United States Patent Application Publication US 2007/0067865 A1 - sequence listing, part 43

SEQ ID NO: 265836 - DNA, 743 bp, Zea mays
atccagatccagatccagcaaccagcatgggccgtggcgtggcgtgcttgcagctgcagtcctgcacgtcttgccgctttgattgccttctccttcccgcaactactcatcctttccatcaaaactgagcaaacccctcatcctattctcgcgcccggcgtctcccttctccaacctccgtttctaatccgcgctgctaatcccactcccagtcccagctcgtccgctgagatggacagtagcagcctcaaatccgcgcagctcctggagctgatgcgccagcacctggccaccgatgccggcaaggaggtcaccaagaaggtcggcctcgtctaccagctcaacatcgcccccaagaagatcggcgttgatgaggagatcttcgtggtcgacctcaagaagggcgaggtcaccaaagggccgtaccagggaaagccggatgccactttctccttcacggacaacgatttccttggaatcgccaccggcaagacgaatccgcagattgcattcattcgaggggcgattaaaatcaaggggagcatcagtgcggcgcagaagttcacccctgacatcttccccaagcctgccaagctgtggaaggttagattggattacttggtcgaggtgagtaatgatgtttgcgagctgcaattactatgtacgagatacaatgagtggaacatgaaaagcacgttctccgtgggaattcggatatggttgaacttccacttaaatcaaag

SEQ ID NO: 265837 - DNA, 1212 bp, Zea mays
tcggagcacaccgcgcagcaacgagaggggcaaacaagcttgctactgtgatttctcgtccgagcagcggcggaggagagagagagagcatggccgaccacaaggaggagcctgtgccggagtctgtgatggacaagatcaccgagaagttccacggcggggactcgtcgtcgtcgtcgtctgactcggacgacgagaagaaggggtcctcgttggcgtcggcggcggaagccatgaaggccaagatctaccgccttttcggccgggagaggcccgtccactccgtcctcggcggcggcaagcctgccgatcttatcctatggaggaacaggaagatctctggcggggtacttgctggtgccacggccatctggctcctattcgaggtcatggagtaccatctcctcaccttggtgtgccactgtctcatcctctcgctggccatcctgttcctgtggtccaacgcctccagtttcatcaacaagtccccaccaaacattcctgaggtgaaaatccctgaggatgtggctgttaatgttgccctgtcactgagatatgagatcaacaggggctttgctaccttaagggagattgggcatggccgtgatctgaagaaattcctaattgttattgcaggtctctggcttctttcagttctcgggagctgctgcaacttcctgacactgttctatattgtctttgtggcactgtacactgtaccagttctgtatgagaaatatgaggacaaggttgatgcttttggtgagaaggctatgactgaactgaagaagtattatgccattttcgatgagaagtgcctatcgaagattccaaagggcccccttaaggataagaagcactagattggtagtaaggtatttgctatgaatcaacatctacattatgtcactagctgtcacctctttctctgaaggatggtgcttggtcctggtctctagttgatagtatataatctgtatgggcaactttggtgtgactgacagtctgctgaaaactgttgatcttgtttttggtttcagctttcaccatagttgcctggaagcttgaaatatattatgcgctctatcaatgtcatgtgaactttgtcatgtacctttaatattgatttggcgcctttcgcaagtgctaggttagtgaatgaagtgtgcacatttctgttcaaggtaatgatagtatttgatctagtttgat

SEQ ID NO: 265838 - DNA, 406 bp, Zea mays
gtacactatacctgttctgtatgagaaatatgaggacaaggttgatgcttttggtgagaaggctatgatcgaactgaagaagtattatgccatcttcgatgagaagtgcctatcgaagattccaaagggcctcaaggataagaagcactagattggtagtaaggtacttgatatgaatcaacacccacgttaagtcacaccttccttgaaggatggtgcttggtcctggtctctagttgatagtatataatctgtatgggcaactctggtgtgactgacactttgatctgctgaaaattgttgatcttgtttttggtttcaactttcagcatacttgcctggaaagcttgaaccttatcaaaaaaaaaaaaaaactatttattaactattatataaaatatttcta

SEQ ID NO: 265839 - DNA, 404 bp, Zea mays
gaacaaccaccaggcacagccaacaagcttgctagtgtgtggtttctctcatcaggtcaggaggagcatggccgaccataaggaggagcagtctgtgatggacaagatctccgagaagttccacggcggggactcctcgtcgtcgtctgactcggacgacgagaagaagaaggggtcttcttcggcgtcggcgacggaggccatgaaagccaagatctaccgtctcttcggccgcgagaggcccgtccactctgtcctcggcggcggcaagcccgccgatcttgtcctatggaggaacaagaagatctcaggcggggtactcgctggtgccacggccatctggctcctgttcgaggttatggagtaccatctcctcaccttggtgtgccactgtctcatcgtct

SEQ ID NO: 265840 - DNA, 365 bp, Zea mays
cggacgcgtgggggtctgttctctcgcttcgcttctactccccccgcatgcttgcttgctccttcctatcttgctgcccgctccacccgagtctgccacacgtctaccggagttcccgctgtcatcagtccccacgtatgaagcccaagcagggtgcaactgcaacacggggtagcttcgcggcgacctgcgaggctgtgactctgccgatcttatcctatggaggaacaggaagatctctggcggggtacttgctggtgccacggccatctggctcctattcgaggtcatggagtaccatctcctcaccttggtgtgccactgtctcatcctctcgctggccatcctcttcctgtggtccaatg

SEQ ID NO: 265841 - DNA, 1164 bp, Zea mays
gtggaaacccctttagtcttgagggaaaaaaaataaagggagaagctctcctgagaagcatatagcaccagcggaacacgggaacggcggaagcaaacaactagaaattccccagcccggttctttgcgtgcggttgatctcgtcggaggcccggccgcggttccccaatccgccatcgaattcgatggcggccaacgccgggaataagatccgcaacgccaagctggttcttcttggagatgtgggcgctggcaaatctagcttggttcttcggtttgttaagggacagtttgttgaattccaggaatcaacaattggagcagccttcttttcccagaccttagcggtcaatgatgagactgttaagtttgaaatctgggatactgccgggcaggagaggtatcatagcttggctcccatgtactataggggtgcagctgctgccattgttgtctatgacatcacaaatccggcctccttcacccgtgccaagaaatgggttcaagaacttcaagctcaaggaaatcagaataccatagtggctcttgctggtaacaaggttgatatgctagatgcgaggcacgtgccagcagaggaagcaaagacgtatgcccaggagaacgggctcttcttcatggagacatctgctaaaactgcaatcaatgtgaatgacatattttatgagattgcaaagaaattgcttcaagggcaacaagctccaagcccacaggctggaatggttctgaatcagagaccaaatgagaggacggtcagcagttcttcatgctgctcttgagctgtgtttcaacctcgtagtgccgttatcaaatgtatcagaggaggtttatggaaaatatcccatgtcgcttgtgtggctgcctttcaggctgacgtgctcccattctgctcctcatttcctttcacatgttcgtcatgtaaatgccaatactaaagtgtcactgcatgggcagaagtgttaccaaagtgttgattgtgctcttatcatttgattaaaaacaaaaaaaaaggcggcgtctaaggatcagtactaccggatgcagatacttttatggactaatcatacggcgcgtaaatcgacggaaactgcgtccaataatgctgcgaatccctttccagtgggtatcaaaggccgaccacgcttc

SEQ ID NO: 265842 - DNA, 522 bp, Zea mays
acatctgctaaaactgcaatcaatgtgaatgacatattttatgagattgcaaagagattgcttcaagggcaagaggctccaagtccacaggctggaattgttctgaatcagagcccagatgagaggatggtcagcacttcctcgtgctgctcatgaagctgtgtttcaacctcatacatagttccgttatgaaatgtatcagaggagattaagcaaaatatcccatgtggtgtcggtgtcgtccaggctgatgttgtccccttctcctgctgctcgtttcttttcacatgtttgtgatgtaaatgcccatactagaatgtcaccaaagtgttgattatgctcttatcatttgattacgcccctctcaaatttgcgtaaatacaaggtgtaattttttaagtctttaactgggttactcctactgacttggtagagcatggtaaattcagctccagtatcattgctacaggaaccaagaaaggaaaggtgccctgttaaaaaaaaaaaaaaaagggcggccgc

SEQ ID NO: 265843 - DNA, 361 bp, Zea mays
cgacttcacgcccgagcggggttcatataccaggtccgccgcctttctccaccaccttcatgctgctcttgagctgtgtttcaacctcgtagtgccgttatcaaatgtatcagaggaggtttatggaaaatatcccatgtcgcttgtgtggctgccttctaggctgacgtgctcccattctgctcctcatttgctttcacatgttcgtcatgttaatgccaatactaaagtgtaactgcatgggcagaagtgttaccaaagtgttgattgtgctcttatcatttgattaagcccctgcttaagttctcaattttgcatatatacatggtggagtttcatttgaactttttaaccgatgaac

SEQ ID NO: 265844 - DNA, 502 bp, Zea mays
tgctctaccggtccggaattcccggggggaccgacgcgtccgcacatcgatgaactaactgcaggaggtgctcatcatctggggagagttcgaccagaggttggcggtggacaaagggcacaaggtgaaagagaagctcggggagaaggcgacggtgaaggtgatccccaacgcggggcacctgccgcagcaggaggacagcaagctcttcaaccgagtcctcctcgacttcctgctgcgcccttcgtccaccgccgcctgacctccaacggcagcgcccaagccaaacagcttagcttgctcggctgccttcttctttggttatccattatcatcctgccgcgcgcgtttccggcgttcttgtttgtttgtagagtggacgaggcgctgccgccttctgtttttgtttgagggtggcaatgtgcagatccctacctgtttggttgtgctgtgaaaaaaaagttgcttgtgggctgtggaaaaagatttatcattaatttat

SEQ ID NO: 265845 - DNA, 1773 bp, Zea mays
cggacgcgttggcggacgcgtgggtctaaacatccgatccgaccatggcggcagacgcacttcggggccttctccccggcgtttacgccgtgctgatggtaatcgccgtcgcaagcgccgcctccagcgacgtgtcctcggtggtcgtcgggctcgccaaatgcgccgactgcaccaggaagaacttgaaggccgaggcggcattcaagggtcttgaggtggcgatcaagtgcaagaacagcaaaggcgagtacgagagcaaggccatgggcaagattgatggctctggcgccttcagcatcccacttagcacggacctccacggcgctgactgcgttgcacagctccacagcgctgcggggaacccgtgccccggtcaagaaccttccagaattgtgccacaatcgtcaaagggcaacttcgtcgtggtccctggaaagacagactacccatcgaaggaatgtgcgtccgcaaccctgtgcgggtcgatcaagaagcacctactagaccatttccacaagaaacctgtgccaccaaagccaaagccagaacctaagccagagccggagccgaagccagagaaccacccacctacaccaacatacggatcctcaactccgatctaccatcctccatccaggcagttgtttgacaagaaacacatgtttgatcacttccacaagcaccacgactaccatcacttctttgaccacttccacaagaaaccagttccaccaaagccaaaaccagaacctaagccagaaccaaaacccaagccccagccagagtaccactctccaactccaacatatgggtcgcccacaccgatctaccaccctccggctaggcatttgtttgataagaagcccttgctagatcacttccataaggaccatgactatcaccacttcttagaccacttccacaagaaacccgtgccacaaaagccaaagccagaacccaagccagaacccaagccacagcctaagcccgagtaccaccctccgacacccacatatgtttctccaactcccatctatcacccgcccgctgagacagaaatgaagtatgacaagaagcacttctttgatcactttcacaaggaccatgactaccaccacttctttgaccacttccacaagaagcccgtgccacccaagccaaaaccggagccagagccaaagccaaagccacaacctaagccagagtacaagccccccatgcccacatacgggtctccaactcctatctaccatcctccagccaagaaagaagtggcatttgacaagaagcacttccttgatcacttccacaaagaccatgactaccaccacttttttgaccacttccacaagaagcctgtgccaccaaagcctaagccggagcccaagccagagcccaaaccacaacctgagcctgagtaccacccccctacaccgacctatggatcaccgactcccatctaccaccctccggccaagcattgatcgatggagttgaatggtggtcagtgatcgacgtcgctagctaagagttgcatgtgtggtctagccagcgtggtttgcagtcctgcttttttgtttctacagaataaattatagctttatttgggtatgtatacttatttgtgtatcggttagtatcatataaatgtatgatttgagtgtgcgttgtttttaatatgcatgttctatgatgtactttattccttttaaaatattattatttataaaaaaaaaaaaaaagggcggctgctcgcgatctagaactagt

SEQ ID NO: 265846 - DNA, 1145 bp, Zea mays
ctcactgcgatggcggccaacccgctctcggccaacctcacagctgccactatcggcgaggggatcgggtggacgctctgggccaaggccgccattgtgccggggctgctgtcgctcgtgctcgtgccgctcattctgtatgtgatctacccgccggaggtgaaggcgagccccgatgcgccacgcctggccaaggagcggctcgccaagatgggacccatgagcaaggaggagacgatcatggccggcacgctgctgcttacggttggtctttggatctttggaggcatgctgaatgtggatgcggtttctgcagcaattcttggcctagcagtcctcttaatctcaggggttgtcacatggaaagagtgtttggcagagtctgtggcgtgggatacccttacatggtttgcagcacttatagcaatggctggctacctcaacaaattcgggctgatctcttggttcagtgagactgttgtgaagtttgttggagggcttggcatgtcatggcaactctcattcggtgtgctggtgctgctgtacttctactcgcactatttctttgccagtggtgccgcacacatcggagcaatgttcaccgcgttcctgtcggtggcgagtgccctgggcaccccgtcgcttttcgctgccatggttctttcattcctctcgaacctcatgggcgggaccacccactacggcatcggctctgctcccgtcttctacggcgccgggtatgtcccattggctcagtggtggggctatgggtttgtcatctccgttgtaaacatcatcatctggctcggggtgggcggcttctggtggaagataatcgggctgtggtgagcagagagcagcacattaactgcgacatcccttttgtttttctgttgtttttttgtcgagtggggggaggaaaactatttcctgaatttgcggtgctacagatgccgctgtccacagttttgtcgtcgacatgatcgcaatgcaacccattcttttttagttggtatcgatacatttgttcgaaaccttccggtggctaattgcgaggccagggtgcagtttttaacgcgcaaaatttgttatataaaaaaaaaaaaaaaaaaaaaaaaaaaaaaaaaaaaaaaaagggcaacaac

SEQ ID NO: 265847 - DNA, 823 bp, Zea mays
agaaggctgccaatggttcagaaccacgcctccggggatgcataggaactctggagtcccgtcagattgtcagcggctttagggactacgccctaactagtgcgctgagggaccgacgctttcccccaatacaatcaaaggaactcccaaccttggagtgcacggtatctatactcactgattatgaaattgcagaggactacctcgactgggaggttggaaagcatggtttaattattgaatttacagctccagactccaacacaaaacacagtgcgacctatttgcctgaagttgcgggccatgaaggttggacacatgtagaaactattgattcactcgtgagcgcgcccggccgccagagaatcatcactgagtccttgaggaagaaaatcaaagtcactcgctaccagagcaccctgtacacgatgcactatggtgaatatgttgcgtacctcaagaagaacagaggtgcagccccgtcaattagtggggctcctcctgtagttaatggcttcaagccaagccattgatttatcagtataaaaaaaagctcaaagaacatattactataatttatctgcgagcaatttggggggtgtagtgtaaccaccccccacagttcattgatctagcatcattcccttccaaggaaaaggccaaataggggcgtcatgacaagcgcccagaataataatgccttcctggatggatcatggatgatgcttatgtatcttgaaaacacatgtgcttcaagaagttcaaattgtgtggtgaagttaaaaaaaaaaaaaaagggcgccgctcgcgatctagaactagt

SEQ ID NO: 265848 - DNA, 2761 bp, Zea mays
cggacgcgtggcggacgcgtgggcaaaccgcacctcatccctgttgacccgacggtggcgctcatctcctccccgacggtggcgctcatcttccccccgacggttctccccatcgacctgctggcttcccttcgtcttccccgacactgatcctcaccactcatgtctgctgaagttgccggaggaaacccttatttcctctcatgctacttctggttcatatactgcataaaattccgagatttcacttgatacaagtggaacactaggagttttgtgcaaatacttcctaccatgtgaatcagttgtagctggtgaatttggcaagactcaagttctctcatctgggttcagaaaacatctgtcggttgattgcttggtctcctgtttcctttgagtcttgccaaccaaagttttctctcagcatcagttgtggtctacgaactctttctgtgacttgaccaacatctcttttggtcctgtcaatcttgcaacactcccttccaaagacttgtctagaggctggattgccctgctctctgctggcgctgcatcctcctttagtcttccaagttttctcttggcagcagttgtgatctacgaactctttctgtgacttgaccaacatctcttttggtcctgtcaatcttgcaacactcccttctaaagacttgtctagaggttggattgccctgctctctgctggcgctgcagcctcctgtagtcttcccttgctgcattctgtgctcactttcgaaagctgctctcttctgctctgctttattgatttgtgcacttggattctcttgcctgtgtactcaagcttctctcttctggggcacaactagtcacccccttgaagcatttcagcttttacctagagatctttctgttgttgaaggcaagagaggctttagggcgatggcgcaaactagcctgcctcctggttttcgtttccacccaactgatgttgagcttgtttcctactatttgaagaggaagattatgggaaagaagcttattgtagacgctatatcagaggttgatctctacaagtttcctccctgggatctccctgaaaagtcctctcttcgaagcaaagatcttgaatggttcttcttttgtcctcgtgacaagaagtaccctaatgggtctaggacaaaccgtgccacaccaaatggttactggaagactagtggaaaggatagaataattatgcttaactctcgcactgttggaatgaagaaaacattgatatttcatgaaggcaagccccctaagggcgacagaactgattgggtgatgtatgaatacaaaatggaagatgaggatttggtttctgctggtttctcaaaggatacttatgtactctgcaaaattttcaagaaaagtggccttggtccaaggattggggagcaatatggggctccgtttgacgaagccgaatgggacaatgcagaagctgaaacctctatatttcctttgatgacctcttcagaagtagtgaacccaacagagggaccacacactcagcctgttgcccctgctggtgctcttcaggaacctctacataattcatctgctacttgtgttgtagagggatcgccatttgatcatgccactgcaaatacttgtgctgagggtgtaacatttggctatactgttgctagctctgctattgaagatatgcctgctcagctgtcaggagatggtgtggtttctatgaacaacatatccagtgaggtcaatgatatgtacagtcctcatgactgtgatgaatttctattggaggagatgtctagattcctgaatgattctccaatgcgtaacactccttatggagagtgctctggtcttcctccaatgtctgaagctgaggctcatgcttttgaagtcaactcttttgacctctacaaagaattatcagggcttgttgagttaggaggcatggacaataacttcaacaccagcaatgtggaaaccacagattaccttgtgctgccacctgacagagaattgtccgctgatggttacatggaacttaatgatctccttgcttctgattcaagcttccccagtgaatttcctgctcaggacaatcaatctatgcagtatcctctggctgagtacaatgtgcattatgatttcgctactgtgtcaggtcctttggaaccaacaatgcctagcattatcgatgattttcctcccaataatggaccccatgtcacagatgaggaagacgactacttggacccgaccatccctttcccgtgattggtcgaataatatgcctgcccttttttgtgtccttacatgtttggactgttccgatgttgcaacttgcagttctttgctactacaactctatccaccttggatgtcgcgatattgttgatgcaatgcctgggctcatgtcagctgagagctgaccttggctgcctggctgtgtgctgaccttcgctggaagcacggtgcttggatgaatctgcatcgactaccacatgcttccaagttccaactggttgagctgaccgcctatctcgtatcgctctgctcagtatctgtaggacttggcatgtaaatctttgattatgtctatgctgagtatcattaagacttggcgtgtaagtctttgattatgatattacctgtctgtttgcaacatgcatgattgcccccattttaagcaatttgtcatctgtgtattcacaatatgcaaacaattgttattgttgtaatgtaatattgaatgtttaatcct

SEQ ID NO: 265849 - DNA, 1661 bp, Zea mays
gtgacttgtcctctcttcgaagtaaagatcttgaatgggtctttttttgtcctcgtgacaagaagtatcctaacgggtctaggacaaatcgtgccacaccaaatggttactggaacgctagtggaaaggatagaataattatgcttaactcccgcaccgttgggatgaagaaaacattgatatttcatgaaggcaaggcccctaagggcgacagaactgattgggtgatgtatgaatacagaatggaagatgaggatttggtttctgctggtttctcaaaggatgcttatgtactctgcaaaattttcaagaaaagtggccttggtccaagaatcggagagcaatatggggctccatttaatgaagacgaatgggataatgcagaagtcgaaacttctctgtttcctttgacttgttcagaagtgaatccaacagagggacaacgtgctcagcctactgtcctggctggtgctcttctggaacccgaaccacctctacataattcatcttctacatgtgctggagaggaatcatcatttggtcatgccactgctgaggacttaacttttagctatactgttgctagctctgctatcgaagatacacctgctcggatgtcaggagacggtgtggtttctgtgaacaacatatccaatgtggccaatgacatgcgtagtcctcgtgactgtgatgaatttctatcggagttgtctagatttatgaatgattctcctctgcataacactcctcttggagagtgctctgggcttcctccgatgtctgaagctgaggctcatgcttttgaagtcaactcttttggcctctacaatgaattatcagagcttgttgagttaggaggcgcggataacaacttaaacaccagcaatgtggaaactacagattacctcatgttgccacctgacagagaactgtcggctaatgattacatggaactaaacgatctccttgctcctgacccaagcttccccagtgaattttctgctcaggacaatcaatatatgcagcattctcttgctcagtacaatggacattatgatctgtcaggtccttcggagccaacaatgcctagcattttcgatgtttttcctcccaataatggagtcctcttaacagatgatccagccaactacttggacccagccatgcagttccctttctcatgattggtcagcttttgtcatggaggtacggatgtttatacctgctctttttgtgcttgaacttgtctggactgcttcggtgttgcaacttgcagctcgctgttgctacaactctatccaccctgaacgtcaaggacgtcattgatgtcatgcctgggctcatgaaatcgtctgttgctcttctgaaccaagccgaccttggctggtatttcttggaagcacggtgcttggaacaatctgcatcgactgctgtatgctcccaactggttgagctaacggccaatctcggctcactctgctgaggagatcatagcctgtaaatctttgattatgctgttacttgtgtgtatcgcaacctgcctgattaccattgtcttgtgttgagttttgacaatatgcaaaccataataatgtcgtaatatggaactcgtttatcatgtttattccatactcccgttatgtgagcttttggatggtccc

SEQ ID NO: 265850 - DNA, 532 bp, Zea mays
cttcggagccaacaatgcctagcattttcgatgtttttcctcccaataatggagtcctcttaacagatgatccagccaactacttggacccagccatgcagttccctttctcatgattggtcagcttttgtcatggagctcgctgttgctacaactctatccaccctgaacgtcaaggacgtcattgatgtcatgcctgggcccatgaaatcttctgttgctcttctgaaccaagccgaccttggctggtattcttggaagcacggtgcttggaacaatctgcatcgactgctgtatgctcccaactggttgagctaacggccaatctcggctcactctgctgaggagatcatagcctgtaaatctttgattatgctattacttgtgtgtgtcgcaacctgcctgattaccattgtcttgtgtttcgagttttgacaatatgcaaaccataataatgtcgtaatatggaactcgtttatcatgtttattccatactcccgttatgtgagcttttggatggtcgatgctttct

SEQ ID NO: 265851 - DNA, 426 bp, Zea mays
agggtggatagagttgtagcaacagcgagctgcaagttgcaacaactctatccaccctgaacgtcaaggacgtcattgatgtcatgcctgggcccatgaaatcttctgttgctcttctgaaccaagccgaccttggctggtattcttggaagcacggtgcttggaacaatctgcatcgactgctgtatgctcccaactggttgagctaacggccaatctcggctcactctgctgaggagatcatagcctgtaaatctttgattatgctattacttgtgtgtgtcgcaacctgcctgattaccattgtcttgtgttgagttttgacaatatgcaaaccataataatgtcgtaatatggaactcgtttatcatgtttattccaaaaaaaaaaaaaaaaaaaaaagggcggctgctcgcgatctagaac

SEQ ID NO: 265852 - DNA, 503 bp, Zea mays
cacacaaccgcacctcgcacccattgaccagacggcggcgctcatctcctcccccacggttctccccatcggcctgctggcttctccccggcttccccgatactgatcctcatcactcatgtctgctgaagttgctggaggacacccttatttcctctcgtgctacttctggttcatatactgcataaaattccgagattttacttgatacaagtggaacactcagagttttgtgcgaatacttcctaccatgtgaatcagttgtagctggtgaatttggcaagactcaatttctctcatctgagttcagaaacgtttgcttggtctcctgcttcccttgagtcttgccaaccatagttttctctcatctctttctgtgacttgaccatcatctcttttggtcctgtcagtctcgcaatactcccttccaaagacttgtctagaggttggattgccctgctctctgctggcactgcagcctgctgaagtctttacttgctgca

SEQ ID NO: 265853 - DNA, 1946 bp, Zea mays
gcctgccccaagctggaggcggtcgatttgtcgcactgcgtcagcgccggggaccgctaggccgctgcgctggcggcggcggccgggctcagggagctgaggctggacaaatgccttgctgtcaccgacatggggctcgccaaggtggctgttggctgccccaggctggagaagctcagcctcaagtggtgccgtgagatctctgatatcggaattgatctgctggccagaaggccccagctccgagctaacatatcctaccttaggtgggaatggatcccttggatcaatttcctcacttgagaggcttgaggaattggcaatggtttgttgttcatgtattgatgatgaaggcctggaattgctgagcaaggggagcgattcgctgcagagtgttgatgtgtcaagatgtgatcatgtgacttccgaggggttagcttcactcatagatggtcgcaattttcttcagaagttatatgctgcagattgtttgcatgagataggacagcgttttctatccaagttggcaagactgaaggaaaccttgacattgctgaaactcgacggtcttgaggtctcggactctcttcttcaagccattggtgaaagctgtaacaaattggttgagattgggcttagcaaatgcagtggtgttacagatggaggaatctcatctcttgtagctcggtgtagtgacctaagaacaattgatctcacatgctgcaatctcattaccaacaatgcgcttgattcaatagctggcaactgtaagatgcttgaatgtttgcggttggaatcctgctctctgataaatgagaagggactaaagcgaattgcaacttgttgccccaaccttaaggagatagacctcactgactgcggagtggatgacgcagcattgcagcacttggctaaatgctctgaattgcgagtattgaaattaggcctatgctcaagtatttctgacagaggcattgcgtttatcagttctaattgtggaaagctcgtggagcttgatctctaccggtgcaactctattactgatgatgggttggcagctttagcaaatggatgcaagaggattaagttactgaacttgtgttactgcaacaagatcactgatactggtttgggtcacttaggctccctggaggagctcacaaaccttgaactgaggtgcttggtccgcgtaacaggcattgggatctcctcagttgcaatcggatgcaagaacctgatagagctggacttgaaacgatgctattcggttgatgacgctggactgtgggcccttgctcgttatgctttgaaccttagacagcttacgatttcgtactgccaagtcacggggttgggcctgtgccacctgctgagctccctgcggtgcctccaggacattaagatggtgcacctctcatgggtctccatagaagggtttgagatggctctgcgagcagcctgcgggaggctgaagaagctgaagatgctctgcgggctgaagaccgtgctgtcccctgagctcctccagatgctgcaggcttgtggctgccgaataagatgggtcaacaagcctcttgtctacaaggactagacagactcgtgttcctcattgtgtgtgcagtgtcagcatcagcatgtattgtcaagatcttgcaggtttgccctggctcacgttgtgagtccgcaataatcgttgggggcgtaagctcccgtcccccagatgtggttatggtgcctttggggcacttcttgcgccatttgtcactctctgctccggtgtatctgtgtatgcaaacggaggcaccggtaatgttcatgtgtatatagcgtgcagtagaatgatcccattttatgggattagttagtgtgtaattgttacctcatttcgcatgattcgaatcttgagatgaaagaatcataaggggtatgatcgatgcattgcattc

SEQ ID NO: 265854 - DNA, 1687 bp, Zea mays
  unsure (1)..(1687): unsure at all n locations
atagtcaaggtggcatccnggtgtgtgaatcaagggctcagctctttttttccccactcagccaagaagtaccacccactcctggccagccggttaaggagcctatgttcatacctgttgctgttggacttgttgactctactggaaaagatatgcccctcacttccgtttacagtgatggaagtctccaaacagtctctactgatggccagccagtcttcactactgtgcttcagtttaaaaagaaagaagaagagtttatgtttaaaaacattcctgagaggccagttccttctttgttaaggggatatagtgctcctgtccgtctagattctgatctgagtgagggtgacctatttttcttgcttgccagtgactcggatgaatttaacagatgggaagctggccaagttttggcacgtaagttgatgctcagtctcgtagctgatttccagcaacagaaaacactggttctaaatccgaaatttgttgatgggattagatcaattctgcgcaacacaagcttggataaggaattcattgcgaaagcaataactttgcctggtcaaggggagattatggatatgatggaagttgcagatcctgatgcagttcatgctgtccgtaactttattaagaaggagcttgccgtgcaacttaaagatgatcttcttgcggctgtgaaaagcaacaggagttctgaggcttacacatttaaccatgatagtatggctcgccgtgcattaaaaaatacatgccttgcataccttgcgtcattgaatgagccagatttcgttgagcttgcactgcatgagtacaagtctgcgactaacatgacagagcagtttgctgcattagcagcattatcccaaaatccaggccaagttcgtgatgatgccctcttggatttctataacaagtggcagcatgaatacttggttgtaagcaagtggtttgctcttcaagctacttcagagattcctggaaatgttgcaaatgttcagaagctgctgtctcaccctgctttcgacctgaggaatcccaacaaggtgtactcactaatcgggggattctgtggctcacctgtgaacttccacgcgaaagatggttctgggtacaagttcttgggtgagatcgttttgcagcttgacaagataaaccctcaggtggcctcccgcatggtttcagcattttctcggtggaggcggtacgacaagaccagacaagctcttgctaaggcccagctggagatgatcgtgtcggccaatgggctctccgaaaacgtgttcgagattgcttcaaaaagcttggcggattagcttgggcggttccgaggaattgcgagtgggagtgcttaactgaatctctcttttgttggtaaaatgacaagtagagataataaacaggcgggccgaatttgcatgaactgataaaatataagtgtgatgatgcccgctttgtggggtgctttggagcatgcatgcgcgctcgtctgttggaatggaactgctgttttttttttttttacgttctccgctcagcggaccgctgtggggcagaaaacatctgaagcccgacggctgctctctgtctctgtttctctctcgaactcgcggtttggttatcagtcggtcctgtggaacccttggcttcgacaaagctggaaaagtttggacctttccagtcc

SEQ ID NO: 265855 - DNA, 1201 bp, Zea mays
cccatgtttccgcccacgcgtccggaagattacctactttcaggaccgcccagatgttatggcaaaatatacttgccgcattgaagctgataaaactttgtatccggttttattgtccaatgggaatcttattgagcagggagaccttgagggtggaaagcattacgcactgtgggaggatcccttcaagaaaccaagctacctgtttgctctagttgctggtcagctgggatgccgggaggattcatttgttacatgctctggccgcaacgtaacactaagaatttggactcctgcccaagatttaccaaaaacagcacatgctatgtattctcttaaagcagcaatgaaatgggatgaggaggtctttggtctggagtatgatcttgacttattcaacattgttgttgttcctgatttcaatatgggagctgcgccacgcgtgcgcttgaatatttttcaatctagacttgtgttggcatcaccggagactgccactgatggtgattatgctgctattttgggtgttgttggacatgagtatttccacaactggactgggaatagagtaacttgccgtgattggttccagctaaccctgaaagaaggactgaccgttttcagggatcaggagttctcttcagatcttggctgtcgtacggtaaaacgtattgctgatgtctccaaacttagaatctatcaattcccacaggacgccgggcctatggcacatcctatccgtccccattcttatatcaagatggacaacttctatactgttacggtttacgagaagggtgctgaagttgtcagaatgtacaagaccatgtttggagcatcagggttccgaaagggcatggatctttattttaaaaggcatgatgggcaagctgtcacttgtgaagacttctatgcagccatgtgtgatgcaaataatgcacaactgccaaactttttacaatggtactctcaagcaggtacgcctatagtcaaggtggcatcttcatatgatcctagttctcagacattctctttgaaacttagccaagaagtaccacccactcctggccagccggttaaggagcctatgttcatacctgttgctgttggacttgttgactctactggaaaagatatgcccctcacttccgtttacagtgatggaagtctccaaacagtctctactgatggccagccagtc

SEQ ID NO: 265856 - DNA, 789 bp, Zea mays
gccttagcagcattatcccaaaatccaggccaataacgtgatgatgccctcttgtatctctataacaagtggcagcatgaatacttggttgtaagcaagtggtttgctcttcaagctacttcagagattcctggaaatgttgcaaatgttcagaagctgctgtctcaccctgctttcgacctgaggaatcccaacaaggtgtactcactaatcgggggattctgtggctcacctgtgaacttccacgcgaaagatggttctgggtacaagttcttgggtgagatcgttgtcccgctcgtccggataaaccctcaggtggcctcccgcatggtttcagcattttctcggtggaggcggttcgacgggaccagacaagctcttgctaaggtgacgtgttcgtctgcagtctttgtagagtccaattgatcgatcattttttttttcagaaaagaaagaagaagatagtgcaatagtagtaacactaaccccttgcttcatttatggcataggcccagctggagatgatcgtgtcggccaatgggctctccgaaaacgtgttcgagattgcttcaaaaagcttggcggattagcttgggcggttccgaggaattgcgagtgggagtgcttaactgaatctctcttttgttggtaaaatgccaagtagagataataaacaggcgggccgaatttgcatgaactgataaaatataagtgtgatgatgcccgctttgtggggtgtttggagcatgcatgcgcgctcgtctgttggaatggaactgctgttttttt

SEQ ID NO: 265857 - DNA, 592 bp, Zea mays
ccggtccggaattcccgggtcggcccaagccttcggcgaccccttggccggccccttgggttcctggtctcccatcttcatcttcctcgcagggccgggactccatcttccggttcctcccttactcgcgctcggcacgcatgcgacgggagcggcgctcatgctcgggctctcagcggcgacttcagcggcttcccctcccgcatcgcgccctcgcctccggtcctccgcacatcggccggtgatcctgctttaagatgtcagaagcactcgagaaagataaagaaattgatgaagaggaagaggagtatgtattgctagagttggacaattgtctttattcagacatgtcgccaggtgctccgttcgtactctccggtttggatacattgacgcctaccttgataataggtgacagtcttaagatgatcggagaatatgaagaaactattggcacctgctatctattctctgaaactgaagctgaaccgaaacctacaagtaatgagatggcaccttctgaagaaaacacagacaaacaagttagcagcagtaaggaagcgccgtcgaaggaggtgaaccatctcgccag

SEQ ID NO: 265858 - DNA, 881 bp, Zea mays
ccggtccggaattcccgggtcggcccaagccgtccgttctggtcctcttcgcctctacgggtttgcagctgacgctctccatcctcgttctgcgcgctccgttcctctttccctcctcccctccgtcttggttcttcacacctggttcttctgtctcccgttgtctctatcgtctgctccggtgaacccgcatcgttcctattccttgtgctgcttccgtcgtcggctccagtaaatcactctgttcgccagctcgagatcgtggacggcttgctaaaatcagttaccataaacatgagagcattctcagtgacaaatagagcatttcctattctctctatattaacaaaccatggaagacaatcctcagtaccatcttccctacttacctaccccgaacatcatcttatcacaagatgacgtacttggccttacaaccacgcaccagcgacatcattttccaaattatccacttctagcagccaaacaaacatggcccgacgattgctagcatatcccggtgtgccacagaatacagaggcggatgaacactacacagatcaacttaacaagaaggagctatcctcaccatcgaaaatgatgaagcacacccaagttgacaaagtcctagattctataattccagaaaaatgaagcttgttacatcctcatgacatgcatgaaggaatttgcttttgcgtatctgtggagggcttcgtcacttttgaatgaaaaaacatctatgtacatataaatcacttggtgaagcctttctcaggcatgtgtgttgatgcaacctctgggaaacaaatgctatcagctgctgacatatgctacttcaatactgcttgatatgtattgccctttcagttccgtctaac

SEQ ID NO: 265859 - DNA, 409 bp, Zea mays
gacaccacgccgtgaccccgacgtccccctcgagctccggcggccgcacgcccaagagcccagacacgacggtcctctcgccgccggacaagaagtccacctcctccggcgccaccgggctcagcgccgcggcgtgggccggcttgggccttgccgggctcgtggccgtgcacctcggcgcgttctaggccagcccgctggcctggccagggaggagacagtgccgtgtgctgttgttaggctgcacgtcatggattggattggtgtattggttgagggacttgactgcttaccagagagagatctcttttggttcagggaactgtgctgtagacctgtagttggataccttggatgttatgctatcagttttgctgttgttatcacatctctttcgtgattttctttt

SEQ ID NO: 265860 - DNA, 1238 bp, Zea mays
catggacgccttccgttttgggaaggcgaggagaggggaaccccggcccagggagagttgtggggaggggatcggcggcggaggagatggaggagcgggagaagctcgtgtgcctggccaagcttgccgagcaggcggagcggtacgacgatatggtggaattcatgaagaatcttgctaggatggacgtggatatgagtgctgaagaaaggcatttgttctcagttggtttcaagaacactattggagcaaagagggcatcatggagaatcatttgttcacatgagcaaaaggtcgcagctgatcgtcagactggtgtgatgatagatgcctataagaagaaagtagaagaggaactaaggaaggtttgcaatgaagtattgtcagtcattgctattcattgccttcccttggccagtacgggtgaaaatatcgtattcttttataagatgaaaggtgactactaccgttacttggctgaatttagcactggaactgaaaagaaagctgcctctgatcagtcacttatggcctatcagcatgccatggttgtcgcctccagtgagctctcacctgctcaccaaatccggcttggccttgccctcaatttgtcggtcttcttttatgagataatgaactctcatgagagagcttgccaagtggcaaaacaagcatttgatgaggctcttactgagataaattctggtgagggagtttacaaggatagcacacttatgatgcagcttctgaaggacaacttagcattgtggacatcagaactaactggaggtgaagcatccaagggtaacgacgatgtcgacatggagggttgatacattctccatgttttaaggaaacacagaaagcacgcaaaaatatccaggctgtgatgctagcgaacctgggtcctcaagttttttctgcatcggaactcagaggagccttgtgtatttttctgaagtttctgtccgtctcgggttttttttttgaggtctgtttgttcctctcttttggccatcgtttggtcctggagtcagtcactcactaccaagtgtttcagaggtctgaactggtgagcatctagatctgttgttgctttttttttcttcttctgtgcttcagaggcatctttgtacaccgatggaaaactgtttctcttatcaacgcatagactgtcagtgctgttactaatcatgttcggtgactgaagcgtctctgtaatgttgagatcgagcatc

SEQ ID NO: 265861 - DNA, 599 bp, Zea mays
tcattaaagagatggccaagaacaggccaattgatgccaaaggcaggagagcatttaaagtccttgtgttaaatgaagttgacaagctctcaagagaagcccagcattccctccgcaggactatggagaagtatagctcatcgtgcagactgatcctatgctgtaacagctcctcaaaagtgacagaggctgtaagatcccgttgcttaaatgtgcgcgtacacgcacccagcgaagatcagattgtccaagttctagagttcattgggaagaaagaaaatctgcatgttccagctggatttgctgctcgtatcgccgcacaatcaaaccgtaatcttaggcgggcaattctgttctttgagacttgcaaagtgcaacaatatccatttacatcaaatcaagtggcgcctcctcttgactgggagcaatatgtgtctgaaatagcaactgatatacttacagaacaaagccctaaaaggctatttgctgtacgccagaaattctatgaattactcgtcaattgtatcccacccgaaagtattttgaagaagttgttggcagaattactgaggaagttagatgcggatctgaaacatgag

SEQ ID NO: 265862 - DNA, 641 bp, Zea mays
cccacgcgtccgaccttggcttggcagatgcctacattaacggttatttctcatttgtagacaagagagaaggtcttctaaatcttttcctgattctcattgcgaacagggacgcaaacaagagtagtagcagcgctgctggtaaaaggggttggtggacacccctgctattgacagctggggttgcctccgctaaatacttcctgcgtcacatagcaaggaggaattctgtctcacaaacacgtcaaaacatctctcaacactatgatctgagtaatgaattcttctctcttttcctggatccatcgatgacttactcttgtgccatcttcaagacggaagatcaaagcttagaggcagcccagctacagaaagtttgcctcctaatcgataaggctaaagtggagcgagatcaccatgttcttgagattggctgtggttggggcagcttagcaatccaattggtgaagcacactggttgcaaatacactgggatcacattatcagtggagcaattgaaatatgcacagagaaaggtgaaagaagctggattagaggaccacataagcttcatgttgtgtgattaccgtcaaataccaactcagcgcaaatacgacaggatcatctcttgcgagatgatc

SEQ ID NO: 265863 - DNA, 717 bp, Zea mays
accggtccggaattcccggggggaaaatgatttcttaaaaaagaggagtgacccggtctaccggagcgtacggtgccgatcccgtcgccgccgctacccctcaatcgcgagcaacttcttccggattcgcaccaagctctccacaattctatcgctatgctgcggaaggccgtcgtcgccttcatcgcctgcaccgccttcttcctcgccttctctgcctactcccgtcgccagggcgttgcagaggttcaattaccagcagttactcacagggtctacctagatgtagaaattgatggccaacacataggtagaattgttattggtctctatggggaggtcgttccaaaaacagttgaaaactttagggctctttgtacaggtgaaaaaggtgtcgggtccaatggcaaacctcttcactataagggaacaccattccatcggattatccctggcttcatgattcagggcggtgacatagttagaggcgaccggaaagggagtgagtctatatatggaggcatcttcccagatgagaatttcactgtaaaacatacacatccaggggttgttgctatggcgaattctggacttgattctaatggatctcagttttacataactaatatcaagaccagctggtttgaatgggagcatgttgtctcggcaggtgatccagggatggatacgtgtacgcatagaaggggcgctgggact

SEQ ID NO: 265864 - DNA, 620 bp, Zea mays
acgagatgtgcaagaacgtcaggtacgctaacgtctatgaccccgacgacgactggccggagcccgccgaatacacgcacatgctcggcgtcctaaagaataggtactatgatctgatcatctccacgaggctggcggggatcgggcacgctctcttccttttcatgtcgtcggcgcgcgacaaggtcggctacgtttaccccaacgtcaacagcgtcggcgcgggcctcttcctcaacgagatgttcaaggcgccgactaacaacctcgccgacggcgggtaccacatgtataaagacatgctggagtggatcggccggccggcgaagaacgttccccagcagccgacacagccgctgcgggtgtccatctccaagaagctacgggcgtacgtggaggacaagtacagccgcgccggcgtggagaagggcaagtacgtcgtcgtccacggcatcgcctccgactccgtcgccagcatgccgtccagaggcgacgacgactgccttcttcccctcgggcactgggctcagatagccaaggaaatcagctccggcgacagggggctcaagcctctgttcgtgatccctcatgagaagcacagagatgaaatccaggaagaa

SEQ ID NO: 265865 - DNA, 1311 bp, Zea mays
tccacgcgtccgctaagaggttggttatccattatcattcactgcatcacaactgaatcgcaaatgggttttcatgcaataaacaaacttatagcgcaagtcgttcttgaatgttgaaaattaaccaggccaacggctttgagtcggaccctgtcaacacagggtgggtcgatgttagagacatggcacaatctcgatcgtgacgtatgagaacccatctacacagggttgtgcttggcgtccatggaatgtttgtttgacttcaccgatagaattgctgatatgtaccatgatttcccagttcacagaatcaactatcaaggaggacaaacagtgttggttgatgagagcaaaggagccctccaagaagttgatcgatctgggcgtttgtttccttccgtttgatgtgaccatcagggagaccgtcgattgcttcagaagcaaagggctcatctagccatgtgaacatttccagatgtaccagggttactattgcttactagaatgaggcgagagctgcttagctcctttgacattccttctacttagtggcaattggtctggttacttgaacctatgctccatatgatccacgctgattgaattttggtttgttaatatgttttgggcaagcagtgctatgagatggagatgatggttaggcatgatctttctataggttaaaagaacagattatccaacagctgatggaacctgcattagagatattatgttgatgtcacagatttagttgatgctcatgtgaaagcgctcaacaaggcagacactagaaaagtcagtatttacaacgttggaacaggaagaggtttggaaccccggacatagttaatctgggacaacatatctctgtactggccatagaggacagcaaaaaatcagaagttgaagaatcacaaccaacgctgcctcctccccactctccagctcaagaacctgggccggagccagttcaacaagtcccacctgcagctgaaccaacagatttactgggaatcaatgaaccaacccctgccacatctgaaatagatcaaaagaatgcgggggccttggccatggttccacaggataatgcgccaaaagcacctgcttctactaccagttctggaagtgtggagactagctgggagctggccttggtcactgcacccagttcaaatgggactgctgtcactccaagcaaattggccggtgggctggacctgcttacactcgacagcttgtacaacgaggcgcaccgaagagcgcagcagaacgcaagctacaacccttgggagaccatcgagcgtcagg

SEQ ID NO: 265866 - DNA, 720 bp, Zea mays
  unsure (1)..(720): unsure at all n locations
accagcctgaataatctgttgcaacacctaagaggttgaaaattaaccaggccaacggcttgagtcggaccctgtcaacacagggtggtcgatgttagagacatggcacaatctcgatcgtgacgtatgagaacccatctacacagggttgtgcttggcgtccatggaatgtttgtttgacttcaccgatagaattgctgatatgtaccatgatttcccagttcataggtcctactttctctgaggacatgcatcaggtttgtgtaagcagggctagctgttcattttggtaatgacatttttacttttttcacatcagaatcaactatcaaagaggacaaacagngttggttgatgagagcaaaggagccctcaagaagttgatcgactgggcgtttgtttcttccgtttgatgtgaccatcagggagaccgtcgattgcttcagaagcaaagggctcatctagccgcgtgggcatttccagatgtacgttttattctatagaactgctacagtaatactatggctcatattaaaccgcctaaacgcaccgggaaaaactaaactatatgataatgatataggtaccagggttactattgcttactagaatgaggcgagagctgcttagctcctttgacattccttctacttagtggcaattggtttggttacttaaacctatgctccatatgatccacgctgattgaattttggtttg

SEQ ID NO: 265867 - DNA, 651 bp, Zea mays
attgcaacttccctcatttttcagcgattttgacccttgagctgctgcagctaacctcccttcaggtgtacaagcataccttgctggtcttacatttgcattggcagcatcaccttgcagcacacctgttcttgctacccttctgggatatgtcgccacttcaagagacccaattattggaggaagtttattgttgacatacccgacgcgcccggttgcgcctcttcttattgcagcttcatttgctggagcactgcagagtttgttgtcagtcagaagatattcggcatggataaacccaatcagtggtgcattgttacttggcggaggtgtttatacccctactggacagggtgtttccagcaacatcaatggtcatgtagaccatggatggacaagaattgctaggcaccagtctgtttggcgtgcgaatgatatttggatgtgaagtagtgaaatgatggcaacaaagtttagccagatctctcagcgttgtatatgcacgcacgacattttgatcgggacaagcaaagcaccttgacctaagtacagtagtctgcatcactgcatatgtatgggcctcgatacttggaggcagtgtaccctactaaaatgtatttctgggacagattgaacgagtatgaaatttat

SEQ ID NO: 265868 - DNA, 1707 bp, Zea mays
cccacgcgtccgggacctggctcacagcactgattgtccacccaccactctacgcaagcaatccttcggacttcggtgggggaaatggaggccgccgccgccgccgagacggggctcgcccagaaaccggttgtgctgtacccttcgccggggatgggccacctggtctccatgatcgagcttggcaagatcctcggcgcgcggggactgtccgtaataattgtcgtcgtcgagcctcccttcaacacgggcgctacggcgcctttcctcgccggcgtctccgcggccaacccgtccatctccttccaccgcctgcccaaagtcgagcgcctcccgcccgtcaagaccaagcaccaggaggcgctcaccttcgaggtcacccgcgtctccaacccgcacctccgcgagttcctggccgccgcgtccccagccgtgctcgtcgtcgacttcttctgcagcatcgccctggacgtggcggaggagctccgcgtgcccgcctacttcttcttcacctcgggcgccgaggtcctggccttcttcctgcacctcccggcgatccacgagcggaccgccgcgagcttccaggacatggggttggagctcgtgcacgtgccgggcatcccgtcgttcccggcgacgcactgcatcctgcccaccatggagcgcgacgacgtggcctacgacggcttcctaaagggctgtaccgacctctgccgctcccagggcatcatggtcaacacgttccgctcgctggagcagcgcgccgtcgagaccgtggccgcgggccactgcacgccccccggcctcccgaccccgcccatctactgcatcgggccactcatcaagtccgaggaggtgctgggcaagggcggcgaggagtgcctggcttggctggacgcgcacccagggccagcgtggtgttcctctgcttcggcagcatcggccggttcagcgtggagcagatcagggaggtggcggccggcctggaagccagcgggcagcggttcttgtgggtggtccgagccccgcccagcgacgacccggccaagaagttcgagaggccgccggagccggaccttgacgcgctcctcccggaggggttcctggcccggaccaaggataggggtctcgtggtcaggtcgtgggcgccgcagcgggacgtgctggcgcacgcgtccgtgggcggcttcgtgacgcactgcggctggaactcggtcctggaggcggtgatggcgggcgtgccgatggtggcgtggccgctctacgcggagcagcggctcaaccgggtgttcctggagaaggagatgcagctggccgtggccgtggaagggtacgacagcgacgagggcatcgtggcggccgaggaggttgctgccaaggtgcgatggctcttggagtccgatggcgggaggatgctccggaagcgcacgctggcggccatgcggcaggccaaggacgcgctgcgtgagggcggtgagtcggaggccacactgaccggattggtggacgagtggaaacgcatttgacgcggtacgtggggattgggaacgggtgacgttacgcgacggatgaagtgccggtcatcatttcttttaaaaaaatatatattagtaatatattcatgtatttttcaataaaagatacaatttattgcattatcctcgtgcgtgcggcgtgccaacaataataagatatctactctttatt

SEQ ID NO: 265869 - DNA, 1500 bp, Zea mays
gtttaatacacatgcttctcaagctgaggtattctctgatatccaacctctgatcagatcagttcttgatgggtttaatgtgtgcatttttgcctatggtcaaactggatccggaaagacttacacaatgagtgggccaggcacatcaaaagaagattggggtgctaactatcgagctttagatgacttgttcgacatctctctaagtagaaggaatgctttctcatatgaggtgggagtgcagatggttgagatttataacgagcaagtgcgggatcttctctcaaatgatattgcacaaaaaagacttggaatttggagtacatctcagcctaacggacttgttgtccctgatgcaagtttacatccagtcaaatcaacattggatgtgctagagttgatggaaattgggcaaacaaatagagcagttggatcgacagctctgaatgaaaggagcagtcgatctcacagcattctgactgtgcatgttagaggggtggatttgaagaatggatctacttccagaggatgtctacatctgattgatcttgctgggagtgaaagagttgagcgatctgaagcaattggagatagattaaaagaagcacagtatattaacaaatccctctctgctctgggtgatgtgatttttgctttggcacagaaaaatgctcatgttccttatcgaaacagcaagctgactcaagttctacagagctctttaggcgggcaagcaaagacactgatgtttgttcaaattaatccggatactggatcatattcagaaacaataagcactttgaagtttgctgaaagggtttctggagttgagttaggtgctgcaagaaggaacaaagagggtaaagatataaaagagctgctagaacaggtttcatatctgaaagacacaatatcacggaaagatatggaaatcgatcaactcctgaaggacaaagccaagtcaccaagttcatcaacagatataaatgacagtagccaacagatccgacgactatcaggggctgctggatcaggcgaggccgaatgcgaagataacatgtctgatgatggctgctcagtggcaggaaccgagtgttctgtaggtggtgcttcagaggcgacagcagaacgaatgcagaaggccccatcaaggataggcaggctgtttctcacaaagaatgggcagcctgcaaattcgaagccaaaaccaagggagtctgccctgaaaccgtcaggtcgcacgacatctacaggaagccaggcgacaggaggaggatcttcagtgaaacccccgaagaggcggtagagaaataaagagcatctggggtttgtcatgttgatggctgatgcaatgcgtgggcgtttgtaaaccgactcggagattgcgctgctgaaacactacggtcaacgggttggtgcgatgcaagggtatgtcactgtaacggtttcacttgtaaacggtctgttgagtatgatggtccccagccggcttttggtggg

SEQ ID NO: 265870 - DNA, 897 bp, Zea mays
cggacgcgtgggcgagccgtccagttcagttcacctcggtccgggaccgcgactacaccgacggcggcgcgtccgagcccagccgacgccgagccaatggtgactccagcgacattctccctccgccccagcgcgccccccgcgccgcctcgtgccgggctgccccgcgctcgggcctgtttcgcgcccgccatccgcacctccccttccgtcgccttttcctaccagcctcggcgcttcagtggcatccgccgcgccgtggccgtcgactccgagcagggctcccccgagtctccagagcaggagaagaagcccaagacgtactacttcctggtggcaaacgccaagttcatgctggacgaggaggagcacttccaggagcaactcgccgagaagctgcgcaactacgccgagcgcgacaaggagcaggacttctggctcgtcgtggagcccaagttcctcgacaggttccccaacatcaccaagcgcctcaagcgccccgccgtcgcgcttgtctccaccgacggcaactggatcacattcatgaagttaaggctagacagggtcttacaagaccagttcgacgcagaatcagttgaagaggcattggcttctaaccctgttgagttgaaatttgagaagcctgagaaatggacagctccgtaccctaaatatgggtttggatggtgggaacccttcttgcctccaaagttcagcaatggtacggcatagagataagcagcaatccctatgaggcatgtaagattactcccctgtaagtggtgaatgtaattttaattttgatgatgaggatgtagtacttgaggttgtaccagtacagttagttgaattagttgcacagtttttgtaataccaaataatcagctgttttaattt

SEQ ID NO: 265871 - DNA, 794 bp, Zea mays
ggagacgtacacagtactcattccacttcttctctagattcaatagaatcaacagagatccttgccagttatttccacatcacattggtgttcgagttgacagggaaagatgtgcaaatccaaaccaaagcgcacagacaattgcacttcagagggatattattaaaccttgtgcattgtcttctccatacaccaatataactgcaaagagtatttcagcaccagaccaaataaatgcagaccttgtactaaaccttcaagtgaggcagtcgaggagtaatgaaccccttcaaagtggggttgtgccattccaacatatcaactcatgtctatgatacttcttcagagattgcatggaaatgttatgttttagcaaacaaagtgaaggctatcaggaggcttagggaactcttgacaaccaaacttcatatctatcacatttccagtcaagggccggggctgctgaaatagctgctaaaaggtgactaccttttcttcttcttccccgggaacatcttgtgaggacgagatgtggttctgtgactgttgccgtgtacggagacgaggacaagccagcgcttataacgtacccggatgtagctctgaactacatgtcctgtttccaaggattcttcttctgcccggaagtggcgtctttgctgctacacaacttctgcgtctaccacaccaatccccatgggcacgaggagtcctacagatgggagcagctacaatgtcgtcagatgtgccggtgccatctgttgctgatctcgctgatcaagttgcaaatgtgc

SEQ ID NO: 265872 - DNA, 765 bp, Zea mays
  unsure (1)..(765): unsure at all n locations
accggnccggaatncccgggtcgacgcacgcgtccggaaccagaaggatcaggctcatggtattcatgggtaaagggtggccgaggtacgcagtccggtgacagtggtgatgggcggaactggaaagacgaggttgatccgttccacataccgtcggactacacctgggtcgatgccaccgagaagaagcggaggatgaaggcaaagaaagccaagagcaggcggaccacagcccgaaaacagtcctcgaagaacacttcttcggaaggaggccaccgccccatgatggatggcttcgaggagtaaaccgcgttctcacaagcatagtaagttgtatttgcattcttaaaatgttagttgttgatggcagctgcacgccagaggcagattgattgatgttgtgcctggagcaccccctcccttggcgtggcaatgaatcggagtcgaatctccttgagaacgtacaggatggcttatacccacccccctaatctgtaattcagccagcgctatttttttttgcccccctccgtgtttcatcttgctggatgtatcatgtatgtttgacagatgatgacgatgatacgaccctgttgttgaaaaaaaaatgtgtttgaggggactgtagtgttccctccccctgttgtaatggaagatttaccaatatgcagcgattttctcgcaaagaggaagctccaatgcacatgcccccttgttcgcaaaaaaaacaccaaaaaaaaaaaaaaaaaaaaaaaaaaaaataaa

SEQ ID NO: 265873 - DNA, 1461 bp, Zea mays
ctcgtcacagtgaagtctcggcgcgtacctggggcgatgacggacgaggagctgtttgccatggatggggaggagaagaacgggaggggcgcggacttgatgctgagttagacgaagtgttgacagccgaggagaggaagcagcttgattctgcgcttaggatggggaacaacgaagaggaatctgagcagaggggcgacgaaggtgacgctggtgctggtcatacggatgcgagtggcgtgaccaaagataagaagggatggtttggttggggcgccaagaaaggtgccaagggcgatgacaagccatcaaaggtggggagtaaggatgaaacaagtgacccagggaagcaaaaggagaagggcagtgggaagaagaaaaagggtggctcatctgctgagtctgtaaaacatgagagcgagtacaagaaggggttaagaccagtgttgtggttgacaccggatttccctctgaagacagatgaactcatccctctgcttgatgtcctagcaaacaaagtgaaggctatcaggaggcttagggaactcttgacaaccaaacttcctacaggcacatttccagtcaagatcgccatccctattgttccaacgatacgagtcatcatcacattcacaaagttcgaagaactacagcctctagatgagtttgccaccccaccttccagcccgacacagtttcaagatgcgaaaaccaaagaaccagaaggatcaggctcatggtattcatgggtaaagggtggccgacgcacgcagtccggcgacagcggtgatagccggagctggaaagatgaggtggatccgttccacataccgtcggattacacctgggttgatgccaccgagaagaagcggaggatgaaggctgggaaagccaagagcaggcggggcccagcccgaaaacagtcctcaaagaacactgcggaaggagcccaccgcccaatgatggatggcttcgaggagtaaaccacgctctcaccggcgttgtaagttgcctctgcattcattcttaagatgttagttgttgatggcagcttcacgcccgaggcagattgaaagttgtgccttggagcaccccccgtggtgttggtgtggcaatggatcggagtcgaatctcattgagaacgtacagatggcttataccccactaatctgtaattcagtcagcgctatttttgtccccacctccgattttcatcttgctggatgtatgcttgacagatgatgatacggccctgttgttgttgttgttgttgaaaaagatgtgttgaggggactgtagtgttcctctcccccctgttgtatggaagattaccaatatgcagcgattttctcgcaaagaggaagctcaatgcacatgcttgtttgttcaaaaaaaaaagcaggaatgaaaaaaagataaaaaaaaaaaaaaaaaaaaaaaaaaaaaaaaaaaaaaactcaa

SEQ ID NO: 265874 - DNA, 1358 bp, Zea mays
gccaaacccatttccctcgctcccatcccgtcccgccccttgtctcttccgcttccccccgaccccgcgcgccgcggaccagcagccatgtcgtgctcccacctctccaccgcctggtcctcctcggcgctcgccagcagcgcctccaccacccgacggcgctcccccccgcgctcgggtctcctggtgcggtgttccctccgtgagctccgcacccgcatcgactccgtcaggaacacgcagaagatcacggaggccatgaagctggtggccgccgccaaggtccggcgcgcgcaggaggccgtcgtctcctctcgccctttctcggaggcgctggtggaggtgctctacaacatgaaccaggagatccagacggaggacatcgacctgcccctcacccgcacccgccccgtcaagaaggtggccctcgtggtcctgaccggcgagcgcggcctctgcgggagcttcaacaacaacgtgctcaagaaggcggaaacccgcatcgatgagctcaagcagctgggcctccagtacaccgtcgtcagcgtggggaagaagggcaacgcctacttccagcgccgcccctacatcccgttggagcgcgatctagaggtgagcagcgtgcccaccgtcaaggactcgcaggccatctgcgacctcgtctactcgctcttcgtctccgaggaggtggacaaggtggagctgctctactccaagttcgtgtcgctggtgcgctccgaccccatcatccagacgctgctccccatgtcgcccaagggcgagatctgcgacgtcaacggcgtctgcgtggacgccaccgaggacgagctcttccgcctcaccaccaaggaggggaagctcaccgtggagcgcgagaaggtgaagatcgagacgcagcccttctcccccgtggtgcagttcgagcaggaccccgtgcagatcctggacgcgctgctcccgctctacctcaacagccagatcctccgtgccctgcaggagtcgctcgccagcgagctcgccgcccggatgagcgccatgagcagcgccaccgacaacgccatcgagctccgcaagaacctctccatcgcctacaaccgacagcgccaggccaagatcaccggggagatcctcgagatcgtcgccggtgccgacgccctcgctggctgagcctgagtccccttggtggtgcggtgctcctgctatatataattctttttcctcattttctccactctgcctgtaattcctgataatagcacaaacgcaacggagttctgtgttccttgcgacacacaagaatttcaatccagagatgccaaaatgtataatcttgccgcaactgagacgtcgaagctcag

SEQ ID NO: 265875 - DNA, 613 bp, Zea mays
ggggcgggtgcgggtgaggggcaggtcgatgtcctcaagaaggcggaaacccgcatcgatgagctcaagcagcgtgcccaccgtcaaggactcgcaggccatctgcgacctcgtctactcgctcttcgtctccgaggaggtggacaaggtggagctgctctactccaagttcgtgtcgctggtgcgctccgaccccatcatccagacgctgctccccatgtcgcccaagggcgagatctgcgacgtcaacggcgtctgcgtggacgccacggaggacgagctcttccgcctcaccaccaaggaggggaagctcaccgtggagcgcgagagcgttaagatccagacgcagcccttctcccccgtggggccgttcgtgccggaccccgtgccgatcctggacgcgctgcgcccgctctagtccaacagggagatgatccgtgctctgcaggagtctctcgcgagcgagctcgcagcccggatgagcgccatgatcagctccaccgagctcagccatcgagcacctgcaagaaccccgagaacgcctacgtgctgaaggaccaggccaagatgatcggcgacacgctcgagattctcgacggtgtcaacaccatca

SEQ ID NO: 265876 - DNA, 1021 bp, Zea mays
cgacgcgagcgagcccaacacgcaaaacggaacgcttcctcctcgcacctccgccttatccgatggcgtccctcaccaccaccacgtcctcaccggccgccctcccggcggctaccaccgccacagcggcatcgtccatatccccccacgccggttcgaagcggccgctcctcgcgggggacgacgcgccctggcggccaccgctgccaccgccgcggggcaggggatccgacccgtcccgcgcatccaccatgcccccgtcctcagcgttgctacgcaggaagactacgccgcctacgccctcgacatcatgaagcatccgaatccgatcggcgaggggctggctatggaggcgttcgcggaggcagccgggccggagtgcatcgtgcccggacagcaagcgcctctaaggcttatggggctcaaggtctggcccgttgatatagatatgaagttcctagagccatttggacgggaactacattcaatgaaaaaattcatggacaaatcgtgcagtgttatggactcatctatggcaaacaagtaggcacatgacacatcagttccgtccaatacagctgttgttgtatccacctgcttcctgaagttacaagacccgaaaaatagaagagacattggagagaagccacattcttttgcgtatcttgctcaccgtcacctgacgaacaaaatatgacatcgggagtgcagtaacgattagtgagtggtcctgtattgagcctgggtgcagcctctgccagtataagtgctctacgtgttatacatttttttatgtccatgaaacattgatccactgagaaaatatatcttcaggtgccaatctacgacaataccttctgttctgttgctagatcaattttatttgttctcaggctcaggccacatgcgatggtcaagtcagaattcttgagttagcctttgtgaggcgtgttggttcttaaaaaaaaaaaaaaaaaaaaaaaaaaaaaaaaaaaaaaaaaagggcggcggacgcgtgggt

SEQ ID NO: 265877 - DNA, 423 bp, Zea mays
catttggacgggagttacattcaatgaaaaaattcatggacaagtcgtgcagtgttatggactcatctatggctaacaagtaggcacatggcacatcagttccgaccaatacggctattgttgtatccatctgcttgctgaagttacaagacccgaaaaataggaaattggaagaagggccatggagggaagccgcagtgttttgcatatattgcccaccttcacctgagagaagatatcgggcgcgcaataatgattagtgagcagtcctgtatggagcctgggtgcagcctctgccagtattaagtgatctacgtgttatacattttttatgttcatgaaacattgatccattgataaaatatatcgtcaggtggcaaggggtcgatttgggggaaaatatcttacgcaatttatttattt

SEQ ID NO: 265878 - DNA, 674 bp, Zea mays
cgcggaggcagggaactcgaaggggctggatgccgccatgaaggacctggccatgatcaccgggcagtggcccgtcaagaccaaggccatcaccgggcagtggcccgtcaagacccgtgagggaaacaccatcggtatcgcagtcaccctccgcggcaggataatgtacaacttcctggataggctcatcaaccttgggctccctaggaccatggacttcctgggtgtcaaccccaacagcttcgacgggcacggcaactacagccttggcctccgtgaccagggcgtgttcccggagatcccgtacgaggtgggcgggaagaagaacggcatggacgtgtccatcgtcaccagcgccaagacggacaacgaggcgttcaggttgctggtcctcctcggcatgccgttctcggagaacatcaagaccgacgtggtgatccggaagaagaggttgaagcgccaccacttcctgagcaagggcaaggggaagggaggacgacggtgaggagaggaaccagccagccagcccatggttgcacacgctctgctcagcttgttttaattccgatctttttgcagaatttggcttacaaattcgatgctgttgttgtctgtcaattatgtaacttgtgcacctatgaaaaaggtttgcaatgatcatgtccgttttgctg

SEQ ID NO: 265879 - DNA, 1448 bp, Zea mays
acccacgcgtgcgcaaaaacgttgttgggaaattcttccttgatgcaataattaaagctgttggatgctacaaaggctgttagtgcatatcctgtggatgatagctcaatggaaattgaatcctattccaacaaaaatatcatgaagagggctctacttttggattttgcagcttcattgatgcctgctttagctgcaaagtctatcaatgtgttgttcagttatgtgaaacctgcaattaaggacagcgactctttgattcaaaagagagcgtacaaggtcctgtcaatgctgctcaaggatgctgaatttattgaaaagaatctggatgtcctgtcagaattgatgatttcgtcactaccatgccaatttccctcgaaacgttacagactcgaatgcctataccaccttattgtttacattttgaaggagtcatctatggttagaaagagagaaattattagttcattcatcactgaaatacttcttgcattgaaggaggccaacaagaaaaccagaaacagagcttatgatttgcttattgaaattgcccgtgcctgtgaaaatgctggaaatgacgaggggaaggagggcttgcaccagttctttggcatggttgctggtggtctggccgctggtcaaacgccatatgcaattagtgccgttgtaactgggttggctcggttgacttatgaattctcagagcttatcggagtcgcatacaatctccttcctcagactttcttgcttatgcaaaggaacaaccgggaaatagtcaaagcgaacttaggttttgtcaaagctttagttgctaaatctaaagctgacatattgcatgaacacttgactggagttgttgagggcctgctgagctggcaaagtgatacaaagaattcctttaaagctaaggtcaagtcactcatagaaattcttgtgaagaaatgtggtttagacgctgtgaaggctgtgatgcctgaggagcatatgaaattgctcacgaatattaggaagattaatgagcgaaaaatgcgaaaggcaaaatcttctgaggatggggatgccatgtctatggcctcaggagctacaaggcaaagtaggtggaatcacacacaaatgttttcggactttggaagtgatgatgaatcagatggtcctttttctacccaacatactgctacttctcgatctcgtactgaatcaaaagcttcaactcggttgagtccgaggcgccaaggagataagaaactactagacaagttcattgaccattcaactggcgaccccctagatttacttgaccagaaaacggtgcggttggctctcaaatcagcagcagggaaaaagagggctgcacccgatgacgacgacgagaagttcgaggtggaccctgaaggccgtataatcgtgcgcgaagagcgggagaagtggaaaaagaagccggcccctcg

SEQ ID NO: 265880 - DNA, 867 bp, Zea mays
cttgcactgaggaaaggccattaggatatatcaagttcatacttaagagcagcttgatgaagtggcctatttttagctgggcatttcacatttttgagtttatcccggtagaacggaaatgggagattgatgaagcaattattcagaacaagctatcaaaatttaagaacccgagagatcctatctggttggcggtttttcctgaaggcacggattatactgagaagaaatgcatcatgagtcaagagtatgcttcagaacatggcttgcctatgctagaacatgtcctccttccaaagacaaagggcttcatttgttgtttgcaagagctgaggagttccttagatgcagtttatgatgtcacaatagcatacaagcatcgactcccagattttctggacaatgtgtatggcgttgatccttctgaagtccacatccacgtcagaatggttcagctccatcacatccccacaacagaagacaagataacagaatggatggtagagaggtttaggcagaaggaccagctcctggcagatttcttcatgaaggggcactttcctgatgaaggaactgaaggagatctgtcgacgccgaagtgcctggcaaacttcttaacagtagtatgcttgacggccatctgtttgtacctaactcttttctcatttgtgtggttcaaggtctatgttgtagcaagctgcgcttacctctcatttgttacctattactccatactaccaccccaactgataggttcaccagagggtgatgtcaaggccaaaaaggttgtgtagatgttgatgtaacttgccatgaaaactgtacatccgcaaaagattttttctgctggagtttttgccttgtgcc

SEQ ID NO: 265881 - DNA, 918 bp, Zea mays
gagttggtaagtataagatctctatgtgcttttgctagaagagctcgccataaatacaagtctgaagagtcacttccatcttattcagtggtgggttcatcttctgcatttggtatttcaagccaaaggttatcaaatggacatttgaaactaccttcttattttggggcaattgcggtgttggcctgcttcgtgtctgctggtttctctcttgcatttgctttcgctatcattccacggcaggttgtgccatggacaggtttgctactgatgcttgagtggacctttgtggcattcttcttattgtttgggagttatctccgttttgtctaccggtggggaagtatcagtgcaaaccatgtgggatttagcaattctgactcatcggagaatcatatgggtccaggccatcagcgaaatatgtctgactgcgacatggatgcaacattttactggacagggatggcatctatagctactattactgtactgttaccgactatcttgggcataactgcattgttcacaaagctaggattaatggtcgctggtggtattgtgctggcatcttttatgacatacgcagcggagcatcttgcaatctcagtcttcaacaagggtcaaaaatacaggaatgcgtcaagaactcgaagcttttgtttttaacgtttaagtaaaaaatccttgttgtattgtaggtagttttgtacacaaaaagaatgatgattcatttttaacacgtggcttcctgcccatggcccctttttttgtagcgctgatgtcacgccaacttgtggtaaataggtttccgacattgtttctgtagcacagttggcatgaagattacagacatgttttgggatcgtgacccgcttttactcgcttatattcatgtttatggtgagattgtagtatatc

SEQ ID NO: 265882 - DNA, 346 bp, Zea mays
gcttgtaccggactcggaagtcccggcccgacccacgcgtgagccttaggctgatcataataaagaggcaccgcacaaggatgttcctacaacctgcaggagaccatggcaagggctgaggagctcgcctttgagggggtcatcgacgaggccaacgggagctctgatatctccaagttcgcggcgctggtgaacacggtggacgttatgatgggcgtccatggagctgggctcacaaactgcgtgttcttgccgaaaaacgccacgctgatccaaattgtgccgtggggagggttgaaatgggtgttccgcaccgacttgtgcaaccccgcggagctgatggggc

SEQ ID NO: 265883 - DNA, 1488 bp, Zea mays
gcttgtaccgatctcggagttccgggctagacccacgcgtccgcccacgcgtccgccggaatcaggaaggaagttgccgacttcatccacaagcgtgatggaggtcccagtgacccggaactcatctacctcacagacggcgccagcaaaggtgtgatgcagatcctgaacgccatcattagcaacgagatggacgggatcttggttcctgttcctcagtacccactttattctgctatcatttccctctttggtgggtctctggtcccatactacttggaagaagaggctaactggaaccttgactttgcaaacatccgacaagcagtggccgaggcacgttcgaagggaatcactgttcgagcgacggtgattataaatccaggaaatcccactggccagtgccttagtgaagcaaatataagggaacttgtgcgatattgctaccatgaaaacttagttctgcttgcagacgaagtgtatcaacagaacgtttatcaagatgaacggccatttataagcgcaagaaaggttatgttcgacatgggtccaccaataagcagtgagcttcagcttgtttctttccacactgtgtccaaagggtactggggagagtgtggacaacgtggtggatacttcgaaatgacaaatcttcctccaaagacagtagatgagatctacaaggttgcatcaatagtactgagtccgaatgttcccgggcaaatctttatgggagtgatggttaaccctcctaaacctggagatatctcatacccgaagttcactgccgaaagcaagtccatcctcgaatctttgaggaggagagcgcgcatgatgacagacggtttcaacagctgccgaaatgtggtgtgcaatttcacagaaggagctatgtactctttcccccaaatacagctgccagcaagagccatcgaggcggcaaagagagccggcaaatcagcggacgtcttctactgcctcaagctcctggaggcgacaggaatctccactgtcccgggctctggttttgggcaaaaggaaggggtgttccaccttcggaccactatccttccagcggaggaagacttccctgccatcatgtcgagcttcaagaagttcaacgactcgttcatggaacagtacgagggctactccaggctgtgagcaggaagagaaacaagagattacagatctgaagaagagattattgattggaagcttattagttattgtaactcccttgaaaagcaggttgtgcggggattattgtttattgaataaaaagtccgccatttgattctactgccataccagtatatataattgtgaattggcttgtacttgctgctggtggggagaggtggaaatagctagccctccttgaccgcgcgcgataagaatgtcgcctcttgttctggagattattggagagttgaatagttcataatcagcctacctacaatatattgcagaaaaagtactgatcat

SEQ ID NO: 265884 - DNA, 541 bp, Zea mays
cggctcgagctctcttctctccccgcggcccgtgactcatccacccacagtccactcgccaatccccccggaacggcggcggcggcgacggcggaggagtaacgcaagatggcgaggaaacctctcgactacgaggagctgaacgagaacgtcaagagggtgcagtacgcggtgcgcggggagctgtacctccgcgcctccgagctgcagaaggagggcaagaagatcatcttcaccaacgtcggcaacccgcacgccctcggccagaaaccgctcaccttcccgcgccaggtggtggcgctgtgccaggctccgttcctcctcgacgatccccacgtcggcctcatgttcccggcggacgccatcgctagggccaagcactatctcgccatggcgcccggcggtctaggtgcgtacagtgacgcccgcggcatccccggaatcaggaaggaagttgccgacttcatccacaagcgtgatggatatccgagtgatccggaactcatctacctcacagacggtgccagcaaaggtgtgatgc

SEQ ID NO: 265885 - DNA, 445 bp, Zea mays
gctcctggaggcaacggggatttccactgttccgggatctggttttgggcaaaaggaaggggtgttccaccttcgggcaactatccttccagccgaggaaggcttccctaccatcatgtcgagcttcaagaagttcaacgactcattcatggagcaataccagggctactccaggatgtgatgtcaacatgaaaagaagcggccgcgcccccattttgcttctactgcccatactagtagaacagtgatcggtgcactatgtgatatttgctgctgcaactgcaactgcaactgcggccttagtctgctatgtatgtgttgcctgttctgaaagagtaaagaagcgaccgataatgttgtatcctgagccgcgcggcgggccgaaacagttatcaagagaaagggaagcatcaagcagcgccgccgccgctagagcccttgacag

SEQ ID NO: 265886 - DNA, 518 bp, Zea mays
ccgccgctgaaacaatctgcacccccacgcacaagcacgaagcagtcagcagtggagtacaaatcctcgcctgcttcctggttttctctccccgccactccagcggaacggcggcgagggagtgagtgacggcagcgaggcaagatggcgaggaggaggccgatggactacgaggagctgaacgagaaagtcaagaaggcgcagtacgcggtgcgcggggagctgtacctccgcgcctcccagctccagaaggagggcaagaagatcatcttcaccaacgtcggcaacccgcacgccctcggccagaagccgggaggtctaggtgcgtacagtgatgcccgtggtatccccggaatcaggaaggaagttgctgacttcatccacaagcgtgatggatatccgagtgacccagaactcatttacctgacagacggcgccagcaaaggtgtgatgcaaatgctgaatgccatcattagaaacgagagggatgggatcttggttcctgttcctcaataccc

SEQ ID NO: 265887 - DNA, 783 bp, Zea mays
cccgtccggaattcccgggtcgacccacccgtcgtggccgacgcggcagcgaggaggaagcaaaggaaaggggatatgtcgaggccgcccaacaggagcgacgcgcacctctccgccgaggacgaggcggcgctggaggccgaggtgcgggagtactacgacgacgcggcgccaaagcgccacaccaagccctcccgcagcgagcactccgccgtgtacgtcgacgcgctcgtcccggacgtcggcggcaactcccacccggagctggacaagttccaagagctggaagcacacaccgagaggttggtgtacgagggcgccaatgtgggagatgagttcgtggagacggagtactacaaggacctcggcggcgtcggcgagcagcaccacacgaccggaacgggcttcatcaagatggacaaagctaaaggcgcccccttcaaactgtctgaagatcccaatgcagaggagcgacatgcttcttgcaggggaaaccctgctaccaacgagtggatcccgtcagctgacacggtgtacccggcgtcagacaagccaagcagaagcgacagctgagggactgtatatctccagccatgagaattcagacgagtgctttccaccattagaataagaaaccacactggttgtccaccatatctttactgttctgcgtcgagattcttgtgattcttacgtggaacaaattaagcgtgctacgagttagacctctgtgttctggctgtaaatggcaaggaatgaagttctaatcgtggttcagcagtc

SEQ ID NO: 265888 - DNA, 670 bp, Zea mays
cctataggagatggaagcgctcgagcggcgcctgcaggacgtcatgatggccaccgatgatgtggagtactgagtcaggcagaacaacaggagaggcagcaaccaagccaccgaggacgacgaagccatcgagccggcggatgtgctgtccaggcagatgatccagtgcacagcggcagatttggcgctcgaggacaccatctacgcgctcgacaaggcaatccaggaaggatccgtgccctttgacggctacctcaggagcgtgcgtgcactgtcccgtgagcagtttttccaccgcgccctatctgccaaggtgcatagcgcgcagcagcaggctaaggttgctagcatggcagcacgggcgccaccgcagtacgcatcatagggatcatggtcagtatgcttgcttggtttgctatttcctccgattttgtctgtcttacctgtctgtgtaaagtttctaccccatgcttgtttactgcttataccagggaaggggaagatgattcaatgctgcctgtcacatttacttagtaagactggatggatatgaaaggacttgtctctataatagcttgagtttgaatgtatgcatatatggcttttgagcttgcagttcacattgcatgcttcatttctgtctattacaataacttgacaattccatctt

SEQ ID NO: 265889 - DNA, 1062 bp, Zea mays
cggacgcgtgggcggacgcgtgggcccggcctgtgccgccgtcgccaccgctcgctcgcccgcctgcctgcctgcctgggcccgcagcaccgactctgacagcgcccgtcctgcttcctgtaccggcaggcgagggagaggactcagggagtgtgatggcggcaatgccggcgccgcttctgcctctgcttctgctggtggtggccgcggcgatgacgctctcccccgccgccgcccgcattcccggcgtgtacgtcggcggcggcggcggcggctggcagagcgcgcacgccacgttctacggcggcagcgacgcttcgggcaccatgggcggcgcctgcgggtacggcaacctgtacagccaggggtacggcgtgaacaacgcggcgctgagcacggcgctgttcgacgaggggctccgctgcggcgcgtgcttcgagatcaggtgcgaggagcagcccgggtggcggtggtgccggccagggaggccctccatcctggtcacggccaccaacttctgcccgcccaactacgcgctcccctccgacgacggcggctggtgcaacccgccccgcccgcacttcgacctcgccatgcccatgttcctccacatcgccgagtaccgcgccggcatcgtccccgtctcctaccgccgggtgccgtgccgcaagtccggcggggtgcggttcaccatcaacggcttccggtacttcaacctggtgctgatcacgaacgtggccggcgcgggggacgtggtgcgcgcgagcggcaaggcggccggcaccggggagtggctgcccatgtcccggaactggggccagaactggcagtccagcgccatcctcgtcggccaggcgctctccttccgcgtcaccgccagcgaccgccgcacctccacctcctggaacgccgccccgcgcgcctggcgcttcggccagaccttcgagggcaagaacttcagggtctgatgcatgggatgggatgcgatgggatgggacttgggagaagaagccaaaactcttttctttctttctttctttcttcttatacgtgattattact

SEQ ID NO: 265890 - DNA, 382 bp, Zea mays
gtccctgctccgacgccgcccgcctccgtgcgctgcactgaatctgacagcgcccgtcctgcagcggccggcgaggaagagctctcggcgagagggcgagcgatggcggcaatgccggcgctgctgctgctggtggtggccacggcgatgatgttctcccccgccgccgcccgcattcccggcgtgtacggcggcggaggctggcagagcgcgcacgccacgttctacggcggcagcgacgcctcgggcaccatgggcggcgcctgcggctacggcaacctgtacagccaggggtacggcgtgaacaacgcggcgctgagcacggcgctgttcaaccaggggctgagctgcggcgcgtgcttcgagatcaagtgcgaggacc

SEQ ID NO: 265891 - DNA, 1900 bp, Zea mays
ggaccgtggcgggcgtcgggggtcacggcgccgcgctgcacgccgttgaagagggcttaaaaacagcaataactcagggagatgttgtgggtgggacttgtgtaaacagaggctgtgtcccatcgaaagcgcttcttgctgtcagcggtcgaatgcgggagcttcatgatgaacatcatatgaagtctttgggtctacaggtttcctctcctggatatgacagacaagctgttgctgatcatgcaaacaatcttgcctcgaaaatccgtatcaacttgactaactcaatgaaagctctaggactggatatattgacaggtgttggcactattgtgggaaagcaaaaggtacgatatggaaaagctggtttcccagataaagaaatcactgccaggaacatcataattgccactggttcagttccttttgttccgaaagggattgagattgatgggaaaactgtatttactagtgatcatgcactgaaacttgagtcggttccagactggatagctattgttggaagtgggtacattggacttgagttcagtgatgtatacacagctcttggaagtgaggttacttttgttgaagctcttgaccagctgatgcctggatttgatcctgaaattgcaaaattagcccagagagttcttatcaatcctcggaaaattgactatcacactggtgtttttgcaagcaagattactcctgcaaaggatggaaaacctgtgctcatcgagcttattgatgcaaagacaaaggagcacaaagaaacccttgaggttgacgcagcccttatagctacaggaagggcgccattcaccaaagggcttggcttggaaaacatcaatgttgttacacaacgtggttttgtgcctgttgatgaacggatgcgagtcatggatgcagatggcaatgtggtacccaatttatattgcattggagatgccaatggcaagctcatgcttgcccatgctgccagtgcacaaggaatttcagttgttgaacaaatctctggaaaggatcacatcctaaatcatttaagcatcccagcagcatgtttcacccatccagagattagtatggttggactgacagagccacaagccagagagaaggctgataaagaaggatttgagataaatgttgtgaagactagctttaaggctaacactaaagctttggcagaaaatgaaggagatgggattgctaagttgatttaccgacctgacacgggtgaaattcttggggttcacattttgggtttgcatgctgctgatctcattcacgaggcatcaaatgccatcgccctaggaactcgtgtgcaagacatcaagtttgctgttcacgcacaccctacattgtctgaggtcctggatgaactcttcaaagcagccaaggttaattccggtgtttctcattctgtaaatgaaccagttgcagcctagagaaaggccggatagcaagccaaggcagccaccccaaccactcctgaaggtcctcagcttcgtcacgaccctgttttcttccccaaaacgagattgacaacggtaacggggagggtgttgttgtaggcagttgctgtaggttacaaatttgaggaagaaattcatcagtgaatacaagcacacaaatgtttcttttttgggtccagattgttaaaagggtctttttttttacggtggggtgggtttttgttggcttcgttatttgcatatttgttgttggttgccctgtaagatgaagtgccgaggctagctcagctagtttgaaataattcatgtttcaaaactcagatgtattgcgccgacacaatggattagttggttatcttcagtaagctgcaaaacaatattttgcacggcaaaaaaaaaaaaaaaaaaaaaagggcggccgc

SEQ ID NO: 265892 - DNA, 164 bp, Zea mays
gggcccccttgccattttgattggggtcccaatgcaatatagattgggtaccacattgccatctgcattggggatgccaatggcaagctcatgcttgcccatgctgccagtgcacaaggaatttcagttgttgaacaaatatctggtaaggatcacatcctaaa

SEQ ID NO: 265893 - DNA, 484 bp, Zea mays
accggttcggaattcccggctggacccacgcgtccgcggacgcgtggcagattcaagatgatgatttaagagctaagaaatgagctacaaagtcggaactctcggatttgcttgacaactaatctttggacctcaaatcagaagttgggttatctttgcttgacagcccactacattaatgcagactttatcttgaaaaaaaagattattgcgttcaaatatttgaaatatccacatacaggcctagcaatcacagaaggaattacagagtgtctcaaagagtgggggatcaaagagaagatgtttactatcacattagataatgtttctaacaatctgtcagtgcgtgaccttcgagaaagtgggctatttggaggcgatcttcgtattgtccaatgttgtgcacacatattgattctcttagttcaagatggaatggcaattgctcatggagcaatctataagattcgtgagctggtcagac

SEQ ID NO: 265894 - DNA, 1228 bp, Zea mays
caccaagatataggatacttaacaagatgggtgaagggacatttggacaagttttggagtgctgggacttggaaaaccaagagcagtggctatcaagattgtgcgctcccttcagaaataccgagaggctgctatgatagaaattgatgtgctccagagacttgggaagcatgactttactggcagccgttgtgtgcaaatacggaactggtttgactatcgtaatcatatttgtatagtatttgagaagcttgggccaagcctatatgactttctgcgaaagaatagctaccgttcatttcctattgaccttgtccgagaatttgccagacaaatattagagtctgttgcatttatgcatgacttgcgacttattcacacggatctgaagccagagaacattctccttgtttcatcagagtctatcagggtgcctgattataaggtttctatacgaccaccaaaggatggttctttctttaagaaccttccaaaatctagtgctatcaagctgattgattttgggagtacaactttcgagagccaagaccacaattatgtggtgtcgacaagacattatcgtgcaccagaagttatccttggtcttgggtggaactatccatgcgacttgtggagtgtgggttgcattttagttgagctttgttcgggggaagctctctttcaaacacatgaaaacttggagcatttggctatgatggagaaggtcttagggcctctcccaaagcatatgattgtcagagctgatcggcgtgctgaaaagtacttcaagcgcggagtaaggttggactggccagagggagcggcctcacgagagagcatgaaggcagtctggaaattgcctcgtctgcagaaccttgtgatgcaacatgttgatcattctgctggagatctaattgatcttcttcaaggacttcttcggtatgatcctaatgagcgcctgaaagcacatgaagctctacaacaccctttctttaccagatgcatcagaagatgtggtttctgaggctacactgagattgaaaatgtcaatgctgtatttcttcattttgatgtgtaagaactacaaaaaagtggagatgttctacgaaaaatgaaatatgctaacttgcattctgttcaatgatttgaaaggtaattggtgtatataagcagagttctctgacactcgatccattttaactggatgtcattttccaattgataaaaa

SEQ ID NO: 265895 - DNA, 1167 bp, Zea mays
ttttccacgcgtccgcccacgcgtccgttctgctttaccactcaatcttgttgagaggcgccggcgccggcgattcctcctccaccgattcgcccggcgggagtctccgcagggctcaccgggaccgcgggtccacgatggccgccaacttctggacgtcgtcgcactgcaagcagctgctggaccccgaggacgtggacctggtgccggcggcggaccgggagcgaggcatcacgccggaagagttccgcctcatcaagatccatatgtcgttccatatctggaggctagcacagcaggttaaagttaggcaaagagttgtagctacagcaatagcttacttaggcgtgtgtatacaaggaagagcatgtcagactatgatcctcgtttggttgcacctacttgtttgtatttggcatctaaggtggaggagagtacagtgcaagcccgacttcttgtattttatataaaaaagatgtgtggttccgatgataagtatcggtttgaaattaaggatattcttgaaatggaaatgaagctcctggaagctctcgactattatttggttgttttccatccatatcgtcctctcttacagttgttgcaggatgctggcataacagacctgacacaatttgcctggggccttgttaatgatacatacaagatggaccttatcctcatataccctccctacatgattgcactggcctgcatatacatagcgagtgttttgaaagataaggacaccacagcatggtttgaagagctccgtgttgacatgaacatagttaagaatatctctatggaaatattagacttctatgacacctacaagattgatcctcaaaggggcatccctgaggataagataagccccgtgatgaacaagttgccggcaaaggcttaactcagatttggcgagcttaggagttgtaaactagtagtaaactacatcatacttccaccatgtgtgtactcagcctgcactgtcgcttgtgacgtgttgatgaactacttgatagattcgatgcaaaaaccccatggaattgtttgtgtatgctgctggagtttattcaagttagtagcatctgcatctattaactatttattacgattgttattccagggttcttgacattaatatgaaaggtgctactttgtttt

SEQ ID NO: 265896 - DNA, 888 bp, Zea mays
cggacgcgtgggttcgtggtgggcgacaatatcgacaccgaccagatcatccccgccgagcacctcactctggtgccctccaagccggacgagtaccgcaagctcggttccttcgccttcgcggggctcccatccgcggcctacccgacgccgttcgtcgctccgggtgaggagtcctcccgctacgccatcattgtcggcggagccaacttcgggtgcggttcctctcgcgagcacgcgcccgtcgcgcttggggccgctggcgcacgcgccattgttgcggagggctacgcgcgcatcttttttcgcaactccgtggccactggagaggtgtaccctctggagctcacggacgttggggcctggaaggagtgcaagacaggggatgtggtcaccgtggaccttgctaactccgtttttattaaccacacctctggcaaggagtacaagctgaaaccaattggtgatgctggccctgtaattgaggcgggagggatctttgcctacgcccggaagacaggaatgattgcgtcgaaagctgctgcatgagggaaagatcagcttatgcagccgagcctctgcggagatgaagaagtaagctggagttaggactaagagttactgcacctacttgatgtcgacggtgtctcaaaataagttgcggcctaccgaaattatgatgaatcaatcaatttggtctttgtcacagatcgtttttttttgtttgttactagtacttgtacaattgtactcctgcctgctactgtccttatctgtttgaataactgctgtgttgccatcttatgtgtacaactctcgaaactcgctgccgttcgatgtatttgagcttttggtatgcaattcttgaaaatggttgcattcaaacaa

SEQ ID NO: 265897 - DNA, 891 bp, Zea mays
cggactcgtgggcggacgcgtgggcggacgcgtgccgcatttcccaagggaaccataccagagcggcagagccttcccctccgctccccagtcccacccgcaccctagccctcagcaaaccctaaccgctcgtcgccatgaaggacacctcgttcaaggccaccggcgccaagcgcaagaaggtcggcggcgccaagcgcgggctcacccccttcttcgcgtttttggctgagtttaggccgcagtacctggagaagcaccctgagctcaagggcgtaaaggaggtgagcaaggcggctggggagaagtggcgctctatgtcggatgaggagaaggcgaagtatggcagtagcaagaagcaggatggcaaagcaagcaagaaggagaacactagctccaagaaggccaaagctgatattcgggagggagatgaagcagaaggttctaacaagtcaaaatctgaggttgaggatgatgagcaggatggtaatgaggacgaggatgagtaaatagtacgatggggaacagcagctttgcaattgagtgtttgctgctttacttatttttctatatgctgttccttttgatgttatatgctgtaaggaaaatctgtacatgatggtaccttagggtatggcatgctggagttcccctttaacccgaagagccggatacttttgccagcctcgtcagcatgtgtaaacagttgttttcttgttttatcgacttattgggtgactacccaagagttggtttgtagtcaatgaggtatgctgccccctgtggtgctacgcagctgcagcaacatcagatggtcaggctaaaatcatgttgtgggatctgattctaatgatgcttatttagtactattacaaatatctatcgttgctt

SEQ ID NO: 265898 - DNA, 347 bp, Zea mays
gggaaccataccagagcggcagagccttcccctccgctccccagtcccacccgcaccctagccctcagcaaaccctaaccgctcgtcgccatgaaggacacctcgttcaaggccaccggcgccaagcgcaagaaggtcggcggcgccaagcgcgggctcacccccttcttcgcgtttttggctgagtttaggccgcagtacctggagaagcaccctgagctcaagggcgtaaaggaaggtaagttgcttcttttcaccctaagcatgtagctgggtttcgcttaagtggctggtatatgcctttggtcggccgggactttgcttataagggaacaaggccgcttggg

SEQ ID NO: 265899 - DNA, 1600 bp, Zea mays
accataccggctttctttattcaaacatggccgattattcagtgccccggcaagagaagtcaggcacaaccgcacaagaaatacacatacgcccaacagcattacccaactctatcaatacatctcagatggtcaagatacaggccaaaatttcctgaagcgaagaggtacaaaacagataccacacggtctcacttctgcatatgggtttacatgcttcggtactgacaaacgaatgtggtgcagtacatatgggaacttgtagaagagacccgaagttgaccatgcgcccaagttacaaccccagctccgagaggagattgcgccaccttggcgtctcctcgtcgaatatgtaggtcagctttgttaccaagactccactgccaccaattgatctcagttgttggatagatttgtaaagcaacttctgtggaacaaccacattaatggcatagtattccacatcaacttttccatcacgtctgcgatagacaggacttacagtcgggccctgcaatccccatatagatgtttggctaagaactctctctgccacttcttctgcgctgttgcccctcatgtttgcggtgaccattaattctgcagttgctcttaggtgagcttctaatctttcaagcaactcatgagtaacctccagcacacctttacgcttgtgcagagatttcctacttgctacaagagtggcctggctttccagaactactccaccatcaatttcctttaggttattctcacgcaaggtcgttccgctactcacgagatccacaatagcatcagccatacccataggaggatatgactcaagagctccatcggcagataaaaaacgaacatgcttaaaacctttctctcttaagaacttatcgcctagatatccaaatccagtaacaacacgtagtggcctttcttctgtccattcagacatctttagcaaatcttccatagtatgtatgttctcaaaaatgccttccttaggtaccgcaagggacaaacgacaatgtccaaactcaagagcatcatgaacaaccactaaatcctcattgccgtttccgtattcactaactatgtcaaaacccacaacaccaaggtcaagatcgcctgactgaagtttacgaacaatgtccttaggcctttgaaaccaaacctccaaatttggaatcagcgggatatctgcagtatactgccgcgggttgagctgcctcaccgacaactggcaactcttgaggaggcttagggtttgctcggccatgcggcccttgctggggagcccgatacggacgacagtgcggtcctcaattaggggagacgaaaccgccgccggtttagcggatacggcggccgcagaggctgctgtccgcggagcgacaaagcgggccctcgccgccagcgaagggcggatggcaaggcgtaagctggactgtggcgaaggtgactgggatagagagagagccgtaaactgcgccgccaacatccccggcatttttgtcgggtcggtgggcggggcgtgggcgtgggcgtgggcggcccccctgctgccgtttttcgttcagtgcagtgaggaggagcctggcggcggcga

SEQ ID NO: 265900 - DNA, 1711 bp, Zea mays
tcatgcccgagttggcgacaggtggtggtggtggagatattggaaagaggatcggtcatggtgggggtgatggtggtgatgatgctggtgacgatgatgactactttggtgattttgatgagggagaggaagaaggtgggcttttcaggaggcgaattgttgtacaagagctattcagtagggagttcgtagaagctgtgttgcaagaatggtacaagacgatgagtgatttgcctaccggtcttcgccaagcttgtgagatgggtttggtgagttctgcacagatggtacgttacttgtcaatatttgcaagacctacaaacgctaggtccttctcaagagctcttccaggctggctttccagaggtcttgttggaaggacacttgcagatccatcattcccacataaaatgtctttggagtttatagctaccattgcgtcatctatttggtgtgaaatgaatattcgcaaagagaggtttaaacaagaatgggatttggtgattgttaatgctttgactgcagcttgttgcaacttgatggttcttggacttttagcaccatgccgttcatatgcgagtacatctcgatttgacttccaaaatgcaattgagaaacttccgagcaacatattcgagaagagctatcctttgagagagtttgatctaccaaaacgaatcagtgcattcttttataaagctgctgagcttagtcttgtcgggtttgtggccggctctgttcaaggtggtatgtccaaagtcttgtctgtaagaaaagaaaggaggttatcggtgactattccctctatcagcaccaatgctcttggttacggagctttcctagggctctatgtgaacttgcgatatcaattgctctgtggactagaccaatatatggtcaagcgctttgacgttttgggtgtggcaatcttctttagcacagcagcaagactgttgaatattcagattggtgaggcatcaaggcgagcatggcttggcgaggaagctgatccacagtactcagatcgactgctcagaccatacaagaggcccgtggaggtttatatggaccaacaagattcaaggtggtttatatccaaggatgcaattgtatctggccttggtcttctaggtatcaagcagggtggacctgaggcaacattttctaagtctcgtcgaaagagagtcatccgcaaaaaggtcacttcaggttgagtttagtggatttggatagcaatgctggaacaattttgcttctgttccactatgccagagggaggtctacccaaattatggtaaatgagaaaaaggtatcaagtcaaccagcacgtggtctgtcggcgaagggatcaaagggtttgttactgggaagggttagttaaaaggtgccaattactattttataatttaattgcagttatttaaggtaagaaaatatgttgttttcttgtattgctgtgaggcaaatagacacgtttagtggtagttttgtaagattgttaatgtactgcctttacatgacaaatggattctgcatttttatatagaacaaaaaaaagccacatgcttgtatctatcttttgaggtcaattaggtcagggtcctgctttgttgctggttaggactacgcttttataaaaacttattttaagtacgaaggccgatctctgtggaagtttcatcgtgctatttccaagactactacattttct

SEQ ID NO: 265901 - DNA, 337 bp, Zea mays
gattttgcttctgttccactatgccagagggaggtctacccaaattatggtaaatgagaaaaactacaaacgtcaaccagcacagcacgtggtcaataggcgaaggcatcaaacggggttgtgctgggaagcgttggtcaaaaggtgccctttactattttctaattcaagtgcagtggtttctttattttttggtaagaataatatgttggtttcttgtattgctgaggcaaatacacacgtttagtggtagttctgtaagtttgttaatgtactgactttaacatgagatggattctgcatttttgtatagatcaaatagctgccgcatgcaaaa

SEQ ID NO: 265902 - DNA, 1809 bp, Zea mays
tcatatggtgaaaatgctaggggaagtttttatttacaatatgctggggttattgacagtgggttagctggtcttgctgctgctgatgctctcagaaatgcatccttccaggttattctactggaatcccgtgataggattggtggcagagttcacactgactactcttttgggtttccggtcgatttgggagcatcttggcttcatggggtctgtgaagaaaatcccttggcaccaataattggaaggcttggacttccactgtaccgcacaagtggtgatgattctgtgctgtttgatcatgatctagagagttatgcactctatgacactaacggacgccaagtaccacaagagttggtagaaaagcttgggaaggtgtttgagaagatactggaagagactggcaaattgagggaagaaatcaatgaagatatgtctatcgcaaaagccatcgcaattgttatggctagaaatccgcacttgaggcaagaagggattgctcatgaggttcttcagtggtatttgtgccgtatggagggttggtttgccaccgacgctgattcaatttcactacagggttgggatcaggaggtgctgcttccaggtggccatggcctcatggttcgtgggtatcgtccggttataaatactctcgcaaaaggcttagatatacgcctcaaccataaggttgtggaaattgttcgccataggaacagggtagaggttaccgtaagcagcggccaaacgtttgttgcggatgctgctgtggtcactgttccgttgggtgtcctgaaagcgaaaaccattagattcgagccgaggctgccagagtggaaagaagaggcaatcagagaactgacggttggagttgagaacaaaattgttctgcacttcggccaggttttctggcctaacgtggagttcctcggcgtcgtttcctctagcacgtatggttgcagctatttcctcaaccttcacaaggcaacaggccaccctgtccttgtttacatgcctgctggccgacttgctcgtgacattgagaagatgtcagatgaggctgctgcgcagtttgccttttctcagttgaagaagatccttcccaatgcagctgagccgataaactacctggtgtcgcgctggggctcggacgagaacacgcttggttcgtacacgttcgatggggtgaacaaaccccgtgacctgtacgagaagctgcgcatccccgtggacaacctgttcttcgcgggagaggccacgagcgtcaagtacacgggcacggtgcacggcgccttctccacgggtgtcatggcggccgaggagtgcaagatgcgggttctggagcggctcagggagctcgacatgctggagatgtgccaccctgccatgggcgaggacagccctgtgtctgtcccgctgctcatctctcggctctaaaagcagacgagtagtagttgtgtatgggatggatcggcacctgagagtaggctgggacatcccactgattgccggagggaagcagggaggaagaagctcccctcgcttcgcttctcctcggcatgaggcatgtgcctggcgttacttgtggcgtgccaagtgccatatttccctaaacttattctgcgtgggaaccctctattatgtatgtatactgtgaatttgtgactgttcaggtaacacgagttatcgtgacatcttcgtagagaaagataccgtatgtatgatgtatgtatgatatacatatgatattatgatcaacaattgtagtagtagtaataataaataatacatatatgtgacttaactgtt

SEQ ID NO: 265903 - DNA, 621 bp, Zea mays
caagaagggaaaaaaaaagagggacaggaaaaaaaatcattctcgtttcgctctccgctagaccccgcccgaatcaatggagattagggctccgccgacgagcctgaggctcgcgccgccgcccgccgccgccagcttccgccgaaccccgcttaggacctccttccttcgcggcagcgtgtcacttaaagttgtgcaagtacggcagtcaaatgtcaacagatttaagtgcaatagcatacgaagtaacctctttgataggctaacaagggttgtcaggtcctacgcaaatgcagttctaagttcgtttgaagaccctgagaagattctagaccaggcagttctggagatgaatgatgacttgacaaagatgcggcaggccactgcacaggtcttggcatctcaaaagcggcttgagaataaatataaagctgcagaacaagcttctgctgattggtatcggagggctcaacttgctcttcaaaagggtgacgaggatcttgctcgcgaagcccttaagcggcgtaaatcatatgctgacaatgcaagctccttaaggtcccagcttgatcagcagaagggtgtagttgaaaatctgatttcaaatacccggcttcttga

SEQ ID NO: 265904 - DNA, 861 bp, Zea mays
gctttctaaacaaacgcaggtgcagtgtggtttcgggcgcacaggccacctctgggcgcacgaggcgtacggagtggaaccagacataatgaccttagcgaagccactggccaacggcattcccatcggcgttgtcctggtgaaggagaagatcgccgcagccataaactacggcgaccacggcacgacgtttggcggcgggcctctcgcctgccagaccgcgataacggtgttcgacaagatcacgagacccggtttcctggccgaggtgtccaggaaaggggagagcttcaagcagctgctccgcgccaagctgagcgggaacccgcacgtgagggaggtccgcggggtcggccttctcgtcggcgtcgagctggacgtgccagctggtcctctggtcgacgcgtgcttggacgccggcgtcgtcgtgctgactgccggtaagggcaatgtggtgaggctggtgccgccgctcatcgtctcggagaaggagctggagcatgccgcggatgtcataagggactgtctaccggcgctcgatgtcgttgctgctgcctaatgtatatggtggtgcaataggtccggatatgaaacctgattccaaattttggaatcgaataaatttcatgtcgggccaatgttgttgtgttcattgaaacaaactcttttttttttttggaatcgaataattattacatgtcagaccgatgctagctgttccgagagcaaagtggctttattatacaaaatggtctgaagagcgataaggtgaccaaccgaaaaagggccgccgatctagacgatcccaccttacgtacgcgtacgtgcaaggtgataactctgctatagcgtcacctaaat

SEQ ID NO: 265905 - DNA, 1540 bp, Zea mays
atttgtggccaatgacccaaccactaagggtggcacatactatcctcttactgtcaagaagcatctgcgagcacaggaaatagcttcggagtgcaaactgccttgcatatatctcgttgacagcggaggtgctaatctccccaggcaggctgacgttttccctgaccgtgataattttggccggatattctacaatcaagctaagatgtcttcagatggtatccctcagattgcagtagtcttgggttcttgcactgctggtggggcatatattcctgcaatggcggatgagagtgtaatagttaagggaaatgggactatatttctagcgggtccaccacttgtaaaggctgctacaggagaggagatatctgctgaggaccttggtggagcatcagtacattgcaaggtatcaggagtctcagatcattttgcacaagatgaaattcatggacttgagttggggcgaaacattgtgaagaacctgcacttagctgctaaaggaacaaatattcagagttctgcttgtggttaccaagagccattgtacgatgtagaggaacttcgctccattgcaccagctgatgtgaaacagtccttcgacattcgttcaataatagcccgtattgttgatggaagtgaatttgatgagttcaaaaaattgtatggaacaacactagtgactggttttgcaaggatatgtgggcaaccagttggaattattggaaacaatggcattttgtttacagagtcagcgttgaagggctcccacttcattgaattgtgcgctcagcggcatattcctttgattttccttcaaaacattactgggttcatggtcggatcaaagtctgaagctagtggaattgccaaagctggagcaaagatggtcatggcagtttcctgtgctaaggttcctaaaattacaataattgttggtggaagttttggggctgggaattatggaatgtgcggacgtgcatatagcccaaactttttatttctttggccaactgctaggatatctgttatgggtggcatccaggcagctggagttctcgctcaaatagaaaagaacaacaaaaggagacaaggagtggagtggagcaaggacgaggaagaagccttcaaagccaaagtcgtggaggcttacgacagagaaggaagcccgtactactccactgctaggctatgggacgacggggtcatcgaccctgctgacaccaggcgggttctgagcctctgcctctccgcttcggccaagccggttccggaagacccaagatacggtgtattccggatgtgaataaatgtgtgtgagtaataacgcagacgtgtttaataaaaagctgcctgcacgcacccaatgtgtgtgcacaaataaaaatttcgccctggtttctgtcgtcgaaatatgttgaagagtgttgttcatttcatatattactatctgatgaatgggaagtgttcttcatttgatagtaggtatatgactgtgcattgctacggaattaatataataaaatataataattttggt

SEQ ID NO: 265906 - DNA, 558 bp, Zea mays
cacgcgtccggaagcttcagcggtgcttgtttcaactgcggcgaatccggccaccgcgcaacggactgcccaaacaagtagtaagatgggggagatggcgcggtctccccttgccgcacggggtcgatgatcctgattggccggagcatcaatcaggatgcacgcagagcgaaatcccaaagcccactccacctgctgatcggtgtactacgcccgacacccagccgacgttattactggctacagttttgcgtggtcgtctggcgtcggaaaacagaggaaggttttggcatcctgactacagttactacatcaagcggagttccttcagcttattcatgtcacacggacactactctacactacagggatatgttagtatttctttttttatatgtattttttttgtggtgctcttgatttgaggatctcggtataactgtaaccacacgcactggttacggttgcttctgcttcacaatcgctggcgacggttggattctttgaatgttatagatctgtaccccgtcttgcttcggaaaaaaaaaaaagaggaaa

SEQ ID NO: 265907 - DNA, 710 bp, Zea mays
caggaactagagcttttgtgtaaaatgccagagcggggaagcgatatgtggggagactgggagccaccaaggcagctccggcgcctgattattgaaggcatcgacttctcacggcagcctcgatggatcaaccgctcctgcctgccacgcctctgctccttatctctgatggtgcacgctcttgaagcacaggacctagataatctagcgaggttgccagagctccagtacctcacgctagatggtctcagctggcctccaaggtatactgttggcccagacgacttcaggaatctgaggttctgcgaagtgggcacaacgttcgagtttcgtaagggcgccatgccaaggcttgaagtgctgcactttggagtttatgcagggtactgtagttgggaacagtatggtgtgccgttcgagcagttcccaacgaaggatgtgatcgaagatcttgacttggacctggataacgtccttttacttcagcaagtcatggtcgaagtcgactgcgcaggtgctactgccgcacaagtggaggaggtggaggccgtggtcatgcgtgccgtggaaaatcatgccaaccgtccaaccataaaaatggatcgagcatatgaagaaaatatcttatctgatgaaaagctggaggctctgcttcggcgacacattgaaaaggattgctgcgtgcgcacgaagaaggataaatctgatgc

SEQ ID NO: 265908 - DNA, 871 bp, Zea mays
ccgtaccggtcctgaattccctgggcgacgcacgcgtccgcccacgcgtccggccccaccgccgccgccggtggccgggccgccccggggctgaacgggcgctcctacagcgcctcctacgcggcctcctacgggcccaccctggccgataccggcgggcagctgaagcgctccggcagcgtcaccaactggacctccgccaaccgccgctccgtcaacctgagggggtacgccccgtccttcgccgcgatggacgacaccgccggcgcggtcccggcgcccaggaggaagctgcgggcgggggcggacgacgccgaggtgcagcggcggcggctggtcgtgtacaagacgtacggcgtggaagggaaggtccgggagtcggtgcgccgcggcgtcagctggatcaagggcaagtgctccggcgcggcctacggctggtggtgatcgatcgccgtgcccaccgccggcctatcggagtggtactactacggtctaccgtatgagctgatgcgctgcatgcccaccgccgcaccagtacctcctgttacttgttcttggagttaggatttttttaaaaaaaaatctttaggagatggatttggtggtatgtactgtagcatactagcatgagctgtggagcttcttctcttggtgagtgatctcgtgtcttgtgagggaaggagggagttcatgctgtgggtgtcctactcctctgtacagaacagatatctggactcagtctggtctatgtaaatataggtgctgcgtatgtatatatgtgtgtatagaataagatttctgtaaattattactacttctacaggcaagactgctgttgatggcctctttgaaaaggccggcttcggattcc

SEQ ID NO: 265909 - DNA, 473 bp, Zea mays
tttgtcgcagagcgaggaagcacgcagagagtgagttttaaagaaagagagggatgccaatggagaggtcggtgtcgtgcgcggagaggggcagcacgttcggcggcggggcggcggtggacgtccggagctacagcgcctcctacgcgaggccccagccgcggccgccgacgtccagggtgcagcgcgccaggagcgtgagcgcgtggacgcgcccggcgccgccgcccgtgcagcggaccgggagcaccaagagcggcgccgccgcggcccgccccaccccggggctcaacctgcgctcgtacagcgcctcctacgcggcctcctacgggcccagccttgtcggcggggcggcgcggccggtggcggcggggagctgaagcgctccggcagcgtcaccaactggacctccgccaaccgccgctccgtcaacctcagggggtacacgccgtccttcgccgcgctggacgaca

SEQ ID NO: 265910 - DNA, 432 bp, Zea mays
cccacgaatccgaacgcagagagagaaagagtgggatggcaatggagaggtcgttgtcgtgcgcggagaggggcagccagtacggcgccggggcgggggcgggggcgatgaacctccggagctacggcgcctcctacgagcgaccgacgacagcggcgccgtccacggtgcaccgcgccaggagcgtgagctcgtggagcacgccgccggcgccgccgcccgtgcagcgggccgggagcaccaagagcggccccaccgccgccgccggtggccgggccgccccggggctgaacctgcgctcctacagcgcctcctacgcggcctcctacgggcccaccctgcccgataccggcgggcagctgaagcgctccggcagcgtcaccaactggacttccgccaaccgccgctccgtcaacctgagggggtaccccc

SEQ ID NO: 265911 - DNA, 286 bp, Zea mays
gtgaagtggcagtaacttgaaaatcagcactggcactgttttggttagttactccagtcctttcgtcttttgtgtcccctttcaatagaagctggccttgtacttcctccattcttttttttagttgtcacggtttagttcaaaaaaatgaactagcgggcgacaattattgagttcaaaaatgctctgttcatcaacatgcacgtaacgtaaggggtctgtggtgcacaaaactgtcaaaacaggcggaaattgtggttcattgctgtaaatcacgctcatttcg

SEQ ID NO: 265912 - DNA, 1594 bp, Zea mays
  unsure (1)..(1594): unsure at all n locations
ggtattcctgggcttccccacacgcgtccgctgctgcccacggccacccacaccacaccacaccaatacactacaccataccagaaggagcaaaaataagacgagatggcggacgagcgcttgcctcaaacggccggcgcccgcacggctctcgccagagctactggatcctcggcacggaaacgcgcccgcgatagttaggtgcgcctgtgggcccggccggctcgtcacttacataggcgcacgcacccccgcctggtgcgtcgtcgatcgctgctttgctggcgcgcggcggccctgtgtggcacagtagaggtctgctgaggacgacgaccggaggcgtgctgcgtggatggtcctcatggccgggatgctccccggcgtggagtgcgcgcggcggcggcgggtccggcagggcggggcggggatgggagcggaggcggccggaggaggcacggggcggcggtcctccttctgcctgtacgcggccggccacggcggcgccggcaattctggcaagcggagcggcggcgtggtgcacgggcacgggtggacgctggacagcaatgcccgggaggccaaggagcggctggaccagaagctcaggaccaagagggaggccgccatcaagagcagcaccacagcacggggagcataaagctgggcgtgccgcaccggagcgccggcgcggacgagcgcggcgagagctccgcgccggcgatggccggcgtgcagcgcgaggtgtactcgaagaagggcgtgatgcggcggctgatgcggtggagccggccgcggtgggccgcggcggagcaggcggagtgcgcggtgtgcctggacgagttccgcgcgggcgacgtgctggcgcacctgcgctgcggccaccgcttccactgggcctgcgcgctgccctggctcgagggcacctcgcggtgccccttctgccgcgccgccgtggacgccggcgccgccgccgccgccgacggcgcctagaagcggccgaggctctggtcttgctggggcttgccctgggctgggacggcgcggggcgccttgtcgctgtcggcccacgccagctacgctacccccatggcgttgccacgctaggcagtggctagtgggggtggtcatggtgagtggtgaccggcctgcttgtgcatgtggcgcggagcggaggaggacagcgagacgcgcacgacgaacccgtgagtgccttggcagtttttgcacgctttgcgcgcgcaaaggcacggttggtgcacatttgttggttgggccgtttggcccccctttgccgtgtcctcctcccatcatcgcgagcaagtgatgaacggttttgttttcgtgtttggggagcgctttgtttatggactctggtattagcggatagcggttccatcatgtaattcatgtcaaaaaaaaaagatcgtctgatcgatcttggagaaagaactgtaatttagatcaacatcaatcacatctgtgtacagtctcagtgttgttgctctgaacttgtataattttctgtttgctcagttgaaggtaaatgcagttggaggtgaggtctctttttaaaaaaaaaaaaaaanaaaagaaa

SEQ ID NO: 265913 - DNA, 466 bp, Zea mays
cgccggatacggccgcaaggactgcgtcgcgctcctgctcgagagcggcgccgccgtgacgctgcagaacctggacgggaagacgcccatcgacgtggccaagctcaacaaccaggatgacgtcctcaagctgctggagaagcacgccttcgtatagacgtcccacgccgccggccggcccgtcttgctcgtctgctcttgtcgccgctgcggccacgtcgcttgcctctgctactgctgctgccgccgccgccattaatgctttgttgatttctctcctggtctagacaacgcaggttccttcatcacttcactgttgagtatttgcattgggtgtgtatgtatcggattttgctttgcgtgatcacggtatcatatttatttgtcggactcctcgttcatcaggtggaggttttcgtaatgaataaggaagaaatttccatttcaccgtccaaaaaacatgaac

SEQ ID NO: 265914 - DNA, 1731 bp, Zea mays
cgtctgtaactgcaacgctaccacctcgactcgcccctgctagcagcatccgggaagctgccctgccactgccaggctgccacaccgaggtgctcccttgactccctctcctctcctcttctcgcgcacgtggtctgtgcccgtacgcggcggcgctgccgctcaccagaccggccgccgccacgtctgcttccgcgcctccccgcctcctcaccgtccgcccccttttacctgcctgatcattttattataaatgtggggcgagagaactcatcataagcactggcatcaaggtcatggtacctcggggaattccaacaacaaaaagcatgataagcggcagccaaaatttataccagacaattatagctccgtcgatgaggttactactgctctgcgagaagctggcctcgaatcgtcaaatctaatcctcggtattgatttcaccaaaagcaatgagtggtcaggcaggcattcctttagaagaaaatctctgcatgccattaatggcaccccaaatccatatgaacaagctatctctataatcgggcgaacgctgtcaccttttgacgatgataacttgataccatgttttggatttggcgatgcttctacacatgatcattctgtgttcagtttctacccagagaaccgaccctgtcgtggctttgaggaggttcttgtaaggtatcgacagattgtaccacatttgaacctttcaggaccaacttcttttgcacctcttatttatgcagcgatttctgttgttgaaaacagtaattggcagtaccatgtcctcgtgatcatagctgatggacaggtgactgccgcgaatataaatgatggaagattaagtccacaggaacaagcaactatacaagcaattgtcgatgctagctactatcctctttcaatagtaatggttggggtgggtgatggaccatgggatgcgatgcagcattttgatgactgtatccctgaaagagcttttgacaattttcagtttgtgaacttcactggtattatgtcaacaagtaaggatatgtcaaagaaggaggctgcatttgcccttgcagctcttatggaaataccttctcagtataaagcaacgcaaggcctccgacctccagaaaagcaagcacaaaggattggctctcctaggattcttcctcctccaaataaagttcttgaaaatgataatgccgccgccgctgcttcgcaccctcctcaaactgcaagctcgaaatcaactggtattggcaaaagtgctgctgacgagcaggtatgccccatatgtctaaccaatccaaaggacatggcttttcagtgtggtcatctgacatgtaaggaatgtggcccaacactatcaacgtgcccattgtgccgcgctctaatcaccatgcgtgtgaggctctactcctaagtcggttggtgtctggagggatgggaccaaacagaaaggagcaagaactttggggcgcaaggactgcgctacgatcttgagatatggtccatatggatgtcatgataacgatgcatgtacagaaaccttgtccgtgcctattcagtaatgtcgttgatgagtatcttccatcaatcacatgtaaaatttctaatgttatcttgtattagtagcaggggattgcttgttgagtggaataccaccagttgttcagcaacagatagtaaactccatgtgcatttggaagtcacttttgtgatttgtgtccc

SEQ ID NO: 265915 - DNA, 846 bp, Zea mays
ttctacgcgtccgcccagcccggccctgcgagcgagaccaccccacccattcactcgcctgcgctccctcgccgccccagttccccaccccctgctcacccacccgtcccctcctgctcgcccatggctcccatcgctgtcggcgacgccctccccgacggccagctcgggtggttcgacgagaacgaccagctgcagcaggtctccgtccacgcgctcgccgccggcaagaaggtcatcctcttcggcgtccccggcgccttcaccccgacctgcagcaaccagcatgtgccaggcttcatcacacaggctgagcagctcaaagccaagggtgtagacgagatcctgcttatcagcgttaacgaccccttcgtcatgaaggcgtgggcgaagacctaccccgagaacaagcacgtgaagttcctcgccgacggatctggagcgtacaccaaggcgctcgacctcgagctcgatctcacggacaaagggctgggcgtgcgctcgaagaggttcgctctcctggccgacgacctcacggtcaccgtcgcaaacatcgaggaaggcgggcagttcacgatctccggcgctgaggagatcctgaaggcgctttagaagctccgtctcctctagaagccgcagcaacgatcggtctatagtttgaactcgcctttgaataacttgtcgttgggcaaggtctagttcggtgttgtgtatggaacggtcgtcactgagtcatgcacgatttggtatccgtgttgtttatgttcaccggtttgaggaactctctgatccgccgtgacacaaagttgatcctgagagaacgaccgagtattttttttttctgcc

SEQ ID NO: 265916 - DNA, 1031 bp, Zea mays
cagtcaagatccaacagctagagctgtcagtgatataatcaagccaattttctagcagcattactaaagcagcagcatgtgtccttttctgtattcggtggttgatatttaataatacacatagtactgtattattgcactcggcttgtacatacgtacggccggtacacacgatggtacatacggcgagcacgttacgtgaacacggccattattttagttattactaggctgacacgcacgtctcagcgctcaccactttattccgtacacacaaataacgactacggtcacacggtcgccgcagcagcagcactcactcgcacacgtacgcctcctgcctgcttgcactttattatgtagcactaggattcgtgtgcgggtgcacgtgtgcgaagcgagactgagggtgttgttttgattcgtttcggtcgcttcacttccacttgttgaacttgccgccgccgctcttgtgcttgccgccgccgaacgcgccgtgcttgccgccgccgtagatgccgtggtggccgccgccgccgccgtagctgttgtggctggtgtggtacgaccccgtgtgcccgtagtgcgccgagtgcgcggggtaggtggcgggaggagggtacccgtggccgccgtgcgggtgagggtacgcgccgtgcggatgagggtacgcgccggcggcggcgggaggagggtacccgtggccgccgccgtagccgccattcccatggccgtagccgtttccatggccatggccgtagccgcttccatggccatggccgccgccgccgtggacgaggttggacacgaagcccttcacgccgccgttgtggccgtagtgctgcccgtgcatgtcgtgtcctccgcccatgttgctctcgtggtcaggtcaggtaccgagagtgagggatgttagctgctgcctgtgccctcctccgctggccgcccgcggctgctgctgcaacgaaggaggatagctgccccgaatttataatgcctatcgtggtgctgcgaatccgcacacgtatcac

SEQ ID NO: 265917 - DNA, 1093 bp, Zea mays
ccgggtttttcccgttacgagtttttaaaaaaaagccccttgaatttaattttgggggcccttttggagggttttaaatttcctttcacgggtaattaaggttgaaaccttttggggggcccccccttttttttttttttttttttttttttttttttttttttttttttttttttttttttttttttttttttttttttttttttttttttttttttttttttttttttttttttttttttttttttttttttttttttttttttttttttcaaagtgtgagatttaataatacacatagtactgtattattacactcggcttgtacatacggcgagcacgttacatgaacacggccattattttagttattactaggctgacacgcacgtctcagcgctcaccactttattccgtacacacaaataacgactacggtcacacggtcgtcgcagcagcagcagcactcactcgcacacgtacgcctcctgcctgcttgcactttattatgtagcactaggattcgtgtgcgggtgcacgtgtgcgaagcgagactgaggggtgttgtcttgattcgtttcggtcgcttcacttccacttgttgaacttgccgccaccgctcttgcggttgccgccgccgaacatgccgccgccgcgcttgtgcttgccgccgccgccgtagatgccgtggtggccgccgccgccgccgtagctgttgtggctggtgtggtacgaccccgtgtgcccgtagtgcgccgagtgcgcggggtaggtggcgggcgggtaggcgccgtgcgggtgagggtacgcgccgccggcggcgggaggagggtacccgtggccgccgccgtagccgccattcccatggccgtagccgtttccatggccatggccgtagccgcttccatggccatggccgccgccgccgtggacgaggttggacacgaagcccttcacgccgccgttgtgcccgtagtgctgcccgtgcatgtcgtgtcctccgcccatgttgctctcgtggtcaggtcaggtaccgagagtgagagggatgctagctgctgcctgtgcggacgcgtgggcggacgcgtgggct

SEQ ID NO: 265918 - DNA, 446 bp, Zea mays
atttggattgttcagtcaagatccaacagctagagctgtcagtgataaaatcaagccaattttctagcagcattactaaagcagcagcatgtgtccaaaactgtattcggtggtgtgttccagcagtttatcacagggttggcatacccccactgcttgcactggctgaggcaacggctgatagtgcaccccggcatatgcgtgcacctctctacacaaaagttttttttgaaataaaaaaaactagtcaataatgacaataccaatatccaatgcatacaatcttttagaaactaaataaatatggttagagtgggcatgatgcacatgtatagctaccatcatttcgtccgtgcacagggcagggtgtcaacacgatggccatgcccatgaccacgatggccatcaggaagagagccctagtgtcattactcttgagaagcgcc

SEQ ID NO: 265919 - DNA, 631 bp, Zea mays
ctcttttttccttttttcttttttaaccagggtgtgaatagaatgaataaaatatggcacagcaggtttaagttagccagcagctgctgtacacggggggtgctacaaatgaattaatatgtatattaaataaacaaaacaaaataaaacaaaaaaacaaatccggagcggtggttagatgatctgcaacagaacggggtcagggcgtctaccctacaagctcatcgaactctgctaaaccctacgagtgtacttccagcgcggtggcacggcgaagccgcagtccgaacaccttagaggaagctcaaagcgacatcgtctcgggcttctcggcagcggacacaaggctccagctcgattcgtcccgcatcacctctgtacagtgtgcattggcatgggaaaaaaaattctgcggttattgaaacagcttctgataaacctggtagcctggcctcttccctgtgtgttgggcgctgacatgcatgggattgggagcgttccatgaatcttgggttcatgataacagcatctgaactaagagatcatctgcggcttctcagatgcacacgggcccctgctcttcactcggtcccttcagacggggtctcccaactaccaggatgtgtctcgc

SEQ ID NO: 265920 - DNA, 803 bp, Zea mays
cacccgtccgcccacgcgtccggggggacttcgggaagctgacggactgcatggactacgcgacggggcacgcggcgtcgccctcgtccacctgctgcggcgacgccggcgacacggagaaggcgcgccccgagtgcctctgctacatcatccagcagacgcacacggggcgcaaccaggtgcagtcgctcggactgcgcttcgaccgactcatggcgctccccgccgcctgcaacctccccaactccaacgtctcgctctgcatcaccctgctgaacctgaagccgggctctgcggactacgccctcttcgccaacgcctccaagatcacgccgtcagccggcggcaaccctgcgagcgacagcgccgcgggcagcggcgtcaagctccgggctggggtcagcggcggcgtcgcgctcgccgtggtctccgcgatcgcctcgtcactcttctgatggaccgacctcctctcaaaggagcagcggcggtttttttttaccctcctgtggattcgttctcgtgctgcgttccgctagcccatgtctactctgtactatctcataaaaaaaaatagatccagctgagacgttgttccctccctctttccctgtaccgtgtttcatggtgacttgtgacaatggatggtttctccttgtgcgtcgccatttacaagcttttatgtttgtctgtctgtatgtatgttctggatgaacggagtttcagcgcagtaaacaattcacataacctagctgatgtgttttccgttttaaaaaatgcctttttcaaaatttggtcaattagct

SEQ ID NO: 265921 - DNA, 963 bp, Zea mays
tgctcctgtactcccagctcctttgccgagcaagggcccgccgccgttagatcccgtgccggagctccaaggtagcaacgagactgacgtgactgatgctggagcaggagaagaaaccgaggagggtatgcacgagaacagggacgagatcaacgcgctcctggacaccgacaggcagtctggtggcgcagccgtgagcgtggagtcggtggccagcgctggcgctggcgctggcgctgcgccgccgccggcagccaagaagagaaggctcagctcctgcaccgacaagtccgtcgttgacacggccagttcagcagcaaggcctcctgagcgttccatggagcaggagcagagggttgaacttgcgaacgaccgcgacgcgcagtcgtgctgcgttggggaggtggaaagcgggcgcaggtttgctctgggggaggcggaagcggaagcggcagagggcgacagccccgacgagcagaggcggaggagggagaggatccaggagactgttgccgcgctcaggaacatggtccccgggggcatcgcgaaagacgccgcggctgttctggacgaagcgatctgctacttgcagtacctgaagctgaaagtgaagacgctgggagctgtctccctctagctaagcctatctagccctctctcctcgtcgtggtggctttgttgtcgaaggccgaagccactggcttctggtgagaggagagctagcctatatcacccatctgttcagttcagtcccagaggagctcggatcttctcctacccgactcactgtcggtggctgcatcacccatcttcctcatcgtgggttggtatgcaaaagctagaaacatctttccgctgagcgtgatccaaagcgaagcccccattccatgcaaagcgctgggtcgtgccgtgcgtggggtggctcctgctttatatacgcgttgagctcctgctttggctgat

SEQ ID NO: 265922 - DNA, 339 bp, Zea mays
agctgtctccctctagcgcctctctcctcgtcgtggctttgttgtcgaaggccgaagccactggcttctggtgagaggagaaacatctgttcagttcagtcccagaggagctcggatcttctcctacccgactcactgtcggtggctgcacatcacccatcttcctcatcgtgggttggtatgcaaaagctagaaacatctttccgctgagcgtgatccaaagcgaagccccattccatgcaaagcgctgggtcgtcccgtgcgtgtggtggctcctgctttatatacgcgttgtgctccggctttggctgatgttgctttggtagttatatataatag

SEQ ID NO: 265923 - DNA, 594 bp, Zea mays
cgtccacccacgcgtccgcccacgcgtccgcccacgcgtccgcccacgcgtccggatcggagggccgccctttttttttttttttatttctacttaatgaataggcagtgcggttgccatttatatatttttctaaaaaaaacttaggtcatgcatggtaaacatatttggcatagctttgtttctccttgtgtataactacggattccttaaacttcgcctggatgaatggacaggggagcagaaggttcagtacagtgacataccagatgacatcgagccagaagagattaggccgatgggaaactatgcagtttctataacttggcctgatggatttagtcagatagcaccttatgaccaattggaaatgctggagcggttggtggaggctccgagtccagcagcagcgtctgcagtggcctcgtcatgatacagcagaaagaatgttcagttagcaaggggcaagaaggccgacttttagctcccagaaaatttatagctctgctacaaattttgaaagaattttacagtactgtagaaccatgctcattgaattttaaaaaaaggcagcagctttcgttcctcttaaaa

SEQ ID NO: 265924 - DNA, 352 bp, Zea mays
gcagctttcggcttccggagatactggaattcctgaggttgtggctgatccgcaaggggatgtggctaatacatttcagaatcttggggcatgtgttgttcaacagtgtgctaaaatcaggcaacaagtttctacagcggtgtcctacgatagatccattaaagcaatcagagtgaaagtgccagattcagacgaagagttcttgctgcatccagcaacagttagacggaatgaccgatccgctcaaagcgtggatgaatggacaggggagcagaaggttcagtacagtgacataccagatgacattgagccagaagagattaggccgatgggaaactatgcagtttctata

SEQ ID NO: 265925 - DNA, 717 bp, Zea mays
gtccggaattcccgggtcgacgcacgcgtccgctcatgtgagcactagggttgcaggaacaataggatacctggctcctgaatacgctgtgagggggcaagtgacgaagaaatcggatatctatagtttcggcgttttgctactggaaattgttgctggtagatgtaactacaacagtagattgcctcagggagaccagtttctgcttgagaagacatgggcatactacgtgcagggaaagctagagaaggtcatagacgccgaagcaggggaggacctgaacgtcgaggaggcatgccgtttcttgaaggttggcctactatgcgcccaagacgcgatgaagctgcgtccgaacatggccagcgtcgtcctgatgctgataggagagaagggaatctccgtggacaggatcaccaagccaaccgtgatcggtgacccgtacctcgaccggaggccaagcaacgcagactctaccccgatgaagtccttcgccacgaccgaagctttaacgtcatcaaaggcaaacacggagtggtctctgtgatggggggaaaaaacgtcatcatcgatggagatttgtttttgtggatgctgcagttgccaaacaaataccgcatcgcttctgttgattatgtttgtttgttatttttgtgtgtgtgtatatatacttgaaatggaaccccgggagtgaaacgaggattgaatatgcttttcccc

SEQ ID NO: 265926 - DNA, 396 bp, Zea mays
tacttttcacgtttgcgcgcactgagttctctttggcttgctaggccacgagagtaacatgacccccgttggggtcactcgatgaactgatctgtgaatgtgggactgctggctgcaaactcgcaaagcatttgcagatgactggaggatcagtcctctctgtacaagttgtattaacatcttctggtctcatattgtgctccagtgttgtacaatttagggaaaagcttggattaacttgtaagttatcatgaatttgttattggcatattggacgattgtattagccataaaaatagaagtgcataagtgctggaagcctggaaggatatccagaatctatattggttgggaacgagcagcaaaaaattgttatagattgttatgttgctttgt

SEQ ID NO: 265927 - DNA, 704 bp, Zea mays
  unsure (1)..(704): unsure at all n locations
gtccggaattcccgggtcgacccactcgtccgtctgaacaaattgatgaagagacgagcctctaatttcaagggagctgatcgattgactcgtctggaaatttttcttcttggtgctgttgccaaacttggtgcaaccgtcgttacgtatccccttctagttgttaaggcaagacttcaggcaaaggacatgattaacgatgacaagaggcatcgctacaaaggtacacttgatgcgttcacaaagatggtacgatatgagggtctgtcagggatgtacaaaggaatgggcacaaaaattgtgcaaagtgtttttgcttctgctttgctttttatgattaaggaggagctggtgaagggtgctcgactattggtaactggtaacactagtctggttaagaaactaccatcaaagtcatcaagatgaactacgggcatcgcaagcgttagtatatcatcctaaaaagccatttattatccgcataaaccgtaaacaaggtcgacaagctatagagctcgcctctgctttggatatgtcaactgtaggttacacaatagccagtatgattcacgtagggaccaaagactatgttggatagatatttgtatcattcatgtaaaatgtatcgtggaagatcgaaacagaagaaaataaataagtatgataatttgaacttcggccggaaaaaaaaaaaaaaaaanaaa

SEQ ID NO: 265928 - DNA, 1448 bp, Zea mays
cccacgcgtccgcccacgcgtccgcggactcgtgggcggcgcacatgctcgctggggggctcatcggcttcgtctggatccagtccggctggatgggccacgactcgggccaccaccgcatcaccggccatccgctcctcgaccgcgtcgtgcaggtgctctccgggaactgcctcaccggcctcagcatcgcctggtggaagtgtaaccacaacacgcaccacatcgcctgcaacagcctggaccatgacccggacctccagcacatgccgctcttcgctgtctcccccaagctgttcggcaacatatggtcctacttctaccagcggaccctggccttcgacgccgcctcgaaattcttcatcagctaccagcactggaccttctacccggtaatgtgcatcgccaggataaatcttctcgcgcagtccgccctgttcgttctcacggagaagagggtgccgcagcggttgcttgagatcgcgggggtcgccacattctgggcttggtacccgttgctggtggcttccctgccgaattggtgggagagggtcgcgtttgtgcttttcagcttcaccatctgcgggattcagcacgtccaattctgcctgaaccacttctcgtccgacgtgtatgtcgggccacccaagggcaatgactggtttgagaagcagacggcaggcacgctcgacatcctgtgctctccttggatggattggttccacggtggcctgcagttccagattgagcaccatctgtttccccgcctacctcggtgccaccttcggaaggttgcgccggccgtccgcgacctttgcaagaagcatgggctcacctattccgcagcctccttctgggacgcaaatgtgcttacatggaagacactcagggctgccgcattgcaggccaggaccgctacaagtggtggtgctccgaagaatttggtatgggaggctgtgaacacccatggataaatgggatgaagatacgggctaatggcaacttctggtgttcagcttggtgcccatgtgattgtctggatgcctttcagttatttagagatattgatcattcaacctgcctgagtcaggttggaattttcgtgttgacaagtggctgtctatccagttggagagttcatgcttcaatagtctggttgttcacgggatgttctgttctccctatcacggtaactatatgatgatgatccttgctttaattcatgaacacttgtttcaagattatgtccattacattttgcttgcattgtcaagattgtggattcttggtgttcatgacgttgtaatgttaatgaacggctggtaacgccatgtggtactggtacccctgtattttcagttgctgtggcaccttggctctctctttgaaaaaccagtatgtatatgacaatgatcaatttatccatattcctacttcattcccaaaaa

SEQ ID NO: 265929 - DNA, 699 bp, Zea mays
ccttcggaaggttgcgccggcggtgcgtgacctttgcaagaagcatgggctgacctattccgcagcctccttctgggacgcaaatgtgcttacatggaagacactcagggctgccgcattgcaggccaggagcgccacaggcggcggcggcggcgctccgaagaatttggtctgggaggcattgaacacccatggatgataaacgggacgaggatatggctgaggggaaggcaacttctggtgtttcagctttgtgccgacgcgattgtctggttgcttctaatctcagttgtttagattgtattggtcattgaacccgtccgagtcgggctggaatttttgtgttgacaagtgaccgtctatccagttgaagagttcatgcttcaattgtctgggttgttcgtcggctgttctattctgttcctcctatatcatggtaacgatatcgtgatccttgctctaagtcatggacctctgttttattaaggttatgtccattcgatttctcgctggcattgccaggattgtggatgcttttttatgttcatgatgttgtaagcttaatgaacggctggtaatgttatatgtagtaccccccccccctgtaatctcagttgctgtggcagctttgactctctttggaatactagtatgtactccgtatatgccaatgatcaattcatccatattcctacagcc

SEQ ID NO: 265930 - DNA, 837 bp, Zea mays
ctcttcaaggaatcgttctccaatatctacactgccaacagccttcagaagccttggtacctggtccttggtaaccatgactacacgggaaacgcgctcgcgcagctcgaccctgccattcgcaaagtggatagccggtacaccgccattgccaagtccttcattgtcaactcaggggttgcggattttttcctcgtcgacacaacgccgttcattgtccactactggaacaacaccaagttcgattggagaggcgtcgctcctcgagacacctacatcgcgaatctcctcaaggacttgaagtgtgcactgacagcgtccaaggctccctggaagatcgtcgtgggtcaccaccccatcagcagcgcctgcgggcatgggaacaacactgagctggaggagttgcttctcccggtcctcaggacacacggggttgacatgtacttgaatggccatgaccactgccttaagcgcgtcagcagcagagacagtcgtcttcagctactaaccagcggcggcgggtccaaggcatgggctggcaagttcaagcccaccctcgacaaagtggagttcctctacgacggccaggggttcatgtcgatgcgcctgagcaggacggaggcccgcctcgcgttcttcgacgtcgctggcagcgtcctgcactgctggaccatgcatgcccaaaaattaacgacgacgacgactgctgctgcagctaggcactaaagctttgctgggtacgatgagttgatgatgcaattaattatttggttttgtcgtcttttcgtgcgtgagagggaagcaatcataattaattgctgctgcttcaaaaaatat

SEQ ID NO: 265931 - DNA, 1214 bp, Zea mays
ccggaattcccgggtcgacccacgcgttcgcccacgcgttcgctgtgacccagacaagcctgtagtgcttgaacgtatggaatttcctgatcctgtgattaaggttgctattgaacccaagaccaaagctgatgccgacaaaatggctactgggttaatcaagcttgctcaagaagacccgtcattccacttctctagagacgaggaaaccaaccagactgttattgaaggaatgggagaactgcatcttgatatcattgtagacagactaaagaaggagttcaaggttgaagcaaacgttggaagctcacaaagtaactaccgggaaagtatttccaaagttgcggaaatacaatatgtccacaaaaagcaatctggtggatctgggcagtttgcagacattattgtgcgttttgaacctttggaagctggaagtgggtatgagttcaagagtgaaatcaagggaggggcagtgcccaaagaatatgtaccaggggtgatgaaaggattggaagaaagcttacccaatggtgtcctcgccggttacccagttgtggacttccgggctgtgctggttgatggctcatatcacgatgtggattcaagtgtcttagcattccaaattgcagccagaggagccttccgtgagggaatgaggaaagctggtccaaggcttctagagcctataatgaaagttgaagtgataactcctgaagagcatctgggtgatgttattggtgatttgaactctagaagaggacaggtcaacagcttcggggataagcctggtggactcaaggtggttgattcttttgtgccacttgctgagatgttccaatacgtcagcaccctccggggcatgaccaaggggcgagcgtcctacacgatgcagctcgccaagtttgacgtcgtcccacagcacatccagaaccagatctccgtggcaaaaacagaggaagctgctgcttagttttggttttccgtagatatatccatacagcaacaggagagcaggttgataggaaggacatcaaggtgtatgtagctttgtagtgtaaatctcttaaggcttgttcggatgattggaggggattgatatggattgagagagattttaatttactatggattgaaacttcctcaattcatatggattggactagaaccgaacatggtctaagggagcattatttgccattgattttgcacctgat

SEQ ID NO: 265932 - DNA, 458 bp, Zea mays
agggcccatatccgatgcaaaaaaaattgcgctgacgaaattgaaggattccggtggccccaagaagcggagagatgtgggagatgaccatgaagaggttgaagatcattcttctcattctagaagaccgaaatccttgaagagatcaaccagccgatgaaggctctggagcatgtctggactgcctcgtttcgtgcaagtcctttgtggttcagcgcagatccaccctgtggtggtttggagtgatgctttgcctatttatactagggccagttaagacgttcacttgacaccattccttgcgttgaaagcaagtctcccccaattttgtcatcccgacccacttgaccccgaacatgtagacgtaggtgttgtccttattgagcaagtgccacagctaatactaaaagggcggccggtttaaaggatccaagcttacttacgcgtgcatgctacgt

SEQ ID NO: 265933 - DNA, 758 bp, Zea mays
cacgcaaaaagcgctcagcagctcctgcgcgccccctttcccccgtcggccgatttcgtttatctcctcaatcctggcttgaatccgtgatacgtcgaggcggcgaagagccgaatcgtgccgcaccgtagaggaggctcaggcttctgcagggttttggagcggggcgatggaggcggcgagcaacggtgggctgctgtaccacgaggtgcaggaggggaagctctgcgccgtgcactgcgtcaacaccactctgcagggccccttcttctccgagttcgacctcgccgcgctcgccgccgacctcgaccagcgggagcgcctggtgatgctcgagggctcccgaagccccggcgcggacaacgctaccgcaggggacttcttcgccgagggcgaggggtcccacaacgtctccctcggcggagatttcagcatccaggttttgcagaaggcgctggaggtttgggacctccaggttatcccccttgattccccagctgcagggtcgtcccaatttgaccctgagcaggaggttgctttcatttgccaccttcagacactggtttagcatcatgaaggtgaatgggagtggcataacttcaatagtctgacccagctcctgagcacctgtcatagttttacctctcacttcattgacaccctgaagcttcaggctggagtatctttgcagtcagaggcaattgtcaaaggagtgccctatggaactgaaggctctaacagttttgtgcaatggctta

SEQ ID NO: 265934 - DNA, 785 bp, Zea mays
atcgtgttgtggccggagagacgagaggactccagagagattccgacaccgctgggctcagatgccgccgccgacgccgccgccgcagcagcagcagcagcagtccggcatgactctctgccgcctccccacggccactcttggccttcccctttctctcccctgtttgctacctcgttcccgcccccgcctgtgcttcgccgcacgtcatgccagggccgtcgccgccagggcttcctcatcctctccatcaccggactcttcattcggttcgcggatggaggagtccgtcaagaagacggtggccgacaaccccgttgtcatctactccaagtcatggtgctcatattgcatggaggtgaaggcgctcttcaagcggatcggtgtgcagccccatgttatcgagcttgaccatctcggtgctcaaggaccacaaatacagaaggtattagagaggctgactggacagtctactgttcctaatgttttcatcggtggaaagcatgttggtggctgtacagatactgtgaagctgtatcgcaagggggagctagctagcatgctgtccggcctggatatcaacattaacaactcatgacaagtttgaccatgttttgcaagtatagttttgatgtttgagagacttgggcagtcatgtattgagtttttttaacttatgcagattctttatgtctgcaagaaaaaaaaaagctgtgtcatttacacatttttgtttggtactctgattaaatcattgaatttgaccactgtatgccaattgctag

SEQ ID NO: 265935 - DNA, 1162 bp, Zea mays
cccacgcatccagagagagagcggcagaggcgcacagcgcaaccgagcgagagagagaggacggcgacggcggagatgatggggtggggagaggaggtggtggctctgtccctgcgaggctacggctatggcaacgaggaggacgaccggccggagaagccgcggcggtacggggtgaccgagatgcggagccccttctactccttccgccccgcaaaccaggcgctccaggaaatattggattctcttagtccattcgttgatggtttgaagttctctggcggatgccatagtttgatgggaaaggagttggttagagagatcactgatctagcacacaggcatgacatttatgtgagcacaggtgattgggcagagcatttgctgcgccaaggaccctcttctttcaagcaatatgtagaggaatgcaaggccttagggtttgacacaattgagctgaatgctgggtctctcaacctccctgaagaggctctgttgagactagtccgcctcatcaagagtagtggtttaagggcaaagccaatgttttcggtgaagtttgacagttctgatattcctgcgtctggtgatagggcctttggggcttacatagctccagtcaaagggaagacctcaggaagagttgaagatggcttgccatttcaacttcattgtacaaactgtaattgaaagagttgaagatgttgacctgctgattaggagggcagagagatgcttggaagcaggcgctgatatgatcatgatcgatgctgatgatgtttgccagcgtgctgaatctctgaggacagacatcatcgccaagattgtaggccggctcgggcttgataaaaccatgtttgaagcttccaactccaacacctcggagtggttcgtcagacgttatggcccaagggtaaatctctttgttgaacactctgacgtgatgaatctggagcgcctccggggcttcaacatgcgcagaagcaactcggcctcccgttttgcctcgccgttcttacacatctcaggaaggggaatgggcattagcccattagatcacgaagatacttctacatgttctcaccctcgcagagcttgttatggcctagagatgtaaccgcctttgttaatgcctccatgtagcccccagcgagcaacgcat

SEQ ID NO: 265936 - DNA, 729 bp, Zea mays
gccaatgttttcggtgaagtttgacagttctgatattcctgcgtctggtgataggggctttggggcttacatagctgcagtcaatgggaagacctcagaaagagttgaagatgttgacctgctgattaggagggcagagagatgcttggaagcaggcgctgatatgatcatgatcgatgctgatgatgtttgccagcgtgctgaatctctgaggacagacatcatcgccaagattgtaggccggctcgggcttgataaaaccatgtttgaagcttccaactccaacacctcggagtggttcgtcagacgttatggcccaagggtaaatctctttgttgaacactctgacgtgatgaatctggagcgcctccggggcttcaacatgcgcagaagcaactcggcctcccgttttgcctcgccgttcttcctgatctaatgggctaatggccattccccttcctgagatgtgtaagatacttctacatgttctcaccctcgcagagcttgttatggcctagagatgtaaccgcctttgttaatgcctcgatgtagcccccagcgagcagcgcatagcacctgttatgttgtcagcgtcgctactgataatcggttctgttggtcaatgctactataataatcggttgtggtgcaagtaatgtgaatagtgtaagagtgttttgtgttccattgcatcggcatcgagcgtacatcttaatcggccaactgaac

SEQ ID NO: 265937 - DNA, 498 bp, Zea mays
ttcccgggtcgaccgcacgcgtccgcccacgcgtccgccagaccacgcacgccggcagagaaaaaccagaattctccaagcaatcctatcgccaacccggccacggatcggggctgccgtctgttgccgccggcgctggcgccgacgccgatgggctccgccgatcgcagtaagatcgacgggatcgtggtgccggagaaaggcgccaggagctgcgtcgaatgccgcgccaccaccacgcccatgtggcgcagtggcccgaccgggcccaggtcactttgcaacgcttgcgggattcggtaccgaaagaagaggaggcaagagcttggcctagaccacaacaagcagcagcagcagcaacaacaaaataatggcgaggcgaagactggagtaaaagacagctctagcaacagcagtagcaagcgggagcagcaactttcacgtggtgcagaaacggaggctcctaatggaagtgaggaggctgctctgctgctgatg

SEQ ID NO: 265938 - DNA, 859 bp, Zea mays
caggagcttgacgcaaaggggagccgtagcctgtagagtgcggggagcaggagccggcggagcatggcgatcactctttcgttatcctctcccctcttcctcggagctccggccagaggcaagggttacacgagtagagttcgttgtcgggagcagcagcgacgaacgacaatagtatctatgcttggaaggaaatcaacggctagagcaactgttgtcccagaccccgactataggttaccaatcgctatactgggattgctagtgcttttgcatatgccgacaatcttctcgctgctgcacctgtaggactgctggggcttcttcgtttggtccagactacaagagtgaggttcgtctttgataacgaggccctggaggtgaaggttggagagcagctgcaggagtcaggtgaaaatgtattcgtcggcggcaagaaccgttggaagtactcaacgttcgtaaactgggagctgtggtggccacagtttcctgtcttggtttacttcaaggagacccaaacgaagcccgaaggacagatccacttcttccctgtgatattcgatggtcgacaattgtacgatgtgatggtggagcgtgctgggccctcgaagacgagtggccctaaatagttgcagctgatcttcctaccgtcgttttgctccctcgggctccctcacatttaaattgtaaaaatggtaaaattatatacaaacggggttcgattccaaccacggttcttagctttaaacccatcttcatacgtacctaaccaacaaaaacacacatctatgtgttttatattttatattttgtatttaaacataaatataaatataaatcgtaacaatatatatat

SEQ ID NO: 265939 - DNA, 437 bp, Zea mays
gcgcccccgcgtccgcccacgcgtgcggtcgcctgtagagtgcggggagcaggagccggcggagccatggcgaccactctttcgttatcctctcccctcttcctcggagctccggccagagctagagatgtggttccgtacggagtgacttcggctagtgtatcactgatgactctaaatatgccaggcaagggttacacgagtagagttcgttgtcgggagcagcagcgacgaacgacaatagtatctatgcttggaaggaaatcaacggctagagcaactgttgtcccagaccccgactataggttaccaatcgctatacttgggattgctagtgcttttgcatatgccgacaatcttctcgctgctgcacctgtaggactgctggggcttcttcttttgttccagactacaagagtgaggaggtgaaggttgga

SEQ ID NO: 265940 - DNA, 1449 bp, Zea mays
cccacgcgtccgcttgatgagggaaataatgaatatgccactcatgcagaatttaatgaacagtcctgaactgatacgcagtataataatgaacaaccctcaaatgcgcgagctcattgatcgcaatccggatcttgctcatgtcctcaatgatccaagcatcatgcgccagacttttgaagcagttcggaatcctgaactcatgagggagatgatgcggaacacagacagagccatgagcaacattgaatcttctccagagggattcaacatgctccgtcgcatgtatgaaactgtccaagagccttttctgaatgcaacaacaatgggtagcgagggtgatcgaaattcgaatccattttctgctcttctaggaaatcaggggtctaaccaagcaagagactcagctgcaaatggaacaactagagcttcagaccccacatcagggtctccagctccaaatactaatccacttccgaatccttggggctcaaatgctggctctgcccaaggagcagcaagatcctctcctgctagcaatgttaggagtactacagcaagtggcctaggagggttgggttcagcagatttgggaagtacgcatggtgccagtggtggtggctctgatgctaccttgttgactcaagttttgcaaaacccaactatgatgcagatgatgcagaacattatgtctaatcctcagtccatgaatcagctgcttaatatgaatccaaatgtacgtaacatgatggaatccaatactcaaatgagagaaatgattcagaatccagaatttcttcgccagttaacatctcctgaaacattgcagcaattaatttcattccagcagtctttgatgtcacaacttggccaacaacaagctggacaggagcggacacaatcaggctctggtgcaggcaatgtcaacctcaacaccttgatgaacatgttcagcgggcttggtgctggtggtggcctaggtgttccaaatgctcctaatgtgccgccagaagaactgtacgccacacaattagctcagctccaagaaatgggtttctttgacacacaagagaacatccgagccttggccgctaccgctggaaatgttcatgctgcagtggagcgacttcttggaaatatgggctaatagaatatgatgatcataactgtactcagatattgtgatttttagttggcattgtgagaccatgtctggctcattggttttacacccgatggtgagaggcggcgtctagattttgtgttcaaggatgaataaagagtgtaccgggggaacctttcatatacatatggtctggtgtcatggttaaattgttgttgttggtacatttggttgctgtacatacatattgatcttttgctatcttatttgcagtgtacatggacaatgtcgtattctgtacaagagggagagggaatatgtagtgc

SEQ ID NO: 265941 - DNA, 524 bp, Zea mays
tgttagattctctcctgctagcaatattaggagtactacagcttgtggcctaggagggctgggttcagcagatttgggaagtacgcatggtgccagtggtggtggctctggtgctaccttcttgactcaagttcaccgtgcgggccgacctgggcgccaccgtcggggcgttcaaggcgatcgtcgccgacagctgcgacgtgccggcgccgcagcagcggctgatctacaagggccggatcttgaaggacgagcaaaccctagccagctacggtgtggagacagaccatacaatccacatggtacgtggtgctgcgccatcaccagcatccactgcacctgcagccaaccaagaacctaccactgctgctcctgccagttccccggcaacaggattgggtggcttgttgcaaagtctgggtactacaggcgctgctgctaacagtgaggggttgggtttgtttggatctgccccccctggattagaccaaatgcaacaacagctagctgaaaatccgaacttg

SEQ ID NO: 265942 - DNA, 669 bp, Zea mays
cggacgcgtgggcggacgcgtgggcggactcgtgggcggacgcgtggggtctcctgaaacattgcagcaattaatttcattccagcagtctttgatgtcacaacttggccaacaacaaactggacaggagcggacacaatcagcctctggtgcaggcaatgtgaacctcaacaccttgatgaacatgttcagtgggcttggtgctggtggtggcctaggtgttccaaatgctcctaatgtgccaccagaagaactgtatgcaacacaattagctcagctccaagaaatgggtttttttgacacacaggagaacatccgagccttggccgccaccgctggaaatgttcatgctgcagtggagcgacttcttggaaacatgggccaatagaatatgatgacgatcataactgtactcagatattgtgatttttagttggcattgtgagatcatgtctggctcattggttttacacccgagggtgagaggcggcgtctagattttgtgttcaaggatgaataaagagtgtaccgggggaacctttcatatacatatggtctggtgtcatggttaaattgttggtggtggtacatttgggtgctggtcatacatactggttctttggtattttaattgcagtggtccaacccacggggccggccacgcgtccg

SEQ ID NO: 265943 - DNA, 426 bp, Zea mays
gacgcgcgcgcgtgcggggtcgaccgccacctggccggcgggcggaggcacgtcgtgccggggcaggagcgcggctggaagaacgtcttcaaggtgcggcccagcgcggtaaccaggatcctcgtgcgcttcaagccgctcacagacgccgcgtcgccggaggagagccgcttccccttcgacgtcaccactggtccgggttacgtgtaccattgccacattttggaccacgaggacaacgagatgatgaggccgatgaagattgtgcgttgaacggtttccaggaagaaaaacatatattctatgaatgattccgtatcgcaaaagaaacgacatgtttactgtgtctttcccattaatgatttaagcaggaagaacttttagatgattgaacttttcagttaatatagcatttgtcgagtaaaa

SEQ ID NO: 265944 - DNA, 1698 bp, Zea mays
cccacgcgtccggaccagctccctggggtctcctactgcatcaccagccctcccccgtggcctgaagccgttcttcttgggttccaacattatctggtcatgcttggtaccactgtgatcataccaactgcacttgttccacaaatgggaggaaacaatgaggacaaagcagtggttatccagacattgctgttcgttgcaggtatcaacaccctcctgcagagtttctttggtaccatgttgcctgcagtgatcggcgggtcatacacctttgttctgcctaccatttcgatcatccttgctggacgttatgctaatgaacctaatccacatattaaatttctccgcatcatgcgtgggacacaaggtgcgttgattgtggcttcagccttacagattatagttggcttcagtggcctttggcgtaatgttgccaggtatctgagtccactttcagctgctcctttggtggcactagttggatttggactgtatgagctaggatttccatcggttgccaaatgtgttgagattggtctacctcaactcatccttcttgtgatctttacaatgtacctgccacatgctgttcacatgctgaagtctatcttcgatcgatttgctgtcctgttcactatccccatagtgtggctctatgcatatcttctcactgttggaggagcatacaggaatgcaccaccaaagactcaatttcattgccgcactgaccgttctggattaattggtggcgcaccctggataagagtaccatatccctttcagtggggtgctccaacttttgatgcgggtgaagctttcgcgatgatggcagcatcatttgttgctctcgtggagtccactggggccttcattgctgtctctaggtatgctagtgctacaccaatcccaccctctgttcttagccgtggtattggctggcagggcatcggtattcttctggatgggctatttgggactggaaatggatcttctgtatcagttgaaaatgctggtttgctagctttgacacgcgttggtagccgaagggtagtgcagatatcagctggtttcatgatattcttttctattctcgggaaattcggagctgtgttcgcctcaattcctgcacccatctttgcagctatgtattgtatcttctttgcttatgccggttctgctgggatcggcttccttcagttctgtaacctcaacacctttaggaccaagttcatccttgggttctcagttttcatgggcctttctgttcctcaatacttcaatgagtacacatctattgctggttatggtcctgttcacacacattcaagatggttcaacgatatagtgaatgtgatattctcgtccaaggcgtttgttgctggcttcgtggcatatttgctggacaacactattgacaggcatgaagcttcagtcaggagagaccgaggctaccattggtgggacaaattccggtcgtacaggaccgatacaagaagcgaggagttctattccctgccattcaatctgaataagttcttcccatcggtctgagcttttgctgtggttaatgtgagatgctcttgttactctggaactgcccaccccctgttctccggcggtggcaccgtgatctggattttctcggtacatgaaaaaattactgtatattaaaacccgctcagctcgggtttcacctca

SEQ ID NO: 265945 - DNA, 640 bp, Zea mays
  unsure (1)..(640): unsure at all n locations
cccacgcgtccgcccacgcgtccgcaacagcatcatcgatcgccgagcgtgcgtgctctagctctagcaatagcagcgaggagacggtcgaggatggatcagaacaacagcaacaggcagcagcagcaggcgccgccgccaccacccgcgggctacccgacggcaggcgcggagcagcagggaggcagcggcaggaagcagggacgccgggggaagacgacctcgcgcggggagaagggcttcatcgaaggatgcatcgcggcgctctgctgctgctggatctgcgagatgtgctgcgactaggcagcccccccttccctccgccgccaggctttgagcctttgacaggaacggagagatctgctccacccatagctgcagttgtggctgcacgtacttgttgagctgttgtgttgtgtccatctcggtactttttgatttgttattagctgtggtgatgatgcatgggctgccctgtcttctgcagctctagcattacactcactactacgtgtgcgtgttgtaccgttttgtattgagtggtgacttgaacgtggcgctggtgatttgtactaccttctatccatgcatactccttggtaccccaaaaaaaaaaaaaaaaaaaaaaaaaaaaaaanaa

SEQ ID NO: 265946 - DNA, 660 bp, Zea mays
  unsure (1)..(660): unsure at all n locations
ttttcgcgtccgcaaccacgttacgcaccatagaacatacccgtgagaagctaagacccggccgttgctcaccacagcatcatcgccgcgccgtgctagctcaaggatggagaacaacaggcagcagcagcaggcgccgccgccgccaggctacccgacggcggctgcaggcttggagcaggagcagggaggcaggaagggacgacgccgggagaagacgacctcgcgcggggataaaggcttcatcgaaggatgcatcgcggcgctctgctgctgctggatctgcgagatgtgctgcgactaggcacgcagctagcggtcagctagctctccgtctccggcggctatacatacgaaatacgatgagagagctagcctgccacagcttctgcttctgcttctgcaagagagatctgcttaaattattctatcgtccagagctgcagcaacacctgatatgtttgtttggggtgttattagtagggagagctagctcagctttattattgttaataataattctgtgctgtacgtagctatagcaagcatacgtatgtatacacgtatatgtatgtgttttaccgtgacttgaatgtttggaaatggccactttttttccaaaaaaaacaaaaaaaaaaaaaaaaaaaaaaaaaattaaan

SEQ ID NO: 265947 - DNA, 381 bp, Zea mays
gcatcatcgatcgccgagcgtgcgtgctctagctctagcaatagcagcgaggagacggtcgaggatggatcagaacaacagcaacaggcagcagcagcaggcgccgccgccaccacccgcgggtcagatcgatcgatcgatcgtcatctccgaataaatccgtgtggatggacggatcgacggacacatattgctgacatggcttgcttgcaggctacccgacggcaggcgcggagcagcagggaggcagcggcaggaagcagggacgccgggggaagacgacctcgcgcggggagaaggcttcatcgaaagatggtaaactatcaatcacaaacttaatgatccttcaatcgtccgtcggtccacccgtttctctgtcct

SEQ ID NO: 265948 - DNA, 416 bp, Zea mays
caggatgcatttttacaagagacatcaacaaggcaatcctgatcagtgatgcaatggagactggaactgtgcagatcaactctgcaccggctcgtgggcctgatcatttccccttccagggactgaaagacagtggcattgggtcccaggggataacaaacagcattaacatgatgaccaaggtgaagagcactgtcataaacctgccgtcaccatcctacaccatgggctgagatattcttgttaagtgttctatagctccatgagcaatgtagagagttaaatgtttcatagccacgtgagatttggacgctatttacacctcagttcttcctgcagaagatcttttgcagtttaaagaataaagtgcgttgaaagtaaaaaaaataaaaaagggcggcccgctcgcgatctag

SEQ ID NO: 265949 - DNA, 983 bp, Zea mays
cggaacagaagggatatggttcccgggctccggcgacgacgagaggtaggcataaatcttttgccaaatcaacaccagcaacagcaaagcgactacagagagtaggagatgcttactctccacaccattcagtcatgcccctcgctgcgcagatcctctctgttccggcgtgctctgctaggcaggaagagatctttcatttctgccagcagttctgaggatgccgaatccggcactcccccgccgcttggtggcgacaaacaccagcaggaggttcttgcacagatcgccatgcttcagacgcagaaggtgcgcatcacagacttcttggacgagcgctctgcttacctgaccaagttcgccaaggacgccgactcggagttcgacctgattgggcagaacgctatgaaagaacttgatgccgttggtgaccagatactggagaggctcgacagcaagatgcaagccttcgaggagacggctgaggtgcaacggcaagagatagaaatgaacgataaggtgttagaggacttcgaagactggatcgacaaggagaaaaacgaagggatgttcttcaaaagccttggcaaggtcaaacctcggaacaagatggacataaaggtgaaagccaaggtggaagcacagaaggtcaaagagattgcagaggagagtgcaggatcaaaaactcgtatgaacatctacctggggctgatggggatactcgggattacaattgcgaatgccatctttgcaacaccagaggtggagtggaggaaggttgctgctctgggtctgattttcattggtctggttgctcaggtcatctacgagcaggatatctcaccgccggaagctgagaagacagagaaaatagaagaataaaaaaggagttgcagacatatcggtagggtggtgtaatctcacacaggcaatgtaaactgtatatggtagcatgaatagatacaaggtttaatacttcaaaa

SEQ ID NO: 265950 - DNA, 1017 bp, Zea mays
ctgcagtggggctggagctggctggagcgctggatggcagcaaaaccatgggaaggccgcaatggggctgacaaggagagcaacattgaccggggatccgttaagagcatgagcttgaaccttggagagggtgagatcacaaaagctttcaaccgccgggactcaaagctagaaaagccatcgccgccaactccaagaccggcccgtccaacttccaggcattcccctttgacgccctctgctagagtggcaccgatacctgcgaggagaaaatctgtcacgcccaagaacgggctttcacaggtggacgatgacgcgaggagcgtgctcagtgtgcagtctgagcgaccaaggaggcacagcatagccacgacctcgaccgtgcgggacgacgagagcctcgcgagctccccgtcgctcccgagctacatggttcccacagaatctgcgagggccaaatctcgcacagcaacggccaatggcgcagagacgcctgagaaaggaggctctgctggaccagtcaagaagaggttgtctttccaaggtggagctgcggctgcctcaccgatgcgacggcattctggccctcccaaggtggagagcgctgtgaaggacattgctgcgccaccacagcctgaggccttggtagccaatggtggtggaagcaagtgacttgtattgacaagttccaggatgggggagcgggttatggtcttatggagggacatgtttcatccgtgaacagaagttaagagtggtgccggatctacgaatggtttgaattgttttcccgttacaaccacattgtttgctgtataagattccctgtacctgccagttggttccatttgttgttttctgtaaaacaaacatcaatttgtcactagaatctgtgatgcttgtatgtaaacaggtcctctatttatgtgagccatatatttcattttcagaaagaaaaaaaaaaaaaaaaaaaaaaaaaaaaaaaaaaacaaagggcggccgctcgcgatctagaac

SEQ ID NO: 265951 - DNA, 631 bp, Zea mays
acgatgacgcgaggagcgtgctcagtgtgcagtctgagcggccaagaaggcacagtatagccacctcgactgtgcgggacgacgagagcctcacgagctccccgtcgctcccaagatacatggttcccacagaatctgcaagggccaaatctcgcctccagggttcagcaacggccaatggcgcagagacacctgagaaaggaggctcgactggaccagccaagaagaggttatccttccagggtggaactgtgtctgcctcgccaatgcgacgacattctggtcctcccaaggtggagatcgcgccaccacaaccagaggccttggtagtcaatggtggaagcaagtgacacatatgtgatgagtaccaggatgagaaacggattatgaagatattagtttcattttcatccatgaatagaagttaaaagtggtatcatatctatgaatggtttcaattgtttttctgttacaaccacattatttgctatatacgattcacagtacctgccagttgattccattggttgtttctgtaaaacaaatatcaatttgtcactagaatctgtgatgtttgtatgtaaacaggtcctctatttatgtgagacatatatttcttttctttcaaaaa

SEQ ID NO: 265952 - DNA, 789 bp, Zea mays
ttcctttcgtccgcccaccatgattgaccaattcctggagggatcctatttaaggtatatattgttggtgaaacaatacaggtagtccgcaggttttcacttcctgatgttaatacgtatgacctgggaaacaatgacggtatctttcgattcccaagagtttcttgtgctacaaataatgcagaagatgcagatgttgacccttgtattgcagaacttcctccaaagccacttcttgagaaacttggccgggagcttcgacgccggctgggtcttagactgtttaacatagatatgattagagaacatggaagaaaggaccggtactatgtcattgacatcaactattttcctggatatggcaagatgccaggatatgagcacatattcactgacttcctgctaagcctcgtgcaaagcaagtacaagaggctaagtgggagctgaagcgtagagaagatttactttcgatggagactattaacagatgccagctagcctggccatattacagtggcagctagaaaggtcttccaggttgtacatagcaagggggtgggtcttagcatgaatgcggtgtttgggccggggccttgactgaaggcgcatagcagaactaagacaaaaaatgcagtgtttgggccggggcagtatctgatgaaaggttctggctccgtgcccagcctactgtgtaattcgtgtgaccagagtggccgacctgtgtaaatcgttttaccgagtgcacgacctgggcttctttagtttcaaaaacaaacaaacaaaaccttt

SEQ ID NO: 265953 - DNA, 475 bp, Zea mays
gacgtggacaggtaccctcccaaggcgtacgtctgatgggccagggccacgtcatgcggcatagcaattgtatgatctgatacgagttccgtcacgacgaaggaagaagggcgtgtgaggcagaaaattatacttgtatgtttttttcatttgttttttcttttgcttcgttttcttttctttttcccagtagattgccgtgagtagacagtgctggcttttggaattcagacgtgtatgtggcgtaaaatgaattccaagagctagcagtgccattctttctcttctcagcctaccctatttgttgtctagtccttttgtcttctctttggcgttctagacgcccgggaagtagaatggacagacgaacaccaccagtgtgcagttcacatgactagagagaactatcgaccaagtgtgaattactgattcaagtaaaaaaaaaaaaaaagggcggctgctcgcgatctagaac

SEQ ID NO: 265954 - DNA, 385 bp, Zea mays
  unsure (1)..(385): unsure at all n locations
gttatgatcggctccatactgttccaaagggacgagggtttctagctccagtagccatggactcgctctgtcaagttgcttcttgaccgggacagtcatgcggtcatgccacaggaaggtggtattaatgtataataactcagtcgaatcaattacaataactggagtttgttagggagtatagccccaggcatgcattcgtcaaaaggcgaagttatgttctacccctggcggttctgatacttgtgtttgctttgacactgcacttgaatttgttcatctgtaagtcagagatgagttatactatacaatcggccactgtcatatctggaattgcgacacggtgcagcagatgttaatactttggcttaaaaaaaaaaaaana

SEQ ID NO: 265955 - DNA, 443 bp, Zea mays
  unsure (1)..(443): unsure at all n locations
gccgttcgcccaaatccattgccgctcctgccccaacgacgcacgctctcacctctactgccatggcgctctcccaaccccttgttgccgctccctccacggcccctcgcccccggctcggcgtacttgcatctgcaggagcccgcccagcccctctctctggcgagcttgacccggcgtcgggccctggctgtcagctgtgtcaccagggttgtcctcctccgctgccactcgttggaccttgcccctgctgcgccgctggtagcttccctcgccctctcctgcctggcgctcgttctcgtctcccatgaacaagctcgtcctggcactagccctctccagctttgtgacactagcgccctcaagtcctatgccaacgcccccatcccctcccatcttcttncccacgctaagtcccatggctgctgtcctccaccccatgc

SEQ ID NO: 265956 - DNA, 506 bp, Zea mays
cccaacccttccggaattattagggctggaaaattgacaaacgggccctacacttggtttgatcttaatccactggttaaagctacagctggagagcgacgagcactagtcatatgcaaaggtgacaagcttgtgggggaagttagcagacttgtggtagcagaagcttgtatccaagctttagatattgaatccactgaaggacaaatatatgagattaactcagttaagggtgaagggcccggaactgacccagagaaatgggaggagctattcagatctgctcggtcagactagtggcattctgcaaagcgtagtaacgtaatgtaggaatatgcatcgtaatacaatgtaatccatagagtgcagccctaattcaatagtcactgaacagtagcgatcatgtagagaatatttggtttgtgtacatagtatgagcattcatatatgacgattatacctcctaaaagtgatagtttttgttggaaagtaaaatgttcaatgtt

SEQ ID NO: 265957 - DNA, 524 bp, Zea mays
acgcgtacgatccaagcgtggagaggataactgctgaaagcatataagtagtaagccccccccaagatgagtgctctctcctccgacttccctagagcctccggtagcccagccgagacagcgacgggttctccaccccatacggggatggagcgccagaagtatggaaataggataaggtagcggcgagacgagccgtttaaataggtgtcaagtggaagtgcagtgatgtatgcagctgaggcatcctaacgaacgaacgatttgaaccttgttcctacccgacctgatcaaatcgatcaggcccttgccatctatcttcattgttcaactctttgatgaaaaaaaaaaatgatatagaaaaaaaaaaaaaaaaaaaaaaaaaaaaaaaaaaaaaaaaaaaataaaaaaaaaaaaaaaaaaaataaaaataataaaaaaaataaaaaaaaaataaaaaaggggcgccctttttaaaggacccaagtttacttcccctgacatgcaactttataccttttttt

SEQ ID NO: 265958 - DNA, 438 bp, Zea mays
ctggacaagaaggtggtggatgtggccagggaggtggccaaggtggaggtgccatcataccgccgccatctggacgttgtggtggcctgtgaggatgacgacgacaatgatgtcgacgtcccacttgtgtccatttactttcggtaaagaggggctcacggcccgtttacatgttgatcctgtgcgatatttgtcaatgtttgtctcagaaggatcaagtgtataatttgcgattgcaaccctgaactagattgtgtttaagcacatactgatgatttcctgtgctgccatctgggtagagttggctgggaattgtcgctgaaatttggaccactgttatggaattcttgagcataacattatcatagctgttgcatgataccgtcgtcgctaaaaaaaaaaaaaaaaaagaaaaaaaaaaaaaaaaagaaaggccgc

SEQ ID NO: 265959 - DNA, 1459 bp, Zea mays
cttgtcgcgtgggcgccaaccccaccccgctccgcccgtgtaaaccaaaccccgcttcggcggcggcggcgactggcccacgagccttctcgaaccgacgcatccgccacccatgctgcgctgccacacgccaccgcaatgcgcccgcgcgccgctccgccaccacggaaggtgggagtcgcctccggcggcggcgcccgcggtggtagtgcggtgcgcgcggggtgcgccgcaggtgtccgggatcgaggcggcttcgccgggccacgcggctgtcacggcggcgttagctaaggcggaagggggtgacgcgcggcccagcctggccgagcggctgcggttggggaacctcctggaggacgggctatcgtacaaggagagtttcatcgtgcgctgctacgaggtggggatcaacaagacggccaccgttgagaccatcgccaatctcctccaggaggtaggatgtaaccatgcacaaagtgttgggttctccactgatggcttcgccacgaccactacaatgagaaaacttggacttatttgggtgacgaacagaatgcacattgagatctacaagtacccagcttggggtgatgttgttgagatcgaaacatggtgccaagaagatggaagaattggtacccgtcgtgattggatcctcaaggacctagctaatggtgaagttattggcagagctaccagcaagtgggtcatgatgaaccaaaatacacggagacttcagcgggtcagtgatgacgtgagggatgaggtgtttatgcactgtccaaaggctccaagattagcattcccagaggaaaataatggcagtttgaagaagattccgaatctttcagaccctgcagaatattcaagacttggactagtgccaagaagagctgacctggacatgaaccaacatgtcaataatgttacttacataggttgggtcctcgaaagtatacctcaagatataattgatacacacgagttacaaacaatcactctcgactacagaagggagtgtcaacaggatgatatagttgattctcttacttgcatagaggaaggagaggagaaaagcatgaacggctctgcttctgcagcagcgcctcacaaagaagagcggcagcagttcctgcattgcttgagatttgcagccaacgggcacgagatcaaccgtggccgtaccgtgtggaggaagctagctagataaaagtgttctttcgtcataaatgatctcctccatttctctgctcacggctggcggcccttgtaccacaattttgtgatgtattgttgccctttggaatgtactcagccatgtatcggtgccgatttgtgacatttcttggagctgtagctgtctgtccgttttgtaccagtggacaatgtttgtgacatgcaataaactgcgtttctccggccaaaaaaaaaaaaaaaaaaaaaaaagggcggccgc

SEQ ID NO: 265960 - DNA, 774 bp, Zea mays
ttggcgactggcccacgagccttctcgaaccgacgcatccttcacccatgctgcgctgccacacgccaccgtaatgcgcccgcgcgccgttccgccaccacggaaggtgggagtcgccttcggcggcggcgcccgcggtggtagtgcggtgcgcgcggggtgcgccgtaggtgtccgggatcgaggcggtttcgccgggccacgcggctgtcacagcggctgcggttggggaacctcctggaggacgggctatcgtacaaggagagtttcatcgtgcgctgctacgaggtggggatcaacatgacggccaccgttgagaccatcgccaatctccttcaggaggtaggatgttaccatgcacaaagtgttgggttctccactgatggcttcgccacgaccactacattgagaaaacttggacttatttgggtgacgaaccgaatgcacattgagatctacaagtacccagcttggggtgatgttgttgagatcgaaacatggtgccaagaagatggaaaaattggtactcgtcgtgattggatcctcaaggacctgtctactggtgaagttactggcagagctaccatcatgtgggtcatgatgaaccaaaatacacggagacttcagcgagtcattgatgacgtgagggatgaggtgtttatacattgtctaattacttctagaattttattttacagaataaattttttttctgatttttagattaattttaaatgtgtctttattgttgtaaatatttttacttgtttttgt

SEQ ID NO: 265961 - DNA, 471 bp, Zea mays
ggtccagccctaaggacggcgccgtgtatggccccggcgagagctggaaggcaaagggcctgtacgtgtgcgacggcagcctgctgcccacggcggtgggcgtcaaccccaggatcaccatccagtctatcgccttctgcctctccaagggcatcgccgagaccatggcccaggggcagggcaagggacagtagcctatgattgaaacgcgcctggcgatggtttaattcatgcgtgcaacactgcaacatgtgtgcgttcttgttaatcgagtgtggtgaaagcgtcgaaaaatgtgtttgtgcattgtgtttgtgcaaatggtacgcgaatcacaatacatcctgtttcctgccccggtcaatatttttctattatgatgcataagattgcccattgtaaaatgtatggctccccccgcttgcccaattctgaaacagttttcttttataaaggttttgacccccagct

SEQ ID NO: 265962 - DNA, 1085 bp, Zea mays
cggacgcgtgggcgcccgcgttcgcccccggctgcgatcaccgcgcgtttgccggcgccatggccgtcgcagtcgccgtcgccagccaaaatccactagcagcgcgtaacctcctgccgatctaggagacgggggatttcttctcgcccttttcctcgccttgcggctgcggaataccggggccggcctggatttgctcgagagtgagaggaaggcgtaacagtgtgaaggaggcgcgggggacaatatggctgcggaaatggtgaaagcggcgacgagcgacaagctcaaggagatggattgggcaaagaacatcgaaatctgcgagctcgtggcgcaggatcctgggaaagcgaaggatgtgatcaagtctgtaaagaagtgtatagggagcaggagcaagaccactcaactctttgctgttatgctattggagatgcttctgaataattgcggagagcctgtccataggcaggtcattgataatggccttcttccaatacttgtgaagatagtgaagaaaaagacggatttaccagttcgagaaaaaatatttcttctgttagatgcaacacaaacatcccttggtggagctaaagcaaggttccctcagtactatgaggcatactatgagttggtgtctgctggtgtgcaattttcaaatcggccaaatgttcttgtcacacgagcagaagtgccagtcccagaaacgagaacagaaccaaataatgaaagtttatcgacccgattgactgaagctcaacaggaagtgcatactcagcctgttcctgatgcaagtatagtccagaaagcctctagtgtcatggaagtattgagggatgtgcttaattctatggatcctaggcaccctgagggagcaacggatgaatttgtgttggatcttgtcgagcaatgtacgtttcagaagcaacgaataatgcaccttgttatgacatcaagggatgaaacgctggtatcacaagctatagagctaaatgaagagctacataaggttctcgtccggcatgacgcgttgctttcagttcatccgacaacagcagtagcttctaatataaaggaagaag

SEQ ID NO: 265963 - DNA, 454 bp, Zea mays
cggttcggaattcgagggacgacgcacgcgtccggcggaaacacaagtctggccgctcctcgaaacaaccagcaaccgcccgtgctagatgatacacatcatgccatgcttagtgcaaaccaaatcttcgatacctcccaaagaaataccttgcagtggttcctacaaactgggatacctgattcgttcaatcaagagctacagcaatgaactgttttcttttcctcagatccattcatgtacgcatttttttcttccctgaccatcgagcaatgtataggctggagatggagctggattagtcagttatgtacattaggttctcttttccgttcttacaagcagcaacatgtcagtttagattaattcgagtgaggaatggagctggtaggtcaacttagcaagctatcattctacctagatacttccaatcaattgaaatatttttaacctg

SEQ ID NO: 265964 - DNA, 478 bp, Zea mays
cccgcgtttgccggccccatggccgtcgcaggcgccgtcgccagccaaaatccactagcagcccgtaacctcctgccgatctaggttggtgcgcgctaccgcttccctccccttctgctccccgtcgacgccatctcctcagccccagattgcatctccctcttcttcctctggttctttcggcccgggcagaatgcctcttttttttcttcttcttcttactcgcaggctgcgggcttatgctcgaaggcgcgatctttacgctcggagtggcttcgtttcaggagacgggggatttcttctcgcccttttcctcgccttgcggctgcggaataccggggccggcctggatttgctcgagagtgagaggaaggcgtaacagtgtgaaggaggcgcggcggacaatatggctgcggaaatggcgaaagcggcgacgagcgacaagctcaaggagatggattgggcaaagaacatcgaa

SEQ ID NO: 265965 - DNA, 437 bp, Zea mays
  unsure (1)..(437): unsure at all n locations
atacaatttcagtctattcctctccgtgctatcttcttccttccgctcctctctgcttgctcctcctctgtgtacccttctgctaacaagcacatagcctccgttactccgcctcctcagaggttccagctatgctactaaaccatgtgtcaattgatgttactggcgaaatgttaaggggaacaacacttgaagctgacatggagaagaaaaatgcaatgacagtccacatgaagcttgtgaaaaagaattcaactcataatttcttctaatgccgaagtttctagtgaagagacttgtactctgtttttatgttatattgtctatttgtacatgtgaatggagatgatcttatgtgatgtgatgatggatatattaactntgttggttggatattaaatgttatttaagttaagcttaaaaaaaaaggatataat

SEQ ID NO: 265966 - DNA, 908 bp, Zea mays
tatctatcgagtggacgcgacgccaacagcgtcagcgcctcctcccgctctccggctcctgtcctgctcgcgctcgtcgcccccctgccgctcggctccccttggcccctccaatgccgccacccatggcactgctgccgctctcctccgcatccgcgtccgccgcgctgccgcccttccgctcctgcccgcccgctgcgatgctgcttcgcctcccctcccccgccccctcccatttcgcccgcccccgcgcggtctccaccgggtacgcggcgtccttctacggcggctcggcgatgtccgcggcaggcggcgcggacgaggaggaggaggtcggctactagtcggggttcggcccggggctagggctgggcggcggcggcctcgggatgtcggccgcggaagccgcgctggcgctggaggagcgcgagatgccgccctgcccacccggcctccgccagtacgagaccatggtcgtgctccgccccgacatgtccgaggaggagcgcctcgccttcatccagcgctacgaggagctgctcgtcgccggcggcgccatgtacgtggaggtcttcaaccgcggtgtcatcccgctggcatacagcatcaggaagaggaacagccgcaccgggctgccgtccacctactacgacggcatctacctcctcatcacctacttcaccaagccggagtccatggacgccctgcagcttaagctcaacgccgacgacgacgtcatccgctccaccagcttcaaggtccgccagcggaaggccgcctagttacgcgggttgcctcgcctcgccgtcaggccctgaacactggtttgttcaacataccatactacaagaaatctgctgtacaagaatccacctttgccatggatggtgaagttttttttttttgat

SEQ ID NO: 265967 - DNA, 1888 bp, Zea mays
gtcactcccggagacgcgtacgccgcgattgacctcccgatcatcggcctgctcttcgggacaatggtcgtcagcatcttccttgagagggctgacatgtttaagtacctcgggaacctgctctcgtggaagagcagaggcagcaaggacctgctcttccgagtctgcatcgtgtccgcgtttgccagcgcgcttttcaccaatgacacatgctgtgttgtcctcaccgagttcatcctcaaggttgctaggcaaaacaacctgccaccacagcctttccttctggcccttgccactagttcgaacatcggctctgctgccacgccgatcggcaaccctcagaaccttgtcatagctgtcgagagtgggatctcatttggccagttcttgctgggagttttcccagctatgatcgttggggttctcacaaacgctgctatcctccttttgtacttctggaaatacttgtcggtggagaaggatcaggagggtgggcagcccacaggaccagaggtggttgccgacgatgaggttacttcccatcggttcacaccggctagaatgtcacatgtttcttctctgaatccagatgacatggattgcgtaagcgaaccgatcatcaggagcaacagtgtcagtactactgggaatgagaacctgagaagcagaagcatcaattctgaggctgacattcagcttgcgatcaagtctctgcgggcatcaagcatgtcgcatgagatggtagaggtctcgacggttcctgatcggagagatgaaggtgcatcctcaaggaagttcacaaggactgctagccagcaaaggagcgtgataatagaggatttagcaccctccccagagattaatggggaaaaggagaaagaaactgaagttgcagagaagagatggaaagtacttgtgtggaagactgctgtttatcttatcactctcggtatgctcattgcacttctaatgggactgaacatgtcctggactgcaatcactgcagctcttgttcttctggcactcgattttacggacgcacaagcttgtcttgagaaggtgtcatattcactgctgatctttttctgcgggatgtttatcactgttgatggcttcaacaaaacgggcataccgaacacactatgggagttagtggaaccatattcacgaatcgatagtgcgaaaggtgttgcacttcttgccgtggtgattcttatcctttcaaacgtggcctctaatgttcctacagtcctattgctcggtacaagagtggctgcatcagcggcttcgatttctcatggttcagagaggaaagcctggctcatccttgcatgggtcagcaccgtggctgggaacctcaccctcctaggctctgcggcgaatctgattgtctgcgagcaggccaggcgggcccagttcttcggctacaacctcaccttctggagccacctccgattcggggtcccgtcgaccatcatcgtcacggcgattggtttgctcatcgtcatcagttactgaaacagctgaaggcagaagagcgtagtgtaagagaagcagaatggataaaaatccttccaataagaagtacatgtaaattaggcttgccctataactcaagtgtgtatcggtacgttatgtctccgtctgtgctcttgctcgtgagcaagcagcacatggctgaccgtgtagcttgcatttccattgcataataggcttatgaagaatgctttggtaatatgattttacagtctgacaaggattgtgaagcagaggcagtgtaccatcaagataatacttctggaagcatataaaaaaatttcgtatatttggatttcaaatccagtctgcttcagactggaaattcatattatcttctggaatcgtgctt

SEQ ID NO: 265968 - DNA, 567 bp, Zea mays
cggtacaagagtggctgcatcagcggcttcgatttctcatggttcagagaggaaagcctggctcatccttgcatgggtcagcaccgtggctgggaaagcctggctcatccttgcatgggtcagcaccgtggctgggaacctcaccctcctaggctctgcggcgaatctgattgtctgcgagcaggccaggcgggcccagttcttcggctacaacctcaccttctggagccacctccgattcggggtcccgtcgaccatcatcgtcacggcgattggtttgctcatcgtcatcagttactgaaacagctgaaggcagaagagcgtagtgtaagagaagcagaatggataaaaatccttccaataagaagtacatgtaaattaggcttgccctataactcaagtgtgtatcggtacgttatgtctccgtctgtgctcttgctcgtgagcaagcagcacatggctgaccgtgtagcttgcatttccattgcataataggcttatgaagaatgctttggtaataaaaaaaaaaaaaaaaaaaaaaaaaaaaaaaaaaaagggggggccccc

SEQ ID NO: 265969 - DNA, 344 bp, Zea mays
agcggccacagaggggcttttgatgcggttgtatgagagagatgactgtttgtttgtaatgagcatggagacaaagggacgcaatggaggagcaatggtacaaattagcggaagcggatgctgtcacaagttgctagatctttctcccttagcttcttgacatttggttcttgccacagctttttgatgcttctcttggcagctggacttaatgttttgctattcttgtcgacatcacgagttgaattgtcaaactagtctcttatgttctatgctgatatgccttaaccagaaaaaaaaataaacacaagtaataaaagaagcatgaataatactattctctt

SEQ ID NO: 265970 - DNA, 2232 bp, Zea mays
ggacctgggcaaaaccagccgagcgccagacgagaagagctccgtcttgccttctcttcctttctctacctgccgcacccgcacagccacagccaaccacacaccccacatcacaacagctccctctgcatctccgcctcgtcgccgtcgtctgcctgcacaaccttcttcttcatctctctctcttcttccgctgccaccctcccagcaccgagggaaggcaagcccacccaggaatctccgtcccgctcccggccgccgtcccttctcataatcgcatcggatctgtattgggttttcagtaaggagcagaaaacgccttagggaatgcagaaagatgtgcttgcacgtcgaagagctactttgtgagggacttggcaggaaagcacgccatactcttcattctctgccacctcttgatgacttcgaagctcaagagtacacgtatctccacctcgtgctttcgcacaatggggttcgacgtggcggctcaaccgtcttcttagatcaccatctcggtggagacggttgaagtcttcacaccctctcgacctctttgctgtctcattttttttttactgtcaaggataagcaagtgacctctgtgtgcataccaccaccaccatacgtagcatacacaggcacagatggcagagcataaagggaacgttctcttgcacaagtatgagatggggaaattgcttggccaaggcacctttgccaaggtttaccatgctcgtaacacggcgacttcggaaagtgtcgcgatcaaagtgattgataaggagaaggttatgaaggttggtctcattgatcaaatccagcgagaaatttctgtgatgaagcttgttaggcatccaaacatcgtacagctctatgaggtcatggccaccaaaaccaaaatatactttgtgctggaacatgttaaaggtggagagctgttcaacaagattcagcgaggaaggctcaaggaagacgcagcgaggaagtacttccaacagctgatctgtgcggtggacttctgtcacagcaggggtgtctatcatcgagatttgaagccagaaaatcttttgctcgatgagaatagcaacctgaaggtatcagattttggtctaagcgcacttgctgaatgccatagacaagacggcctgctccacacgacttgtggcacgcctgcttatgttgccccagaggtgattaacagaaagggttatgatggtgcaaaggctgacatatggtcttgtggggtcatcctgtttgtgctattggctggttatcttccgttccatgataagaacttgatggacatgtataagaagattgagaaagctgacttcaaatgtccaagttggttttctaccgatgttcggaggcttttgcaaaggattcttgatcctaaccctagtagaaggatctcggtggaaaaaatcatggagaatccatggtttaggaagggtttaggtgcaaagctacttaggtacgatttacagaataagaatgcccctcatgtggacaagaaggcagattttgattcactgagcaccaacgtaacaactgagagcaagcaacatgaagaaaagaagcctaccaacatgaatgcatttgatataatatctctatcaactggtttggacctctctggtttatttgaagaatctaacaagaagagagaatccaaattcacatctaccaacacaagctcgacaatcatatcgaagatcgaagatattgcaaagaatttgcggttgaatttgacaaaaaaggatggtggcttgttaaagatggaagcttcaaagcccggaaggaaaggggtaatgggtatcgatgccgaagtatttgaggttagccccaacttccatcttgtggagataaagaagacgaatggcgacactctagagtatcaaaaggtcctgaaccaagaaatgaggcccgcactcaaggaaatagtgtgggcttggcaaggtgagcaatcaaagcaaaagcaggaacaacagtcgtgttaaaaacttatgagctagtgcaatgtttttagccaatttccaatctttcgtgtatttgtgtagtttttactcttttattatccatttttgttttcccgtgtaataccaacaaaaacttgtgtagttgtgttattttctgaggacaaatttgtttcaaagatgtgtttacgctgttattaagagtttcctttatgttatatactgttttcaacacccgaaatatattgttatt

SEQ ID NO: 265971 - DNA, 356 bp, Zea mays
cgggtcggcccacgcctcccggaaaaaaacctaccaacccggaaggcgtttgggatataatatctctatcacacggggggggacctctctggtttattggaagaatctattaggaggagggattccaaattcacatctaccaacacaggctcgacaatcatatcgaagatcgaagatattgcaaagaatttgcggttgaatttgacaaagaaggatggtggtttgttaaagatggaagcttcaaagcccggaaggaaaggggtaatgggtatcgatgccgaagtatttgaggttagccctaactttcatcttgtggagataaagaagacgaatggcgacactctagagtatcaaaa

SEQ ID NO: 265972 - DNA, 458 bp, Zea mays
gtccgtaattcccgggtcgacccagcgcgtccgattttgggaagctcgccgacctgggctacaagagaagcgccaagaagtgcaaggagaagttcgagaacgtgcacaagtactacaagcgcacaaaggaaggccgcaccggcaggcaggacggcaagagctaccgcttcttcgacgagctggaggccttgcacgcagccgcgccgcagccacagccgccgctacagaagcagcagcagcagttgccgccagcgagcaccaccgctccaccgttgcacgccttcgccgcgccagtatccgcgccgccgccgataagttcaatgccaccgtcgacggggccgatgcaaccagcgcccatatcgtcggcggcaccggcggtgcaggtccagacactcgtggagcttgccggggcccaccagcccctcaacctgctgcaaggcttcagcttctcttccatg

SEQ ID NO: 265973 - DNA, 1082 bp, Zea mays
cggcacgcggccgcggacggaactcggccgggaccgcccgcgcgtgcaccagacctcatctcactccgctaccccctcatcctgccatccaccagcagcagtgcaagcatatggcgcgccgtgccagcctgctcctcgccgcggcgctgctcgtcgccgtcgctgccgcggcggtgccgccgacgtgcgagcgcatcgagtgcccggcgtacgaggtggtggacagcgccaacgggttcgagatccggcggtacacggacgccatgtggatcaccacggcgcccatcgaggacatctccttcgtcgccgccacgcgcaccggcttcctacagctgttcgactacatccagggcaagaacgcgtacaacgagacgatcgagatgacggcgccggtgctgacgcgggtgtcgcccagcgacgggcccttctgcgcctccgccttcgccgtgagcttctacgtgccggccaagaaccaggcggacccgccgccggccgagggcctgcgcgtggaccgctgggccggggccaggtacgcggccgtgcgccgcttcgggggcttcgtggcggacgccgacgtcggggagcaggcggcgcgcctcgaggccagcctccagggcacccggtgggccgccgccgtcaacgacgcgcgcagggccgacccggcctcgccctacaccgtcgcgcagtacaactcgcccttcgagttcaccggcagggtcaacgagatctggatgctcttcgacgccgccgacgcggacgacgacgccagtatgtgatgcgattccaagcgtgctctcggggcactgaggcgtttagggaaggacgcgcatgcacctgtgcagtcagctgtgctacaatgaagtatttcgtgctcttgtgcgctagcttcgtttactttcgagttttcgagtaaggaataaggtgcctcttgttgcaataatgataaagctaatcctgcttgtaattacatttcgtggcatggccattccggcaacatgtccagtaaaaaaaactttttagtctcataaaaacagatttcatctcaactccctgggtgatcataagagtcaggttcgactttt

SEQ ID NO: 265974 - DNA, 922 bp, Zea mays
  unsure (1)..(922): unsure at all n locations
ggaattacccgggctcgactccacgtcgtctcgggtttctgtctgctaccagcaccacgcctagcaccccaccgcgtctagggttttctgctccaatggccgccgcgggggcagacggggagcgcaggatcggggtggccatcgactactcggagagcgccaagaaggcgctggactgggccatcgacaacctgctccaccacggggacaccctcgtcgtcgtccacgtcctgcaccacggcgcggaggagaccaagcacacgctctgggccaagtccggatccccgctgatcccactctccgagttccgggagcccgaggtgatgcagggctacggcgtgcgccccgacgccgaggtgctcgacgcgatcgacacggcagcgcgccagaagcagctgaaggtggtggcgaagctgtactggggcgacgccagggagaagctctgcgacgccgtcgaggacctcaagatcgattccctcgtcatgggtagtcggggcctcggcccgatccagaggattctcctgggaagcgtgacaaactacgtgctgtcaaacgcatcgtgcccggtgacagtcgtcaaggggaagtagtggcctgggcagcgtgccagtgatatgaatgaagatgctagcgtgcagtttgtgtgggttatagctaaacactatgttccgtcttgttgctgcatttcaataaagcatgtgtcttctagatttcacaaatctctctgaggctctgacctctgtcttattagctgtgaaactgtccgtgcttcattcctgtccagatcgaatttgaggattgattcataccccttttactgtagtgtcgtgttgatctactggttagtctgctcaatttgtatttctgattgtcttgcaccacgtttggattgcagcaaaaaaaaaaaaaaaaaaaaanaaaa

SEQ ID NO: 265975 - DNA, 886 bp, Zea mays
aacctacctgctccattttatgcttctccctcgctcgcctcgccctcgccgcaacgctttgcgatagagtttctgtctgctaccagcaccatcctagcaccccaccgcgtctagggtttcctgctccaatggccgccgcgggggcagacggggagcgcaggatcggggtggccatcgactactcggagagcgccaagaaggcgctggactgggccatcgacaacctgctccaccacggggacaccctcgtcgtcgtccacgtcctgcaccacggcgcggaggagaccaagcacacgctttgggccaagtccggatcccgtaagctcccccactcaagctctcgccgcatccatccctacccttacccaaatgctcacccgcttgccgctggtgtctggttcggttttctgacggtcttggctcgtcggctccatctgattcgctcgatcggtctcgcttgcttcgatccccgcagcgctgatcccactctccgagttccgggagcccgaggtgatgcagggctacggcgtgcgccccgacgccgaggtgctcgacgcgatcgacacggcagcgcgccagaagcagctgaaggtggtggcgaagctgtactggggcgacgccagggagaagctctgcgacgccgtcgaggatctcaagatcgattccctcgtcatgggtagtcgcggcctcggcccgatccagaggtatagtacaatcctaagactccattactactactatagtactattgaaatgttgcctcatcaggactggaatgcgctggtcagcctctgattataagctaatttctcgctttttctttttgttcggatagcgcgtcaattgagtgtctggaaaaaatggatatagtctggcgtgcatggat

SEQ ID NO: 265976 - DNA, 472 bp, Zea mays
catccttctttgattcctgttcagatcgaattcgaggattggttcattcctatttgggtgcaggtctctcccctcacttgttttatttgaaactcacgatatctggcactaatatgaatgtaaattaccacattcacttttcatgcaaactgatacggtatattctgattattgcactcagaacctgactcatgcaaactgcatatattggcttaaatattttagcatattccattttgttgacgactctctaatccggtaactacttcaggattctcctgggaagcgtgacaaactacgtgctgtcaaacgcatcgtgcccggtgacagtcgtcaaggggaagtagtggcctgggcagcgtgccagtgatatgaatgaagatgctagcgtgcagtttgtgtgggttatagctaaacactatgttccgtcctgttgctgcatttcaataaagcatgtgtcttttagatttcc

SEQ ID NO: 265977 - DNA, 669 bp, Zea mays
gcctcttaaggagatacccgcccacgccgccgtgggaggcttcgtcacgcactgtggctggaactcggtcctcgagagcctatggcatggcgtgccgatggtgccatggccgcttggcgccgagcagcactacaacgcgttcacgctggtggccgacatgggcgtcgccgtggcgctgaacgtggaaaggaagaggacgaatttcgtggaggcgacggagctggagcgagcggctaaagctttgatgtgtgacggcgagacagcgaggaaggctagggacaaggccatggagatgaaatccgcgtgcctgaaggcaatggaggagggcggatcatcgaacatgtcgttgcagaggctctgtgatgcgctcgtcgaaggcgcggtgcacccgggaaagtgatgcccacagagttcaatcaggaggctctgtccaccagccatccaatggtgtacatgtattctgttatgagttctctgtttttagagcaagttaaataatattttttatgagttctctatataatgctcaaataatttatctaacataaatattatagcgataattattttagaatatagacagtatatttcttctattttaaaataaatattgtatttggcttcgtgctcatcatattttcagatttataaaaaaaatgttaaccaaaa

SEQ ID NO: 265978 - DNA, 540 bp, Zea mays
cccacgcgtccgcccacgcgtccgcagaactaacagttctgagatcgagctgcacaaggaaggaaagaaggagacacacaatcgtcgcctgcttaaccagagcgacaatgcccaagctcaggctcatcttcaccgttattcttgtggtgtctctactgttcagtggtgtgtcttcaggacaaactgcagctacacaagccagcgatgcagatctttctgaagcggttgaggttgagagacgcagtgggaaggttctgacgtacgttcaggactacgactacggcgggtccaaccccaaacatgacccacgcaggaagccagggagcggacaccctccataggtagccaaggataaacgtccggtgacgctccagccactggactctgctggtacctagctagtcttgctgagttgttcctgtaatgagtagaaagaatcagaacggtttggtcccgtccacgcccacgtcactttgttagctacgtagtagtataataaggtagtcttttagatgatgatgaaataaagatccagaatgt

SEQ ID NO: 265979 - DNA, 772 bp, Zea mays
attgttctactgcagattgctgtgccaacaagaactgacgtccctgaatatcaaaagctaacgagccaagtgcatgaaattgttgggcgcataaacggtcgatttggaacgttgactgctgtccctattcatcatctggaccgatctcttgatttccacgccttgtgtgctctttatgcagtcactgatgttgctcttgtaacatcactgagagatgggatgaaccttgtgagctacgagtatgttgcatgccaagggtctaagaaaggagttctgatacttagcgagtttgctggggcagcacaatcacttggagctggtgccattctagtaaacccttggaatattacagaagttgcagactcaatacggcatgctttaacgatgccatccgatgagagagagaaacgacacagacacaactacgcacatgtcacaactcacacggctcaagattgggctgaaacttttgtatttgagctaaatgacacggttgctgaagcactactgaggacaagacaagttcctcctggtcttcctaggcaaatggcaattcagcaatatttgcgctctaaaaatcgtctgctcatattgggtttcaattcgacattgactgagccagtcgaatcctctgggagaaggggtggtgaccaaatcaaggaaatggaactcaagttgcatcctgacttaaagggtcctctgagagccctctgtgaggatgagcgcactacagttattggtcttagcggcagtgacagggagtgtcttgatg

SEQ ID NO: 265980 - DNA, 882 bp, Zea mays
ttttagcccttacaatatcatgttgcatcaattgatcacgaaaattcctcattgcaagaacaaaaggtcgaccacggcggatagaagcacaaatttgtcgcaataccaacaccccatgtcagcaggaggaaataacagcacattttgggacctaactctatagcttgaacgaattggtaccatcctatttcctgcttggcacgctccagaaaagcatcaaaatttctggacctgttcttgttgattcacagatcaagctccagccacctattctgcatcgccggcaccaaaaccgtcgtcttcgacttcgtcaaccttttgaggtgccacactaccttcgacagctgttgggtcatcatctccaaacttttcagggcctggtcctgcagacactttgaccattgctgggcgaagcagtctttccccgagtttgaaaccttttcggaattcctggagaataatcccctcttcaaactctgatgattcttctctcataatagcctcatgaagcatgggatcaaatggtttgccgaccgtttcaacatcttcaacgcccaatgaattcaaaatctcgatgaattgcttataaatgctctggtagctattatttattttctcctctccctctgtttccacctttatttgcactttcgctctttcaaagttgtcgagaacaggcaaaaagctctctataagttccccttgcacattttccatcatgttaagcttctcattttctgtccttttcctgaaattgtcaaaatcagcactgatcctcaagatacgttctcgttgagttgctagttcggcatctcagagcagtcctttgttcaaaagagagtttatctcatcatcgatagaaagtaaaaaggactctatctc

SEQ ID NO: 265981 - DNA, 392 bp, Zea mays
ctgcaatttcagtttgctggggcagcacaatcacttggagctggtgccattctagtaaacccttggaatattacagaagttgcagactcaatacggcatgctttaacgatgccatccgatgagagagagaaacgacacagacacaactacgcacatgtcacaactcacacggctcaagattgggctgaaacttttgtattgtgagtttctcatttccatggcccaatatcattcggtggaccaagccccttcacttatcattccgtttgcaactcaagttttctggtgattatccttttctttttcatgtagtgagctaaatgacacggttgctgaagcactactgaggacaagacaagttcctcctggtcttcctagtcaaatggcaattc

SEQ ID NO: 265982 - DNA, 722 bp, Zea mays
  unsure (1)..(722): unsure at all n locations
taccggttctcggaattcccgtggtcgacgccacgtcgtctcgtgcacaagtanngtgtatctcgttcgactagatctcctatnnagctgctagctaggtatttagtccttgttggtttgtacctgatagaannaagctagcatnctgatctagtcgtatngcatcaacatcatnacatgggttcctggngtgcgcatctcatcatcgtcgcccttctcggaagaattgctcagcccgcaacaagcgcgacggcatagaagacgctcgcgccgccgccaccaccaccaccaacgacgccagcagcaatctccttctccttctccttcttcttcatcagccatggaggaggagcacagcggcgagatggagataagcaggtcgcagctctacggcgaggtgatggcgtgcacgtacgaggacgtgcaggtcatgtggtccatgctcgacaaggccaggatctgcagcgcgtcgtgaccggaccgccacacacggaccttcacatccgctcgatccgccgtccatggccgatccaatgcaccagtacataatatatactctcccagcagctgggcactgggcttcttcttcattcatggcaaagcaagctctcttggcgcgagacaactcgatctgccgagacgcgcggcatgcaacctgctatgatccatcactacatatactagccctgaacactttttttttgtgccagtggttttgtgtg

SEQ ID NO: 265983 - DNA, 445 bp, Zea mays
  unsure (1)..(445): unsure at all n locations
ttccncggtcgactcacgcgtccggcaaaacatctctaatacacccaaagcaaatacacacgcagtgatagccatggctcgtggcggatctggttgccgtcttctcgccctgctcctagtcttgactgccttcaatggcagctttgcagctcgacatctcttggacacagcagctgcgccagaggccacgcctgctcagccgtccattccagcggttccaaccaaactgcctccagtgccgaccataccagcggttccaaccacgctgacgctgcctccaatgccttccattccggcggtccccaagatgacaatcccaccaatcccgtccattcctatcccaaagctagccctgccaccaacagctgctggcgcaatcccatctctcacaaacccggtggttcccaccaccgtaccagctacttttgctgtcccggttaccctg

SEQ ID NO: 265984 - DNA, 337 bp, Zea mays
accggttcggaattcccgggaacgtttcctggtagacatggagctgaatgcaaagactggtattctcgtagcgtatgatggtgacttcattggcttggttgggataaccgatcctttgaaaagggaggctgctgtggtcatacaaggtctaaaaaagatgggtgttcatccagttatggtcactggggataactggaggactgcacgagcagttgcaaaggaggttggcatcgatgatgtcagagccgaggttatgccgtccggaaaagccgatgtaatccactccctgcaaaaggatggcagtgttgtcgcgatggtcggagatggcatcaacgac

SEQ ID NO: 265985 - DNA, 575 bp, Zea mays
tcgcatcaacagccccaccacctccggcacaagcacacgaagccttcgcattcctgtccggcggaaccgctgaaggaagggagccgaacgagcaagcaagccaccaacgaaggttgctagggccggagtggatggggttcatgctgcgggtgaggctcgcctccttcttcgtcggcgcggctgccgccgccgcgggcgggggctacttcctctacaaggactacaagctcgccaacgactctctggccctcaaggtgaaatgtctccaagactcaactgacactcgctacgaagcccttgaaaagcgactcgctgctttggaaggtctgcaaagccctgaggctgcaccggatgtggatacgccatctgattagtctgttcgctacgagactttgatttacgtctgttttcgtttgccccagttgtcttctcctttgaaagcaagtacctgaccaacaacaaaataatctaggatgcttctttggtactgcaaatgtccgaggctgagattctcccctacatttcatgccagaaaagcacatgaacatcaaaactctgattactcaggcatactg

SEQ ID NO: 265986 - DNA, 260 bp, Zea mays
tggaggtacaaccggtgaaggggggtgaggaagcagcatcaatggtaagagttctactactgagtgggggaaaaacaacttgcggctgggttagtgaagcttagtagctaccactattcaagagttaaagggagttcgtatgacagttcctctggagatgttatcttcaaagtcttatatcactgctacttgtgagctgtgttaaaacctatatatataagtcacgtttgacgtgactgcattaaagatagtacaaaaag

SEQ ID NO: 265987 - DNA, 969 bp, Zea mays
tcgactctcacgcgtccgccttaagccagcaggcgctcgatacattccacacaacaacccccagctctgccccagcccgcccacaggagttcccgcatctccctcttggtctggtcacaggagctccgagacctctccaatggcggttaagatctacgttgtgtactattccatgtatgggcatgttggcaaactagctgaagagatcaagaaaggtgccttatctgttgaaggtgttgaggctaaaatatggcaggtccctgaaattctctctgaagaagtgcttggaaagatgggcgcgccccctaagcccgacgtgccagtcatcacaccgcaggaacttgcagaggctgacggtatcctctttgggtttccgacaaggttcggaatgatggcagctcagatgaaggcgttcttcgatgccaccggtgggctctggagggagcagagccttgctggcaagcctgccggcatcttcttctgcactggatcccagggtggtggccaggagacgacagcgttgacagcgatcacccagttgacgcaccacggcatggtgttcgtgcctgtgggctacaccttcggcgccaagctgttcggcatggaccaggttcagggcggcagcccctacggcgccggcacgttcgccgccgacggctcgaggtggccgagcgaggtggagctggagcacgccttccaccaggggaagtacttcgcaggcatcgccaagaagctcaagggttcagcctgatctacacatatacccttgtcggatatcataaaaaacacttattacagattcgtcttacccatcaatagatcggtctgttctctcgtggtgtctggatgttgtgtggctcagtggaactttcatgctacggtgactttgttgtaatctggagttggaatatcgttgtttcgcataaatttcgatgatttgctcaagtaaacggtttgtttggttcaaaa

SEQ ID NO: 265988 - DNA, 606 bp, Zea mays
gcactggatcccagggtggtggccaggagacgacagcgtatgtgccattacattccacgcatggttacatgatccgagcgctgcctagacctggtgtccaaagatcatgggaccaacatctcgcttgctactcttttcatccaggttgacagcgatcacccagttgacgcaccacggcatggtgttcgtgcctgtgggctacaccttcggcgccaagctgttcggcatggaccaggtccagggcggcagcccctacggcgccggcacgttcgccgccgacggctcgaggtggccgagcgaggtggagctggagcacgccttccaccaggggaaatacttcgcgggcatcgccaagaagctcaagggctctgcttgatctgcacatacccctctgtcagatatcataaaacatttacagattcgtcatacccgtcacaatagattggtctgtgttctctcgtggtgcctcgatgctatgtagttcattggtactgctgccgtatgaatttcgatgattgctctggtgacttggtttgtaatttggagttggactatcgttgtttctgccgcataaatttcgatgatttggtcaagtaaacgacttgc

SEQ ID NO: 265989 - DNA, 459 bp, Zea mays
cggacgcgtgggcggacgcgtgggcggacgcgtgggcggacgcgtgggcgaggcaggagcggcgatccattccacacaaccaccactgctcttgccccagcccgccgcaggagttgccagatctgctccggtcacaggagctccgactccgagccctctccaatggcggttaaggtctacgtcgtgtactattccatgtatggacatgttggcaaactagctgaagagatccagaaaggtgcctcgtctgttgaaggtgttgaagctaaaacatggcaggtccctgaaaccctccctgaggaagtgcttggaaagatgggcgcaccccctaagcctgacgtgccagtcatcacgccgcaagaactcgcagaggccgacggaatcctcttcgggttcccaacgaggttcggaatgatggcagcgcagatgaaggcgttcttcgatgccactggtgggctc

SEQ ID NO: 265990 - DNA, 665 bp, Zea mays
gaatttccgggtcgacgcacgcgtccggtcacgctccactacacccagctccagctcgcgtcgggcgatatcaagtacttctaccaggcgcggaggagccagcgcgggctggcggtggcggtggtgggcgacaaggtgccgctgtacggcggcggttcgggcctgagcagcaccgcgactacgctgccgccgcccaggaagcgcgcgccggcggtggtggtgcctgctgacgccgtgccgctgcagctggcggtgcggctgcggtcgcgcgcgttcgtgctgggcaggctcgtcgcccccaagttctacaccgaggcgcggtgccgcgtcaccatggaccagaccaggctcggcaggcccagtctccctcgccaaggcctgcacctacacccactagctagagcgaaagcgaaacacgcgcgcgcgcgcgcctgctgccctcgccgttttgttcttcacttgagttctctctccgtcgtcgttatactactactaccgcctgcgtgtgcttgcgtgcgtgcgttacatttggatgcatggggccattgttgctcggttgttgtcatgtatgtacagaggatttcttttttttctttttcttttttggtgttggagagttttcattgttgctcgcttcttgttctccttcgtgaccagcttcgtgt

SEQ ID NO: 265991 - DNA, 1529 bp, Zea mays
ccctcccctctccggcccgacgcccctcgcccccctcctgaccggccatggcgaccgctgctgctgcgtccccggtggctgtctcggcgccggtcttcggttcggacggcggcgccaggagctccgggatcaagggcaacaacaatgttagcttcggcagcaaatcctgggtcggcggcggcacattggcctgggagagcagctgctcggtgcggcccaggcacgccagcaaggtgctctgcatgtccgtccagcaggcgagcaggagtaaggtctccgtcgcgccgctccatctcgagagcgccaaggagccacctctcaacacgtacaagcccaaggagcccttcacggccaccattgtctcggtcgagagtctggtcggccccaaagctccgggggagacttgccacatcgttatcgaccatggtggcaatgtgccgtactgggagggccagagctacggcgtcattcctcctggagaaaatcctaaaaagcctggagccccacaaaatgtccggctgtattcaattgcatcgactaggtatggagataactttgatgggcgaaccggaagcttgtgtgtccgccgtgcagtttattatgatcctgagactggcaaggaggacccctcaaagaatggtgtctgcagtaatttcctgtgcaactcaaaacctggggacaagattcaattaacaggtccctccggcaaaataatgcttctgcctgaggaggatccaaacgcaacccatatcatgattgccacgggcaccggtgttgcccccttccgtgggtacctgcgccgcatgttcatggaagatgtcccgaactacagatttggtggcttggcctggctcttcctcggcgttgccaattcagacagccttctgtatgacgaagaattcaccagctatcttaagcagtatccagacaatttcaggtacgacaaagccctcagcagggagcagaagaacaggagcggcggcaagatgtacgtccaggacaagatcgaggagtacagcgacgagatcttcaagctcctggacggcggcgcgcacatctacttctgcggtttgaaggggatgatgcctggaatccaggacacccttaagaaggtggcggagcggagaggcgagagctgggaccagaagctggcccagctcaagaagaacaagcaatggcacgtcgaggtctactaggactcggattgctgtggttgcgacccttgatgctgccggggcagcgtctggagacaaacacatgattgaaattgaatcgatggatggttctcggggcggtgtaaagtcacaaaagttctctttgtgataatcagaaaaaaaatcgccttttgtaattcataaaagcttccgcgccacggttatccgtggaacggaccgtgtaactttcagccgtttacatttgcagtgcagatgcttttggcagtatgtctaacactaggtctctgtccagttcgtacgcatatgaaccctgatgactttgcataattgccgctcttaacatcagaggattac

SEQ ID NO: 265992 - DNA, 723 bp, Zea mays
  unsure (1)..(723): unsure at all n locations
acccgccctcgttttccggccacgctccctaccangggtacctacgttgcttgttaatgggaggacaccctacttccaaacctggcggtccggcttggctcttccttggtgtctgcgaactctgacagcctttctctcatgacgagacagctccaccaaactacccttcaggcagtatccagacaatttcaggtacgacaaagcgctaagcagggagcagaagaacaagagcggcgggaagatgtacgtgcaggacaagatcgaggagtacagcgacgaaatcttcagactgctagatggcggtgcgcacatctacttttgtggtttgaaggggatgatgccggggatccaggacacgctcaagaaggtggctgagcaaaagaggcgagagctgggaccagaagctgtcacagctgaaaaagaacaagcagtggcacgtcgaggtttactaggctataagatggcaaggattgtgattgtttagctactgagctcagaaactggacgtatgattgaacgactgtggctgctgcgatgtaatgtaacattgtagacttggattcataagcttctgctccaaatggtgaataatatgaagcacccggtttgtagctgctactgccagtatcaggacagtttctttttgctagatacataaaggttgcttaagccnannaaaaaaaannaaaaaaaaaaggcggcccgcccggaattccggccggt

SEQ ID NO: 265993 - DNA, 750 bp, Zea mays
gaccgtgatagcagtcgtgactgctggagaatgtctgatggaaataatttcagagttcgaagcaagaattttgtatatgataaaagcaagattcctgcaggaaagcctctcacgcggccggtcgctgttgactggtttaaagatgcaaagcgaatggatcatgttgctagaagaaaaggctgtgcagttcaagtagcggctgagaaggggctctttgcattggctataaatctacaagttcctggcactacaaactacagtatggttttctactttgttacgaagaaactgataccaaactccttattgcaacgctttgtggatggtgatgacgaatttcggaatagtaggttcaagttgataccatcagttcctaagggctcatggattgttcgacaaagtgttggcagcactccttgtctattaggaaaagctgttgacattacctatatacgtggctcaaattatttagaaatagatgtggatattggctcgtctacagtggcgaatggagtcttggggcttgtgtgcggtgtcataacgacactagttgtcgatatggctttccttgtccaggctaatacatacgacgagctcccagaaaggctgattggggcagttcgtatgtcgcatattgagctgtcatctgcaatagttcccgtgctcgaggattaatcatagtacgcgatactgcatgcattgggcccgaccagattatgccggtctgctgagatcactgacagtgtacac

SEQ ID NO: 265994 - DNA, 1880 bp, Zea mays
cccccgacgcgtccgcaaaatctcatttgagcgtgcaagctccttcgcctcgaaccctctcgcgcttggcttgctttcactctccagggccccactcccacctcgccgccgcagccatggcgatcacagcgccaactcccgacatcctcggcgagcgccagtccggccaggacgtccgcacgcagaacgtgatggcttgcggggcggtggccaacatcgtcaaatcctcgctcggccccgttggtctcgacaagatgctagtggacgatattggtgatgttacaatcactaatgatggagcaaccatacttaagatgttggaagttgagcatccagccgccaaggttcttgttgagttggctgagctccaagatcgtgaggtaggagatggaactacttccgttgtcatcatagcggcagagttactcaagagaggcaatgatcttgtgaagaataagatccatccaacctctataatcagtggctacaggcttgctatgcgtgaagcctgcaaatatgttgaggaaaagttagcagtcaaggttgacaaacttggaaaagaatcccttatcaactctgcaaaaactagcatgtcttcgaaattgattaatagtgacagtgatttctttgcaactttggttgttgaggcagttcaagccgtgaagactacaaatgccaagggagacgtgaaatatccaatcaagagcatcaatattttgaaagctcatggtaaaagcgccaaggatagttatctgttgaatggctatgcactaaacacaggccgtgcagctcaaggaatgcctacgagagtaactcctgctagaattgcttgtcttgattttaaccttcagaagacaaaaatgcaacttggtgtccaagttcttgtaactgatccaagggaacttgagaagattcgtcagagagaatctgacataacaaaggagcgaattgagaaaattctcaaggctggagctaatgttgtgttgaccaccaagggaattgacgatatgtccttgaagtactttgttgaggctggtgcgattgcagtaaggcgtgtgcgcaaggaagatttgcgacatgttgccaaagccactggtgcaactatggtgtctacttttgcggacatggaaggtgaagaaacattcgattcatcattccttggccatgctgatgaagttgtggaggaaagaattgctgacgatgatgttattctggtgaaaggcacaaagaacaccagcgcggtctctataatacttaggggcgcaaatgactacatgcttgatgagattgaacggtccttgcatgatgccctgtgcattgtgaagagaaccctggaatcaaatatggttgttgctgggggtggtgcagttgaagctgcgctgtcagtttatctggagaaccttgcaacaaccctgggttctcgggaacaattggcaattgctgaatttgctgagtctttgttaatcataccaaaggtactatctgttaatgctgcaaaagatgcaactgagcttgtagcaaagcttagggcatatcatcatactgctcaaacaaaggccgataagcaacattattcaagtatgggtcttgacctctctaaaggtatcattcgcaacaaccttgagtatggcgtgatagagccatcgatgagcaaagtaaagatcattcagtttgccacggaggctgccattactatcctgaggattgacgacatgatcaagcttaccaaggaagaagagggtaacgaagaagagtaagcagcccaccagtagtgggctagtggactcccgtgcgctggttgtcatagcgtgtaagagcccaccaatattggtgtagtggactcttgtgcgctgggtgtcataacgtgtaacttttttttt

SEQ ID NO: 265995 - DNA, 515 bp, Zea mays
  unsure (1)..(515): unsure at all n locations
atttgagcgtgtgaggtcgttggcctcgacccctctcgcgcgcgcgcgcttgcctgcacgctccagggcttcaggctcccctcccacctcgccgcggcagccatggcgatcacggcgccaactcccgacatccgcggcgagcgtcagtccggccaggacgtccgcacgcagaacgtgatggcgtgcggcgcgttgtccaacatcgtaaaatcctcgctcggccccgtcggtctcgacaagatgctagtggacgatatcggtgatgttacaatcactaatgatggtgcaaccatacttaagatgttggaagttgagcacccagctgccaaggttcttgttgagttggctgaactccaagaccgtgaggtaggagatggaacaacttccgttgtcatcatagcggcagagctgctcaagagagccaacgatcttngtgagaataagatccatccaacctctataatcagtggctacaggctngctatgcgtgaagccctgcaaatatgtgaggaaaa

SEQ ID NO: 265996 - DNA, 561 bp, Zea mays
cggactctaagatgcaactgagcttgtagcaaagcttagggcatatcatcatactgctcaaacaaaggccgacaagcaacattattcaagtatgggccttgacctctctaagggtatcattcgcaacaaccttgagtatggcgtgatagagccatcgatgagcaaagtaaagatcattcagtttgccacggaggctgccattactatcctgaggattgacgacatgatcaagcttaccaaggaagaagagggtaacgaagagtaagcagcccaccagtagtgggctagtggactcccatgggatggttgccatagcatgtagcacttgttttttcacttatcgtttacttttgcttgctgtgagcattcgtttgtaggaaaagtgagaacggatgtgtatcaatccgtgttgggtgccgatgactcacggatgaatcaaatctttgcgtatattggggccaaaacagttctatctgaaggatttaagttggaaaatggaatggtttcgtgtagtgattatttgattaactacttgtgcggaacactggatacattcggtac

SEQ ID NO: 265997 - DNA, 453 bp, Zea mays
  unsure (1)..(453): unsure at all n locations
cngtcctctctaaaggtatcattcgcaacaaccttgagtatggcgtgatagagccatctatgagcaaagtgaagattattcagtttgccacggaggctgccattactatactgaggattgacgacatgatcaagcttaccaaggaagagggtaacgaagaagagtaatcagcccaccagtatctcttttgcgctggttgtcatagcgtgtaactttttttccttcccatttttccgtttagttttttgctggctgtgtgtgagcattcgtgtagggtgttgtaggaaaactgagaatgaaggtggtattaacgtatccccgtggcgtgacgttatttagacaacgacccacggatggatcaaattttgcgtgtattggggccaaaacagttctgcttcaaggattgaagttggaaatttgaattgttccgtgtactgatggactttttgctgg

SEQ ID NO: 265998 - DNA, 602 bp, Zea mays
tgcactaccggtccggaattcccgggcccacgcgtccggagcgcatcaacggccggctcgccatggtgggcttcgtgtcggcgctcgccgtcgaggcgtcccgcggcgggggcctcctctcgcaggccggcagcgggtccgggctcgcctggttcgcggccacggctgccgtgctgtccgtggcctcgctggtgccgctgctcaggggcgacagcgccgaggccaggagcggcgccgtcccgcgcgcccgcgccgagctctggaacggccgcttcgccatgctcggcctcgtcgcgctcgccttcactgagtacctcaccggcgcaccgttcatcaacgcgtagaggcggttcagtccaagccagtgcttatatattttggaagttggaactgtgtatgctagtcagctatagcggcaccatgcccgtagtaggagcctagctacagttggacgagctactttttattgggatttactagtcttgggccatttacttctcttcttattaaagtccactcataaatcagaaatccaattttatctgacgggaataagggcggaagacactagtcaaagttgtttaggctatccacactcgtac

SEQ ID NO: 265999 - DNA, 396 bp, Zea mays
cggctgccgtgctgtccgtggcctcgctggtgccgctgctcatgggccacagcgccgaggccaggagcggcgccgtcatgagcgccgacgccgagctctggaacgcgccgcttcgccatgctcggcctcgtcgcgctcgccttcactgagtacctcaccggcgcaccgttcatcaacgcgtagatgtgttgtgtattttggaactgtgtatgctagtcaggcagtcagctagcggcaccatgcgcgtagtaggagcctagctacagttggacgagctactttttattgggatttactagtcttgggccatttacttcccctcttacccaagtcctctcataaatcagaaatacaattaaatatgaaaaaaaaaaaagaaagggcggcagccgccta

SEQ ID NO: 266000 - DNA, 889 bp, Zea mays
tatcaaaagaaaagagcagcggagcggagcatgctcttcctccggtgccagcctcgcgtcccgtccccgtccgcgcccgccgacgccgccttttcgtccccgcgtccgcgtcgcggctccactgggcgtgcgcgtcaccggcgggaggcgagggcaggcggtggtcgcgatggcgtccgccgacgcgcgcttggcggggatcgcctcctccatccgcgtcatccccgacttccccaagccagggatcatggtccaagacatcaccgtggttgctggtgttgaagctagagggttcatttttggtcctcctatcgctttagccattggcgcaaaatttgtgcctttgaggaagccgaagaagttgccaggcgaggtgatctccgaagagtattctttggaatatggaactgacaagatagaaatgcatgtcggagctgtacaggccaacgaccgggctcttgtagtcgatgatcttattgctaccggtggaacactatgtgcagctgtcaaacttattgaacgtgttggagcaaaggttgttgagtgtgcttgtgtcattgaattgccagaactgaagggccgagacaagcttggggacaggccagtttttgtccttgtggaagcagacgcctgagcggaacttgggacttctcagagagtttggcgccgtcgatgctccctctctggagacaacacagtttcccatgttggctatattctggctgacacgtaataaagtttcattccaaattgtgatcccctgaatgatttgtcaatgtagacatgattgctggtccttgtatactgtggcttattattcacatcaattaaggataatcctgattggagcttaaaaaaaaaaaaaaaaaaagtcgagactagttctctc

SEQ ID NO: 266001 - DNA, 961 bp, Zea mays
gacccaacgtacggcccgcgtccgttcactcgcgtgctgccagtctggcatcccgtccccgtccgcgccggccgacgccgccttttcgtccccgcgtcagcgtcgcggctccactgagcgtgcgtgtcaccggcgggaggcaagggcaggcggtggtggcgatggcgtccgctgacgcgcgcttggcggggatcgcctcctccatccgcgtcatccccgacttccccaagccagggatcatgttccaggacatcacgacgttgctgctcgatcccaaggcgttccgtgacaccatcgacctctttgtcgagcggtacaaggaccaagggatcaccgtggttgctggtgttgaagctagagggttcatttttggtcctcctatcgctttagccattggcgcaaaatttgtgcctttgaggaagccgaagaagttgccaggcgaggtgatctccgaagaatattctctggaatacggaactgacaagatagagatgcatgttggagctgtacaggccaacgatcgggctcttgtagtcgatgatcttattgccaccggtggaacactctgtgcagctgtcaaacttattgaacgtgttggagcaaaggttgttgagtgtgcttgcgtcattgaattgccagaactgaagggccgagacaaacttggggacaggccagtttttgttcttgtggaaacaaatgcttgagcggaacttgggacttctcttctcaaaaggttagagttggcgctgttgatgctacctctctgtcaacaacaaagtttcccatgttggctatattctggctgacacgtaataaagtttcattccaaattgtgatcccccgaaatgatttgtcaatgtagacatgattgctggtccttgtatactgtggcttattattcacatcaattaaggataatcctgattggagctaaaaaaaaaaaaaaaaaaagggcggccgc

SEQ ID NO: 266002 - DNA, 356 bp, Zea mays
gacaggccagtttttgtccttgtggaagcagacgcctgagcggaacttgggacttctcagagagtttggcgccgtcgatgctccctctctggagacaacacagtttcccatgttaccatgttggctattttctggctgacgcgtaataaagttttattccaaattgtgatcccctgaatgatttgtcaatgtagacatgattgctgatctttgtaaactgtggcttatgttttgtcaaaatggttctaattattcacatcaattaaggataaatcctgattggagctaaaaaaaaaaaaaaaaaaaaaaaaaaaaaaaaaaggaagagaagagaagaaagagaacgacacaagaaa

SEQ ID NO: 266003 - DNA, 655 bp, Zea mays
gcggggagtgggtggacgtgccgcccatgcgccacgccatcgtcgccaacgtcggcgaccaggtggaggtcatcagcaacgggcggtacaagagcgtcatgcaccgcgtgctcacgcgccccgacggcaaccgcatgtccgtcgcgtccttctacaacccgggcgccgacgccgtcatcttcccggcccccgcgctcgtcggcgccgccgaggaggaccgcgccgaggccgcgtacccgagcttcgtgttcgaggactacatgaacctgtacgtgcgccacaagttcgaggccaaggagcccaggttcgaggccatgaagtcggccatcgccaccgcgtgagagaagactgccttccgctgccggcttccttcgtggcgtcaagccttgaggcttgaacgaacaacgtacgtccatgtgcttatagtggcacagttatgtgtgtaactaccgatcgtggaacggcctaatgtatttcggttgcctcagatcgatctatatgtgcgtatacattatgtactgaaaagtgtgtagcgtctggttaatgtacgagcagtgtgtatgtgaccaggacccggtgtgtagttgctattactaccatatccggtgaatgatcaaaccttttggtgtattaaaactagatgttcatcccaaaa

SEQ ID NO: 266004 - DNA, 630 bp, Zea mays
gcacgtaccggtccggaattcccgggtctgccgactcttacgattagatctcccagatgttgcagatctctgtgctccccctgcagacaatgcatcaaggaagagggaatcaaatgggtctgctcttcatgactcgcgcaataaatttccaaggatgcaatcacaatcccaaggcataggaagtgctgcagggaacgccctaattccaccgcagcttcgtggaaggagcaatgttgttaccgaagacatgagcaaactctttgtggctaaacgaaaagagtagcatcttaaccttttctggacctgaacctctgtttggactccatagactgataaacgcatgtactgagtgcaatggatgtgccggcatgatccaaggttgttgctgaatcctaaagaaccggacgaaggatgctaacggtaggacgacctggtctcttagcctaccgtgggctgttgtcagatgtcaaaaatgccctcttagaagtttagaacatttctttggtgctcactcgcgtttcatgttcaacggtgctacatgactggtgctggatgcatgtaaactctgcaaccctatcatgttatggcagctagatgctacttcgtcgaagcagtgtaaggccaccaagg

SEQ ID NO: 266005 - DNA, 525 bp, Zea mays
tgcgagcgctattttggattcggatgcgaaattgatgaagagacctccaacaaactcgaaggtcttccaggggttctttttgtgcttcctgactcttatgttgatgctgagaacaaggattatggtgctgagttattcgtgaacggtgaaatcgttcagcggtcgccagaaaggcagagaagggtggagccagtgcctcagagagctcaggatcggccacggtacagtgaccggacccgctatgtgaagcggagggagaaccaatcttaccacagatgatgtctccgtttctggagatggaaaatgccagggtttccacaggtgtgccatactggagatgcaggagcaacccccactacccacatgagaatgacatccgttgtgtttgctgcgctttctaagcttgacaagttgacattgcttatgcgtttgggcttgtacctctagttgatatgacggtgtatccttttaactccgcataacattgtgtttgaagtcttctttagtcagaaaatattgacgatt

SEQ ID NO: 266006 - DNA, 467 bp, Zea mays
ccggtccggaattcccgggtctgccgacggtggcgggcacgacgtgcggagccccattgtggtgacgtggctgcagcccatgtgactgtcaggtggggacaactctacggcctctgtggagcctgccctggctgggactgccgataaagatggcagcaggagtcaaggcgcagtggccagtgggccagtaacggtaaagtcgtgcggtcgggactgcgccattaaaggtgggtcctgcacgctcgctctgcagaattgattaaccgggcgtgctgtaacagtatgggcttatccgagtatagtgactactggtagtgacagtggtgtgtgaaaaactgataactctggtgtttctacttgcttgactgtgtatggaggcaacagtacatgcttgccactgtcggacaggactctggagaaaaaaaaggggatgcaccatctaggcatccccatgaaaaacgagtact

SEQ ID NO: 266007 - DNA, 1352 bp, Zea mays
  unsure (1)..(1352): unsure at all n locations
ttggtcgcgtgggcgcggctgctccccccctagcaaacccgccatggccgagcgcctcgcagcatccgccgccaccctccgcgcctcggccgccgccaccccattcgcccgccgcgcggcgccggccaaccgcgccttcttctcgccttcgctagctcgcgcgcgcgtcggcctccgcgccgcgccctcttcgctcccacagaaggcgagggcagtgaggtgcgcggctgtggcgatggcgtctgacgcggctcaggtgaaggccgcacgcgaggacatcagggagcttctcaggacgactcactcccaccccatcctggtccgtctaggatggcatgatgctggtacgtatgacaagaatattgaggagtggccacaacgaggtggagctaatggaagtttaagatttgatgttgagttgaaacatggagccaatgctggtctgataaatgctctaaagcttatccaaccaatcaaggacaagtaccctagtatcacttatgcagatttatttcagttggcaagtgctacagcaattgaggaagctggtggcccaaagattccaatgaaatacggacgagttgatgttacaggacctgagcagtgcccccctgaggggaaacttcctgatgctggcccaagttcacctgctgaccacttgagggaggtattctacagaatgggccttaatgacaaggaaattgttgccttgtctggagcacatacacttggaaggtccaggcctgaacggagtggctgggggaaaccagaaacaaaatatactaaaaatggtcctggtgcacctggtgggcaatcatggacagttgaatggctgaggtttgataacagttacttcaaggatatcaaagagaaacgagatcaggatcttctggtcctacctacagatgctgctttatttgaggacccaaagttcaaggtctatgcggagaaatatgcagaggaccaagacgcattcttcagagactacgctgaggctcatgctaaactgagcgaattgggtgcaaagttccaaccaccgcagggattctctttggatgattagtgcggcaccagaaccacagtccgtgaaacaggaaaaccctgtccttgaaaaggatcaagagggagcatacaattcattgttcttctcatatcatcgtacaagatggactggtcccccttttcatgatgctatatggagtcttctaatttagctagatttctgaaccgagcttgcaaataaaaaagaaccgacacagtggcactacataattttcagatccattgggagaactgacacagtgctatcagatttggttttatcccttccccnaaaagggaaaatataaaaa

SEQ ID NO: 266008 - DNA, 805 bp, Zea mays
tcgcatgcaaaatgagtagcatcagaagtacgctcgatccgagaacggctcgagacgatcgcattggatgtcttcatgcaatgtcacattaaaggggtgccaggtccttgcatcgaagatgccgatgctcaatgtggagatcatgaatgaactagatggaagtagtgaaatggagaaccatggagacctctctaaagtggacaagttatatgtttaccgcacaactgctggagcgagggatgatgcaccaaattttgttaagatcctacagagctagccgcgactacccttatatcttcccaccttgagagatggtcggtggaatccggcatgcctggggccagggcaacagtggtaagttcttgaatcgtctccccttttgcagggtcaggaaaagccacactggcctgcgcccttatcgtggagcaacacgaccgggaatccatcatcatcctctgtaccaccgcccccctccctttcagtgtctggtcatatggccacccaggcccccctttattacctgtgaattctcccactcgagaggaggggaccgaacggataactttttctagccatgtaacatctctagtgtacttgtctccatttgcttttgacattggcacggtggattgtgttgctggcgtcgctgttgtagtgttttgtttcgcaaacctgagaattatcgggacattccggggacgacgctctgtttcttgctcctgtgaatgcatggactgcatgtaatatttgatggccttgcaggatttatcgtacacacttttcgcccttgcatatttctcgtctc

SEQ ID NO: 266009 - DNA, 1452 bp, Zea mays
aatactagctcggtcattcctgagattcaaagtgcttgtttttatcagctgcgaagggttccccaccgatggtctagctgctattgcgagtcactgcaagctcctgagggagttagatttgcaggaaaatgatgtggaggaccgtgggcccagatggctttccttccctgattcctgcacttcgctggtctccttgaatttcgcttgcatcaaaggggaggtgaattctggtgcgttggagagacttgttgctaggtctccaaatctacgcagtttgaggttgaatcgttctgtttcagtagacacactctcaaagatactattgcgagccccaaatttggaagacttggggacaggtaatctgacagatgagttccaagctgagtcctattccaggcttactagtgctctggagaaatgcaaaaagctgagaagtctgtctggattttgggatgcttctcctatttgtgttccgtatatctatcccctctgtcatcaactaacaggcctaaacttgagttatactcccacactggattattctgatctagctaaaatggtcagccgctgtgtgaaactccagcgtctctgggtactggattgcatttcagataagggtttgcaagtggtggcctccagttgcaaggacctacaagaactcagggtgtttccatcagaattttatgttcctggtgcttctgcagtgacagaggagggacttgttgcaatatcgtcaggctgcccaaaactgacctctttgctgtatttctgtcaccagatgaccaatgaagcgctaattactgtagctaataactgcccaaatttcatcagatttagactctgtatccttgagccaaagaagccagatgccatgacaggccagccgttagatgaaggttttggtgcgattgtccgtgaatgcaaagggctaagacgtctgtcaatatcaggtcttctcacagacaaggttttcatgtatattggaaaacatgcaaaatacctcgaaatgctttctatagcatttgctggagatagtgataaggggatgatggacgtgatgaacgggtgcaagaatctgaggaagcttgagatcagagacagtccatttggcgatgttgcactcttgggaaatgttgccaagtatgagacaatgcgatccctttggatgtcttcatgcaatgtcacattaaaggggtgccaggtccttgcatcgaagatgccgatgctcaatgtggagatcatgaatgaactagatggaagtagtgaaatggagaaccatggagccctctctgaagtggaccagttatatgtttaccgcacaactgctggagcgagggatgatgcacctgattttgataagatcctacagagctagccgcgagtaccctgatatcttcctaccttgagaggtgatacttctcttgcatccaccgttttatctggaagtatcat

SEQ ID NO: 266010 - DNA, 592 bp, Zea mays
cagtacattgattgtggctactcatagtgctaatttctgtcgaagtgtgaaccactcagattccagtacctatagagagcagcaggacctgatatgtctaaccctgttttcccgctcctactcgattgcttttacagatggtcggtggaatccggcatgcctggggccagggcaacagtggtaagttcttgaatcgtctccccttttgcagggtcaggaaaagccacactggcctgcgcccttatcgtggagcaacacgaccgggaatccatcatcatcctctgtaccaccgcccccctccctttcagtgtctggtcatatggccacccaggcccccctttattacctgtgaattctcccactcgagaggaggggaccgaacggataactttttctagccatgtaacatctctagtgtacttgtctccatttgcttttgacattggcacggtggattgtgttgctggcgtcgctgttgtagtgttttgtttcgcaaacctgagaattatcgggacattccggggacgaaaaaaaaaaaaaaaaaaaaaaaacaaagaacaaaaaaagaaaaaaaaaaaaggggggggccccc

SEQ ID NO: 266011 - DNA, 192 bp, Zea mays
gaattcccgggtcgtcccactcgtccgcccactcgtccgggggatgatggatgtgttgaacggatgcaagaatctgaggaagctggagattattgacagtccatttggtgattttgcactcttgggaaatgttgccaaatatgacacaatgcgatccccttggatgtcatcatgcaatgtcaaattaaaggg

SEQ ID NO: 266012 - DNA, 352 bp, Zea mays
gaattcccgggtcgaccgacgcgtccggtggtgtgcagatctttgtgaaaaccgttactggcaagaccatcactcttgacgtggaggcttcagataccagggacaatgtcaaggccatgatccaggacaacgaggagcatcccgccggaccagcagcgtcttatctttgccggcaagcagctggaggatggacgcacccttgcggattacaacattcagaaggagagcaccctccacctggtgctgcgcctcacgggaggaatgcagatcttcgcgaagacattgaccggcaagaccatcaccttggaggttgagagctccgacaccattgataatgtgaatgccaagatcc

SEQ ID NO: 266013 - DNA, 1774 bp, Zea mays
aagggctcgcccaacatcgagatggacgagaagacgttcctgatcaacagggacagggccggcgactacctcaactccctggagaaggtgttcgtcaacgaccagttcctcaactgggaccccgagaaccggatcaaggtccgcatcatctccgccagggcgtaccactccctcttcatgcacaacatgtgcatccggcccacggacgaggagctggaggacttcggcacgccggacttcaccatctacaacgcagggcagttcccctgcaaccgctacacccactacatgacgtcgtccacgagcatagacctcaacctcgccaggagggagatggtcatcatgggcacgcagtacgccggcgagatgaagaaggggctcttcggcgtcatgcactacctcatgcccaagcgcggcatcctctcgctgcactccggctgcaatatgggcaaggacggcgacgtcgccctcttctttggcctctcaggtaccgggaagacgacgctgtcgacggatcacaacaggcttctgatcggcgacgacgagcactgctggagcgacaatggcgtgtccaacatcgagggaggctgctacgccaagtgcatcgacctggcgcaggagaaagagcctgatatttggaacgccatcaagtttggaactgtgctggagaacgtggtctttgatgagcatactcgtgaagtcgactacgccgacaactctgtcaccgagaacactcgggctgcctacccgatcgagtacatccccaacgccaagataccatgcgtcggcccgcaccccaagaacgtgatcctcctggcgtgcgacgccttcggcgtgctcccgccggtgagcaagctgaacctggcgcagaccatgtaccacttcatcagcggctacaccgctctggtcgccggcacggaggacggcatcaaggagccgcaggccaccttctccgcctgcttcggcgcggccttcatcatgctccacccgaccaagtacgccgccatgctcgccgagaagatgcagaagtacggcgccaccgggtggctcgtcaacaccggctggtctggtggcaggtacggcgtgggcaagaggatcaggcttccctacaccagaaagatcatcgacgccatccactccggcgagctcctcaccgccaactaccagaagaccgaggtgtttggcctggagatccccactgagatcaacggcgtgccgtcggaaatcctcgacccgatcaacacctggacggacaaggccgcgtacaaggagaatctcctgaggctcggcgggctcttcaagaagaacttcgaggtgttcgccagctacaagatcggggacgacagcagcctgactgacgagatcctcgccgcaggccccaacttctgaactaaagcaatggatccggatgaataaaacgatggtgtgtgtgcgtgcgtgcgtgtgaagatgattacgacgacgacgacgaaaaaaaggtgttggatcgatgagccaacatagtaatagattagctgggtattgtcatgggtgcgtctggtgttgttatctataaggctgtctgcctgtcccaagcagctatcatattctatttcaaattctattctgtaagcgtgtagttcaaaacaatgctttacacaaccatatgcacagtcttatctcaggttggtctgttctatcagcttgttgggaaaagtttgcgtgtgcttgtatcttgcgccctgtactctctctggtttctgaatttgaatatgaaacagcttgatcgcgatca

SEQ ID NO: 266014 - DNA, 539 bp, Zea mays
aggaagatcatcgacaccatccactccggcgagcttctcaccgccaactaccagaagaccgaggtctttggcctggagatcccgactgagatcaagggcgtgccgtcggaaatcctcgacccaatcaacacctggacggacaaggccgcgtacaaggagacgctcctgaggcttgccgggctcttcaagaagaacttcgaggtgttcgccagctacaagatcggggacgacagcaacctgaccgacgagatcctcgccgcaggccccaacttctgaactaaagcagtgggtccggatgaataaaacggtggtatgcgtgtgaagaagaagatgatgacgacgaaaaaagtgtgttggatcgatgggccagcacagtgtagactagcttttgtatattatctcgggttggaaatctggtgttgttacctaaaatgttggtctgttctatcggcttgttgaaaacagtttgcgcgtgcttgcatcttggcccccctgtattctctgtggtttcagaatttgaacacgaaacagcttggtct

SEQ ID NO: 266015 - DNA, 350 bp, Zea mays
tagagagcactgctggagcgagaatggcgtgtccaacatcgagggcggctgctatgccaagtgcatagacctgtcgcaggagaaagagcccaagcgcggcatcctctcgctgcactccggctgcaatatgggcaaggacggcgacgtcgccctcttctttggcctctcaggtaccgggaagacgacgctgtcgacggatcacaacaggcttctgatcggcgacgacgagcactgctggagaacgttgtcttcgatgagcatactcgtgaagttgactacgccgacaaatctgtcaccgagaacactcgggctgcctacccgatcgagtacatcccaacgccaagatacat

SEQ ID NO: 266016 - DNA, 455 bp, Zea mays
aaaagcaaagcagggctttattcttttctttgaaggcagcacatggatggacgaccgtaggggtacctcaaggcaaaaaaaaacatcaccttgttttgaagatatagcaacaacaacatatatacatggggtctgcctgtctggagtcccaaactgcttcgagacaaatgcatttgctctttgctgttgcagcactacactgatagcatgctacttttttgttttgtttttgcaggtgcaaggatcaggtgaacccaccgaagaagggctacaagtttacgaaccaacctctgaaggaccttggcgtcaagttcactccagtgcatgggtacctgtacgaagcagtgaagtccctgcaagacaagggcttcctcccgaagacctctggcgccaaggtaataacactaaaacaaagagaacaccatatgaagatcacttgaacacacagagagttg

SEQ ID NO: 266017 - DNA, 677 bp, Zea mays
gtttttgcaggtgcaaggatcaggtgaacccaccgaagaagggctacaagtttacgaaccaacctctgaaggaccttggcgtcaagttcacgccagtgcatgggtacctgtacgaagcagtgaagtccctgcaagacaaggggttcctcccgaagacctctggcgccaaggtgcctgaacgacgcagctgcctgcctcaaacgacatcacagccaccgcccgaaatcgtttcgaaactttgaggtggatctgcacacgtgctcaaactggccatgtgtttttttgtcagaacaagccgttcatttgattggttattaaaagattttgggcagtctgttcttacatagcaaaaatgtcttgtctctgtctatggtgcatcctgttgcttttgcactacaactatacacatccttgtctgggtagtctgttctttacatagcaaaatgcgaagtctgcagggtgatttcagcgatgatggaagcatgcccgcccacctcttgactgcatgcgctggtcagctgcggcttattctacacatcttgcttgtctgtactagcctttgcatcgtgccttcgtattatgcttttctcctttcatagtacttattgacctttgcggccatcatcatcattttcatgataggccaccttgcccaatcttgggtatggacttaaacc

SEQ ID NO: 266018 - DNA, 2058 bp, Zea mays
  unsure (1)..(2058): unsure at all n locations
cccacgcgtccgcccactcttcccatttcccagccgccgcggcgccacgcagacctagcagagaaacacccacccgagatggcgatggctctgcgccgccttgcgggcgtgtccggatcgccgtcggcctcctctgccgcggccacggtgctactccggtcggcgctgacccgcccgatctccaccggcttccgcgaggagcgcgacaccttcggtcccatccaagtccccaacgacaagctgtggggcgcgcagacgcagagatcgctgcagaactttgacattggcggggagcgtgagaggatgcccgttcccatcatccgtgcctttggcgtgctaaaaaagtgcgccgctaaggtgaatatggactatggccttgatccaacaatagggaaggccataatacaggcagctgaggaggtcgcagagggaaagttggatgatcacttcccacttgttatctggcaaactggcagtggcacacaaagcaacatgaatgccaatgaggtaattgcaaatagggcatctgagatccttggacacaagcgcggtgagaagtttgtgcacccaaatgaccatgtgaataggtcacaatcttcaaatgatacatttcccactgtaatgcatatagcgacggccgttgagatacattcgaggtttatcccaagtttgcaacagttgcatgattcacttcattcgaaaactattgagtttaaagacataattaaaattggacgtacacatacccaagatgccaccccattgactcttggccaagaattcagtggctacactacacaggtcaaatatggaattgaccgcattaattgtacattacctcggatgtaccagcttgctcaaggtggaactgcagttggaactggcttgaacaccaagaaaggatttgatgccaaaatagctgctgcagtggctgaggaaacaaacctaccctttgtgacagcagagaacaagtttgaagctttggcagcacatgacgcttttgttgagagcagtggtgccgtaaatacaatttctgcatctcttatgaagatagcaaacgacatacgtttgctaggaagtggtcctcggtgtggtcttggtgaactaatcctaccagaaaatgagcctgggagcagcattatgcctgggaaagttaatccaacccagtgtgaggctctgacaatggtttgtgcacaggttatgggtaatcatgttggtgttacaattggtggtgccaatgggcattttgaactgaatgtttttaagccaatgatcgcagccggattacttcgatcattgaggttgttaggggatgcatctgtgtcctttgagaaaaattgtgtcaggggaattcaagcaaaccacaagagaatttcacaacttttgcatgagtctctgatgttagtgacatctttgaaccctaaaattggctatgacaatgctgcagctgttgctaagaaagcccacaaagaaggaaccacgttgaaggaagctgcattagaccttggagtattaacggagcaagaattccatgagcttgtcgtcccggagaaaatgattggtccttctgattgataaccccatgttcactatgtttctttgaagcattcaggttgccacatccgcgagttctggtggccctgtgtttccaagttaatgattctagcgcacccataaataaagcaaataatttttcatatggtcattaggtcctcaccgtaccgcactagagaaatgatttttgcatggcggatggtatctgagaaaacagttgtattcttgttcaaatagggagcagtgcactttgattcatgaggcgccttccattatcttggcatcagtcaaccttttcttgccaagtagctagtgctatgtaacaagtgacatggcaaccatgtatagaaattatttgcatgggtttgtgttcttgccaggtagctaatgttatgtaataagtgacaaggaaacaatgtcatgaattatttgcattgggttttgacgagtgaaatagaaatatacgccctgttttagttttctttttaaaaaaantaataaaaa

SEQ ID NO: 266019 - DNA, 849 bp, Zea mays
taccggttcggaatgcccgacgcgtccgcggacgcgtgggcggacgcgtgggttccgagtcgtcgcatcaggtccgatcccctcgagtgcgccggcggcgccaccaaccagcaagctgccagagttccagatcggtcttggaacaattgttgtccagtctagtaatcttctttcacctcaggaggcacaacttgatggcaatgtagtcacagatttgccaagtgatcctatattgcacaacatgagaactcgaagggttcaagctgccagcatgggcatatcagaatcaagacaaaagcaagtctaccttatttcactgataaacaaaggcagagttgtggccaaagggaagttagtgactacaaatagccaaagagaaatattaggagcaaagcttggaccaaaatattgtggggttcttgttgaaggccttgaaaatattgaacttggcaatattatagatgaggaggtacctagaccatctaatcagattcgtacactaattgatgctattggctatgttattccttggccaattacacatgtgaagcaagctagaagctcatcttgtacccgcaacaagttggtacctgcagcacgtggacaaagctagatggcgtggacaaagctagatgggaagcctagtataattgcaaagtgaatcagttagattctagtagttactaaaatttttaagtgatatttgtatgatattgccactttggctttgcttctttgtgaacacaattggcagttactgaacatgtttgctatcgagttagttagcttcttgatattttgccaaggccaaaagcaatattatagagggcctctataatttgatttttt

SEQ ID NO: 266020 - DNA, 729 bp, Zea mays
tctaagcacgtgggtactatgatgataagtactggagtcaagtacaagcttttgaaggtttaccgtttgttattcaaacagaggaagaaagaatgtaccaagagaaagtaaatgaaattgacaataaaatggaatccgtgagtggtctcatgaagcattggcttacttttatgtcaaaaaagtatctagaagatttaaccccagagatgagagaacctttacaaaatgaaggtggtgatagttatgaccaatgcactgaagatgacaactctgaaaattatgctgccaaagatacgagtagcatccaagaagattcaaatgctgacgtgaactctccaacaaatgaagtgcataacatggttcatgtcgagcagcagcaacaacaatctgtccatagaagtcttggacgaactcaagtccatacatctacaccacatgagcaaacaccttcaaaggaggcacaacttgatggcaatgtagtcacagatttgccaagtgatcctatattgcacaacatgagaactcgaagggttcaagctgccagcatgggcatatcagaatcaagacaaaagcaagtctaccttatttcactgataaacaaaggcagagttgtggccaaagggaagttagtgactacaaatagccaaagagaaatattaggagcaaagcttggaccaaaatattgtggagttcttgttgaaggccttgaaaatattgaacttggcaata

SEQ ID NO: 266021 - DNA, 531 bp, Zea mays
tccgaaaggatcttagcggatttcggtgaggcggcggcggaccccgacgccgtggccgagctcccaccccttctccgggcgcgcgctttccttgccttggcgcaggccgcgacctcccttctcggagttcgtttaaggtgttcgggagttgaccctgacgagcaccccatcagaaaggagtttgaaaggttaagcctaatgcaggagaagttaaatcaatttgagaactgggacaaagcaccacttcgcccttctactacactaaatacacaagcagcagcaaggttcattggacactcactttcccatctgacatctgatcagaagaggagcatgcatgaaataagtagaggagaaaggcggagttggtctgggcagaagagaaagcctgaaccttcaatagaaaagaagtctgttcgtgctgctgcagaagagttccttgcaaaggcttctcaagaacttattggacatagtgattgcaaggtcaagggttctgttatactaatttctgatgaagatgaagactagatc

SEQ ID NO: 266022 - DNA, 1137 bp, Zea mays
tcgcggacgcgtggtaattccttcccccgctttctccttccttcctcctgcctcccggctcccctcacccagccaccggccatgtcggtggagacggagcggagctccaccgagtcctccggggcttccgggctcgacttcgaggacaccgcgctcacgctcaccctccgcctcccgggctccgcgccttccgccgccgccgccgccgcggcttccctgtccctctcctcctcgtcgtcctccgccttccccgaccccgaccgcaagcgcgcctcctccgacgctgaccccggccgctcctccccgctcgccgcgtcctccgacgctgcaccggcacccaaggctcgtgtggtgggctggccgccggtgaggtcgtaccgcaagaacgcgctcgccgacgccgcgggctccagcaaggccgccaagttcgtcaaggtggccgtcgacggcgcgccctacctgcggaaggtggacctccaggcgtacgccggctacgaccagctgctccgcgcgctccaggacaagttcttctcccacttcaccatcaggaagttcgccgacgacgagaggaagctggtggacgcggtgaacgggacggagtacgtacccacgtacgaggacaaggatggcgactggatgctcgtcggcgacgtcccctggaagatgttcgtggaaacctgccagcgccttcgtctgatgaaaggttcagaggccgtgaacttggcaccaagagccgcccgatgaggcacactccgttgggcgttggcacgcacgcacgcactggcgtcttgaaggaaagggggaactctgctggtcttgatgaggatcttcacgtgagataggaacgtgtgtacagttgtcgccttatggtattgagttgaggaaacttggaagttccattacttgtctgtagtctctactttatatagatgcgaagaagcttgagatacacattgcctacaatgtcttttgatgaataagaccagacagcaccgaaccgaactcgtcctccacacggttgctttgccatctcggtggttttgtggtggtggtggtggtcgtgctgcctataggtctgaggctgatggcgtggctgccatttatacaatctttaatcgtgttttgttgagctttatt

SEQ ID NO: 266023 - DNA, 399 bp, Zea mays
ccacctcgaggtcttccaggaagctgagcttcttgtcaacattaaggaccatgtcctagtgccagagcatgtgctcctgacaccggaagacaagaagactcttctagagcggtacaccgtgaaggaaacccagctgccccggattcagattacagacccgatagcaagatactatgggatgaagcgtgggcaggtcgtgaagatcacaagagccagtgagactgctggaagatacatcacctaccgctacgttgtctgagttttgctacattctcatggcttaagcttccgcaccaagcgaaaatgacctctacttgctaatcctgctgtgtactcggaatatctgttgccctggtgcccttccttgagaactgatctaaaaaaaaaaaaaactcgagg

SEQ ID NO: 266024 - DNA, 458 bp, Zea mays
ggtccggaattcccgggtcgacccactcgttcggaagatttaggaacaccactctctcggttgttaggacttatacaagatgtgtgcattggggaaagtggaccgcacttggactcgaagcatgcgtatgttattgtcaggcatgtgaagtttgcaacaaagaaaggtgggaagaaagctagccaggccatggaagatgcaggaaaaggtaccagcagtgctgtcccagagtcacccgttgatggcagcaataccgaagacatggcagttggacatggtctcgggaaacctgatgatcgtaccatctcagatcgtgttaaggaaacagccacccgtctctccagagactcccctgcccaaaaggaggggcacgatagagaatttaaaagggagttcaattggccaaaatccaacccaggggctggtggaaacagaaataatcctgccagaggggacca

SEQ ID NO: 266025 - DNA, 1087 bp, Zea mays
cccacgcgtccgcccacgcgtccgcccacgcgtccgtggaataccaaaactcagttcagtcacgtctctaggagggaaacacgttgagtttgttagcgttgacaaatgtaaagaggaaaaaggtggtccttatacagcatctattccattaaatcaggcaacaaatcctgatgctgatgtattacttgcatatgaaatgaatggagaggtactcaaccgggaccacggatacccgctccgggttgttgtacctggcgttattggtgcacgctctgtaaaatggctggacagtatcaacgtaaaagaggaggaatgccaggggttttttatgcaaaaagattacaaaatgtttccgccaaccgtggactgggacaacattaactggtcaactagaaggccacagatggatttccctgtgcagtctgctatctgtacactggaagatgtagatgttatcaaggaaggacaggctaggattgctggatatgcactttcaggtggtggccgtggcattgagagagtggatgtatcagctgatgggggtaagacctgggtcgaggctcgtagataccagaaagacaatgtggcgtatgtgtcagatggacctcaaagtgacaagtgggcttgggttctctttgaggccacattagacgtaccagcgaatcctgagatcgtagttaaggcggtggactcagctgcaaatgttcagcccgagaaggtagaagacatatggaatctgagaggaatcctcaacacgtcttggcatcggatcaaaattcagagatctttgtgcgttgaaagatctaagctgtgaaattaagtacgcagctgatcacttggagcaagcagactcactttaccattgtcccagaataataattagtcacttcaactttctgcgtctgtggagtaaggttgtacgagtgttggggctgtgtcattatgggatttgagctcacttggtttctgtgtaaatgtcagctgctgcggtttttttggtcactggatgactgctgctgctggctggtcaggtttgatatcgagaaatatccattgcattctgcgtttgaaaaaaaaaaaatttatt

SEQ ID NO: 266026 - DNA, 511 bp, Zea mays
tcggaattcccgggtcgacccactcgtccgcccactcgttcgtgcaacctgtggctaggtagaatgtgggctacttgagggcaactggggatcgacaatttgatgcagcacagcaagcttaccatgctgtgccaggagcagccatggcggatttgagcttcaaggagtctatacaggcatatgcaatggaacaaggtttgctatttatgcctagagttggcaagttctataatggcatgccagtgtatgagttcggcacagttagtatttgcatagactctgtgaagcgactactctatgcacaacttcaagagggaatcgacagatggagtcctgtaactcttacacaattgatggacatgaaccgaattggaagaccacactagtagatcgctcctagcctttgacttgcatgatgtttttactttcttccctgttgtgtaaaacttttcagagatgtcaattcattagctcttttgaacaatatctccgttaaaaaagaaaggggtta

SEQ ID NO: 266027 - DNA, 3058 bp, Zea mays
cccacgcgtccgcccacgcgtccgtgctgctgcatttcacccagaagacaaaggtatcgagcagaacccacaaactcttgacaaagatgaactttctccatccggattgcctgattatatggaacatgtaagcgccgatgggatgcatccacttggatcaaacgagttatccatggctacaaggaccagtgagacaggagatggggaggaaactatagtagaggatctgtataaaggagaaagtgaattagaaaaccaaaacaaacaattggagtcctccccacctgaccaatatttttcttctcctggaattcctgctccctctgtagtatccactgctttacaggtgcccgcagggccgattgtggttccagcttctgttgacccaacccaggaaaatgctatagctgcattgcagattctaaaggtgatcgaatccagtgctcaagctggtgaattgtgtacccggcgtgagtatgctcgatggttggtagctgcgagcaattgcctttcaaggaacactttctcaaaagtgtatccagcaatgtatattgataatgtcactgaacttgcatttgacgatgtcacacctgaagatcctgattttccattcatacaaggcctagcagaagctggattgatttctagcaagctttcaagatctgatatgaatatcccagaagatgttcatgacaatcatatcttgttttcccctgagagtcctttgtcacgtcaagaccttgtgagttggaaaatggccctggataagagacaactgcctgaagttgacagaaattgtttgttcaaactatctggctacatagacatcgataagataaacacagctgcctggccagctttggctgcagacttggatgctggagaccagagcattacagctcttgccttcggtttcacaagacttttccaaccgaacaaacctgtgacaaagggacaagctgccctagcattttcagctggtgattctggcgaagtggttctggaggaggttgcccgtatcgaggcagagaaaatagctgaagcagctgtaaatgcacatgctgcattggttgctcaggtcgagaaagatcttaatgcaagttttgaaagggagcttaaggaggaaagagaaagggtagagacccttgaaaaagtagctgaagaagctagggtggagctagataggttgagggcagaaagagaggaagagaagaatattctggtcaggggcagagctgctgttgagtctgaaatggaagttctgttgaagttgaggagtgaggtagaggaacagctgcagaacgtactgagcaagaaggtggaggtgtcgttcgagaagagtaggattgagaaactccaaaaggaaattgagagcgataactcggctgttgtgcaacttcagtatgagcttgaagtggagaggaaggcgttatctatggcaagggcttgggcagaggaggaagccaaaaaggcccgggagcatgcacgcgcccttgaggaggcccggaaccaatgggagcgtcaaggaatcagagttgttgtcgaaggagaactgaaggatgacgcctcagctggggtgacatgggctaacgctggcaaagaaaacgcagtcgacgagtctatcaaccaggcagaagctctgctggagaagctcaagacaatgtctggtgagatggaggtgaggtctcggggtgcggtggagagagtgatgcagcatgtgaggtccttcatcgcaatcctaaagcagcaagctgcagatgcaaggcagtggtgtaccgagtttggggcttgtgctgcttccagggcaaacgaggtatcagcacaagtgaagggaagcgtatctgcgtttggtgcaacccttggagacaagtcgaagagggcaatggaagagtgcaaggacggcctggagaggatttcacacagattcaagacagactagataccaattttgttgtttgcttgttttttggggatgatgttgttgcagagttgtttactatagcatgctggaacgaacagtaagtagttcccgaccgtggccttgtggaataagtaagtgcaacgaagcacttgtggccttctggaataagtgtaattaataccaacagtaattaataatagttcccgtttattatattatatcacaagatggatctgtctgtcgcttattctgcctttggtcgtcagagctttgatgctgttttgagctttgtgctcgactcaaaagccttgctgctgctgccttgcaccatgcgtgccttcttcacttggaaaaggagctcgtgggcttcctcaaaatgagggctcgtggctttcttcaccttgtccatccagacaaggatcctctcatgagctcccaggaatcggtcacggacctcatcgccaaggatctccaactgcattatctcacagacaaggctcagatctgcaatcgatggctgggggctacctagcaagaacttggcatcgcctttcagccatacggattcgatcacccccagtgactgcatcacaagcttctctgcttgtttcacagcctcatgacttgtcgtaagaccaaggaagggagccaatgcagtgtgcattacaagggttgctgcaccacgccgcaaatttgagtgatgccaatccaagattgactcaattttggctctggtgaacaagtcagaaggataccagtggtcagctactccagggaaaaccgatgcaagatacctcaaaatcgcatgactttcaaatagtttgaatcttccatcaacaattgcaggtacctgtcccattgggtttatttttttgaattcgggtgtgaggtgctgagacttgaacagatccaccgtgacctcctcgaaatcgatctggttcaccctgcagaagatgatgacagctcgggagggttgcgaccgccggtcggcgtacaccttgacgggctgcatagcgattcgaagcttggggaggcttctccgaccctcgctgctctgctaaaatctgctcttttccactgctgcacggaacctcggataagcgggatcgcgctgggctcgggcccttccaattccgg

SEQ ID NO: 266028 - DNA, 404 bp, Zea mays
ggggatacctagcaagaacttggcatcgcctttcagccatacggattcgatcacccccagtgactgcatcacaagcttctctgcttgtttcacagcctcatgacttgtcgtaagaccaaggaagggagccaatgcagtgtgcattacaagggttgctgcaccacgccgcaaatttgagtgatgccaatccaagattgactcaattttggctctggtgaacaagtcagaaggataccagtggtcagctactccagggaaaaccgatgcaagatacctcaaaatcgcatgactttcaaatagtttgaatcttccatcaacaatgggacaggtacctgcaattgtcgccggaagattcaaactattgcaggtacctgtacccattgggtttatttttttgaattcgg

SEQ ID NO: 266029 - DNA, 1038 bp, Zea mays
ccatgtcattctagtccaatacgaccttcatttgttccaaattgtcatcttccagtcaataccaccaagcaatctctggacttagggggatcagtgccacagaatatgcagcgaaggtcagttgatttggtagtcaattcgaattatcgaattgaagcaaatacaaatcagccacctcgtgtgctattgaacagtgcaagatacatccagaaagaaaaggattcaacaacaacaagacaagcatttctgcagctagcatggaagaatggcttgcctttattcatgctgtcttatggcgattctgatatcctggcagccactgttagaaggaagggcatctctgaaaaggatgatctggaaagcacatatgctgtattcactgttgaagaacctaagaaaaaaagtggagcttggatcaaggcagggggcaagaacaagaaacaccaccttttgtctagcatagttggggaaataaaggttgcacgtcgaaaatcaagatgtcaccatacagcagatgttcatgtatacagggaatttgtgttgcttggttccagatttctaccatcgtctgaagaatcaggtgattcaaatgttagtggagagcttgcggcttttatcagcgcacttcctcagcaagaagcagaaacttcgaagcaatcatcttcacagaataccaggcaaagaaattcagtgccaattggctgtggttgccccccactgggaaatttccatcctagcacgagaagtgctaatccctgcgtcagccaatgttgttgcagtacttcctgatggcttccatggcacaacaacatctggacagccattgcctttgatcgagaggtggaggtcaggaggagcttgtgactgtggcggatgggatgaaggttgtatgctaagcgtcctcactgatgcggcccaagagaatgatgccattcaggctaaccaggtaaaggatggcagccagagatttgagcttctagatcaaggtcgatcacgagaagagaggcatgccttcaggatgacttcctttaaagaggg

SEQ ID NO: 266030 - DNA, 539 bp, Zea mays
ccatcatctgaagaatcgggtgattcacatgttagtggagagtttgcggcttttattagtgcacttcctcggcgggaagcagaaacttcgaatcaatcatcttcacagaataccagacaaaaaaatttagcaccaactggctgtggttgccccccactgggaaacttccagcctagttctgcttcagccaatgttattgcagtacttcctgatggcttccatggcaaatcaacgtctgggcagccgttgcctttgattgagaggtggaagtcaggaggagcttgtgactgtggcggatgggatgaaggttgcatgctgagtgtcctcactgatgcggccgaagaaaatgatgccgttcatgctaaccaggcataggatggcagccagctatttgaacttactagctcaaggtgcgatcacgagaagataggcatgccttcactatgacttcattcatagagtgtcattatacaatgagcatgcatatcatccattgcattacttcaggcttgtgcaactggtctagtgatactgcatga

SEQ ID NO: 266031 - DNA, 823 bp, Zea mays
ctgtctcgtgggttctatttgtcgcttcaaccatcctgatcggccagggccagctgcggatatagcttttatggttccactggttcaagctactcttccttcatcagcacccattgtccctgcagtggttgaacctttgccaatgatctatcctcaaaggccaggagaaactgtttgtgatttttacatgaagacaggatcttgcaagtattctcagaaatgcaagtttcaccaccccatcagtcgttttgccccgcattccaaagaaaacggggatcctcaacagcctgcgacacttgctagcctgccaaggagagaggacgctgaggcttgtgccttctacatgaggtctggcatgtgcaggttcggtgcgcactgcaagttcgaccaccctcctcgcgaggaggctatttccgagctgcaggcagccggaaaggaaggaatagaagggccgagcctcgtccagcgcgaccatgatgtctaatactgtatcctgcatcagtatgtaataccatgtgaatcgcactgttagttaatgcttggtgctgtcagtcttgttgggagtctgactcgtaaagctcattatcatcggaagtgtttgtcggaggagtgctggcactaactatttatcttcagttggttgtcgtgttgccaacttgcgatgtcaaggtgcatatttcagtttttttagagtaaaaatgcactttacatcctgccgccaaacttaactatgggcctgtttatgcccctgtttggtttagcttttttttaccagcttttctaaaaatctggttgcggaaagaatttgagtattgtgaagatt

SEQ ID NO: 266032 - DNA, 867 bp, Zea mays
tttttccaccaccaccggacagggacacggacggcactagctcgaggagggtcggcaagccagagtcacagcagaaggtgaaagggagcggatatgggggcggatcgtttcctgagcgtggcggagggcggcctcggcggcgaggcgctctacttcgcggtcatcctgtggctgtccgtcatgtcgtggatcatcttcacctgggtcggcgacggcggggaggacgggaggcgggggaggaagcgccggggcagccgcggcagcccggtgttcgtcggcgcgtcggggatctgcgacggcaccgggcccgagtgcagcggcgggtacggcatctgcggcacctgcctcgactagcctgctctgctactagtaagtttgtgtgagcgtcaaaagcgcggccatgtttgtagctgtagcgtctacatgtcgtcgtcgtcgtcgtcgtcgtcgatgcgtggcctcgatggagaagctggcgttgctctggtgatatgatgagagcagagcagctcccctgtgtgaagacaataagagggaggagcctactcatcagcctacttccatcttgcttattaggctgctcaaactgagttgtcgttagctcttttttttatttctccttcctttaaagtttgatctcgatcctctgtaaatttaagctgcagaagaaccaaatacatgtctcgaacagtactatgtgagacgagatccttcttcgtccgcgaggtttgttagtttcctgctgcgtttagctgctgtgggggggaatttctctcgttgtctgaggagctctatcctatgacagatagttgggcacatgtccttttcaggtaggcaatctgcagtggttagtgggaagtctcaaga

SEQ ID NO: 266033 - DNA, 1278 bp, Zea mays
atgacgcggacggtgccgaagcggacgcggaggcggcgctgagctacggcctcacggtcgttgggaaggggcaggaggaagtattggcggagcaaggacagggtcctcgaggagtacaccaccttctcggtgaagcaggtggagacggcggcgaaggagaagtcagaggtcatggacgcgagggcagtggccgagatcacgccggaagaagctgtcggggataagaaggaggttgttgaggagaagtccgcggcgttctggacgacaatagcgccgaacgtggacgattacagctcgtcggtggcgcggctgatcgcccggggatcggggcagctagtgaggggcatcatctggtgcggtgacatcacggcggggggcctgcggcgtggggaagaagtgatgaagaagagcgtgggtcccagcacgaagccgacccaggtgaagcccagcactctcagaaggatgaagagggctaggagggttacaaagatgtccaacagggtggcaaactcaatcctgtctggtgttctgaaagtcactggctttgtcacaagcaccgtgttgaactccaaaccagcacaaaagtttttcaagttaatgcctggcgaagttattcttgcttcacttgatggatttgggaaaatatgggatgctgtggaagtgtctggcaaaaatgtgatgcagacatcctcagttgtgaccacttctgttgtaacacacagatacggtgaacaagcaggtgaagccacacacaattacctccacgctacaggaaatgttctcggagctgcgtgggctgtattcaagattagaaaagccctcgaccctaagggtaatatgaagaagtcttttgtcagccaagcagcgcacgccgtagctaaagaatcagttgcgaggcaaaagaagaagtgaactggcctggtcggtggttccattgtacctgtaatttgatatgtttgatgttgcagtatgttagcaatataggaactaagttgctgtttggtttatatgtttgtaatgtaatagataacaaataacgtttgatcatgtttgtttaagtctaaccgtaatcggataccacactagaaattgttaccagcctattcaaatttgttaccgctggtaatcgaatgtaaatcattaccgttaccatttacgttacattttgggaaccaaacgacacctaggaagctaggtcttagtgagtttgtggtgtcgtcattagattttgatcttctttacttctttttttgggccgtgttcgcttttttaaacagg

SEQ ID NO: 266034 - DNA, 617 bp, Zea mays
tttttaacgacggtaggtttttaactgctgaaactgaagtatctgtgttacatgtgtatgttcacagcagatgaacttttactagcagatgaactttacagcgttacatgtgtatgttcacggcagcaccctgtgtgtgtgtatgtgtatgcgtatgcgcctgcgcaacctactacttcgcggcctcctcctccccctcctcttccttccagaccggaaggatgccttgcccagccagcctcttgtagacccagaacaccacgtacttggccgttatcctcttctcatcgatcaggaacggctcgatggtgctcacttcgttgctgtaggacgatagcgcaaagcccttcggtcctgtgaggtctccttttggaaagaaggcccaaaaataataagggacgtcgttctttatgaaggatccctccagcgtgttgttttcgaaggcgagctggacctgggacacgtcctcctccgcctccaaggcggccttcagcggcgggatgatctcctcctgcatcatctccggcagcggcagcgccgcggccttcttcggcttggccgctgtggcctccttattggcaccgtccttcttcttgctaacagcggtggaggtggac

SEQ ID NO: 266035 - DNA, 427 bp, Zea mays
tctctttttttaggtcggttttttttttttttttttttttttttttttttttttttttttttttttttttttgtctcagcagctcttagcatctgtatatatattagcagacgaactttaacagtttcagacatgatgactgtgtgtaggttcacagcagcaccctcctgcctcctgctgcgtgtgttctacttggcgtcctgatgatcctccccctcctcttccttccgagaccggaaggatgccttgcccagccagcctcttgtaaacccagaacaccacgtacttggccgttaccctcttctcgtcgatcaggaacggctcgatggtgctcacctcgttgctgtaggacgatagcgcgaagcccttgagtcctgtgaggtctccttttggaaagaaggcccagaaactataaggacgtcgtcct

SEQ ID NO: 266036 - DNA, 469 bp, Zea mays
tgattgaccctagcatcggcttcttccccgaggacactgcacgagccctttgtgaggttgtgaggtcctgcatcgatcgggatccaaagacgagaccgcacatgaaagaggtcgcagctcggatgagagagatcaccgcgctagggcctgatggggcaactccgaaggtgtcaccgctctggtgggctgagcttgagattatgacttctgagagctgagttcgacgcatgccagatgatattgtttctcctagtgtgactgagaattctttgagctactactggctgctgctaatcttgtttgtggaagtggtgattaggtagaatttgttatgtgtgcagaattgcatatagggattggtattgtacttgtacatgtcaagaaggtttaacacacaacatactgatacgcaggcattccagccaggtgagcaatagaaagcatgtgtggcttgtttttgctgcaataa

SEQ ID NO: 266037 - DNA, 997 bp, Zea mays
accggtctcggaattcccgggtcgactccactcgtccggataggcgtagcatatggtgttggtggttgggcagatctcggtgtctatgcgtggacgatatgctaaggagcggatgagaaattcaatgagcgctatcaaagatgagccagaacggaccattgatccaaccagagttttggaaaaggcttatattagtacgaaagcaagggggtcatctaccgcgtgtatcatcactcttaaagatcagggtatccatgctgtaaatcttggggatagtggtttcgtagtagtccgagatggccgcactgttctcaggtcaccctcacagcagcatgatttcaattttacttatcagctcgagagtggaggtggcagtgatcttcctagttccgcacaagtatttcactttccggttgccccgggtgatgttatcgttgctggcacggatggactttttgacaatctatacaataatgagataagtggtgttatcgttgaagcgctcagggttggacttgaacctcaagttgcggcacaaaaaattgctgccctggctcgacaaagagccacagacaaaaataggcagtcaccatttgcatcggccgcccaagaagctgggtaccggtactacggtgggaagctcgacgacataacggttgtggtgtcgtatgtgaaaagcgcttgattcgagcctttctttttattagatgtaatgtcaaaatcttagtcccgaatttaatggcacatgtgttctcaaggtgtgaaatcccctgagatactagaagcactcctgctgggtttagccctggaatacgttagcaaaccattacaccattttacttgtttgccactgtgagtaatcttctttttatatataattctctaaaaccagggcggtcgtttcgcccttgggagttggagggggaggataatgacctgctggaaccaaattttgttgtaaatattgtcgattgccgaatgataacatgttggactc

SEQ ID NO: 266038 - DNA, 596 bp, Zea mays
  unsure (1)..(596): unsure at all n locations
gataagnggtgttattgttgaagctctccgggttggacttgagcctgggattgcatcggagaaaattgccgccctggctcgacaaagagctacggacaaaaataggcagtcaccttttgcatcagctgctcaagaagctgggtaccggtattatggtgggaagcttgatgacataacagtcgtggtctcatatgtgaaaagcgctggagccccatgatctgagcctttcttttattagatgtaatgtacataaatctttgtcccgaactggcggcgtatgtatgcaccagggcatagaagcttattctcaaggtgtggaatcccctgatcctagaagcacctgtgctgggttcagtatggttgcgctttagccctggaacatgttagcaaaccattgcaccattttacttgtttgccactgtgagaaatcattttctctaattatctgaactcctgaagccagggtgggtttgtttccccccttggagttggaggataatgaccagctggaaccaaattttgttgtaaacagcgttgattgccgaatgatagttatagacatcttggactaaatggtgaaccagcgatgctgtttg

SEQ ID NO: 266039 - DNA, 1014 bp, Zea mays
cggacggtgggccaccccagagagctaccctgaccagatttggccgcttcctcctctgcctcccgctaaccctagtccagccccccgagatctgctccgcgcgagcagccatggcggagacgctcgacatgaccctcgatgacatcatcaagaacaacaagaagagtaacccctcctccggcggggcccgccgcagccgcggcggatccgcccctggcggcggcagcggcggggtcgggccgaccaggcgctccttcaagagggctgggaacaggcaggcgccctaccagccgccgaaggcccctgacgctgcgtggcagcacgacatgtaccctgcggtcgccgcaggaggcggcggcggcgggagggtctcggcgctcgagacgggcaccaagctctacatctccaacctggactttggggtttcgaacgacgatatcaaggagctgttctctgagctaggtgatctgaagcgtttttcgataatatatgatcgaagtgggaggtctaagggaacagctgaagttgtatttgcaaggcgttctgatgctgtagcggcggcgaagaaatatgacaatgtccaacttgatggtaagcccatgaagatagagatagttgggaccaatactccagctgcagcagctgctcatccagtccctaatggtggccatgctaggaatgctgcgaggagtgcaccaaaggatgctgctccagcaggtatgtcgcagcatagaccccatcagaggggtgggaggcgtgctgctggatctggtggtggtcgtcgtggcaaggagcgcacaagccaaagtcggctgaagaactcgacgctgacttggagaagtatcatgctgatgcgatgcagaccaactaaatgtgttcacaaatttgatattcaacatcaaatatcaagcacattagtccttccattccagctgtttgtgctaccatgttcaggggacaacaaacattttcttttgtgttggggggggggggtttcgctttactgagtttttg

SEQ ID NO: 266040 - DNA, 547 bp, Zea mays
  unsure (1)..(547): unsure at all n locations
gcctttcnagccaaaagaaatatccaattcctcaccctaccccctcgctgctttcgcctccccgtcgacctcgccaatctccctcccgctaaccctagtccagcacccgagatctactccgcgcaaacagccatggcggagacgctcgacatgaccctcgacgacatcatcaagaacaacaagaagagtaacccctcatctcgcggggcccgccgcagccgcggcggatccgcccctggcggcgggaccggcggggtcgggccgaccaggcgcccctttaaaagggctgggaacaggcaggcgccctaccagccgccgaaggcccccgacgctgcgtggcagcacgacatgtaccctgcggtcgccgcaggaggcggcggcggcggcgggagggtctcggctctcgagacgggcgccaagctctacatctncaacctggactttggggtttcgaacgaggatattaaggagcttttctctgagctaggtgatttgaagcgtttttcgattaattatgatcgaagtgggaggtctaagggaacagctg

SEQ ID NO: 266041 - DNA, 1179 bp, Zea mays
cggaattcccgggtcgacccactcgtccgcgcactctttcgtggacgcgtgggcttcttcagatcgatcccattgatcgatgtggggctgcttgtcgaaaagattgatgatccaagcatggccaactataaggatttactgcatgttgtccggttactggatgatgcttgcaaggaggcctgattcttctatgtgaaaggccatggtattgatgagtcactgatgagggaagtcaggaatgtaacccgtgaattctttcaccttccttatgaggaaaaattgacaattaagatgacacctcaaagcggatatagagggtatcaaaggataggggaaaatattaccaagggtaagcctgatatgcatgaagcaatcgattgttatactcctattacacctggcacatatggagatctcgctaaaccaatggaaggatctaacttatgacatttcaagaaagataatgcgaggtatagccttggctttgggaggggcaattgatgcttttgaaggggatacagctggagatcctttctgggtgttaaggttgattggttatcccgtagatattccagaagagcagcgcactgatactggctgtggagctcatacagattatggacttctaacactggttaaccaggatgatgacatatgtgcccttgaggtgcaaaatcgttctggtgagtggatatatgcaacgccgattcccggaacctttgtttgtaacatcggtgacatgctgaaggtttggacaaatggaatatatcagcccacccttcacagagttgtcaacaattcccagcattaccgtgtatctgttgcattcttctacgagtccaacttcgatgctgcagtagagcctgttgagttctgccgggagaaaaccggcggtgctgctaagtacgaaaaggttgtgtacggggagcatttggttcagaaagtattgacgaacttcgtcatgtaaatttgctaagtacgacaaataaatctgcattgcagcatcagaactccagacctatttggtgtgtagtgctgtaccagaaaggtagtaacggactaaagcatgcgcccgtctctgaaatttgaccttaacaagagtcgcagacttgcagtgcaggtgatatcacaaggaaatcggggggagatttgttctctctgctgcacggagttgtcgac

SEQ ID NO: 266042 - DNA, 437 bp, Zea mays
cactgattgaggcagttcgtgaacaagccgtcacacccactcgctgctgaaccaggagttccatccatcgccgctcactcccacgatcagcgtcgtcgcttatccgcaaatatctctcttcctctttgcagtcggcaccatgggttccgacttcaaatcgatccccttgatcgatatcggcccgcttgtcgaaaagattgatgatccaagcatggccaacgataaggatttactgcaggttgtccggttactggatgatgcttgcaaggaggccggattcttctatgtgaaaggccatggtattgatgagtcactgatgagggaagtcaggaatgtaacccgtgaattctttcagcttccttatgaggaaaaattaaaaattaagatgacacctcaaagtggatatagagggtatcaaaagataggggaaaatatta

SEQ ID NO: 266043 - DNA, 288 bp, Zea mays
gcagaaggcaacaaacaaccacactgattgaggcagttcgtgaacaagccgtcacacccactcgctgctgaaccaggagttccatccatcgccgctcactcccacgatcagcgtcgtcgcttatccgcaaatatctctcttcctctttgcagtcggcaccatgggttccgacttcaaatcgatccccttgatcgaaaggccatggtattgatgagtcactgatgagggaagtcaggaatgtaacccgtgaattctttcagcttccttatgaggaaaaattaaaaatta

SEQ ID NO: 266044 - DNA, 411 bp, Zea mays
ggtcttgcaattgatccaaaatctgtaaacatctatccttctgcaaaagctccagctgaatactcaatgcaggcttcttctggagattacatactgtggaacaccttaggaaaatgtccgacagctgcgttgcctagagaattatgactctgttttccagcatacgatgccatcacatttttgtgcctggcttttgctgcttgtacagacttcagagctgtccacgttgttcctcctaccagatctgtgctgggaagtctttgatcatttgtatttagttctcttttaccgaggagaaaatctatgtacctacagatcttgttgtctgaagcccaatgacgagatacttatcttgaagccatatccataatcttatcagcagtgtgattatttttaaaaaaatactgcttt

SEQ ID NO: 266045 - DNA, 675 bp, Zea mays
tctattcgtgctcaaaccaacaaggatgcagagcccgaaccggtgtccagcacgactgggaaaggttctgccattagaagggtgacactggtggttctcgctgcagtgctttttggagttagcattgccttgagggacggggctgagaaggcatcggagtactttgctgggtatttattggaacagagtttgtcggtggacaatctctttgtttttgttctggtcttcaagtatttcaaagtgccaaaagaataccagaatcgaatactttcttatggtattgctggagctgtggtctttcgggctgtgatgatcatcttaggaacagctagcatccagaaatttgaggcggtgaacttgctgttggctgtgatcctgttattcacttcttacaagctatttgctgaagaagaacaagaatctgatctatccgataacttcattgtgaaaacatgccaaaagttcattccagtcactgaatattatgacgaccatcggtttttcacagatcaagacggtttatggaaagctacaccattgctcttgactttggccgtgtttgcgctaactgatcttgcttttgctattgactcaattccagcagttgtccggcgctacaagggatccacttataatcctattcacacatatcttctgctattcctggcctgcggt

SEQ ID NO: 266046 - DNA, 338 bp, Zea mays
cccaggcgtcctttttaccaatccctcactcaacagccttttgacgtcatacaatccttccatgctgttgtctactgcatattatcgaatggatctttatgaacgtcccttaaatgaggtgcctgtgacaaatttttttggatcagtcatgaagactctccacactgattcagcctacacaggtttcttggctgcgcatgacaatgaaactccaatgtccacgggagataaccttgatgatcatttcatgttaaagggcagggctatcgcacgaagatcaaccatagaaaaggaggcacaattaacaccgcatggatggactgaagttcttgctgaac

SEQ ID NO: 266047 - DNA, 488 bp, Zea mays
  unsure (1)..(488): unsure at all n locations
tttggccttcaggcaggggatgcgctcattatctacaaaaactccgtgcctggcaaatttattatccgtggggagaagtccattcagcagacaaacccctagacacaatttgatgtgactgtgcaccatcagatatggcgtccgaggatacaccatatgttcacgttccagttgttatcgacttttctaatgtctcaccgtcacactgagataagtcgaaaaaggagatacaccgtgtggatggagaaaaggagaagaaattttgggagacattggaagtgctgccagtgagcctacgtctaagctcagaacaaatggtttatgttttttcccctaattcggtcgtatttggatgcttgagtcctgcattgcatgatgaagaacattctcagtctctctttttttgtaaatattttaattcaggatctataaggtaaaggaagtggtttggaaccaaaaaaaaaaaaaaaaaaaaaaantatanaaaa

SEQ ID NO: 266048 - DNA, 514 bp, Zea mays
gcgccgtgctcgacaacctggcgctctccgacgtcgggctgctggaccagatctcgtgcgccgacgacgtgcgctccgccgagcgcgccgacggcgccggccaggtgtactacgagtacgaggtggcgggcgccagcgcgcacagcctcatatcggtgacgtgcgcacggaacaagctgtacgcgcacttcgtcaccgcgcccaacgccgagtggagccgcgacgaggccatgctccgccgcctgcacgagtccttcaagaccatccagcccggcgccccgccaccggccacggagacctagctccatctgagcacgagcgagaaacctactgagcgattcgcgatgcgttgtaattgctagtaaaatcatcagttttgtataggctactctgcctttttcctcagttcctctgccacggagcttggcctactcattttcaagtgtaagtgtaaactttgatgtatacacgaatgactccagacagttttgcaaaaaaaaaacccacgcgtcct

SEQ ID NO: 266049 - DNA, 2310 bp, Zea mays
ctctccactctctcttctccctccaataattctctcctcccctgcttgctgcagcttcaagcactaccgaatcagggcgagtgggagcagaggagggaatcccatgtctccgcccctcgctggagcagatcgttgtcgagccgacgtggagctgctgcggtagaaagctagcggagcctgcgagctagcctgatccgtccgcagtccgatcgggatcgatgggtggggaggcgccggagccgcggcggctgacccgggcgctgagcatcggcggcggtgacggcggctgggttcccgaggagatgctgcaactcgtgatggggttcgtcgaggacccgcgcgaccgggaggccgcgtcgctggtgtgtcaccggtggcaccgcgtcgacgcgctctcgcggaagcacgtgacggtgcccttctgctacgccgtttccccggcacgcctgctcgcgcggttcccgcggctcgagtcgctcgcggtgaaggggaagccccgcgcggccatgtacgggctcatacccgacgactggggcgcctacgcccgcccgtggatcaccgagctcgccgcgccgctcgagtgcctcaaggcgctccacctccgacgcatggtcgtcacagacgacgacctcgccgagctcgtccgtgccagggggcacatgctgcaggagctgaagctcgataagtgcaccggcttctccactcatggactccgcctcgttgcccgctcctgcagatcactgaggactttatttttggaagaatgtcaaattgatgataagggcagtgaatggatccacgatctcgcagtctgctgtcctgttctgacaacattgaatttccacatgactgagcttgaagtgatgccagctgacctaaagcttcttgcaaagagctgcaagtcactgatttcattgaagattagtgactgcgagctttcagatttgatagagttcttccaatttgccacagcactggaagaatttgctggagggacattcaatgagcaaggggaactcagcaagtatgtgaatgttaaatttccatcaagactatgctccttgggacttacttacatgggaacaaatgaaatgcccattatgttccctttttctgcaatactaaagaagctggatttgcaatacactttcctcaccactgaggaccattgccagctcattgcaaaatgcccgaacttactagttctcgcggtgaggaatgtgattggagatagaggattaggagttgttgcggatacgtgcaagaagctccaaaggctcagaatagagcgaggagatgatgaaggaggtgtgcaagaagagcagggaggggtctctcaagtgggcttgacggctatagccgtaggttgccgtgagctggaatatatagctgcctatgtgtctgatataaccaatggggccttggaatctatcgggacattctgcaaaaaactatacgacttccggcttgttctacttgatagagaagagaggataacagacttgccactggacaatggtgtccgagctttgttgaggggctgcaccaagcttcggaggtttgctctgtacttgagaccaggagggctctcagatgcaggtctcggctacattggacagtgcagcggaaacatccagtacatgcttctcggtaatgttggggaaactgatgatggattgatcagcttcgcattgggttgcgtaaacctgcgaaagcttgaactcaggagttgctgcttcagcgagcgagcactggcccttgcaatactacatatgccttccctgaggtacgtatgggttcagggctacaaagcgtctcaaaccggccgagacctcatgctcatggcaaggcccttctggaacatagagtttacacctcccaatcctaagaacggaggttggctgatggaagatggggagccttgtgtagatagtcacgctcagatacttgcataccactccctcgccggtaagaggctggactgcccacaatccgtggttcctttgtatcctgcgtgagtgtaaatagactaagctggtgtctttccttagcctcctggtcaacaagaatggtgttgataactcgatatatgcggttattgtatggatctagatggctagctgctacgtactgtaataagctactagtagctgagagatgtcctggaataagcccttgctatttttgcctgtactgctttctaatcctagggagatgtatactgctaagcaacgatggaagatgtgagtctgcttgctcgccctgatttgatttgtaccactggaggtataagaatacctgggttttggc

SEQ ID NO: 266050 - DNA, 755 bp, Zea mays
cagtcatgtggaaattcaatgttgccagaacaggacagttgacttagagcttcttgcaaagagctgcaagtcactgatttccttgaagattggcgattgtgatctttcagatttgatagggttcttccaatctgccacatcactggaagaatttgctggagggacatttaatgggcaaggggaactcaccaagtatggggatgttaaatttccatcaagaatatgctccttgggacttactttcatgggaacaaatgaaatgcccattatgttccctttttctgcaatactaaagaagctggatttgcaatacactttcctcaccactgaggaccattgccagctcattgcaaaatgcccgaacttactagttctcgcggtatcatctcctgctcatgtaaattatgaagatactgaattggcaatcttttcatggtaattgacagtatatttttttccgataggtgaggaatgtgattggagatagaggattaggagttgttgcggatacgtgcaagaagctccaaaggctcagaatagagcgaggagatgatgaaggaggtgtgcaagaagagcagggaggggtctctcaagtgggcttgacggctatagccgtaggttgccgtgagctggaatatatagctgcctatgtgtctgatataaccaatggggccttggaatctatcgggacattctgcaaaaaactatacgacttccggcttgttctacttgatagagaagagaggataacagac

SEQ ID NO: 266051 - DNA, 574 bp, Zea mays
tggatgcacttgaggcagaagcaattgcttctggattgggggccgctgatcgtgggtcgaggaatgatggaaagagacagtctgctagggaggaagaacaagcggctgatgctgaaaagagaagcagtggttatcaaactgccattgcaaaggctgaagaggcatcaagagcattgcgcggggagaaaactgcacctgctaaaccagctgaagaacttgttttcggtgatgattatgaagatctgcagaaatctctagagcaagcaagaaagttggccctaaggaagcaggaagaggcttcagcttctggtcctcgttccatagtcgaactggctactgcaaccaagagccaagaggaaacagaagccacagaaggagattcagaacagaataaggttgttatcacagagatggaggaaatttgtgtggggactgcaattgaatcaaggaacacgcaagccagaagacgatgtgtttatggatgaagatgatgatgccatgccttcagaataatgttgcaaaagatgacactaatgggttggcagagatggaagaggatgctctgacagaaata

SEQ ID NO: 266052 - DNA, 362 bp, Zea mays
gctggtgctgccggacgtcgcggaggccgcgcagtccggcgggctcacgccgtcgctcaagaacttcctcctcagcatcgtgtccggtggggtcgtgctcgttggtattgtcggcgccgtcgtcgccgtctccaacttcgaccccgtcaagagggcctgatcggaatccatcgtatcgatcgtctcgcctgtgtcctgtcctgtgcctgtgctgtctgtatcgactggtggtgctatatcccctgtgtgttaattgattttggagaatgttcagacgtatatctatgtctaagaaatggagttcgagttaaactttgctgagacttctcttgtctatataatattattagtaggaatcaaaa

SEQ ID NO: 266053 - DNA, 537 bp, Zea mays
  unsure (1)..(537): unsure at all n locations
gcccccgcggcggccgaggccccctcgcccgccctcgcgcccgaggccggcggcccgtccgcgggcggcgacagcggtcgcgggcgcgtcctcgtccacggcgccgtccaagtcccccaacgccgccgtgcccgcggccggcgtgtccgcgcccgcgctacttgcgctcgcgctggtggggtttttggcggcggtatggtgacgcgtgaatggtggagccatcatcccggcgaaggtggcggcggcgggctggggacgaaatatcgcgctgttttctttttattggggttcgtttttaagctttgtttttggccgtgaaataaaaatagttgctgtacttgttgagctgttgtttggtagagtcatagtgacgatttattattactagcagtaccgagtctgtgatcatggccgagagattaagctcggattagcagtggccagcaagatgagctggcggccggcgctcttcagtggccggcgatgcaggcaacgccggccgcccgattagaagattttgtgcaaaanaaaaggaaa

SEQ ID NO: 266054 - DNA, 968 bp, Zea mays
gccgccctttttttttttttttttttttatatataaataaaatacttcgaaacaacatatcccagatctatatatcggagtacacactaatatcttcctgacagaaagtgatctcatgtaagcagcagtgcaagctcactgaattaacatgtgttcatcggataaacaacttcggcaatgaagagtcttagcaattacagttctcaaaattttaaattgcaatttttcagaaacctcggcagccaactttttgttttcatgtaacaaaattaggtccctaacaaaacgaaggagctagcatcacatgatcactcttcctcttcgtcgtcaccgcctccaccagaagccttcttttggttctttctcttcacccttccaggttctccaccaccaagtgggctggtaagagagaagtcgatgtgcttctctgagtcaactctcaccatgaatgagggaatgttgacaagttgcctcccaactctaatgtggcgttgcctgatgagcacacgagcatgatgaatggacttcgccatgccattcttgaagacaatggtctgaaggcggcgctgcagaaagttctctaacggtgagtgcaagcacatagtcaagcttgttctggccctcaccgagaagaccatagcggttcatgcggcgcaggagtgcctcgccctcaaggatacgacgggggttcttctcatcaagggtgagcagctcccttgcagcatttcggatgcggctgagggcatactgcacacgccacagctcacgcttgcacctcaggccatattcacccactaatttcaactcagcatcaaggcgctccttctcataaggccgccttggcttcttgaaagtcttaccatagttgcgatagaagttcacgtgcaccatggatgacgctgcccacgccgctcggcggccgccgcctgtctctgccgccgccgccgccgcgagatgtgtttgtaagc

SEQ ID NO: 266055 - DNA, 599 bp, Zea mays
ccacgcgtccggttctagatcgcgagcggccgcccttttttttttttttttgaattaacatgttcatcggataaacaacttcggcaatgaagagtcttagcaattacagttctcaaaattttaaattgcaatttttcagaaccctcggcagccaactttttgttttcatgtaacaaaattaggtccctaacaaaacgaaggagctagcatcacatgatcactcttcctcttcgtcgtcaccgcctccaccagaagccttcttttggttctttctcttcacccttccaggttctccaccaccaagtgggctggtaagagagaagtcgatgtgcttctctgagtcaactctcaccatgaatgagggaatgttgacaagttgcctcccaactctgcagaaatggaagagttacattgaggtgaaattgctgagagaaaataatgtatgcttttgaacatgcaatttgaaaatccatgcatccagaacagaaaaaaagtatcataagcaccaacaggcacaatttaacgaaatcacacattggtgtggattccaaagagtgaacacaaatcaatcatgttgatgtatttgcattaaaaccaag

SEQ ID NO: 266056 - DNA, 968 bp, Zea mays
tagaaaaaacacggtatgatagagggacataactaatcagaagtctagactttatgttgtgcatcctgtaatagtaaaaatttccccattgttgtgatgtccattgctgatgttttgctacatattgcttatgcgtcaattccttgctgctgctgagggctgcaaactttcaaaactaggctgcaaggtggtgtctatattgttaagctgaggaggctgaaatgatttcagtccgcgattatgcattgcagcgaggaacacaacgtcagaaaaggcaattgttagttgaactgtactcccctgaacttcagctattcaaggatctgactgtgcaaagttcctcctgtttgatagatacaatttccaagcttgggttgcagatatcatctgtcctgcttcatatgactattgtgattgataaaatcttggagaaaggtactgttgagtacttaatagtgcacacggccatattggagtactttacaattgcagataagacctcagcctcggatgctatttgtcaacttatcccccttcttactcaaggggcattaatcatagatggagatgaacctacaaacgctccagaactaccaaagaaagcaaaagctaagaagaaaaggtcgaaagagccacttattgttcggatcatgcagacaagggaaggattaaaactaggaattagttgcctcaagtatggcagtgcaaaggacaggaagaagattattaaaagtttgaagggccacattatgaagcttgctctaagtgattttggatgtctttttcttatctgcattatttctattgttgatgacacaaagcttgttaataagattgtcattcaagagctggtaaaacatttaaagcagctcatttttgacaagaatgggagacggccattgctgcaactacttcaccctttttgctcacgctatctttctccgaatgatctagcttgtctgaactac

SEQ ID NO: 266057 - DNA, 475 bp, Zea mays
ggccaggctaatatcaaatgctgaacaggctctggaaaaataccccaaagatttcaatagatgggatgcatacatgcagcagctaaacggcacctgtgccagcattggtgcttcaaggatgaagagtgagtgcgtgtcattccgggattactgcggacagggaaatgttgaaggttgtatgagatcgttccagaaagtcaagagggagcacggtgccctgaggcagaaactagaggcctatttccagctgctacgacaagctggtcctgctggagctgccaccaggcctggatgtaagaactaggagttgcaggaaagcggagtatgacccaagaagagacctcactacaactgactggcccggtggccctgctgcgcagcaattaggggtcagcatacgaagcgaaacaacagatgatatgcatggatatgcacaaaactgtaataagagattgttatttcaagaacatacgac

SEQ ID NO: 266058 - DNA, 366 bp, Zea mays
gtggcggcgagcgcgggcggggcggcggcgcagcagtgcagcgcggcgcagctggcggcgtgcgccccggcgatcatccgcgggtcgccgcccacggcgtcgtgctgctccaacctgcgcgcgcaggagccgtgcttctgccagtacgcgcgcaacccggcgtacagcagctacatcaacagccccaacgcccgccgcacgctcacctcctgcggcatcgccgtcccgagctgctagggcgctagctcgtgcctcgtggtgtgggtgaataaaaagatgcatgtcgatctctgcttactgttatcgtatctgtagtacctcgtgtgatatgaacaatatgtattatttaccaagagcggttgtgtc

SEQ ID NO: 266059 - DNA, 529 bp, Zea mays
  unsure (1)..(529): unsure at all n locations
cccacgcgtgcgtgtcaacaaagtttagtcacatcggctactgcaangttaagtgaagacattgtcaaccaatgtgtaaatcccatcttgaaaggataatcttctacaacaagagtcactaagcttgctgcattggcagctctatgtgcacaatacgaatcagagttcatgcccaacatgagcatcgttgttaaggcgctttcgcctctccttcaacaaagacctgcaccaaccaccgaagagccagctccacaacctgggagctcaaaccagtcacatgtgatgggacccctaggcataagccatctccgcaaccattcaatcagcacattctataaatcattgagagtattttgggtatttgttctgtagcgttctcagttgggtatagcatacatgaacttgcccctgctgtttgtggccacctagttcgtggcttgatgttggcgccgcacaatggtatatgcagttggttcgaagtttttttttcacaacaaaaaaaaaaaaaaaaaaaaaaaaaaaatataaa

SEQ ID NO: 266060 - DNA, 791 bp, Zea mays
  unsure (1)..(791): unsure at all n locations
acgacagaagcacggtatttcgccgcggttgtcccgttcctgaactccatgaggcttctgatatatggactccgtctctacactgatgaagctctggtaaaatcagtgacacgtgaaggaaaaccagagtaaatccgatgaactgaagatccgtatgatcgtttagcttgctgctctgacgataacgactttgcttctttacagggaattgctgagaggtccactctattatgtcctggtgctgctgttcagcgttttagtcttctggcgtgagtcccccatcgggatcgtctccttgtcgatgatgagcggtggcgatggttttgctgacattgttgggaggaggtatggctcagcgaagctgccattcaatcggaagaagagctgggccgggagcatctcgatgttcatttctggtttcctgctgtccgcgatgatgatgctctacttctcaagcctgggttacattgatgttatctgggaagaggcacttggtaagctggcgcttgttgcactagcagcgacagtagtggagtgcgttcctgtgaccgaagttgtagatgacaacatatctgttcctttggccaccatgctggtagcttttctcttgtttagctccaaccgcacaatagttaattaaaatactactagtgcattatttaagacatgtgatgagttcttcaaccctcggttgtgcttgcttttgcttcctatgtgaatgtgatctctagtacttgatggcgacagcctaaaaaaaaagantaatggaaattttgacattcttattaaaa

SEQ ID NO: 266061 - DNA, 426 bp, Zea mays
catcgaaaagagcttgagcagaaaggttgtgcacgtgctatccggcgtcctgttcatgtcatcttggcccctgttcagcaattcgacagaagcacggtatttcgccgcggttgtcccgttcctgaactccatgaggcttctgatatatggactccgtctctacactgatgaagctctggtaaaatcagtgacacgtgaaggaaaaccagaggaattgctgagaggtccactctattatgtcctggtgctgctgttcagcgttttagtcttctggcgtgagtcccccatcgggatcgtctccttgtcgatgatgagcggtggcgatggttttgctgacattgttgggaggaggtatggctcagcccagctgccattcaatcggaagaagagctgggccgggagcatctcgatgttcatttctggttt

SEQ ID NO: 266062 - DNA, 772 bp, Zea mays
acgagttcaaggccacctacctcggcctacggagcagtgttggcgatggtggtagtggtatcgatgacgacgacgagccggacgaggaggagggctacgagggtgtggtcggggcgagcctccccaagtcggtggacgggcggagcaagggcgcggtgacgggggtaaagaaccagggccagtgcggcagctgctgggccttctccacggtggccgccgtcgagggcatcaaccagatcgtcacgggcaacctcacggcgctgtcggagcaggagctcatcgactgcgacacggacggcaacaacggctgcaacggcggcctcatggactacgccttctcctacatcgcacacaacggcggcctccacacggaggaggcctacccgtacctcatggaggaaggcacctgccagcgcagcagcagcagcgagaagaagtggccgggatcgtcggaggacgccaacgacgatgccgcggtggtcaccatctccgggtacgaggacgtgccgaggaacaacgagcaggcgctgctcaaagcgctggcgcaacagcccgtcagcgtcgccatcgaggcctccggcaggaacttccagttctacagcggcggcgtcttcgatgggccctgcggcacgcagctggaccacggggtagcggccgtcggctacgggacggccggcaagggccatgactacatcatcgtcaagaactcgtgggggcccagctggggcgagaaggcgtacatccgcatgacgaggggcaccggcaagcgcca

SEQ ID NO: 266063 - DNA, 612 bp, Zea mays
taccggtctcggaattcgagccacgcgtccgtccacgcgtccgacggatctcagttttacataactactatcaagacaagctggttggatggggagcatgttgtcttcggcagggtgatccaaggaatggataccgtgtacgccatagaagggggcgctgggacttacaatggcaagccaaggaagaaggcggtgatcaccgacgctggtgagatacccaaggagaaatggggtgatcaggaagcgtagggtgttttctacttcttgtcaccttcaaatcaggtagccatgtacttcttttttccttgacctccatggtgtgccacggttcagcaagacttccggaatgttgtatatcgtagctagcttatggccagtcgaattgactctgatcccttgagttgtgatgtggagacgcatacatctgaaaaatctttaggccatgttcggttagggtggagtgaaggggattaagtttccttccattcaaatttgaatttaaatttcaataggaggaggttgttcgcttcgaattaaagctaactgtttagactgttatagctgtaatctgtacagacaaaaacattgtataagcagaagctaatatggatt

SEQ ID NO: 266064 - DNA, 589 bp, Zea mays
  unsure (1)..(589): unsure at all n locations
tacatctttgccatctgcatacactagccctggtgtcccaggttttatcctagcaacaggatttggtgcatcactgtatttcctggcaaagaaaaatatgaacttaggtaaggctgcattgatcactgtcgggggacttgcagctggtgcaactgtcggatctgcagtggaaaatttcctgcaggttgatatcgtgccctttctaggcatccactcccccgccgtcgttgtcagtgaatttattctgttctcccagttgttggtatcactgtttgttaggtaggatctgaaatcaagctgtcatcctgatcatggcatgtaagtaactgaaatggttcgtgttcaaacttcaaagggtcagggaaatgcttattttccgctcaaggtgcaagcagctgtgtatagcaaacaatacatggacatctctgtcccttataaagatcacttgtatctagtctagttctctcaagctcaatctcaagtctttcagatagaagcttgtatcgattgcaggatgtggaatgagaattcttggattaatactctggagtctggaatatcgtagcctcttgttntatttttcaaaata

SEQ ID NO: 266065 - DNA, 1673 bp, Zea mays
ctttgccagcggcgccgaacccgccaccagccttctcccatcctcgaagcacggaaggctcccagaaggagctctcacctcgcagccatctctggcacgtccgtccttcttctccctcggtccctccccttctccacagctatcggattggcgttggagtggagatcgacccgggctcggaattcccttcgttggtaaggaaccctaatttggtcagatgggatttccaacttcgacaaagcccgcgaggtcgatcgatctcagttgacgcgagggattggaaaactaagttgcgggtgtagttaattttctaggaagattggggtttcagctcaaactcccatgctcgacgctgaggacgaccctggcgggagatgacgaggatcttcgtgcagcgcgggaccgccggctcctcgtccagctccggccgctcggacacgcagccagtgcagccggcagcagctgcccgggaggaggagttgccgctgcaacctcaaccacagctgccggagctattggccatagatgatacaactgataatttaaatgagggcagcgagaatatcagcaataagcctttgaggacggatgacaccatttcagagagctcaagctccgcagaggagagggctgccagggagaagcctcttaaggatgactctaatgtaatcaaccccactttcttagtagaggaacctgtagggatccagatccctgatcagattgagcatgaaaattctgtgctgtcagtcactggttcatcacagatggcaggtgcagcatcgcacccaccaccaccgccagctccaccttcaaaaccattgttggggaataatggcttgcggagaatggggcctggaagttcgaatagtgtgcggattggatcttcaagaaggccagtagcttggccactagtggcagcccggacatctgcttcaggttctcggccttcttcgcctaggtcactcgttgatggtgaaggttacaatagtgctgatgaacagggtccctgttacgcctcgagttatgatgattcggaaagagagcgtatgtttgagcatgacctaaggcgagtgaaagggttggaaatcagaaagacggccgaagatgggaactgtctattcagagctgttgctgatcaagtttatggagatgcagaagcttatgacatggctaggcagatgtgtgttgattatatggaaagggaacgggatcatttctctcagtttataactgaaagttttacattatactgtaagaggaaaaggagagacaaggtttatggcaacaatgttgagatccaggcatttgcagagatgtacaatcgtcccattcacatatattcctacagtacagagcccattaatatttttcaaggaagctataacacagacgttcctccaattagattaagttaccatcatggtaatcattacaattcagtggttgatccccgacggcagacagttggggcaggacttggatttagctcccttagagggacaaataatgttgacagggaccaggtgaaggctgcaataaaagctcagcaagaccagcaaattgagaatgcacttttagcagaagggcgattctactctgatctggagttaacagagagggaaatagaacggatggtgatggagtcctctcgttcagaatatctcgccaag

SEQ ID NO: 266066 - DNA, 548 bp, Zea mays
tcggggacgagtacgcctaccagcaatcatgctacccacggaggaacgctagctgacggaaggagctctcacctcagggccatctctgtcgcgcccgtcatcctcctcctcctcccctcctcaactgctatcggatttgcgctgcagtggagatcgacccgggctgggaatttctttcgttggtaaggaaccctaatttggtcggatgggattttcatcttcgacgaagcccgcgagattgatcgaccttagctgacgcgagggattggaaagcgaacgctcgggcgtagttaattttctaggaagattggggtttcagctcaaacccccatgctcgatgctgaggacgaccctggcgggagatgacgaggatcttcgtgcagcgcgggaccgccggctcctcgtccagctccggccgctcgggctcgcaatcagcgcagcagccggcagcagctgcccgggaggagttgccgttgcaacctcagccacagctaccaaaactattggctatagatgatgtaactgagcatttaaatgagggcaacgag

SEQ ID NO: 266067 - DNA, 364 bp, Zea mays
cccacgcgtccgcccacgcgtccgcgccgaacccgccaccagccttctcccatcctcgaagcacggaaggctcccagaaggagctctcacctcgcagccatctctggcacgtccgtccttcttctccctcggtccctccccttctccacagctatcggattggcgttggagtggagatcgacccgggctcggaattcccttcgttgttaattttctaggaagattggggtttcagctcaaactcccatgctcgacgctgaggacgaccctggcgggagatgacgaggatcttcgtgcagcgcgggaccgccggctcctcgtccagctccggccgctcgggcacgcagccagtgcagccggcagc

SEQ ID NO: 266068 - DNA, 1705 bp, Zea mays
cggaattcccgggtcgacccacgcgtacgggatcatgacatgggggaggaaggctgtctctttgcccagtcccacctgattggcgccggcagggtgatttatactttttgcagagagagaagatatggagtcgacaggaaagattttgatggagcggtatgaggtggggaggctactggggaaaggcacatttggcaaggtgcactacgcaaagaatcttgagtccaacgagagtgttgccattaagatgatggacaaggacaaagtgctcaaggccgggctttcggagcagataaggcgggagatcacaacgatgcggttggtggctcataagaacattgttgagcttcatgaggtcatggcgacgcggaacaacatctactttgtcatggagtatgtgaaaggcggagagctctttgacaagattggcaagagtggcaagctcacagaggccgctgcacacaagtacttccagcagctcattggtgcggtggattactgccacagccgaggtgtgtatcaccgggacttgaagcctgagaaccttctgttggatgagaatgagaacctcaaggtctcagattttggactgagtgcactttcagaatccaaggggcaagatggcttactccacaccacctgtgggactccagcatatgtagctccagaggtgatcagcaagacaggctatgatggggcaaagtcagacatctggtcctgtggtgttgttctatttgtactagttgctggttatcttcctttccgggccccaaacatgatggtgatgtatcgcaagatacagaatggtgatttcaggtgccctagttggttttcacacaaactcaagaagctcttgtacaagatcctcgaccccagcccagacagaggaatttcagtgcagaagataaaagagtctacctggtttcgaaaaggccctgtggagacccgtacagtaaaggagaaaattctgagtgagaatgacaccacagatgctgctccagccgttgctatgaggcgcaagaagaatgttcatgaagacgtgaagcccccgactgtcacaagcttaaacgcctttgaaattatatctttctccacaggattggacctctctggcctatttatcagaaacgagtgtaagaaggagacgcggttcacttctgataaggggtgccgtgtccatcatctcgaagcttgaagatgttgcaaaagcactgaatctcagggtaaggaagaaggacaatggtgttgtcaagattcaggggaggaaggtggggaggaagggtgtcctggagttcgacactgaaatatttgagatcacggcatcctaccacctcatcgagatgaaacaaacgggcggtgattcacttgagtacaagaaactgttggaagaggacatccggccagcactgaaggacatagtctgggcctggcatggagatgaccagcaacaaaagtagtagctttggatctctcttttttgttccataaaattgttagatctttcacttcagattgattttgttcgacatgtgcgtgttcttcttactagttacattctttctgtttctgtggaccattggactgtattctgtcgtgcaataattgttgggaggcctgagtttgttagtcgttctattctgaaaactggtatctgttctgtaatggttgtccctatcaataatgaaataattgcgtttgatccttg

SEQ ID NO: 266069 - DNA, 490 bp, Zea mays
gaatatcccggctcgacgccacgcgtccgcggacgcgtgggcggactcgtgggcggtttcgtgggccaggacatgcggagagctcgagggtggtacggtatgacgctgactaaccaatggtgctgcgacgtctgacggaataacagacaggtgacgtgcttgccgttccagacgccgtgcgccaacaggaacgagtacctcttctgggacgctttccaccccacggaggcggccaacatcctcgtcggtcggagggcgtacagcgcggcgctgccgtccgacgtccaccccatggatctgcgcacgctcgccaggatctagctgtatggatcatgtgaactcgcgaagagaagcacagcttacagcgtcttcctttgctcttgtgctttgtttcccctcgtgattgtattgcttaccactcgctaagggacgtatggtccctccatctaaactatatatataaacatgatatatactccctcgctcccgc

SEQ ID NO: 266070 - DNA, 473 bp, Zea mays
gggtatcgtgcggcggtggatggcaacgatctcgtgatgaacctgggattctcccaccctgttcggatggccattcctgaaggcctggcggtcaaggtggaggagaacacaaggatcaccgtgagcggctatgacaagagcgcgatcggtcagtttgctgctaccataaagaagtggaggccacctgagccatacaagggaaagggtatcagatatatggatgaagttgtccgaaggaaggaaggaaaagccggaaagaagaaatagaaagtgtttttttgccgccttctccttacttcatttcatttttcccactgtaatgatcttcgtctgctaaggctgaacctaagaaatatattgttctgtgctgatcatggcatatagatgtacactttgagcaccccattgtttcataatttcattgtttttcaaaaaaaaaaaaaaaaaaagggcggcggctcgcgatctagaac

SEQ ID NO: 266071 - DNA, 859 bp, Zea mays
cccacgcgtccgcggacgcgtccgcccacgcgtccgaccacagaaggaaagcagcggtgaacggcgattgcgacggcgacggcgaccgctactactcctccttctcctccacgtcgtcgtcgacggaggaggccagcgccaaacaaccagaagatgacgaagaagaagtagaagaggagtggcagagcagggtgtggaaggtgtgcgtgtacgtcatcaccctgggcatgctggtggcgctgctgctgggcctcaacatgtcgtggagcgccatcaccgccgccctggcgctcatcgtgctggacttcaaggacgcccgcccctgcctggagaaggtgtcgtacccgctgctgctcttcttctgcggcatgttcatcaccgtggacggcttcaacaagacgggcatccccagcgcgttctgggacttcatggagccgtacgcgcggatcgacacgcccacggggacggccgtgctcgcgctcgtcatcctcctgctctccaacgtcgcgtccaacgtgccgacggtcctgctgctgggcgcgcgcgtggcggcgtcggcggcggccatctcccccgcggcggagaccaacgcctggctcatcctggcatggacgagcacggtggccggcaacctctcgctgctgggctccgacgccaacctgatcgtgtgcgagcaggcgcgccgctcccagcagtacggctacacgctctccttcttagccacctccagttcggcttgccggcgacgctcgtcgtcaccggcatcagcctgctgctcatcagaacctactgatgcgtaccggtagggatgtcttgagggggaagaagaatgtggatttttttttcagcgccgtgtatc

SEQ ID NO: 266072 - DNA, 479 bp, Zea mays
cccacgcgtccggacggcgtgttcaacgcgtggtgtgggacgtggtggtggagccgtcgagccagggcctcgggctgggacgcgccgtcatggagcgcctcgtcgacgagctgcggcgcgacggcgtgggccaacatcgtgctctacgccgagacgcgcgtggtggggttctaccgcctgctggacttcgccatggaccccgacggcatcagggggatggcatactaccgcaagtccgctactaccgccgcttgattcgtctcgtctgtcttgtactcattcatcaatgaaggaagtcgatcgaattccctaaagccccccatgtttgtatgatgtagatatgacatggtttatttttatcactcatctcatagttgctcgtttattatctttcattttatattccgcgaaaacgatctagctagaacatgtacttatatttcgcgcaaatcaagcaatataaaaacctcacttcaaaa

SEQ ID NO: 266073 - DNA, 593 bp, Zea mays
tcttcgcgtacgcccacgcgtccgcccacgcgtacgcccacgcgtccgctcctacggccgccactcccgctcctcctccgtcagccgcttctccggcaacctccgcaagggcgccgccggggaccgcaaggtgctcaacgacaaggggtggcccgagtgcaacgtcatcgaggaggagggcccgtacgaggacctcgccggcgatagcggcctctcccgccgctgccagatcatactcggcttcctcaccttcgtcctcctcttcaccgtcttctgcctcatcatctggggcgccgcccggccgtacgagcccgaggtcatcgtcaagagcttggtgatggacgacttctacgcgggtgaaggcacggaccacagcggcgttccaacaaaattggtcacaacaaactgttctctgcacatagctgtctacaaccctgccacaatgtttggaattcatgtcacttctggccccatccacctgatgtattcagagatcccaatagcagtcggtcagagcttggtgatggacgacttctacgcgggtgaaggcacggaccacagcggcgttccaacaaaattggtcacaacaaact

SEQ ID NO: 266074 - DNA, 921 bp, Zea mays
cccgagtgcaacgtcatcgaggaggagggcccttacgaggacctcgccggcgatagcggcctgtcccgccgctgccagatcatactcggcttcctcaccttcgtcctcctcttcaccgtcttctgcctcatcatctggggcgccgcccggccgtacgagcccgaggtcatcgtcaagagcttggtgatggacgacttctacgcgggtgaaggcacggaccacagcggcgttccaacaaaattggtcacaacaaactgttctctgcacatagctgtctacaaccctgccacaatgtttggaattcatgtcacttctggccccatccacctgatgtattcagagatcccaatagcagtcggtcaggttcggaggtattaccaaccgaggaagagccaccggatggtgacggcggtcatccacggcgagaaggtgccgctgtacggcgccgggggcagcctgatgctgtcgacgagcacgggcggggcggtgcccctgacgctggacttggacctgacctcgcggggctacgtgatcggcaagctcgtgcgggtgacgcacaaggtgcacgtgacgtgccccgtcgtcgtggacgccaagaagaccaagcccgtcaggttctccaagaaggcctgcgccgtgtacagggcctgaacttcaaatgcgttttcgtaaagctgcgatccgacggcgcattagcaacgcgcgtaggatgccgtgcctgtatttagctatcgtgttggtcgtgaagaacaataagctgcacacacatatggtctgtttgagccttttggttctgtcgataaatcgcgctgtacggcgggtgtcctcttgttcttgcgtgtgggtatctttcttttttcagggcgcgatcctagagacgggacggatggccatttttatttattaaattcccccagttag

SEQ ID NO: 266075 - DNA, 672 bp, Zea mays
cccacgcgtccgcccacgcgtccggaagagatatcacagggacctcttcaggcttcaaggcagatccgcagcagatggaggcgaagagcaggctgccggaggtgaccatcgtcccggcggcacggccgttggctggcgacggcacagtcgacgcggcaaaggcggcggcaggcaaggagcccgtaagcccgggcactccgtcctcggtggccgccggccgcagcagctgtgaggagaggcgcgcggtggacggcgtcgccctgcctgggtggaagctcgacgccctctgccaggagtcctgcccgtcgccggccatgagggcgcgcttcccctactacttctgaagctttccgttgcagtcctgcgtgagagttcttgagcggcgacatctggtgcatgctcttgacgactgatggcgttcttgggtgttttccttgctcaggattttcctttcgtgcacgttcatgtatgtatgtatatgtatgtatttatgtattgtgggtataaagatctgcgagctttgttataacgcaaatgatgaaccttcgggcaactgcgtgtatggttgtatctgtctatctgacataatttgagcacaaactgtatgtatcgttctcatcgaaatagttcccgatatggcatagcacgcgtaatacagcgtaggaatttcag

SEQ ID NO: 266076 - DNA, 585 bp, Zea mays
gggaaagatggtccaccggcggggaccggaccggaaaaaccggggggacccacgcgatctcttgaaccaggacaggcttcaaggcagaagccggagcagatggaggcgaagagcaggctgccggaggggaccatagtaccgacggcacggccgttggctggcgacggcacaggcgacgcggcgaaggcggcggcgggcaaggagcccggaagcccgggcactccgtcctcggaggccgccggccgcagcagctgtgaggagaggcgcgcggaggacggcgccgccctgcctgggaggaagctcgacgccctctgccaggaggcctgcccgtcgccggccatgagggcgcgcttcccctactacttctgaagctttcctcggtgcagtcctgcgggagagttcttgagcggcgaacatctggtgcatgctcttgacgactgatggtgttcttgggtgttttccttgctcagggtttcccttacgttcatgtatgtatgtatgtatgtattgtgggtttaaagatctgtgatctttgtgtataacgcaaacgatgaaccttcgggtaactgcgtgtatggttgtatc

SEQ ID NO: 266077 - DNA, 674 bp, Zea mays
  unsure (1)..(674): unsure at all n locations
cggaattcccggatcgacccacgcgtacggtggtcctcattgttttcatccggctgtgcatcagttactacgcccacctatgtttaacggtgtagacctcacatgaagttaaaccagcctggagtttcatatcccatgcatgatgctgtccataggttttcaacccacatgcacccatttgggtggcctaatcatctggatgaatcatgcccacctcatatgcaagtttggaatggacgcagtagtgtgtttccgggtgaaccctatatttacggtagacaagagtgggatcagaatagacctcatggtggcagcagagggtgggagctgactggtgatatatccaagggaccaaatgatgtgccggatgctgaacttctgatagctaagaaggatccttactctgcaataactgctgtttctgattctggtggacaacataatcttcaaccccaggctgaccaaaaggagattggacgcttgactgctgaaaactttgaagcgaagaatcatactaaaagttcaaaaagtttggaagctcctcaaggagcacaacttgtgacttctatgctgtcaaagaatagcgtggtcttttgtaaaaactatctatccagaatcagtgtttcacatgatcntgttgagcctgagttgtacanaaggtgtatatccttgct

SEQ ID NO: 266078 - DNA, 1439 bp, Zea mays
tgccacgcgtccggggtgaacgagtccatcaccgcgcttgtcatgggcctcatcaccggaggcgtcatcctgctggttactaatgggacaaactcacgcattcttgtgttcagcgaggacctgtttttcatatatttacttccgccgataatcttcaatgccgggtttcaagtaaagaaaaagcaattcttccgcaactttataacaattattttgtttggtgctattgggactctgatttcctttgtaataatctctcttggtgctatggggttgttcaagaaacttgatgttggtccactcgagcttggggactatcttgcaattggtgctattttctcggcaacagattctgtttgcaccttacaggtgcttaaccaggatgaaacacccctactctatagtctagtttttggtgaaggtgttgttaatgatgccacatctgttgtgctcttcaatgcaattgaaaaccttgatattgataattttgatgctattgttctgttgaatttcgtcggaaaatttctctacttgttcttcaccagcaccatacttggagtagctaccgggttgctgagggcatacattatcaagatgctctgctttgccagacattcaactgatagagaagtttctatcatgatactcatggcatacctttcatacatgatatcaatgctgttggacctgagtggaattcttactgtcttcttctgtggaatagtaatgtcacattacacttggcataatgtgacagaaagttctagggttaccaccaagcatacttttgcaactttatcattcattgcagaaattttcctcttcctctatgttgggatggatgcattggacattgagaagtggaaattagctagtagcagtcctaagaaaccaattgctttaagtgcaattattttgggcttggttatggttggaagagcggcatttgtattccctttgtcgttcttatccaacctaagcaaaaaggaggcccgtccaaagatctccttcaagcaacaagtaatcatatggtgggctggtctcatgagaggagcagtgtcaattgcgcttgcctataacacgtttacagcatctggtcacactgaagtgcgagtcaatgctatcatgatcaccagcacagttattgttgttctattcagcacaatggttttcggcctgctgacgaagccgctgctcagtctcctcatcccaccaaggactggactgaacacgtcgtctctgctctcaagccagtctatgctggacccactccttactagcatgatggggtctgactttgatgtagggcagatcaactcccctcaatacaacctccagttcattctcaccgcgccagctcgctccgcccatcgcctttggcgcaagtttgacgatcggttcatgcgcccggtgttcggggggcgaggtttcgtcccctt

SEQ ID NO: 266079 - DNA, 587 bp, Zea mays
acgagccggaaatatcaagatttccggaatccgccgccgccgccgccaggccgcccacgggacctctccgtcgtgccatccctctccctctccctctccccgcgccgtgcccttccgcgtcccggccaggagggcagcgcgccgtccggccttcgtctgccgctgcagttgctccccggacgcgtccccggtggccacccggcggttgttcgcctccctcctcgccaccgcagcagcggtgggggttggcgtggccggaggcggaggggaagccggcgcggtgtccacgagcaggagggcgctcagggcgtccaagattcctgagagcgaattcaccaccctgcccaatggcctcaagtactacgacatcaaggtacgaagtggggctgaggctgttaaaggatcccgtgttgcggtacattatgtggccaagtggaagggcatcacattcatgacaagtaggcacggtcttggtgttggtggtgggacgccatatgggtttgacgtaggcaattctgagagaggcaatgttttaaaaggattggatcttggggttgagggaatgaaagtcggaggccagaggttga

SEQ ID NO: 266080 - DNA, 428 bp, Zea mays
tctcagtctacgactaggcggcggcggcggccttcacgcacgagccttcgccgcctatacttgcgcttcgtcgagccggtgaattgtggtctaagcacacgaaggaaggatctttctccagacttcgcaattttggacgacgagatgcacttccttgcatcatttcatgtccctacaggttttgtgttatctggtttgtcgggatggatgccaaaaagttcctgcagctggtcgaagagaagaaaaggaggatcctcgagaagaaagaagccccactaaagtggcagcagaagctagaagcagcagttaacgtcaaagctgatgcagaagcgaaggcgaaaaaactaaaatcaagaaagcataggaggagaggagattcttcctcggactctgacagtgactatgacagcgatgttgatcggaaacac

SEQ ID NO: 266081 - DNA, 328 bp, Zea mays
  unsure (1)..(328): unsure at all n locations
ctctcagtctacgactaggcggcggcggcggccttcacgcacgagccttcgccgcctatacttgcgcttcgtcgagccggtgaattgtggtctaagaacaagagggaaggatctttctccagacttcgcaattttggacgacgaggttttgtgttatctggtttgtcgggatggatgccaaaaagttcctgcagctggtcgaagagaagaaaaggaggatcctcgagaagaaagaagccccactaaagtggcagcagaagcttgaagcagcagttaacgtcaaagctgatttcccagcgaaggcgaaaaaactanaatcaagaaagct

SEQ ID NO: 266082 - DNA, 1738 bp, Zea mays
cagaaaaaccagcggcgcagtgacaaaagcccacagcttcttctccctactcctccagtcctccgtcatccgtttcgctctctgccgccgccaccgcacaagaagctagctcctgcctgtaccgccccgtcatggcgatgctatcccgcgcagcctcctccgcggcccggcgcccgctgctgccgccgcctaggcttctggcggtgagggcgatggcgtcgtcgctcttcggccacgtcgagccggcgcccaaggaccccatcctcggcgtcaccgaggctttcctcgccgacccctcgtccgacaaagtgaacgtcggcgtcggcgcctaccgggacgacaacggccagcccgtcgtgctcagctgcgtgcgcgaggccgagcgccggatcgcgggcaacctcaacatggagtaccttccgatgggaggcagcgtcaagatgattgaagagtcactgaagctggcgtacggagaagattctgacttcatcaaagataagaggatagcagcggtgcaggcgctttcaggcactggtgcctgccggctctttgctgatttccaaaagcgttttttgccggattcgcagatctacataccaacaccaacgtggtccaaccatcacaatatttggagggatgctcaagtgccacagaagacattcacatactaccatccagagtcaagagggcttgatttctcaggattgatgaatgaaatcaagaatgctccagacggttcattctttttgcttcatgcatgtgctcataatcccaccggtgtagatcctacggaggaacaatggagagaaatatcccatcagttcaaggtgaaaaaacattttccattctttgacatggcataccaagggtttgccagtggtgatccagagagagatgccaaggcaatccgaattttccttgaagatggacaccaaattggatgtgctcagtcatacgcaaagaacatgggactttatggacaaagagcaggatgcctgagtattttgtgtgaggatgagatgcaagcagttgctgtcaagagccaactgcaacagatcgcaagaccaatgtacagcaacccacctgttcatggtgcactggttgtttctataatcctcagtgatccagaattgaagagtttgtggttaaaagaagtcaagggtatggctgatcgtatcattggaatgcggaaggcacttaaggaaaatcttgaaaagctaggttcacctttgtcatgggatcatatcactaatcagattggaatgttctgctacagtgggatgacacctgaacaagttgaccgtttaacaaatgaattctatatttacatgactctgattttgaggttattttttgtttgttttatcttcattattgttttttttttatgtttttttattttaattactttacttattttatatttattttatttattatcattctcacttttttatttttcttttctttttttatttctatatttatatattaatattatttttatcttttatattttatttaatttttcagttgcttcttatcttatctttataatacttttctttttttttatttttattacctataatttattttatatctatttattttttatttttttttttttttattatcttattatatataattattttttttaattattttcttctctttaatctttattaatttttatctattttaatcttacttttcattaattttttatatattt

SEQ ID NO: 266083 - DNA, 959 bp, Zea mays
  unsure (1)..(959): unsure at all n locations
ggaccggnccggaatcctttattaccacgcgaacgctcataccaaaggaaagccagtggcgacccagagtgagatttcaagggaatccgcattttcctcgaagatggacacgaaaatggatgcgctcagtcatacgcaaagaacatgggactctatggacatacagcaggatgcctgagtattttgtgtgaggatgagatgcaagcagttgctgtcaagagccaactgcaacagatcgcaagaccaatgtacagcaacccacctgttcatggtgcactggttgtttctataatcctcagtgatccagaattgaagagtttgtggttaaaagaagtcaagggtatggctgatcgtatcattggaatgcggaaggcacttaaggaaaatcttgaaaagctaggttcacctttgtcatgggatcatatcactaatcagattggaatgttctgctacagtgggatgacacctgaacaagttgaccgtttaacaaatgaataccacatttacatgacccgcaatgggaggataagcatggctggtgttacgacaggaaatgttggttacctagcaaatgcaattcatgaggttaccaaaccaaattgagttagggtcctaccttctttggtcgatggaagctgatggaatgagactgtgaagcggcgtttccccccctctgttcctgacagaaataagtttagcctgctgctaccatatacatggacacagactcagatgtagacactcaagttttgagagctgtgatcctgtttcatttaatcaaaaacaattttgtttttttttccatcttgtcatggcaaatgttacaccagctgcaaaataattacaataattgatcttgatccagcgtcacagttacttcgaaaaaaaaacataagaagaataaatataaaatattataaataataattttaaaagggcggccgttttaaaagatccaa

SEQ ID NO: 266084 - DNA, 2114 bp, Zea mays
cccacgcgtccgcggacgcgtgggccctgcacagcacgactcctccccatctaccgctacctttctacctacccatctagcacccctcgctcgcaaatcgcaatggcgctggccaccaactccgccgcagcagccgcggccgtgtccggtggcgtggcatcgcagccgcgccgcgcggccgtgttcctcccgctgaagaggcgtaccatctccgccatccacgccgccgacccgtccaagaacaacgggcccgcggtccccgcggccgcaggcgcctaactcatctgcctctgcggtggccacgccggagaagaatccggcggcgccggtaaagtgggcggtcgacagctggaagtcgaagaaggcactgcagctcccagagtacccgaaccaggaggagctggacacggtgctcaagaccatcgagacgttcccgccggtggtgttcgccggagaggcgcgccaccttgaggagcgcatggccgaggccgccatgggccgcgccttcatcctccagggcggcgactgcgccgagagcttcaaggagttccacgccaacaacatccgtgacaccttccgtatcctgctccagatgggcgccgtgctcatgttcggtggtcaggtgccggtcgtcaaggtggggaggatggctggccagtttgccaagccaaggtccgaaccgttggaggagagggacggcgtcaagctgccaagctacaggggcgacaacgtcaacggcgacgacttcaccgagaagagccgcgtgccggacccgcagaggatgatccgcgcctacgcacagtcggtggcgacactcaacctgctccgcgcgttcgccaccggagggtacgctgccatgcagcgcgtcactcagtggaacctcgatttcatggatcacaacgagcaaggtgataggtaccgtgaattggcccatagggtggatgatgctcttgggttcatgactgcatcggggcttacagttgaccacccgataatgacgactactgacttctggacctcgcacgagtgccttctcttaccctacgagcagtctcttacccgtaaagactccaccagtggccttttctacgattgttcggcccacatgttgtgggttggtgagcgcactcgtcaactcgatggagcgcatgttgaattcctccgtggtgttgccaaccctcttggcataaaggtgagcgacaaaatgaaccccagtgagttggtgaagctgattgatattctgaacccttcaaacaaacctggaaggatcaccataattacaaggatgggggcagagaacatgagggtgaagttgcctcatctcatccgtgctgttcgcaatgctggattgattgtcacatggattactgatcctatgcatggaaacaccatcaaggccccttgtggcctgaagactcgtccatttgactcaattctggctgaagtgcgcgcattcttcgatgtgcatgatcaagaaggaagtcacccaggaggcatccaccttgaaatgactgggcagaacgtgaccgagtgcatcggtggatcacggaccgtgaccttcgacgatctgagcgaccgctaccacacccactgcgacccaaggctgaatgcctcccagtccctggagctcgcctttatcatcgcagagaggctgaggaagaggaggatgcgatcggggctcaacagcagcctgccactgccgccactggctttctgagtagccggagccaaacacaaaggagggtaggaatagctgtggtgactcggaagagaaagagacagtcgacgccttgttttgttgatgcttagtgtggtgacctggtggtggtggtggtgggtgttcttggcacaagttacatgctggggatagctataggaggtacctgttgaggtgtgtaagacagtagctagcaaccgtatgccttggtttcctgtttgggtgcgtgacttgccgactttctagctgcttctggggttttgacctcggtaaggaaagaataaaaagataatcggagtgcaatgcttgctgaactggtgctcaataaattgatcccttgatgccaaaaaaaaaaaaaaaaaaaaaaaaaaaaaaaaagggcggccgctcgccggca

SEQ ID NO: 266085 - DNA, 683 bp, Zea mays
atatgtcctgatactgatcatatgaaccatcagcctgtgctaactctcatcatcatctgtgagtcggcatctcgacgtgcatgatcaagaaggaagtcacccaggaggcatccaccttgaaatgactgggcagaacgtgaccgagtgcattggtggatcacggactgtgaccttcgatgacctgagcgaccgctaccacacccactgtgacccaaggctgaacgcctcccagtccctggagctcgccttcatcattgcagagaggctcaggaagaggaggatgcggtcggggctcaacaacagcctgcctctgccaccactggctttctaagtagccgaagctgaacagagaaggtagagggatagttgcggcgactcgaaagattacgcctgtttatttgttgatgcttggtgtggaggcctggtgggtgctcttggcacaagttacatgctggggagctataggagggtacctgttgcgttgtggaagacagtagctagtattatgtgttgtaattgtatgccttcgtttcatgttctgggtgcgtgacttgtcgactttgctgcttctggggttctgaccttggtaaggagagaataaagagataatatgagtgcgagatgcttgctgaaaaaaaaaaaaaaaaaagaagcccataaaaaaccaaaactaaaactcgaag

SEQ ID NO: 266086 - DNA, 408 bp, Zea mays
tcgcccacgcgtacgcccacgcgtccgcccacgcgtccgcccacgcgtccggcaaggtgataggtaccgtgaattggcccatagggtggatgatgctcttgggttcatgactgcatcggggcttacagtcgaccacccgataatgacgactactgacttctggacctcgcacgagtgccttctcttaccctacgagcaggctcttacccgtgaggattccaccagtggccttttctatgattgttcggcccacatgttgtgggttggtgagcgcactcgacaactcgatggagctcatgttgaattcctccgtggtgttgccaaccctctgggcataaaggtgagcgacaaaatgaaccccagtgagttggtgaagctgattgatattctgaacccttcaaacaaacc

SEQ ID NO: 266087 - DNA, 411 bp, Zea mays
cggagctcgtattcggctcgaggtcgctctgcactgcacgactcctcccccatctaccactacctgtctacctacccagcccatcgactgcccctcgcaacgcaatggcgctcgccaccaactccgccgctgccgcagcagctgccgtatccggcggcgcggcatcccagccgcaccgcgcggccacgttcctcccgctgaagaggcgcaccatctccgccatccacgccgccgacccgtctaagaacaacgggcccgccgtccccgcggccgccgccgctaagtcatctgcctctgcggtggccacgccggagaagaatccggcggcgccggtaaagtgggcggtcgacagctggaagtcgaagaaggcactgcagctcccagagtacccgaaccaggaggagctggaca

SEQ ID NO: 266088 - DNA, 422 bp, Zea mays
gtcaggaatattgggaagaacagcccagttctttcctcagtgaatatgctcattgtgggggaaattctttcactgaatccactcctcctgttagtgctgcgtcacctgatatcttccagctctccaagatttctcctgcacaaagcccttcaatgggctctggcgagcaggcgttagagcctaaacatgagtcggcagcttcacctacgtcctgaaaacttgaggcctgatgcattattctctgggaacacagccgatccatccattttcaataatgccatagccatgctcctgggcaatggcattgatgccgagtacaaacctgttcttggtgatggaattgtgctcgattcttcgtcatggaacaacatgcaacatgcttttcagatggcgggattcaaatgagttccatgcaccttgtt

SEQ ID NO: 266089 - DNA, 608 bp, Zea mays
tcacgcgtccggcatgcatatgcagctgtgtttaagcactttgagcaggacggggcgttctactgctacccagggcagtcgaacaaatccgtgactgctatgtacaacctctaccgcgcttctcaggtggcctttccaggcgaggatgagctccgacgcgctgaggcatacagccgtgagttcctctgccgcagacgagcctccggggagctcaaagacaagtgggtcatcccctaggactttgcctggcgaggtcgcttacgcactggacgtgccgtggaaagctagcctgccgcgcatcgagacgaggatgtatctggagcagtacggtggtgccgatgacgtgtggattgggaaggtcctgtacaggatgtctctcgtcaacaacgagctcctcctccggacagctcaagccgacttcagaagtttccagagacaatgcaagctcgagtggcatggcctcagaaaatgggccagcaggagaaacctccaagcatacggcgtgacgtcgaacagcgcgctgcgatcctacttcttagccgcagccagcatctttgagccagacagagcgacagagcgtctgcgatgggctcgcacggcggtgctcg

SEQ ID NO: 266090 - DNA, 1143 bp, Zea mays
attggtgacgctgacgccccagtaccatcgatccccatggtcggcccgatggtattggtgaggctgacgccccagtacttccatatcggtgcgctgccattgggatcgaggctctcaagtacatcagctacccggctcaggtgttggcaaaatcttctaagatgattcctgtaatgttgatgggaactcttctctatggtgtgaagtacacacttccagagtatttatgcacctttcttgttgccggcggtgtgtcctcctttgcgttgttgaagacaagctccaagacaattaagaagcttgccaaccctaatgcacctcttggttacacattgtgcttcctcaacttagcttttgatggatatactaactcgacccaagatttaataaagtcaaggtacccaaaaacaaacccatgggatataatgcttggcatgaacctctgggggaccatatataatgctgtaattatgtttgttgcgccattactattcagtaactggccatatgcaaatggttttgaggcattgagattttgccaggagaacccagaggtggcctgggacattttcctattctgcctatgtggccgccgtggggcagaacttcatcttcttaaccatcagccggtttggctctcttactaacacaacaatcactaccaccccgtaaattcatgagcattggtggtttcatccgtcatcagtggcaatccattatctttgaagcatggggtagtgttgtgatggtcttcttaggcctctctatccaaatatatctcaaatggaagagaaagaaaggcagagagcacaaggagtaagcttgattcttcaaccttttctgatttgtaacttcaattggacagatctcttgtgaggttgaccaggataacgttaatgcagtctgtttgaaattaggaacttttacatggattattatgagtgataccaagtgtgaggctgagctattggtaacagctctaatttatgttctagagggaggattcatgtgtttcacttaaatgttgatctcgtggatttgtcttatgctactagaagaaaatacccccctaaacaatataaggaatatacgaatagtccttaactccggtaaaaaaaaaaaaaaaaaaaaaaaaaaaaaaga

SEQ ID NO: 266091 - DNA, 505 bp, Zea mays
cgcgcatcgaacccccacctgtgccgattctgctgacccctcgccgtcgccggccggcgaatcgacaccatggccgctgcgcgccggggccgtggcgacggcgccaacggcgtcgtccgtccccgcccccgcgaccgcggcatcggcggcgggagcatggcggggcgcgtggccgtcctcgccttctgtgtcgcagggatctggtccgcctacatctaccagggcgtcctccaggagactctatcgacgaagcggttcgggccggatgcgcggcggttcgagcacctcgcgttcctcaacttcgcgcagaacgtcatctgcttcgtctggtccttcataatgattaagctgtggtcgggcgggagtagctccaatggcagcgcaccgatatggaagtactggggcgtcagcgtcaccaataccatcgggccgaccatggggatcgaggctctcaagtacatcagctacccggctcaggtgttggcaaaatcttctaagatgattc

SEQ ID NO: 266092 - DNA, 390 bp, Zea mays
aaacattattaacctaaattgccaaagaaaatggacgtgcaacgaaaatatggaatttaccagtatcagtctgtcatttacatttcgtaatggagcattgagcacccgttgtattcgtatatctacatgaataatggtctcataacatctcctgacaacaaatattcattacgattgggaacataacctaaatccttactataaacattcctagaccaattttactcatccaaataacctgtggcctgtggcttagtaaaatttaagtcgtctccaaaatgtccaagacatcactgctcttccaaacacaatataagaggtatacgtgaataaaaaccttgattctaattctataacaggttactttcgggacagtagaacaaaaataca

SEQ ID NO: 266093 - DNA, 844 bp, Zea mays
ggacgtgcaacgaaaatatggaatttaccagtatcagtctgtcatttacatttcgtaatggagcattgagcacccattgtattcgcatatctacatgaataaggctctcataacatctcctgacaacaaatattcattacgattgggaacataacctaaatccttactataaacattcctagaccaatttacatatctacatgaataaggctctcacagcctcacattacgtatcgctctaggcatagctcataatttcagcagactacattaacattatcctggtcaacctcacaacagatctgtccaattgaagttacaaatcggaacaggtacaagagtcaacaatcgagcttactcacttgcggtctctgcccttctttctcttccatttgagatatatttggacagagaggcctaagaagaccatcgcaacactaccccattgcttcgaagataatggattgccactgatgacggatgaaaccacaatgctcatgaatttacgggtggtagtgattgttgtgttagtaagagagccaaaccggctgatggttaagaagatgaagttctgccccacggcgccacataggcagaataggaaaatgtcccaggccacctctgggttctcctggcaaaatctcaatgcctcaaaaccatttgcatatggccagttactgaatagtaatggcgcaacaaacataattacagcattatatatggtcccccagaggttcatgccaagcattatatcccatgggtttgtttttgggtaccttgactttattaaatcttgggtcgagttagtatattaacagaagtgtgtgtagaggcgtgtatcgac

SEQ ID NO: 266094 - DNA, 286 bp, Zea mays
tagagctgttaccaatagtcagcctcacacttggtatcactctaaataatccatgtaaaagttcctaattgcagacagactgcatcatcgttatcctggtcaatctcacaagagatctgtccatttgcagttacaaatctgaattggttgaagaatcaagcttactccttgtgctctctatccaaatatatctcaactggaagaccctgatcggcagagagcacaaggagtaagcttgactcttcaatgataatggattgccactgatgacggatgaaaccacaat

SEQ ID NO: 266095 - DNA, 918 bp, Zea mays
gctcgaggatgctatctcgaagaagagaaggcgccgcatcgaccagggacatgaagctggtagcatgggcactggttctagcctggagcaagggccacagggagtgtttgaaccgcaggagccggtggaatcagtcgccaacggtgtgccatctgatctggagagttcgtctgttgaggcgaagggattggaggttcgacagggtgtttcttcaggtggttctgagcatctgaatggcaggccaagcggagagttaaatgatgatttctgggaggaccttctgcacgaggggggacttggtgcagatgcaggcaatgctgttggtcaggatgatatgaacatggacatggacccagatgttagcctgcctcaactgaaacaacatggacccagacattagccgctcttgtgctatcacaatggctgtgactctgtgagtatctttacagttatgctcgttatacccctgtggtgtacctgtttcgatcgtcttcgaccaaatgtcacgtcgactgcagtctccagttgttaatacagtctgttcagcacgctgatttaagtatttgggtcaagatgttcatataatcctgtggtatccagagatattatagtttgttttcgtaactgtttgcgcagagaccatgctatgttgcctgcaggctatcagtgtatttgttctaacagatcgcgacgctggtacaacccagtgacctgccagtatgggcccctatgagattgtagggaaagaccagatagtttgtgtatgtaaaagtggtgattctatccttctatgtatgctgatccatagtagcgtctcctgtccacccacccttcgcctagcggtgatgggttacccccggttgtgcgcgcctcgggtgtgttctgcgagttccgtgtgcccttccgtgtacgcgtagc

SEQ ID NO: 266096 - DNA, 939 bp, Zea mays
cgggccgacccacgcgtctaccaagcgtccgataatatctcaaaaaaaagtcttgagtcccccctctccttccccttcccaacgctctcgctgcagaggaaaggcgaagatggcgatgaccgtcgaagtgcttgctgcactcgcgttcatgttctccacgagtattctactgcagatactggcatgcgctttgtacaacaactggtggcccatgttagcagctctcatgtacgtccttgtaccaatgccatgcctgttttttggtggtggatccacacacttcttgaccagcagagaaggtggagggtggattaatgctgcaaaattcttgactggtgcgtcggccatgggaagccttgctattccagcaattctgaggcatgctggcttaatcgagaccggggccatgttcatcgagttcacgtccttcttcatccttgtatgcacagtgctgtgcttccatagggcgactctggatgaagactggtaaatgcgcatttcaccgacaccctgaaccctagcggttcttggctgcttctgtccatgctaagaaatattcctgttggaagctaacatggatctgtacaaagaagcgtatttcgagcgtagccgtagctgatgtcttatgtagacacttgtgaagattatgtggtcatgtggcaatgcagatgttattaccttcactttgactttgtcgtcacatgttctatggtgaaggaaggaatcatccgtgtaaaccatggccagggcacgccctacttggctcctaattctatcgcaggctttggggttaacctattatgaatggaataataggatcttgatgaccgaaagaaaagggagagctaattagtcacatggctcggccgatgtatttttttttcattttgcattcatgaatctgtctaggatattacatattgtggtctgaatctttat

SEQ ID NO: 266097 - DNA, 466 bp, Zea mays
ctccttcaagcagctatagctagcataattaactcatgggtgcatagagatatgccgccgacgacccatatctatgggtccctccccttgcactgcatcttcttcttcctcctcctcgacctccttcaattattcctagtgtttgcttctcccttccttgacctttgcttggaaccattgatagttacttattgggcatggagcacgtcatctcaatggaggagatcctcgggcccttctgggagctgctgccagcgccagcgccagagccagagccggagcagcctccggtaaccggcatcgtcgtcggcagtgtcatagacgttgctgctgctggtcacggtgacggggagggtggcggcgacatgatggatcagcagcacgccacagagtggacctttgagaggttactggaagaggaggctctgacgacaagcacaccgccgccggtggtggtggtgccgaa

SEQ ID NO: 266098 - DNA, 419 bp, Zea mays
cttcaagcagctaacataattaactcatgggtgcatagagatatgccgccgacgacccatcatatctatggttacttattattgggcatggagcacgtcatctcaatggaggagatcctcgggcccttctgggagctgctaccaccgccagcgccagagccagagccagagcgagagcagcctccggtaaccggcatcgtcgtcggcagtgtcatagacgttgctgctgctggtcacggtcatggtggcggcgacatgatggatcagcagcacgccacatagtggacctttgagaggttactggaagaggaggctctgacgacaagcacaccgtcgacggtggtggtggtgccgaactcttgttgctcaggcgctctaaatgttgaccggccgtcggtgatggaagaggcggtaatgat

SEQ ID NO: 266099 - DNA, 1210 bp, Zea mays
gactcgtggttcgtcacaacaccctagactcggcgcctcccacgtctccagtccgacactccgactcactccccctcccccgccccaacccgtcgcaatggccgccgtctccgcagccccgaggccctcgatgcctccccgactcgccctccgtgcccacctcttctcctccgcctctccgctcccaatgcgcgcgctccccttactccgcagccgcttccgctccttgaccacggcctacgctgtcaagcaggacacggccctctggacccctgcacccgtctccgccatcagtgctgccaccgacgacggctccgtctccctcatcgccgtcgacctatctgacgccacggacctcgtggactcgtacacgaacccgggccaatacctcctgatccgcgtacccggcgaggagctcaagccggcgtacatggtcatctcctcgccgcctaaagcggggccccggttcgaattcctcgtcaaaagcgtgccgggagctaccgcggggcggctctgcgccctccgagacggggatgttgtggagctcggcgccgtcacggggaaggggttccccctcgacaggataaatccgcccgacgtcgcgcagaccgtgctcatcttcgcggcggggacggggatcagtgcgattcgatcacttatcgagttcggtttcgctgccaaagaaagagctgatgtgaggctttattatggtgatacaagtctgaaatctatgtcataccaggaaaggcttagtaactgggagtcaactggaattaaaataataccagtcttatcacaaccagatgacagctggaaaggtgaacgaggatatgttcaggatgctttcttcagaaacaagaacatagtaaatccatcttctacaggagccatactttgtggaccgaatgaaatgcaggaggaactcacccttatcccttgtagcagatggtgtctcacgagacaaaatcttaacgaactactgaaagcgatctccggtctctgatgtattttatgaccagttaggcctcaacgtgtaaactttattgcttaggcctggctgtgatgttccagtgatatatgaataaactactgaacttgagacgaggatgtaatgttcagtgatatattatatgaataaactactgaatttgaggcgaggacaatactgtggtcaagtttcggtttggttcatataaatggccgcagtaac

SEQ ID NO: 266100 - DNA, 1296 bp, Zea mays
  unsure (1)..(1296): unsure at all n locations
ccggaanncctggtcttccacgcgtttttaaaaacgaccaagacacggnccccaagggggctgcttatggcccngacagcggtttgtgtgtcacgtacattggcaaaggtggatcgggcaaccactgtcaagcacggcgccacaaagcggaatccgatctactggcggactatgcagcctgattgcacgaggcatacgacgacctcaagtcggtcggtaagctcaccaacagtgagctgcaccaggtgttctccgagtggaacaagggcgagctcctgagcttcttgatcgagatcacggccgacatctttggcatcaaggacgagcatggcgatggctacctggtggacaaggtccttgacaagaccgggatgaaagggacagggaagtggacggtgcagcaggccgccgagctgtcggtggccgctcctacgatcgaggcgtccttggactcgaggttcctgagcgggctgaaggacgagcgggtggaggcctccaagatcttccagggtgactactactccaccggctcgccggtggacaaggcgcactggtggaggacgtgaggcaggccctgtacgcgtccaagatctgcagctacgcgcagggcatgaacatcatcaaggccaagagcgcggagaaaggctgggggctcaacctcggcgagctggccaggatctggaagggcgggtgcatcatccgcgccatcttcctggaccgcatcaagaaggcctacgacaggaacccgggcctcgccagcctgctcgtagaccccgagttcgcgcaggagatcatggacaggcaggcggcgtggcgcagggtggtgtgcctcgccatcaacaacggcgtcagcaccccgggaatgtccgctagcctggcctacttcgactcctaccgcagggacaggctgcctgccaacctggtgcaggcccagagggactacttcggggctcacacctacgagagggtcgacatgcctggctctttccacaccgagtggttcaagattgcgcgcaacatctccaacaactgatgagctgctcaacggatggcatgcccggtgttgactactccagtcggtaatgagatttcctgcaggaacttgtctattgatctttgtaagttaattatttatatgaataaaataagagcagacatgcttgtgtttgggcaccctctgttttctcctccctgttaatcaatgcaccatgctccaaaggtgatgtacataattcagacaagtctcgatgatgtacatgttacagaactagcgaaagagttcagcttggtcgccgc

SEQ ID NO: 266101 - DNA, 1047 bp, Zea mays
tcttccacgcgtccgcccacgcgtccgctgactcacaagtcacacagccacacttgaaccgctgcccgcagcggagggagcttgcacgggccaacgcacacataacacaagctcgtcgtcgatggcgcggtgggctgcggtgctggcgctggccgcggccacggccatcgccgtggcgtccgtggcgggcggcgacatgagcgcggacaagacggagtgcgcggaccagctggtgggcctggcgccgtgcctgcagtacgtgcaggggcaggcccgcgcgccgccgcccgactgctgcggcggcctgcgccaggtgctggggaagagccccaagtgcctgtgcgtgctcgtcaaggacaaggacgaccccaacctgggcatcaagatcaacgccaccctcgcgctcgcgctccccaacgcctgcggcgccacccgcgccaacgtctcccactgcgctcagctcctgcatattcccccgggctccaaagacgccgccgtcttcagccccggcggcgacaagggctccactgccgctccagccaaggacaactcgacggcgacgaccgactcccgcgcgctgcacgcgacctccggacgcggcgtctcctcctcggcggcgaccgccggtgctgcactcacggtgctgctcgccggctacctcctcctgctcgtgccagagctgtcgcctagctcgttctagaccctctgtcaagttgtgccaccagtaggatttgatgtgttgttgttctttctagtacgtgacgtgacagacaatttgctgctggtgtccttgttgttgtagtagttgcactgtgtgttcctgttatgctatgggtacgagatgttagggcatgggttaagctaagctaaggcgatggggtatcagcagtaccttacctctcatctggctgctgatcctttttgttcttggcactgctgttttatctgaacatttgatcagccaagaaagcttcccctcgttacacggttaatgggatagttcttagtaatgtacgaatgtcgatgtaaaatacccccccggttctt

SEQ ID NO: 266102 - DNA, 1594 bp, Zea mays
cttcaccccccctctcggtctcaccctcctggcgacgactgggccgccgaccggccgtcgccgccgccccacgccaggtttcaaagtcttcgtcaggcccttctccggcgactcgagcaccacagggtgacaaggatagctttctcgggtcactgaaggaagacatcttctcggcgcggtagaccttctgacggttggctggttgtgctttaagtgtccaaggggtggattaggaccgggaaactctgtactgaagggaaggtcaaaagtgtcaagagagcttgttccaagatggatgaaggtcagggagttaggtattggtgccacatgtgtcaggaggtgatagatcccatgcccgagatgaagtgcccaggctgcgagggcgggtttgtggaggagatggactctgaagactttgagccagctgcgaacgcgaggtctgatcgctccgtctctctcttggctccactgctgcttggtatgatggggggttcgtcgcgcagatcaagactcaggagggaggccatggttgaagctgatgccgaccaggatgacgaagaggatgattcagaccatgagcttgaactttccaggaggaggcggaggaggaggcgctcatcagcgcttttcagtgtgcttgaggctatgcgtgaccgtgatgaagtaaggggctcggatgacaccgacagtccggcggagagaggacggaaagcttaatactgatcaactccaacaacgaggctattattcggcagggaacattcggatctgatgacaaccaggaggactcaagcaacacaagttctggtgtatcacttggggattactttcttggtcctgccttagacactctcttgcagcgtttggcggagagtgacctcagtcgttctggcacaccgcctgccaagaaggaagcagtcgccgcgctaccaaccgtgaacatcaaggaagcgttgggctgttcagtctgtcttgaggatttcgagatgggaggagaagcgaagcagatgccctgtcagcataagttccactcgcactgcatactcccgtggctggagctccacagctcttgcccaatctgccggtttcagttgcctactgaggagacgaagaacaacccatgcgaatcagccagcaccgcagggaccgtgaacggcggtggagacaacgctgctgcaagcggcagcgatacagaaagtactaaccacaatgaagatgaccattccgatagccctatcttctctgctctgagcacactcttctctgatccgttctcatccgacgatgatgaaagtgttccacactcttacgagaactgaagatagcgtcggacgcaggcttgcaatatggtgaagacgttctgcttctgaggctggcatctttatattgtagcttctgtacatatctctctgaacggtcgccccccataagacaaactattacctctccgttttactgaaaactatgtggcttgtaatctgctagtgcttgctatgttcacttgcctcgaataaatgttatcctttagcgtgcttaaaaaaacactcatggagctgcccggagcccaacagtcccttaacctgctgcaaggctt

SEQ ID NO: 266103 - DNA, 416 bp, Zea mays
atccgttctcatccgacgatgatgaaagtgttccacactcttacgagaactgaagatagcgtcggacgcaggcttgcgatatggtgaagccgttctgaggctggcatctttatattgtagcttctgtacatatctctctgaacggtcgctcccccccataagacaaactattacctctccgttttactgaaaactatgtggcttgtaatctgctagtgcttgctatgttcacttgcctcgaataaatgttatcctttagcgtgcttattaccatcgccggacggccctagacgtgcatgtggacgcagatttggttgacagtatggccaatgtaaggcatatatgtatgcagtggcgttgcgtcttactcctatattttaactgtcaatgagaaggtacttggaagaaggctgaat

SEQ ID NO: 266104 - DNA, 357 bp, Zea mays
aaagagagggagaagggagaggatggagaggcagagggagaggttaaggcagatcgagagggtgagtgctcgtggcagagagaggacggaaagcttaatactgatcaactccaacaacgaggctattattctgcagggaacattcggatctgatgacaaccaggaggactcaagcaacacaagttctggtgtatcacttggggattactttcttggtcctgccttagacactctcttgcagcgtttggcggagagtgacctcagtcgttctggcacaccgcctgccaagaaggaagcagtcgccgcgctaccaactgtgaacatcgaggaagcgttgggctgttcagtctgtcttga

SEQ ID NO: 266105 - DNA, 298 bp, Zea mays
ggattactttcttggtcctgccttagatccgaatgctccctgcagaataatagcctcgtggcagagagaggacggaaagcttaatactgatcaactccaacaacgaggctattattctgcagggaacattcggatctgatgacaaccaagaggactcaagcaacacaagttctggtgtatcacttggggattactttcttggtcctgccttagatactctcattgctgcgtttggcggagagtgacctcagtcattctggcacaccgcctgccaagaaggaagcagtcgccgcgctac

SEQ ID NO: 266106 - DNA, 875 bp, Zea mays
  unsure (1)..(875): unsure at all n locations
ccgtccggtcgccggcggggcgtcggcgccgccgtgggcccaacccggccccgacgtggccatggntgcggatgcaggnncggacgggcgccttgcccctcgcggagcgccggaactacccgcggngcgtcggcgaacgccatcggcccggatgggcgcgcgacgaagggcgtgcgcagccctctggcccgcgggtcctcgctcaaaccgtcaaccgcgccatgatccgtcaccggcgtcgcagcctggcccacgtacgaaccaggccaaggagggccatcctggcgcgccgcggcccgggcgccgacggcctcgccacgcacgtggccgccagcttcaccgccggcatcgtcgccgccgccgcgtccaaccccgtcgacgtcgtcaagacgaggatgatgaacatgaaggtggcgcccggcgcgcccccgccctacgccggcgccgtcgactgcgccctcaagaccgtcaggtcggagggacccatggcgctgtacaaggggttcatccccaccgtgatgcgccaggggcccttcaccgttgtgctcttcgtcacgctcgagcaggtgcgcaaggtcttcaagggcgtcgagttctgagaccggcgacgaggaaagatgatgacgacaacaaacgctgcgctgccagttcgtcaccgcgttcgctgccaagaataataacccgctgccaccctagaggccgcgactactattacgccctttgcttgcattgcatcccgtgttagacttgtgctcatgcgcttcactgcatcctgttgtatctggatggatttgaccaaatgcaaattgccaacatttttattatttaaaaaaaaaaaacccacgcgtccgcccacgcgtctcgccacgcgtccg

SEQ ID NO: 266107 - DNA, 452 bp, Zea mays
cccacgcgtccgctcgccatttctgtattacttcatgtgatggtccctcagctggcctaggtgcattcttgcaagacaaactggttatgaccaaactgttacagcaacatcttttgcgcgccaagcaatagatgaagtctatggatgataagcaccgcactgagtgtgaatttgctgttggagatctgaaggccgtgggtgtgctaacgtcctggtatctccgttgctgcctgccactgactctgcttggcacattcatgaacagatattggagcgacatctggtcgtcccaaccttcctcgttggcaacatgggaagacttggaagcactcaagcacacctttcctcaggctccagcttgggggcaagctggttctcatggaggagggaatgtcagtatcccttcatcagtcactggaggtcaggcagagcatgttcgaggagatgcagca

SEQ ID NO: 266108 - DNA, 916 bp, Zea mays
cacaggcaaggccatccatatatctcatcagtattcgaagagaaatctgatcgtctcatgtgcggtctggccgtccgaagagagtggaaatgatcgctctctccaagatagccctggtgtctgcggtggcgctgctggggctgggctgggcgtaccaggccacccgcccgccgcccccggcgatcttgggcgccccaggagggccgccgatcagctcacctagaatccggctgaaagacggccggcaccttgcctacagggaggaaggagtgcgcagggagaacgccaggttcaggatcgttttcatccatggcttctcctccaccaaggagagcgggttccccgtgtcccaggagcttgtggagcagctgggcatatacatgctcttcttcgacagagccgggtatggcgacagcgacgccaacccgaagcgctgcctcaagagcgacgccacggacgtcgaagagctcgccgacgcgctgcagctcggggacaggttctacgtggtagggtgctccgtgggcggctacccagcatggagctgcctcaaatacattcccaacaggctggccggagtggcactggccgcgccggcggtgaactactggtggccgctgcctgccaacgtgtccagggccgcgtacgggaggctccacgcccgggaccgtaagaccttctggatcgcgcaccacgcgccggcgctgctccacgcctggctcgcgcataattgtgttttgttgttttttatcttattgttttatcttctagtagggtggtgttttttacttttttattctattttttttttatttttttattttttatttttatttttttttgtctttttttatttatttttttttaatatatatatttttatatttttttttttattattttttttattttttttttt

SEQ ID NO: 266109 - DNA, 1517 bp, Zea mays
ccacgcgtccgggacctggtacaccacgcgtccgccacgcgtccgcccacgcgtccgcatagaaggcgtgtacaccaagaagaagccggccaaccaaccgactcccccgaccctcctgatcgatcgagggccccttgttctagccagttgtccccttccctctcgccggcgttgctcctgcctgctccaatggccgctgcctctgccgccgcccccacgaagacggcgaacatccccgcgacgatgcgggccgtgcagtacgactcctgcggcgggggcgccgctggactcaagcatgtggaagttccggtcccttcggccaaaaagaatgagcttctgctgaagctggaggcagcaagcatcaacccagtggactggaaggtgcagaaaggcatgctgaggcctttcctgcctcgtaaattaccttttatcccagtgactgatgtggcaggagtcgtggctgatgttggtccaggaatcaatgggttccaagccggagatcaagttgttgctatgctcaactcatttaacggaggtgggcttgcggagtatgctgtggcatcagaaaatctgaccgtcaagaggcctcctgaggtatctgctgccgaaggcgcagggctgcccatcgccgccggcactgccctccaggcgctcaggaccatcggcgccaagttcgacggtactggcaaggccatgaacgttctggtcaccgcggcatcaggtggcgtcggcctctacgccgtgcagctcgcgaaacgggctggtctccacgtcactgccacctgcggcgcgcgtaacgtagagctggtgaagagcctgggcgccgacgaggtgcttgactacaggacgccggagggtgccaccctgcagagcccctcgggcaagaagtacgatggcgtcgtccactgcactgtcgggaccagctggtcgacgttcgagcctgtgctggccgccacggggaaggtgatcgacatcaccccgaacttgactgccatcctcaaatcggcgctgcacagtgtgaccttcgccaggaagcggctcgtgccactgctcctgtcgcccaacaaggcggacctagagttcctggtcgggctgctgaaggacggcaaactcaagacgctgatcgactcgaggttcccgctgagcgaggtgagcaaggcgtgggagaagagcatcgagggccatgccactggaaagatcattgtcgagatgggagactgatctgggacgcgtccattgccgatagagacttgcagtagcatccactaggctgttggacactacagggttaaagtcaacatatacgaagtagtactagtatctgagtttggtcgtcgtacaaattgttcgtgagtggtgagccagtttataggcttgtttttcttttgttttcagctataaacttgaacttcttgtacagtttagggttttatggggttgcatgatagatccgcaaagttgcattgtaattacatatttgggagttgctatatttctgctttaaaaaaacagaaaaa

SEQ ID NO: 266110 - DNA, 381 bp, Zea mays
gtcattctcctcccctccttccacccggcaaaaaccccgcgtcggccactctccggaggcgactagggtttcagcccctgggacacgccgccggtcgtggcacctccgccaccggatcccggtacccgagctacgccatcgccgccccgcccccggtcaccgccggtgcgcttccgccgacaccagacgcagctcgtccgccccgtcacgtgcacctctgcgtgggcgcgggattggatagcgtttgcggtttcggcggctggcgccaaatcccaccgctgctgctcgcgcacgatgtctcgagcccttggggttcccctactacgctccggctggagttctctatgaaacttgttctacagtgctcttttggtgcatgac

SEQ ID NO: 266111 - DNA, 347 bp, Zea mays
cagatagtactgtcgcttggagcacgtccatgggacgctctgtatggaggagggaataccccggcggtcggcttggcttccgtcttctccctggcagcaggtgtgctcgcagttctcaagctgccaaagctgtccaactcgtaccaatctgccgggttccatggatttggctgatgctcatgcccaaaacacccccgtctgccatgtaaaacatcacaccaacacttggccccattttgccattcgtttacagagaaatgattcttttttcctcgtacaactacagaataatgacagtgaaagtaggagtttaggtgagagaaaggagaggctaggtaagttgatgt

SEQ ID NO: 266112 - DNA, 1953 bp, Zea mays
  unsure (1)..(1953): unsure at all n locations
cccacgtcgtctccaaggttgagaaattgatcaaggaactaccaactgcaccgtcagattcatctaatgctgaaattcctatcaatggcactggaacaccaaatggggaggctgggacaggtgtcagagaaacacagagcattctcctagaaagaattgccagcgagatgaaccgtcttaaattctacattagtcatgcagagaacctcccttttattgagaacatggagaagaggatccaaggtgctacaaatctgctggatggtagtttggagcgctgctttgtggatggtctggaacaccgtgatgctaaagttatatacaactgtttgcgtgcttatgctgcaattgacaatacatcatcagccgaagagctttttcgtacaacagtggtgtctccattgatccagaaaatagtccctcaaaactatgcaagagctgttgctggggcatcatctgatgagctagaagatgattatcaacagataaaggaatgcgtagaaaaagattgcaaatttatattggaaatatcttcgtcagaaaactctggattgcatgtttttgattttctgggtaattcaatactcaaagaagtcctttctgcaatccagaaaggcaagcctggggccttttctcccggaaagcctaaagaattcttgaggaactacaaagcgagcttagggtttcttgattttcttgaaggctacatgcttctccaagtctgctgtaacgaagttccgctatgagcctgcttacacagatttcatgcgacaatggaatggttggtgtctacttntttcgttgcgatttcaggaaattgcgggtggccttgattctactcttacaaatacctttagtccttctggatcgattgaggctcaacagaaaccgttgctcttgaagcaaagtattaagctcttagaaagtttggattcatgttggagtgatgaggttcttgtattctctcactgcgataaattcctccgtctgtccttgcagcttatttcaaggtatacgacatggctttcatctggtttatcggcacgtaaagcttctgacgggagcccaaattcacctgcagatgctgaatgggcactgtctattcctatagaagatttcatatatataatgcatgatgtgcatgctgtaattggtgagctttcagaatcaggcagctttattggacatgtgaatcagttactagggtcatgccccattgaagtatttaatcttgtgaaaggaagtatattgcaagctgctgaacctttaaaggagctgttgcctgcaataatggatgtcatgattggaatcatagttaagaagtctaacgaggacttgaagcacctgaaaggaataacagcgacatataggatgacgagtaaacttccagtcaggcattctccatatgtatcagggattttacatccgttgaaggtgtttcttgaaggggaccgtatacgctatctatcagaagatgataaaactaagttgtgtcgtgggtctacagataagattactgcaatttactatgacttggtctctgaagttgtcactgtggcaaggaaaaccgagtcttcgttgcagagactgcgccaaggtgcacaaaggcgagtaggagctagtacagatgcctcagatagcatcatatctgatacagacaagatctgtatgcagctatttcttgatattcaggagtacgcacggaaccttcgtgcgataggaatagacgcgagagagattgattcctacagagctctatggcagtgtgttgccccaaaggacaggcacgagaacatccagttttgatgtaaagaacgctgtcagtatatataaaataaaattgtcaacccgtagatatctcagtatgtgaaaatgatacggttggcactggttcatccagtcttcaacgacatgacaccctgtcagtttgtgaaacaaggacgtgtttggttt

SEQ ID NO: 266113 - DNA, 473 bp, Zea mays
ttattcttcgttgcaaagactgcgccaaggggcgcggattatagaaggagctagtacagatgcctcagataacatcatatctgatacagacaagatctgtatgcagctatttcttgatattcaggagtacgcacgaaaccttcgtgcgataggaatagacgcgagagagattgattcctacagagctctatggcagtgtgttgccccaaaagacaaacaagagaacattcagttttgatgtaaagaacgctgtcagtacatataaagttggctgcccgtagatctctcaaacatgcaggcgtatctgatggtgtccttttcggtttgaagtacttattatggatgcatacgtaaggtagatagagagctggatttggtacacattttattgttaggatggatggtcacctccagatataatccagaactggagaacgtgtaccagtatatgattaaattttcatgtgaaaaac

SEQ ID NO: 266114 - DNA, 1763 bp, Zea mays
ggatttggcagcccgtcaggttatatagctcactcttgatcgcttcctggtttgctaagcgatttgcctctcgtggttcggtgacggatcggaggcgctgcgagttcgaagctggtttctctgggctaagtcggttcggacttacttgttcagtaggtgtagtgtagctcgatagacgagaagaatatctggcgtggaagtttcagcaaagctcctggattaaattggcatcatagagggcgcaggatccaaatctgccggaaacctgtatcttcatccagtatcaaggggaagttctgttgttgtgagttcggtgatggatacatccaaaagcaagcaaggaccagaacatctccttgttcttgtccatggtatcatggcaagccccaaagactggacatatggggaagcagtgctgaagaggcggttgggtgatgattttttcatatatgcttctacagtgccggtttatgaactaaatggatgttaaaaaaagtgtatgcaaacatctttgtctacagctagttcaacgaacagttacaccaaaacctttgatgggattgatgttgctggaagaaggttagcaaatgaagtcttggatgtggttaacaagatgcccagcttgagaaatatttccttcctagcgcattctctgggtggtttgtttgctagatatgctattgcaatactccactcagtctcagtggaaacaaagaatgcaggacaaagtagtgcacttactgttcctacaacaagagggccagcaaaatcaagatgtgcttcaggattaggttctattgctggattgcagccaattaattttattaccttagcaaccccacaccttggggttagagggagaaatcagcttccgtttcttcaaggcctatcaatcctagaaaagcttgctgcgcctttggctcctttaattgttgggcgcaccggtgctcaactcttcctcactgatggtgatcctagcaagccacctctcctgttacagatggcatccgactgtgatgacaaaaactacatatcagccttggcagcttttaagaaccgtgtcctgtatgccaacgtctcgtacgaccacatggtcggctggcgaacgtcttcactaaggagagagaagaatcttataaagccctcacatcgttcactggatggctataagcacattgtgaatgtggaatactgttcgcccgtgtcatcggagggcccacatttcccttccaaggctgccagagctaaagaagctgcacagcgaacgccaaaccgagaaaataccgaggagtaccaccaaatgatggaggaggagatgctccatggcttgcagaaggttggctggaagaaggtggacgtcaacttccattcgtcattctggccttactctgctcacaacaacatacacgtcaagaacgagtggcttcacaatgctggcgctggtgttatcgcgcacgttgcggacagcatcaagcagcaggagtcacggccatgtcttcctgccaatctatagcagtagcattcagcaatccatttgttcaaattatctgtcgctagcaaataaacccatgaccaaactctgttcgtcagcatccactgagcggcgaaatatttgggactgggacacacaataagctgtgtatcattatcggccgcctaggttttacattgtttgatgtcaattgtcaaatggcatgtgtttcctcatggaacagacgaagcattcgaagttgatataaagacaacctaaattaaaaaaaaga

SEQ ID NO: 266115 - DNA, 568 bp, Zea mays
cccgtccgcgcgtccggctcactcttgatcgcttcctggtttgctaagcgatttgcctctcgtggttcggtgacggatcggaggcgctgcgagttcgaagctggtttctctgggctaagtcggttcggacttacttgttcagtaggtgtagtgtagctcgatagacgagaagaatatctggcgtggaagtttcagcaaagctcctggattaaattggcatcatagagggcgcaggatccaaatctgccggaaacctgtatcttcatccagtatcaaggggaagttctgttgttgtgagttcggtgatggatacatccaaaagcaagcaaggaccagaacatctccttgttcttgtccatggtatcatggcaagccccaaagactggacatatggggaagcagtgctgaagaggcggctgggtgatgattttttcatatatgctagttcaacgaacagctacaccaaaacctttgatgggattgatgttgctggaagaaggttagcacatgaagtcttggaagtggttaacaagatgctcagcttgagaaagatttccttcctagcgct

SEQ ID NO: 266116 - DNA, 1691 bp, Zea mays
tggaagcggcagcccgtcaggttatatagctgactcttgatcgcttcctggtttgctaagcgatttgccccgcgtggttcggtgacggatcggaggcgctgcgagttcgaagctggtttctctgggctaagtcggttcggacttacttgttcagtaggtgtagtgtagctcgatagacgagaagaatatctggcgtggaagtttcagcaaagctcctggattaaattggcatcatagagggcgcaggatccaaatctgccggaaacctgtatcttcatccagtatcaaggggaagttctgttgttgtgtgttcggtgatggatacatccaaaagcaagcaaggaccagaacatctccttgttcttgtccatggtatcatggcaagccccaaagactggacatatggggaagcagtgctgaagaggcggttgggtgatgattttttcatatatggtaaggcatgctagcatttgaattcttcattcactaggctcattactagtcattatctaaccatttgttctagcttctacagtgccggtttatgaactaaatggatgttaaaaaaagtgtatgcaaacatctttgtctacagctagttcaacgaacagctacaccaaaacctttgatgggattgatgttgctggaagaaggttagcaaatgaagtacgtcctttgaagtttgtcctagaaaaaaggtttcaagcattctccttgttggagactgatatctcctgttcctggatcctaatgaactgctttagaagctctgataattgtgcctatggaaacaggtcttggatgtggttaacaagatgcccagcttgagaaatatttccttcctagcgcattctctgggtggtttgtttgctagatatgctattgcaatactccactcagtctcagtggaaacaaagaatgcaggacaaagtagtgcacttactgttcctacaacaagagggccagcaaaatcaagatgtgcttcaggattaggttctattgctggattgcagccaattaattttattaccttagcaaccccacaccttggggttagagggagaaatcaggtgcatcaccaaaatgtttcggattacgtttgcaaaatatactgcacattatccagcaaaggctcgattcctgggaaaacgaactctctatttgttattttgttcattcatgtagattttgaagttgcatggtatgatttttacaagcttggattatatcattgctgaagtggtcaataccaactagcatctataacttttgaggaaaaaaacgacgaacttattgggacctgttcctgttagtgctgagcaatttctttgacacatgcttatatgtttttcccccgaattaccagcttccgtttcttcaaggcctatcaatcctagaaaagcttgctgcgcctttggctcctttaattgttgggcgcaccggtgctcaactcttcctcactgatggtgatcctagcaagccacctctcctgttacagatggcatccgactgtgatgacaaaaactacatatcagccttggcagcttttaagaaccgtgtcctgtatgccaacgtctcgtacgaccacatggtcggctggcgaacgtcttcactaaggagagagaagaatcttataaagccctcacatcgttcactggatggctataagcacattgtgaatgtggaatact

SEQ ID NO: 266117 - DNA, 637 bp, Zea mays
  unsure (1)..(637): unsure at all n locations
cccgtcaggttatatagctcactcttgatcgcttcctggtttgctaagcgatttgcctctcgtggttcggtgacggatcggaggcgctgcgagttcgaagctggtttctctgggctaagtcggttcggacttacttgttcagtaggtgtagtgtagctcgatagacgagaagaatatctggcgtggaaagtttcagcaaagctcctggattaaattggcatcatagagggcgcaggtagtccatgagaattctgacggttctcaaaccatttgcaatctagctaagaacaatgcatcctcgattgatctaggtaggtaaacccaatttacgtgtctgaataggaccaggcatcaggatcctatgtgtggttgcttcgaagctgaaacaacgaggcggcttcgtttttttatccagattccaataacagtccgaattcgagacaaacatgcgtgcatgcagttcgaagttgccttggtattatattttccacacgctttcagtgagatatactagaactcgtcactacagcattacatgaatttttgcaggattcanatctgccggaaacctgtatcttcatccagtatcaaggggaagttctgttgttgtgtgttcggtgatggatacatccaaaag

SEQ ID NO: 266118 - DNA, 430 bp, Zea mays
ttctcgcgtccgagcccgtcaggttatagctcactcttgatcgcttcctggtttgctaagcgatttgcctctcgtggttcggtgacggatcggaggcgctgcgaattcgaagctggtttctctgggctaagtcgattcggacttacttgttcagtaggtgtactgtaggcgtgtagctcgatagacgagaagaatatttggcgtcgaagtttcagctaagcaacgagatcaggaagtttcagcaaagctcctggattaaatatttggcatcatagaggttcgcaaaccgtttggaatctagctagctaagaacaatgcatcctcggttgatctaggaatgtaaacccaatttatgagtctgaataggaccaggcatcaagatcctatatgtgggcttcgggtaaaacaacgaggcgacttcattttttta

SEQ ID NO: 266119 - DNA, 646 bp, Zea mays
ttcattcgtccgcccacgcgtccgcccacgcgtccgcccacgcgtacgcgtggttcggtgacggatcggaggcgctgcgagttcgaagctggtttctctgggctaagtcggttcggacttacttgtccgtcagtaggtgtagtgtagctcgatagacgagaagaatatctggcgtggaagtttcagcaaagctcctggattaaattggcatcatagagggcgcaggatccaaatctgccggaaacctgtatcttcatccagtatcaaggggaagttctgtcgttgcgagttcggcgatggatacatccaaaagcaagcatggaccagaacatctccttgttcttgtccatggcatcatggccagcccccaagactggacatatggggaagcactgctgcagaggccgatgggccaaaaacttttcatatatatggaggggcccgcccccattagaattcttcattcactaggctcattactagtcattatctaaccatttgttctagcttctacagtgccggtttatgaactaaatggatgttaaaaaaagtgtatgcaaacatctttgtctacagctagttcaacgaacagctacaccaaaacctttgatgggattgatgttgctggaagaggttagcaaatgaa

SEQ ID NO: 266120 - DNA, 453 bp, Zea mays
  unsure (1)..(453): unsure at all n locations
aattcccgggtcgacccacgccgacgcacgcgtccgccttctcgctcgtcgccgtcgtcaccgtcgtgctcgtcgcggagccgcaccgcgtcagggtgctcggcagcgtctgcctcgccttctccatggccgtcttcgtcgcccccctgagcgtcatcttcgttgtgatcaggacgaagagtgccgagttcatgcccttcaccctctccttcttcctcaccctcagcgccgtcgcctggttcttgtacggcctcttcaccaaggacccctacgtcacgctcccgaacgtgggcggcttcttcttcgggtgcatccagatggtgctctactgctgctaccggaagcgcaagccggcgtccgtggtcgtcctgccgacgacgacggccgccgcagccgtggcacagcagctggaggcggagatggagctgcccctcgccgnccaccagcaccagc

SEQ ID NO: 266121 - DNA, 1530 bp, Zea mays
acagacatgatcattggtgatgacactgtgtactactatcatgacatgatagtggaaatgattaaatggggatatcaagaaggaaaaactctctttggatttggttatgatttccgtcaaagcaacaggctctcagagacacttgacagattttctaaaaagctggagtcagtgtacacagcttctggtggaaagaagatcaatctcattactcattcaatggggggattacttgtgaaatgtttcatctcactgcacagtgatatatttgaaaaatatgtcaagagttggatcgcaattgctgcaccattccaaggtgcccctgggtacataactaccagtctgctgaatggaatgtcttttgtcgaaggatgggaatcaagattctttatttccaaatggtgtatgcagcaattgctacttgagtgcccatcaatctatgagttgctggcaaaccctaacttccagtggagagacatcccactgctacagatttggagagagaatttggataacagtggcaagaaaagtgccctgttagagtcgtatgagcctgaggaagcaataaagatgattaaagaggctctttccagtaatgagatcattgctgatggcatgcatattccggcgccccttaattcggatatattgaattgggcaaaggaaactcgtgatcttttatgcagtacaaagcttccggaatcagtgaaattctacaacatttatgggattgattatgatactccacatactgtctgctatggcagtgaacagcagccggtttcaagtcttagtagcctcttatatgctcagggaaaatacgtctatgttgatggcgacggatctgttcccgcagaatcagcaaaggctgacggatttaatgcagtggcaagggttggggttgctgctgaccaccggggaatcgtgtgcagtcgccgcgtgttccggatcgtccagcactggctgcacgctggagaacctgacccgttctacgacccgctgagcgactatgtcatactcccaacactctacgaaatcgagaagcatcgtgagaaacaccgggatgtcacgtccgtagcggaggactgggagatcatctgcccgaacgacggcaagaccatgaggccaggcgagtttcctcctatggtcagcacactgaccacgagcctggaaggcaaggagggtgcactggaagaggcgcaagccactgtggtcgttcacccggagaagaaggggcggcagcatgtgcaagttagggctgtgggtgtcagccatggtggctaaagccgtaggagccactttggttgtctactctatctagcagtagcagctatacctgtctctgtgcacgccctgtaaaattggatgtacatatatggctatgacctctgtagggactctggttttagaactataaatgggcaccctgcctgcttgtaaatgttcagaaccgaaaacacaggccctgttcttttttttcctttttaaaaaaaataaaaagatggtaaaggattccattacttggaaggc

SEQ ID NO: 266122 - DNA, 747 bp, Zea mays
catcgatcactatctgttaaatgtttcaaagtttaatatccatatatgtatttttttgagcttttgaacagtcttttgtatgcaccacttgtcataactttcatgtgaatcagaaaattaaccaaaaattggttgattcactttggagttagattagtgtgcatatataggattcattagctccattaaatccttgtcacccaatgtgtacttcgtgtttgcgtgtgctgcttcaggtgccagctctccagagattcatgcgaagtcgagcacacattcaccagcaaacaggtgtccacattacatcctcaccgatctacacttctaccttacacattgctagggtaaatgtgagggaccctggtacaataaacgatggcctcggtgctgctcgtgaagcagatgccctattggttcaggatgagtctaccaggagccacgcaagagggtcaacagaatggaatttctgagccagctgccaacaatgctctccagtatcaagagcaaaaccctcagcgagctggaagtacccctgcaggctcaggctccctcaacccatttgggtcccttttgctgtggttgctgggaggcggtgcttctgatggcatagtttctttcttctctatgttcagagatgttcgtgatcatggtcaagattacaccgatccacctcgaaatggaaatgatcaggtgacatagaatcatggggatgaaagtgggccaatgactgaactcgagtgcttgggc

SEQ ID NO: 266123 - DNA, 852 bp, Zea mays
cccacgcatccggcaggatatgatactttgcttacaaacagctgggtgaattcgcctggtcatggctattgatacaactttcagacgaaggagctctatgatcttagttatgggcatgaaccaccagaaggtcctacaagatttggagattactttgtgacaaaatgtggtgtccttctaatgtcactctttgtctttttcacaaccaccatgtctgtttcatttactttgagagaaacacaatcccgcatgcttagattcacagtgcagcttcaacaccatgcacgccaccacctgccaacctttcagttgatattcgtgcatgtcatcgaatcattggtttttgtgccgattatgattgggattctcttttttctatttgagttctatgatgatcaattgcttgcgtttattgttatgactcttgtatggttatgcgagctattcacgatgatcagtgtgcggacatccatatcgatgcagatctttccacgcttcttcttgctgttgtttttggttttccatatctacttcttctcatatacctatggcttttatatctggctttctctgctaccgcagcattcatgcaacacctgatatgagaagccataggtatatgagaagaagtagatatggcttctcatatctggctttctctgctacggcagcattcatgcaacacctgattttatatttttggaaccgttttgaggtgccagctctccagagattcatgcgaaccgagcacacattcaccagcaaacaggtgtccacattacatcctcaactatctacacttctaccttacacattgctagggtaaatgtgagggaccctggtacaataaac

SEQ ID NO: 266124 - DNA, 532 bp, Zea mays
tatgttccaccagaaggtcctacaagatttggagagtactgtgtgacaaaatgtggtgtccttctaatgtcactctttgtctttttcacaaccaccatgtctgtttcatttactttgagagaaacacaatcccgcatgcttagattcacagtgcagcttcaacaccatgcacgccaccacctgccaacctttcagttgatattcgtgcatgtcatcgaatcattggtttttgtgccggtaatgggaaatattctttggcgttctggagtatttgtagtttgtgatgaaaatacattcgctgcagaattcaccgaacttctatattagctcactcattattttgttctgatctttgtagattatgattgggattctcttttttctatttgagttctatgatgatcaattgcttgcgtttcttggtttgactctcgcatggatatgcgagctattcacgatgatcaagtaatggtttacatggaagtattactggattttttattatactctatctctgatgtgaaacacctac

SEQ ID NO: 266125 - DNA, 724 bp, Zea mays
cggccctacttctgtctccacggctgccgacgagccgcgcggccgaactcactgcaggaggactcgcacagatcggtgagcgagcaagcgagagatggctgggaggctaaccgcggcagggtcccgcatcctgggcggcggcggcgcacgcgccgcggcttccgccctccgacaccgcgccggcatgggcctccccgtcggccgccacatcgtccccgacaagcccctccccgtgaacgacgagttggtatgggataacggcacgcccttcccggaaccctgcatcgaccgccttgccccgcacatcggcaagtacgaggcgttggcgtggctgtgcggagggctagggttcttcgctgccctcggtatggctgctgttgtgaacgacaaggcctccaatataccatatactcccaaagtctacccgtacgacaacttgagagctgagcttggtgatagaccatagaagattgtttctctgtttgacaagccactttgatgaattgaacatatcttctaccagacaaaagcagggaaagctgttgtttaccatgtttttttattgttgtaactaccttcatgtaatttcctggatcttgcgaagcatggattttccctacaataatgcaaccggttgcactggcaactattcctgaaacaaaaagcttaagggcgattcaaccgaacaaatcttgctggcatgggagtcatccgtttatgctac

SEQ ID NO: 266126 - DNA, 398 bp, Zea mays
ttggcgtgcctgtacggagggctagggttcttcgctgccctcggtatggctgctgttgtgaacgacaaggcctccaatataccatatactcccagagtctacccgtacggcaacttgagagctgagcttggtgatagaccatagaaggttttttgtctgtttgacaaggcactttgatgaatatgatctgagatctatatctcctttccatcagagagaagcagggggaaacttatttaccatggtttttttgtgactgccttgttgtaaaccaccgttatgtgatttgctgaatattgtgaagcatgggtttgccctacaataatgcaaccagctctgaacctattcctgatgctacagattcgagtattaacgggcggccgctcgcgatctagaac

SEQ ID NO: 266127 - DNA, 469 bp, Zea mays
gaaaggccaatctctagtggatgctgcttaccgaaaggcaaaatcattgaaggcggcgagcaaacgggcccctggtgcaaggaaaggaaagaaagagaagaatgaaaggcaacattctgagaaggctccgaacaggcatgaagagatgcgtgacctgttccaaaatgatatgagtgaatggaaacagggacgctcctcaaagaaaaaataacaatatttgcgcccaaaaaatcaaggaactcttttaagagcaaagcaaggtacaagcggaagtagaagactcggccatctccgggtttatattacattcccttgtttcaattttgactgactgatcctgaagaaatatctgggatccagatgtttgcagttaattcaagtttgctttaaacatattctcatatcatgtattgaaactcaccgttttctggggtctcttatgatctcgcgaactgtgttaccgttttgt

SEQ ID NO: 266128 - DNA, 781 bp, Zea mays
agccgccacgcacccgctgccggccaaaagccaatacgaatctccccgctgcgcggcggggcctctgcttccgcaatgcgggcctccgtcgaggaggccggcgcgctcctggcgcggagcgactcagccggccgccgccgccgctccccgccgccggtgcagaccgcgtccccgaggcccggtagcctcaggcgccagtcgtcgccgttccgcgaggacgtcgggcacgccgcctccgagacttacctcgtctcgcgcctcaccttcaccctcctccagtacctcgggttaggttaccgatggatgtcacaacttctttcactcacaatctatgcaattgtacttatgccaggatttatacaagttggatattactatttcttttcgagccaagtgcgtagaagtgtagtctatggagaccaacccagaaacaggttggatctatacataccagaagataatagtaggccctgtccagtggtggcctttgtgactggtggagcatggattattggttacaaggcatggggtgctcttctaggaccacgattggcagagcgaggaataatagttgcttgcattggctacagaaatttcccacaaggtacaataggggacatggttcatgatgcttctcaggggatttcttttgtgtgcaacaacatcgccagccatggaggagatcctaatcagatctacttgataggtcagtcagcaggtgcacatattgcagcgtgtgccctcatggagcaagcagttaaagaatctggtgggaatcctg

SEQ ID NO: 266129 - DNA, 864 bp, Zea mays
cggtccgatacaccaaaacccgcatccataaacaagaaaaagaaaagaaaacccccgctgccagcgacagaagaagaaggggtcccttctccttggttgcgttgcgcctccctcctgtctgcgtgcgtgcaatcgacgcagaggcgcgggcgctcgcaccaccacgaccacgacccgatggctttcatgcgctcccgctcaaatgcatcttctggcatgggagttgctcctaacattagggagacattcgtcgagcttcaaatgaagaaggcattccgatatgttatcttcaaaatcgaagagaagcaaaagcaggtggttgtggagaagacaggggctactactgaaagctatgatgattttttggcctctctcccagagaatgactgccgatatgcgctgtatgattttgattttgttactggggagaatgtgcagaaaagcaagattttcttcattgcctggtccccatcgacatcccgcatacgtgctaagatgctgtactccacgtcgaaggaccgcatcaagtacgagcttgacgggttccactacgaaatccaggcgaccgacccatcggaggtggacatcgaggttctccgggagcgggctcactgaagctggttctccttttgaagggacctgtggagggccgtgaaccttcagccagatgcaaattcaattatcaacgatgaagctcccgccgtggtgtttgttaataagttcctgtaagcatatcatttagtcgctatgcatgatactagctgctagctggtgaagcgctatctaagctgtaaacgaagcacgatttgcaaactcgttatattgtggtattgatgatactggattactggctgtgggttaaaa

SEQ ID NO: 266130 - DNA, 702 bp, Zea mays
gaattcccgggtcgacccacgcgttcggaagagatgacgtgggggtggttgaggagatgacaggggctactactgaaagctatgatggctttttggcctctctcccagagaatgactgccgatatgcgctgtatgatcgtgattttgttactggggagaatgtgcataatagcaagattttcttcattgcctggtccccatcgacatcccgcatacgtgctaagatgctgtactccacgtcgaaggaccgcatcaagtacgagcttgacgggttccactacgaaatccaggcgaccgacccatcggaggtggacatcgaggttctccgggagcgggctcactgaagctggttctccttttgaagggacctgtggagggccgtgaaccttcagccagatgcaaattcaattatcaacgatgaagctcccgccgtggtgtttgttaataagttcctgtaagcatatcatttagtcgctatgcatgacactagctgaagcgctatctaagctctattggtatgaggtttggttgccgtgttgccgagcctgtaaacgaagcaagatttgcaaacttgttatattgtggtattgatgatactggattactggctgtgggttgttcaggaaaaaaaaataatcatttgttgtacctgatccctacttttttgggagaaaggttcaacgttttggtgcatgataaaat

SEQ ID NO: 266131 - DNA, 589 bp, Zea mays
cggaccggaatacccgggtcgacccacgccgtccgggtggacttcccgattttgtgccaagatgttttactccacctcgaaggaccgcatcaagtatgagctcgacgggttccactacgagatccaggcgaccgacccatccgaggcggacattgaggttctgcgggagcgggctcactgaagctggttcgcctgcgaagaagaagggacctgtggagggctgtgaaccttttggtcagatgcaaattctattaccaatgatgaaagctcccgccttggtatttgttattaagttcctgtaagcatgtcgtttaggcgcgatgcgtgactctagctggtgaagcgttatcaaagctgtatctgtaagagttttggttgtcgagcctgtaaacgaagcaaggtttgcgaacttgttatattgtggtattgatggtactggattactgactgtgggttcctgggaatgcctgtgttggtctggtatgtgggcgtggtagtggttcgaccgggaatgggccctgttggttttggacgttcgaatctgttggatagattggtgttaatcaaacgaatgctatattgctattgt

SEQ ID NO: 266132 - DNA, 411 bp, Zea mays
gcccaacaggacagtaggggctcccttctccagtgcgctccttgcttgcgtcttcccggtcccgtctgcgtgcgtgcgatcgacgcagaggcgcgggcgctcgcaccaagccgatccgatggccttcatgcgctcccgctcaaatgcatcttctggcatgggagttgctcctaacattagggagacgtttgtcgagctccaaatgaagaagacattccgatatgttatcttcaaaatcgaagaaaagcaaaagcaggtagttgtggagaagacaggggccactactgaaagctatgatgattttctggcctctctcccagagaatgactgccgatatgcgctgtatgattttgattttgtcaccggcgagaatgtgcagaaaagcaagattttcttcattgcctgatcccc

SEQ ID NO: 266133 - DNA, 1558 bp, Zea mays
cttgctcttgccttctgttcttcacccgtttcagattttgaatcaaaggttttagtccgtaaggtgctgaagaagtgtgtcaagctgccagttctagctcatcatctagtaaaagagtctggcattctgttgtggttattgtctgttatttcagtccgtagcgaagtgtctgacggttctgaaagctcctgttctagagtaactgagttagcgttggaggtagtcaatggttcgatatcatcaagattgatcacagattggctccaagaaaccgcccttgagcagctctcaacaatatcatcatacctttctgttctaattaacaatgccaaattattgaaaggaaatgttcatttgttgacttcagctctaagtgtgattacatcaacaatgaggttgtctatgacaaggaagatataccaaccacattttaccttgtccctccatggtgtatttaatctgtgccaaactattggtggtagctcaagaagtacagagcataagcttgtaatggaacttggtatcgatgccattctgatgaatggtcctataccaattttatctgaaatggataagtcaagaatataatggttgtttcatgggcaacttcaagcatcttctgggttgtactctaaccaaagatcgctgttggaaatatcctgcaaagagccaccaagaaatgagtctctactttcaaagattttgcgcttgttagccgcttctgtaatacttggaaagatatctagcatctttcatggaaagagtgtagatcttgcagggaacaccagtgaaactctttgctctttcttggacaatgcatatgaaagggctgaaacggcaaagagttgcagtgtgaatgatactctagctgtcattatactacaccttcaagaccatatgccaaagaacagtgattccttgccatcagttattgcagccctttgcttgtggcttcttgacagatccagtaagcaagtgaacaaacacctggccaacaaccgagggaaaattgaaatgctttgctcaaagataggctgcccggctgaatcaaatcctgcatggagatggcattactatcaaccctggaaggattctgctttgcagcgcacggggatggagcgactggaagaagagcaggcctgccgaagcctcctggtcctattttccagtgccttcagtgcctgcctgtcagagttcccggtgttgtccctagatgatgttgagaagtctggccttttccagtgggaaagagacttaatggctaaacaatcttccacttagcgccggacgattgatcttgtttagaacttggaagaagggaatgcttcgaccctcagctggattggatggatgagcctacggtgctgcacaagccgaaccggccctgcgcccctgcctaacaccgatatgttggacacttccactactgttcttcacttcccatttgtataacgggacctgcattattgtagcatgggtgcagcgtttcctatgtaatttctgtgacattaccaactcacaatattgatttcatctgaaatgtaacatattttttctc

SEQ ID NO: 266134 - DNA, 853 bp, Zea mays
ccaattcgcaagatccattggcgttgagatcgcatcgaccatctagtacaggatcaaacgtgaagagcaacatagaagctgtttggatgggacactctcctcctttgctaaggctcgcaattgtggatttggcattaccaaaaactcctaatgataactctctgtcattgtttgctgatccccttgttccagagagattttattgtgcgcatggtggggggcttgacatggtcacactgcacttcctaccattttcataccctgaaatgtcttcgacaccaccctctgtgcatcctgtcctcactacagggaacagcgaaacaagctcaccttttctttctggatttgttaccatagctgatgcatatggtcatgtacagttagctggcatcacatgcttgggtgagtgctttgtggtggagatgaagggttggaaggaaccggcacctcttcagcttgacttagaaagcaaaatcgtcaaggatgtggagcctcctgcaactggaatgatcagcagagaacttattgctggtccagacccacccatacttccatcatcttcaagcctgaaatcgttgaccccagactctattgaaggaaaatctacacttcaccactatattaaggtcttccatgagtactatgtggagtacggacacaaggtgttcattgaactcaaggagcatgcggactatttgaagacagaaatggaagataaacagaaacgcttggaagcagtgaagaaatcacttatatccgtagaagccaaagatggagacatcaacaagaggatagatcgggccttcaaggtgtatgaactgttggagaagcgaatagatagcttcaagatgct

SEQ ID NO: 266135 - DNA, 1619 bp, Zea mays
attcggtaatttttttggaagcccaagtccagagcgggtccagcccagttcatcctccacctgctccgccggctgctcttcttctcccctctcgctatatccccggggacctcacagccacatctctccactgctccgtccagcgcgtccacctcccaaacccctactcccccaggaagcaatggcttcccccacccagggccaggtcatcacctgcaaagcggcggtggcgtacgagccgaacaagccactcgtgatcgaggacgtgcaggtggcgccgccgcaggccggcgaggtccgcgtcaagatcctcttcaccgcgctctgccacaccgaccactacacctggagcggcaaggatcctgagggtctttttccttgcattcttggccacgaagctgccggaattgtggaaagtgtcggtgaaggagtaactgatgtgcagcctggggatcatgtcattccttgctaccaagcagaatgcaaagaatgcaagttttgcaagagcggaaagaccaacctctgtggtaaggtccggagtgccacaggcgtaggtgtcatgatgaatgatatgaagagcaggttctctgtaaatggaaagcccatttaccatttcatggggacatcaacattcagccagtacactgtggtgcatgatgtcagtgttgcaaagatcaacccacaggcacccttagataaagtctgcctgctcggttgtggtgttcctactggtcttggagcggtgtggaatactgcaaaggttgaatctggctcagttgttgctgtttttggccttggaacagttggacttgcagttgctgagggagcaaaagctgctggtgcttctcgagttattggcattgacatcgacaataaaaagtttgatgttgcaaagaactttggagttacagaatttgttaacccaaaagagcatgacaaaccgatacagcaggtcctggtcgatcttacagatggcggcgtggattacagctttgagtgcattggaaatgtttcggttatgagggctgcactggaatgctgccacaagggctggggaacctccgtcatcgtcggcgtcgccgcctctggccaggagatcgccacacgaccattccagctcgtgactgggcgtgtctggaagggaaccgctttcggtggcttcaagagccggacccaggtcccatggcttgttgacaagtacatgaagaaggaaattaaggtggacgagtacattacgcacaacatgaacctggctgacatcaatgacgccttccacctgctccacgaaggtggctgtctgcgttgtgtgctggcgatgcagatctgaaattcctaagctaagcagtttttggatatgtgtcggcatagactgtcttttgttttggaactagaactcctttttgcctcgttaggcctggacccactgtataatgctatgttgcgttggatggctgacgatggttaccgctgtgttgctagcaatgtggtacttgatctgtatcacggttgcaaataagtgctgtttctaaaacactcccccccaacaacataaacaacaatagcttcaacaacaacaactcctactacaacatcactgtataagcccacatcatcataac

SEQ ID NO: 266136 - DNA, 607 bp, Zea mays
cggttcggaattcccggctggagccactcgtccggtggattacagctgttactgcattggatatgtctccgtgatgagggctgcactggaatgctgcctcaagggctggggaacctccgtcatcgtcggcgtcgccgcctctggccaggagatcgccacacgaccattccagctcgtgactgggcgtgtctggaagggaaccgctttcggtggcttcaagagccggacccaggtcccatggcttgttgacaagtacatgaaaaaggaaattaaggtggacgagtacattacgcacaacatgaacctggctgacatcaacgacgccttccacctgctgcacgaaggtggctgtctgcgttgtgtgctggcaatgcagatttgaaattcctaagctaagcagtttttgttttggaactagaactcctttttgcctcgttaggcctggacccgctgtataatgctatgttgtgttggatggctgacgatggttactgctgtgttgctagcaatgtggtacttgatctgtatcacggttgcaaataagtgctgtttctaaaaccctccctctcggtgaataaggggttgtttggtttgaggaatcattcca

SEQ ID NO: 266137 - DNA, 797 bp, Zea mays
gagtgataaaggtgcattcagcgcagaagagcgagaagctgctaagaaagagtgtcttgatgcttctggtgcagcggagaatggaaatgcgaataatggcgatcctatggagaatggtgatggtcaagatggtgccgaggagggcaacacatttcctgatgaacaatatggttatccaaaagctgaatctgagaggtgggtttcctgcattaggatcttggatccaaggagtagggacacaacctgtctgctggaattgcaggacaatgaggctgctgtcagtatctgcactgtgaatttccatgataaggagcatggaactctactggctattggcactgccaagggtttgcagttctggccaaggaggacccttgctggtggattcatccacgtatataagtttgtggatgaagggaggtcacttgaacttctacacaagacacaggtggaggaagtacctcttgcattgtgccaattccaggggcgattacttgccaggtgttggttcagtgctcagactatatgatccgcgtccgagaaaattgctcagaaaatgtgaaaacaagctttttccgaggacattagtatctattcagacctaccgtgatagaatctatggtggcgatatgcaagagtcatttcactattgcaagtacagacgagatgaaaaccaactctatatatttgctgatgacagtgttcccaggtggctttacaacagcacaacacatagatttttgacactatgtttggatcaaatatatttggaaatatatatttttgctcctctttcc

SEQ ID NO: 266138 - DNA, 1530 bp, Zea mays
  unsure (1)..(1530): unsure at all n locations
cgccttttgtgcatccacctcctgttcctgtaaaagcagagggtaaacactgccgactgaaagtaggatatgtgagtagtgattttggtaatcaccccctttcccatctcatgggatcagtatttggaatgcatgatcgtgccaatatcgaggtcttttgctatgcactcagtcaaaacgatggtactgagtggaggcagcgtattcagtctgaggcagaacattttgtcgatgtttctgccatgacttccgataatatcgccaagcttatcaatcaagacaaaatacaaattttgataaatcttaatggctacacaaagggtgccaggaacgaaatttttgcaatgcagccagcacctatccaagtttcgtacatggggttccctggaacaacgggtgctgcatacatagattacttggtcacagatgagtttgtttctccatctagctatgcacatatatattcagaaaagctcgtccatttgcctcattgctattttgtcaatgactacaagcagaaaaatcgagactgtctcactccagtatgtccacacaaaagatctgattatggattacctgaggataaatttatttttgcttgcttcaatcagctttacaaaatggaccctgagatatttgacacatggtgcaatattctcaaacgtgttcccaacagcgcattatggcttttaagattcccggcagctggtgaaactagagtgagagcatatgctgctgccagaggagtaagatcagatcaaattgtattcacagacgttgccatgaaaaatgagcatatacgacgcagtgccctggcagaccttttcctggacactcccctctgcaatgcacacacaacaggcactgacatactgtgggctggtctgccaatgatcacccttccactagagaaaatggcaaccagagtagctggttccctctgcgtagctactgggcttggggaggagatgattgttagcagcatgaagaagtatgaagatagagcagtagaactagcgctgaatccggtgaagcttcaagcgctgactaacaagctcaaggaagttcgtatgacctgcccgttgtttgatacagctcgatgggtgcgcaaccttgaaagggcatactacaagatgtggaacctttactgctccagtcgccacccggagccattcaaggtggtagaggatgacaatgagtccccatttgaccgctaacgagatctcatcagcagcccggctctgtaaataaggcgagagttgtagaatatttagcatcgtgaccgctgttgctccaggtgcttgtttgccgccccctttcctgccgtgcacatcacctctgtggaggctaacttcgtagtatgtatgtactacactgcaaaagaagtcctagggttagcctattgttatcactatttagtttgctatattgtatcgcggtcgtggtttctaaaataaactgcaacctttaggagtgttgatgtgaaatctcattcttaaaaaaaaaaaaaaaaaaaaaaaacngagggat

SEQ ID NO: 266139 - DNA, 836 bp, Zea mays
gggtttctctccctcccttgccttcgtctccgcctcccgtcttcctctagaagtcgattcccttccccaagaacccaagcccccaccatgacaagctcctcctctccttcccgaaaggcgctgagcaagatcgcttgcaatcggctgcagaaggaactcgccgagtggcaactcagcccccctgctggattcaagcacaaggtctccgataacctacaaaggtgggtaattgaggtcactggagcggcgggcaccctttacgccggcgagacctaccagttgcaggttgacttccctgagcattatcctatggaggcacctcaggtcatttttctcaatccagcgccaatgcatccacacatctacagcaacgggcacatctgcttagatattttgtatgactcgtggtctccagcgatgaccgtgagctctgtctgtatcagtatcctgtctatgttgtctagttcgccagcaaagcaacgcccggcggacaatgaccgctatgttaggaactgccgcaacgggaggtcgccaaaggagactagatggtggttccatgacgacacggtgtaatgatctccgtggcattgcctgtcagccttctgtactgtgaactgtgatatatctcttcaagggggagatgagatgatttaggcctatttctaagcagccctctattggattgcgaagcttaccttgctgtggtggtatgtaaatgagttgctcacatgtgtcagtctgggaatatgtgttatcaccatcaatgatataatatatagaatgaagcatgattgtaccctgcctgaatcactggaacgagctcaaaaggaattacc

SEQ ID NO: 266140 - DNA, 878 bp, Zea mays
  unsure (1)..(878): unsure at all n locations
agcccacgcgtccgcttggccttcgtccccgccttccgacttcctccaaaattccattccctttcccaagaaaccaagaacccaaccccccaacaagacgaactcctcctccccttccaaaaaggggctgaacaagattgcctggaatccggtggaaaaagaactccccgaatggcaacaaaacccccccggcgggttcaagcacaagggccccgataacctccaaaagggggtaaatgaagtgaccggaacgcgggggaccctttatacccgggagagcgtaaaattgcaagtggagatctctgagcactatcccatagaggcgcatcacgtgacatttctcacaccagagccaatgcatccacacatttacagcaacgggcacatctgcttagatattctgtatgactcattgnaacttccgatgaccgagagctctgacgaaatcggtaacctgtaaatgacctctacatcgccagcaaagcaacgcccggcggacaatgaccgctatgtcaggaactgccgcaacgggaggtcgccgaacgagaccagatggtggttccatgacgacacggtgtaattgagcgcctgtcagccttccttgctgtggtatatctcgtcaaggggagattggggatgatttaggcctatttgtaagcatccctctatcggattgcgaagcttaccttcctgtggcggtgtgttaaatgagttgcacacatgtgtcgagtctgagaatacatattaccatcatcaatgatataagtaatatagaataagcatgagtgtaccctgcctgaatcactggaacgagctcaaaaggaattaactgtgcaggtttaactatgacttgctttgctcaatgtgcctttgtatca

SEQ ID NO: 266141 - DNA, 945 bp, Zea mays
tccggaattcccgggtcgacgccacgcgcaaccacactcttgcaccgagctagcagccaagatggcgaccaaacacctggctctttgcctccttgttctctttagcataggcatgggcatggccaccgctgctgcaaaccgcaaactgggttatggccccgggggaggaggtggcggtggtggtagcggtggcggtggaggcggtggttacggaggaccaggctatgggtccggatcagggtatggtgagggcggtggcagcggaggtgctgctggagggtatggacatggtggtggcggcggcggcggtggtggtgagggtgcgggagctggtggctctgggtatgggtccgggcaaggatctggctacggagctggcagcggtgctgccggtggatatgggagtggcggaagtggtggaggtggaggtggcggtggccagggtgggggttccggatatggccatggaggtggtgaaggatacggctctgggtctggctttggtggtgctgctggcggcggcggtggacatggtggcggtggtggcggcggccaaggtgggtctggctatggctctggttcaggatatggatcaggtgaaggatacggacaaggtggtgctcatggaggaggctatggaagcggtggtggcggtggtggcggcggtggtcaaggtggtggtggctctggctatgggtctggatccggctccggttatggaggtggcaacgacaacggacattactaggctctttttcagagctaggaacatgttatacaaatatgtcaccagacatgagtaggtcttgctgcatgggatgctagttgtgtccatcgtgtgtgtaacaccgcaaggcttgtaatttgtcctgtaaactgcttgctgctttacattactggcaacaactaagtgataaataaaaatcatctatggaattatagtag

SEQ ID NO: 266142 - DNA, 737 bp, Zea mays
  unsure (1)..(737): unsure at all n locations
cccacgcgtccgcggacgcgtgggctcagccactgctgccgtcgacaggtcctcccccgaccccgacgcgctctatgaagaggggatgtggcaacaaatggccatggacagcggtgccactatgcaacctgggtcatatcctgagcgaccaggtgaacccgactgcacttactatctcaggactggattgtgtcgatttggcatgagctgccgattcaatcatcctccggataggaatctggctattgcctctgccagaatgaagggagaatatcctgagagagcgggacagccagagtgtcagtattatctgaagaccggaacatgcaagtttggtcctacatgcaaatttcaccatcccagggaaaaggccggaattgcagggagggtgcagctaaacacatcaggatatccactccgcccgaatgaaaaggagtgtgcgtattatttaaaaacaggacactgtaaatacgcaaatacttgtaaattccaccacccggaacttttcaatgtggtgccttcgtcacgtggttctcctatttatacctctgtacattcctctgcgagcgctggtccgcagtcctatactggaactatgccaagctgggcttttccacgagcttcttttataccaagccctaggtggcaaagtccttcaaattatgcgccgatgattgtacctcatggccttgtccaatgcagagctggaatcatatacttntcagctgcggcacctg

SEQ ID NO: 266143 - DNA, 533 bp, Zea mays
gtcctctacctggcgtacgcgccgcggcgggcgcgcctgcggactctggcctacttctgcctgctggacgtggcggccttcgcgctcgtcgtcgccgtcacgctcttcgccgtccgcgagccccaccgcgtcaagttcctcggcagcgtctgcctcgccttctccatggccgtcttcgtcgcgccgctcagcatcatcgtcaaggtggtcaagaccaagagcgtcgagttcctgcccatcagcctctccttctgcctcacgctcagcgccgtcgcctggttctgctacggcctcttcaccaaggacccctttgtcatgtaccccaacgtcggcggcttcttcttcagctgcgtccagatgggcctctacttctggtaccgcaagccccgcccggcggccaagaacaacgccgtgctgccgacgactcacgtgtaccgggcgctcaacgcccggtgcagggtgcaaggggcaggggtcatcgagccctgggcgcccaacacggggtgggccatcctgtcggtgaagccccccat

SEQ ID NO: 266144 - DNA, 1025 bp, Zea mays
ctgtatttgcttttcagtcaacaccagagttaatgtttggactgtaccttctgtattacttccgtgtgtttgagaggcagataggctctaacaaatactcggttttttgtctcttcactatcacagcatcatcgctcctcgagatcctgtcattggttatcttgaaagatacaaattacatcagcacgcttgcatcagggccttatggtctcatatttgcctcttttgttcccttctttcttgacattccaatcacatcacggttccgtatttttggtctgaatttcagtgacaaatcattcatttacttagctggttttcagcttcttttatcttcttggaagcgctcccttattcctggtatatttggtctggttgctggttctctctatcgtctaaatgtgctcggcatccgcaagatgaagcttccacaggttatttcatcattttttgcaagatatttcgccccttccccaggaagcacatctcgcccctccaggagtcttgttggaaacacaccgtcccatagaggccgtgctgttcagaatcagccatcaactggatttgcacctatcgtggagcctccacagtcctccgttgctatgctggtctcaatgggctttgatggcaataacgcaaggcaggcactcgtgagggctagaaatgacatcaacgtggcaacgaacatcctactggaagcacagtctcaatgaactaacgcactgcaactttctggtggtaaattagagggaagaactggttatattccaagatgaacaaacaatatgagcacattggactacagatcggtagattagtgcctcatttcatctaccttgaactgcaggccgacagtttagtaaatcagcgtatacatttgcggcagttagttttatcgtgtcaatacttagatgccttacatacagagaatgtaatattccaatttcagcttgtaggatagatgatataagcattcatagtgtacaattcatccgatgttttacagctttagaacttgttccagc

SEQ ID NO: 266145 - DNA, 538 bp, Zea mays
cgccatccgccctcatcccctcacgcccaaactaaaccctagtagatcgccgtcgtcccctcccgaatcgccatccgtgtattcctccccaccgcaagaccttcctctccctcccatctaccgatccattcctcccctccgccttccagccacaagagctccacctccacccgggctcgccgccggcggaggaccacatctgggagatgcaaagtggagcacgctgcgccactcaacatcgagatccgcttcttgggtcgacccttcgacagcgcccccctggcagacccgggcaacaacattgtgcttcgtggtgctgcagtggccgctggagacccgtcgacggggagccccccaagaccctctatcagctccaccgatgccatgagagcgcaagaaggctgaccccctatggctgcgaatagggccatggttgctgctggcactcgagcaagccgacgccgactatgaccatgtccccatgagtcaacagactggtgactacgccgctgggagcacctcgccaggaacatgcata

SEQ ID NO: 266146 - DNA, 403 bp, Zea mays
cagaaatcgatgagctgagccgtcaagttgctaggaaaacatcacaaggaagggatagtgctcttggaatatctgaagaggctagagcctcacaatttgaaggtacatatacttgtagactgttacatccctatgaagacagcagaggatttgatgaaacctgtgctggtggttggcaatgtgaggctgacaaagggaagctgttgcaggaactcacgagtactgctggcgaggatgtcgtctttgccatgaatgcgttcataaagcgcctgttggcggtctctgactcagagcagatgaaggtgagggtgagggaatggtatgcatggcagtgcttttgtttgatttgaacttgaacttgtgtgtgtgtgtgtgtgcagacagcagtctcggaaacaagtgc

SEQ ID NO: 266147 - DNA, 1857 bp, Zea mays
cggactcaacgaagcggtgacgaagaacaagttaacccaacctgtaagcgagtaagcgaccttcttgagcgtgaagccaaaggtttcaccgatccgccaccacgccacgaaatcatctcctactccagcagttccgctcctcgccgccgccgccgccaccgccaccgccacgatgccggaagacgtgcagatgaacgactcggagccccagtctgcggccccagctcccgccgccgccgcggcgccggcgctctccacactacaccatctgaaggagatcgcgtccgtgatcgaggctggttctctgtccaaggaggtccgccggatctcccgcgccttccgcctcaccgtcgcgctccgccgccgccttgccgcacgggacgtctccgccttcctcgccttcgcgctacccgcgtcctccgaagcctacgggcgcctcatcgccctggtgcccaaggaagatgatactgagatggacgttgatgctgcggctccagcaactcagatttcaatcaaacatggtctccctgagattgaaatatattgctacttgcttgcactgatttttcttattgatcagaagaaatacgatgaggctaaagtatgtgcaagtgtgagcattgctcgcctgaagaatctaaaccggagaactgttgatgtcttggcatctcgtctgtacttttattactcttatgtgtatgagcttaccaacagccttgctgaaatccgcgggaatctgcttgctctacacagaatggcaactttgcatcgtgacgagctcggccaggaaactctgctgaatcttctcctccgcaattacctccactacaacttgtatgatcaggcagaaaagcttagatcaaaggcacctcgttttgaagcacattccaaccaacaattctgccgatacttgttctacttgggcaaaattaggacaattcagttggagtacactgatgctaaagaaagcctcctgcaagctgctcgtaaggcaccaacaactgcccgtggttttcggatccagtgcaacaaatgggctatcatagtgaggctgctgcttggagagattcctgagaggactgttttcatgcagaaaggaatgaagaaagctctgataccttattttgagctcacaaatgctgtcagggttggggaccttgaactgttcagggctgttgcagacaaatttgcaagcacattcagcgcagacaggactcgtaatttgattgtgaggctgcgccataatgtcattcgaactggactgcgcaacatcagcatttcttactcaaggatctcccttgctgacattgctaagaagctaagactagactctgagaaccctgttgctgatgcggagagcattgtagccaaggccataagagatggcgcaattgacgccaccatagatcatgcaaatggctggatggtatcgaaggaaactggtgatgtctactctacaaatgagccacaaattgcattcaactccaggattgcgttctgcctcaacatgcacaatgaggcggtcaaggcgatgagattcccccctaattctcataaggaaaaggagagcgccgagaagcgccgagagaggcttcaacaggaggaagaactggctaagcacatggctgaggaggaggatgacgacttctaaattagctgccttttgagcaaccacttgcaattgtggacttgttggaacgcctggttaaaccctgcctctagctactcgagtcatgcaaacactgtaatgttatgttgatcagggtttttctttaaattcaatacttgagttttaatctccttgaattgttaaaccacggaatttacccaccatgcaaatggctttcttttatttct

SEQ ID NO: 266148 - DNA, 499 bp, Zea mays
ggagaaccaaggtaatcgaacccgtgtagcgaccttcttgagcccgaagcaaaaggcactgctcatcgatccgccaccacgccacaaaatcctctcctactccggcagttctgctcgccgccgcctccacgatgacggaagacgtgcagatgaacgactcggagccccagcctgcggcctcagctcccgccgtcggggcgccggcgctctccacactacaccatctgaaggagatcgcgtccgtgatcgaggccggttctctgtccaaggaggtccgccggatctcccgcgccttccgcctcaccgtcgcgctccgtcgccgcctcgccgcgcgggacgtctccgccttcctcgccttcgcgctacccgcgtcctccgaagcctacggacgcctcactgccctggggcccaagggagatgatactgagatggatgttgatgctgcagctccagcaactcagatttcaatcaaacatggtcctcctgagattgaaatata

SEQ ID NO: 266149 - DNA, 696 bp, Zea mays
gtggaattgtgaggtctgtccatgctgcctgctagaaatgggaaaatatgttagcagtagcaacaagtgtttttggcctttgatcttctggaggtcatgtggttgcagttctaccgatacttgttctacttgggcaaaattaggacaattcagttggagtacactgatgctaaagaaagcctcctgcaagttgctcgtaaggcaccaacaacagcccatggttttcggatccagtgcaacaaatgggttatcatagagaggctgctgcttggttggaacagaacaagacattgtgattttctttgactgttttgtaaggaatcagtgaaggaggctgaattgtggaatactattgtgatgaacatagtgaagcaggctgagttgttgcgtgcttctggttctggtctcagggagttacttggaaggggtttgtctctccgactctgctactgctttttaggcactgcttttttttgaagcacacattgttgtagctgaaacctccataatttcttcaccggttttatttaatctcttgttgcaattataggtgtacccaaaaactaatttttcatttgcttgtattactaaacttaatttcacaatcagccttgtagcactttgagattctgttgtttatttcttgtattagatattcttctgagtactggaataaagtcaatttatcctttttcc

SEQ ID NO: 266150 - DNA, 555 bp, Zea mays
  unsure (1)..(555): unsure at all n locations
gcattgtagccaaggccataagagatggcgccattgacgccaccatagatcatgcaaatggctggatggtatccaaggaaactggtgatgtctactcaacaaatgagccacaaattgcattcaactccaggattgcgttctgcctcaacatgcacaatgaggcggtcaaggcgatgagattcccccctaattctcacaaggaaaaggagagtgctgagaagcgccgagagaggcttcagcaggaggaagaactggctaagcacatggctgaggatgatgacgacgacttctaagttagctgccttttgagcaactacttgcaatgtggagtttgttcgatttgtgaacgcctggttcaaagcaattcccctacctctagttactccagtcatgcaaacactgaagttcatccactgtaatgttgtgtcgatcaggattttgtattaattctatacttgagttttagtccccctgaattgttgaaccagggaatttactcaccattaaacggctttgtttccttctttaatcccagttcggcctcgttttntattt

SEQ ID NO: 266151 - DNA, 318 bp, Zea mays
ggcgatgagattcccccctaattctcataaggaaaaggagagcgctgagaagcgccgggagaggcttcaacaggaggaagaactggctaagcacatggctgaggaggaggatgacgacttctaaattagctgccttttgagcaaccacttgcaattgtggacttgttcgaacgcctggttaaaccctgcctctagctactcgagtcatgcaaaaacactgaactttgaaattcatccactgtaatgttttgttgatcaggggtttctttaaattcaatacttgagttttaaaaaaaaatacaaccaacaagctaagac

SEQ ID NO: 266152 - DNA, 467 bp, Zea mays
cttaaaagccaacccacccgtccgcgactcacgagcacagcaaggctcgctcgctcgcacacaccaagcaagcaggccgcaggcgtctcacaggctctccgccgtcccccaacgcgctttccccggcgccatggccaggctggcgctggtgctcctcctgctgctggccgtggcggcgtccgcgtgggccggcgccggcgcgagccacctcgatctgggcttgggcttcctctcctccggggaccgccggcgggagtgccgcggcacggtggccgagtgcctggacgagtcagagggcctggacctgggggcggggcccgcgtccgtggagtcccaccgccgcgcgctctacggcggcggcggcgggtacatcagctacggcgcgctgcggcgggacaacgtgccctgctcccgccgcggcgccagctactacaactggccgccccgggggccaggccaacccctac

SEQ ID NO: 266153 - DNA, 667 bp, Zea mays
cgtccgcccacgcgtccgcagactcatggcgaaggttattgcgggtggatgcgaagccattggtgtggtgcatatggtggcaccaagcatgaggcaggaactgcattacttgcaagaaagtcacaaaatccattgcaagatcatacttgtggctttcttgcaagttgcgcagttgttgcctcaagcttgctgcctccctttgccagagctatcggtaaaacaggaagtactgtcagtttccgagctacaaacaagctataagtttagaaaaataatttagaaatgtacatcaaagtctagtaatacattgttaaagataaatcaatactcaataagttcctcatgctttggatttggggataacatacctgttttatttacatgctaatatttggaccaacaaaaaataccttaggaacagccatttgagaaaaaaacaaagccttttagtcctaagcaagttagcatagcttagagttgcaacttctacatgagcacaataaacagaaaagaaagagaaaaggaaaatatatatatatggcaccaaaagctattaccatgttataatataaatttaatgaccgaaattataaacattcttacaatcttagcagacctctcaacgtgtagtctgaatcgacagaacatcagtagagtaatttttgtt

SEQ ID NO: 266154 - DNA, 440 bp, Zea mays
caagcttgctgcctccctttgccagagctatcgttaaaacaggaagtactgtcagtttccgagctacaatcaagctataagtttagaaaaataatttagaaatgtacaacaaagtctagtaatacattgctaaagataaatcaatactctacaaacaagctataagtttagaaaaataatttagaaatgtacaaccaaggccttttaatacattgctaaagataaatcaatactcaataagttccttatgctttggattttgggataacatacctgttttatttacatgctatttggaccaacaaaaaataccttaggaacagccatttgagaaaaaaaacaaagccttttagtcctaagcaaaaaaaacttttagtcctaagcaagttagcatagcctagagttgcaacttctacatgagcacaataaacagacaagat

SEQ ID NO: 266155 - DNA, 874 bp, Zea mays
aagtgaggctgcactagagaagcaaaatgaacagctacttatcttacaggctgggcttgacaacttgaaggatgaaaatgaaactctccaagggtcacttgctgatcttaattcaaaactttctgagaaagattccttgttgcatcaggcagaagatgagcttgctaaagcacaattggtactctcagaagcactgtcacaaaaaggagagttggagctgaatctgaactctctcaatgagcagcatggtgaatccaaagcttttggagaaaatgcaagtcagaagattattgagcttgaagcacaaatacaggcaatgcgtgcagctgaagaggcactcaacctacagctaacagaagctgaggcaagcgtcaaagctgctgagaagaaaggctcagacctcgagcaacagctcagtgagattgagaacaaattagttgcatcaagtgaagaaatagagttgctgaaagagcgtattcaacaagaagctgctgtatcagcagaaagaggaatgcagcttgaagaaacaatgaccagtgcagagggatacaaagataaaattatcgagctacaatcctccctagattcctcggtgtctaaaaaccagctacttgaacaagaagtcaaggagctgactgataaatgttcagagcatcaagaacaagcgcattcagttcggcaagcaagctcattcagttcggcaaagaagtctggagctggaagatttgcttcacacatcaaagactcatgctgaaggtgtatactcacggacacaggagctggagcaggagctgaatcacacatatgaaaagttcaagcgggttgaagaagaactcgagcagtacagaagcaaggcttcacagctctctgataa

SEQ ID NO: 266156 - DNA, 380 bp, Zea mays
tcccggtcgactccacgcgtccgcccacgcgtccgatcatgtgattcatcttttggcactgcggcttatatgctcgcatcggtctacaaccatgacgtgcgttctcgaatgctcacaccgcttagccgcaaaacgcggtcgcgatattgaaggctctccgctacattgtaaaaggcaaggaactctgcatctggtacacatactctagcatagatgccgaacgcagaacctactattgatgatgatcgatacgacttgcactgctactatctccaatgtttggccagagactactctcggtgcctacgagaaagacgagcatgactttggattctattgaagcttattgaagccgttggtgcagcttatcatgatgaact

SEQ ID NO: 266157 - DNA, 413 bp, Zea mays
tcctctttttgattatcctgatgaatcttccgaggacgaggatgatggtaggaacgacgaggatccttttggagacaaagaaggttctgactcagattacgagaaggaagaagtagaggtggaagaggatgagtaacggtgaagggaagttgtgatgaaacgtgcggttgtggaatgtagatgcagggcagcaggggagctgactgatgaatgtttgtgttgctttatgctgtctaagaaacgggacttgtctcgacgctttgtgccagttagcatagcacatcgtgtgcagtatccggaggaagaattgggaaaaaacaatatttggaagcgtcagctagacacaggcgaatcgtaataattggtattttgccacttgaaatgttgcatacttctgtaattaccgtttgtgt

SEQ ID NO: 266158 - DNA, 1046 bp, Zea mays
cccacttttccgcccacgcgtccgcccacgcgtccgcccacgcgtccgcccacgcgtccggccgaaatgatgcgcaactaagagatgctagtaaagctaaccagacatccgcttgtgaacctgagaagaccacagctaatgggcaaccaattgttccttgcggccttattgcttggagcttgtttaatgatacatataatttcactcgtggtaatgagaacttgacagtggacaagaaagatatctcctggaagagtgatagggagcataaatttggtaaagatgtctatccgagcaacttccagaatggtgcacttaaaggtggagcaacacttaacccaaagatcccgttgagtgagcaagaggacctcattgtttggatgcggaccgcagcacttccgacgttcagaaagttatatgggagaatatacattgacctcaaggagaatgacacaataacagtgacattgaataacaactacaatacatatagcttcggtggcaagaaaaagctggtcctctccactgcaacctggcttggggggaagaacgattttcttggctttgcataccttatagttggtgggctctgcattttcctggcatttgcattcaccttgctgtacttcgtaaaaccaaggaaactgggagaccacaactacttatcctggaacagacgctaggatgtttcggaacaccaagtgtccgtactactcgaaatgtagcttgtatgaaatgaaatgctctgaaccagaaatgtcgatgggcataagcaagcatggttcaggaaagaacttcatgtatattttttacgaaggggtctaggtggctacgttatttttgtttcttgtgttctttagtgtagcactgaacaggagaataccaattgatctctattagcttgcttcgtggtacaagcactctaaatggttgactgtgtggtgttgacgctttggctgccgaagaataccaattaatgatgttggttgactgtaatatcctcaagtgggaacagtaccaacttctgtatacattgattaccgtgt

SEQ ID NO: 266159 - DNA, 510 bp, Zea mays
tcttactccaaaatgggttgtctctgttttcttaatcgttggggtcatctttgttcctattggtgttgtttcactgctagctgcaagagatgttgctgagattattgatcggtatgatgaggcatgtgtgccaggcaacatgactgagaacaagcttgcttacatccagaatgagaccttatccaaagagtgcataaggaatcttacggttacaaaggatatgaagcagcctatttttgtgtattatgaacttggtaacttctaccagaaccataggaggtatgtaaagagccgaaacgatgcgcagctaagagatgctagtaaagctaaccagacatccgcttgtgaacctgagaagaccacagctaatgggcaaccaattgttccttgcggcctcattgcttggagcttgtttaatgatacatataatttcactcgtggtaatgagaacttgacagtggacaagaaagacatttcctggaagagccatagggaacataaatttggtaa

SEQ ID NO: 266160 - DNA, 530 bp, Zea mays
  unsure (1)..(530): unsure at all n locations
aanaaagctggtcctctccactgcaacttggcttggggggaagaacgattttcttggctttgcataccttatagttggcgggctctgcattttcctggcatttgcattcaccttgctgtacttcgtaaaaccaaggaaactgggagaccacaactacttatcctggaacagacgccatgcaggacgctaagatgttttggaaccccaagtgtcctaactacttaagtgcaacttgtatgaaatgaaatgccctgaaccagaaatctcgttgggcacagactggatcagactagaacttcatgtacatttttttacaaagggtctaggtggctacgtgattttgtttcttttgttctatagagctgcatgtagcagtgatcatgagaatacatattgatgtctaatggcttgcttcgtggtacgtgcactctgagggcctgttcggtccagtggatttgagcattcggaacgactcctagctggattgtttgtctaatttatataaggtttgatcggttggaacgatttct

SEQ ID NO: 266161 - DNA, 658 bp, Zea mays
ccccgaggaattccgatctcatttcctttggcttcaggataggcctaataagaaaacaaataattccaattcatatatgaacatttttgcctccttatttcttgaaaatgtggaattggaattcctttcctttggcttcaggataggcctaataagaaaacaaataattccaattcatatatgaacatttttgcctccttatttcttgaaaatgtggaattggaatcccccgaggaattccgatctcatttcctttggcttcaggataggcctaataagaaaacaaataattccaattcatatatgaacatttttgcctccttatttcttgaaaatgtggaattggaattccccgaggaattccgatctcatttcctttggcttcaggataggcctaataagaaaacaaataattccaattcatatatgaacatttttgcctccttatttcttgaaaatgtggaattggaattccccgaggaattccgatctcatttcctttggcttcaggataggcctaataagaaaacaaataattccaattcatatatgaacatttttgcctccttatttcttgaaaatgtggaattggaattccccgaggggatcttctagagtaggcgtgcaggcatgagtcgactgcaggcatgcagcagtc

SEQ ID NO: 266162 - DNA, 941 bp, Zea mays
cggacgcgtgggcgctcgccaacgtgttgagtaaggaagcagccaacgtgcagactaaggaagcactgaccggccggtcatggcgaggatccacctctacgtcgtcgccgcggcctgcgccgtcgccctcgcgctcgccggcgacccggacatgctccaggacgtctgcgtggctgactacgcttccccggtcaagctgaacgggttcccgtgcaaggcgaacgtctcggcggacgacttcttcttcgacgggctgaggagcccgggcaacaccaacaacccggcgggctccgcggtgacggcggccaacgtggacaagttcccgggggtgaacacgctgggcgtctccatggcgcgcatcgactacgcgccgggcggccagaacccgccgcacacgcacccgcgcgccaccgagatcatcttcgtcctcgagggcacgctcgaggtcggcttcctcaccaccgccaacaggctcctcaccaagaccgtcaccacgggggacgtcttcgtcttcccccgcggcctcgtccacttccagcagaacagggggcacggccccgccgccgtcgtcgccgccttcaacagccagctccagggcacgcaggccatcgccatgacgctcttcggggccacgccgcccgtgcccaccgacatcctcgccaaggcattccgggtcggcagcggggaggtcgagcacatcaaggcaaacttcgcacccaagtagacgacgaccaggcagcgtgtctgcatttgttggtttctcaataaatatcccgcggcaacgattatattgctcggtcgatgtatcgtgtcgcagcgtgcagttttcgatttgttgttcttcgttttgagacgacattgctgaccacgctagttcttgttgctgctaatttgtgtggagccactgcttgtcctccaataaataccatgatcagcccttt

SEQ ID NO: 266163 - DNA, 625 bp, Zea mays
tcctgctacccccgtcgtcgccgccgctttccccgtggtttcagagctccagtcggctagctaggccgcctggctaatctccctgccttctataagtacaggttcattgtgtgctgtgctcccagctccatcactgacacaagagagcacgctactactcatcactcgccaacgtgcagagatcagggaagcggcactccatccactgactgaccgctcatggcgaaggtccacctctacgtcgccgcggcctgcgccgtcgtcctcgcgctcgccaccccggccctcgccggtgaccccgacatgctgcaggacgtctgcccggctgactacgcctccccggtgaagctgaacgggttcgcgtgcaaggcgaacttttcggcggacgacttcttcttcgacgggctgaggaacccgggcaacaccaacaacccggcgggctccgtggtgacggcggccaacgtggagaagttcccgggcgtgaacacgctgggcgtctccatggcgcgcatcgactacgcgccgggcggccagaacccgtcgtacacgcacccgcgcgccaccgagatcatcttcgtcctcgagggcacgctcgaggtcggcttcatcaccaccgccaacgcgc

SEQ ID NO: 266164 - DNA, 523 bp, Zea mays
ccttcggccactgccattgctggcccttgcccatagattttttcaaacccctgacgctgcctccccacaccttcttcttctccccaaattcgcccggcccgtcgtcgggagcaagcaatgtgccccagagccacggaccagctctgcggcgccgcaatggctagcgtgtgttccttggtggaggaggagtacatcgacctggatctcagttcgtgcggtgagctagagttccgggtgcgccggagcggcgcgtcggacgagctcctctgccggggtaggctgcagccgccggcgccaccgaggcctggcggcaaggcgcaggaagctgacggcggcggcggcggcagtggctgtggtggcgccggcaggaggagcgccgcgacggtggcgccgctgcagcactcgcactccgcggggttccgcgacgacacgcagcccgtggcgaggctgcgcaccgagtgctcccgccgcatgaaggcggcgcggaccgtgcacgcgaagctgctggcgtcgcgggcctttt

SEQ ID NO: 266165 - DNA, 813 bp, Zea mays
gctgcagtggcctatcgaggaggtggaggcgctgagagaaaagtcggtcactctcaagaacaggttaatcaaggcaggacatcacgtcgaggtgaccgggatacaaacggcacaggctgacgtggaggtgagcttcgaggtgtcgccggcggccctggccggtgccgagacgctggacccggcgctggcctacgacgcggagaagctgtgcggcgtgaagcgcgcggacgtgaggggcggcgtggggccgttcgggctgtgggtgctggcctccgccaaccgcaaggagagaaccgccgtgttcttcagggtgttcaagcccgccgccggcagcgacaagcccgtggtgctcatgtgcaccgaccctaccaagtcgtccctgaacccgaacctgtaccgcccgacatttgcaggatttgtcgacacggacatctcgaacggcaagatatccctgagaagcctgatcgaccggtcggtcgttgagagcttcggagccgggggcaagacctgcatcctctccagggtctacccgtcgctggccatcggcaaggacgctcgcctctacgtgttcaacaacgggagggcgcacgtcaaggtgtcccgtctcaccgcgtgggagatgaagaagccggtcatgaacggggcctgaagatcttgaataaatatatcacccatgcatgacatagtggcgcctgaggaatctttcctttttttaaaaaacatattttagatgtcgtttattaagagttgattggccatactaaagggcgccccgttatatgttacaatggtaccagctgcacttctagtaac

SEQ ID NO: 266166 - DNA, 413 bp, Zea mays
cgacacagacatttctaacgggaagatatctctcagaaccctgatcgaccggtcgttggtggagagctttggagccgggggcaggacctgcatcctgtctagggtgtacccgtcgttcgccatcggcagcaaggctcgcctctacgtgttcaacaacgggagggcggacgtaagggtgtcccgtctcaccgcgtgggagatgaagaagccactcatgaacggcgcttgaaatatttttattgcggatatggaatggtgctcgcctttgtacaatatggtatggctagatacatatatatgagagcttccacgctcggtcgtcgtgtggaaaaaacctatgatgagtgtgtacgatcttagggatgttcgattcagatgccactacacgggcaataactattccaattcatggt

SEQ ID NO: 266167 - DNA, 581 bp, Zea mays
cgttgttggagaatggggatggggtcgtccctccttcgggccgtcttcctcctgctggcctgttgttgctccttcgccagcggggcgtgaacaactacaacaccagcgatgccgccgccagcagctgcagtggggcaacgccagggccacatggtacggccagcccaacggtgccgggccctacgacaacggcggcgcttgcgggttcaagaacgtcaaccagtacccgttcatggccatgacctcctgcggcaaccagccgctctaccgcgacggcaagggatgcggctcctgctacaagatcaggtgctccaagcacgccgcctgctccggccgcaccgagaccgtcgtcatcaccgacatgaactacaccccgggcgtcgcgccctaccacttcgacctcagcggcaccgccttcggcaggctggccaagcccggccgcaacgacgacctgcgccgcgccggcatcatcgacatccagttcgccagggtaccctgcgagttcccaggcctcaaggtcggcttccacgtcgaggaaggctccacccaggtctacttcgccgtgctggtcgagtacgaga

SEQ ID NO: 266168 - DNA, 390 bp, Zea mays
  unsure (1)..(390): unsure at all n locations
gccggcgaggtggcttacatctcgctcctgggccgatctcactgagcccccgccgttcttctctccacttcctgcgttctccagccgccgtcttcgctgataggctacgccgcccgctggcctgcgcgcgccgcagccttaccctgtgtgcaccctgttcctaaccctgcgtgtggccgccgccgactggcttgcgtgcgcccgcgcctccgcctaaccctgctagcttgcgcgcccaacgccagatgccctgagcccaccgccggctgtctgtgcacgcatgtgaacccatccggctacctgggcacgccatccgacctccctgcgaacctctgtatctgccgatattcctcaagaacacagtgcanacagtaagttctggagacagca

SEQ ID NO: 266169 - DNA, 1622 bp, Zea mays
  unsure (1)..(1622): unsure at all n locations
aaagattgtattaccataatttcaaatagctgtccccaccccctccttgaaatattgatgtgtactttatatttctttttatttgacctcagttattattttataggttgttcaaaaaattggtgccttatgtgtgaacttgagcaatatgcttcaactttacgtgaaagtggtggacccttatctccaagtagaatcctttctaatctgaggaatattggatgtcgcttgggtggtggaactcaggaagatgcccatgagtttctaaggcatcttgtgatgtctatgcaagcagcttgcttggatgggctgggtggtgagaagcacgttgaaccaagtttgcaggaaacaacactgatacaacagatgtttggtggccgtcttaaatccaaggttaagtgcctcagatgctatcacgagtctgaaagatatgagaatataatggatcttactttggagattcatggctgggtagagtccttgcaagatgctttgacacagttcactgctcctgaagatttagatggtgataatatgtataaatgtggaaggtgttctgcctatgttaaagctcggaagcaactgttcgtgcatgacgtgccaaacattttaacagtcgctcttaaaagatttcagtcacgaaaatatggcaagatcaacaaatgtgttactttccctgatatgttggacatggttcccttcgtgactgggtctggtgacaatccccctctttatttcttgtacgccgtggttgtacatgtcgatacagaaaatgcatcattctctgggcactatatatcatacgtcaaagatatgcagggtacatggttgagaattgatgattcagaggtccaggttgtatcagtgaatcaagttatgtcagaaggtgcatatatgcttttctacatgaggtctttcccccgaccaccaagaatatacatcgagaaggggccgactgttccatccgcgaagcgccacacatcaaagtattccaagggctctaaacacgagcgcgagcagacagagttactcctctcggcgaacgatccagcatacggtgtttatgactttagacccgatggcgagggctacacgcaagatcagcaagcagagttgagatccagggatttccatcgcgccgacgatgccttcgcagactcggttagcgcggacttctcggaggccacgtcaagcgaatggtcgctgtttaccagctccgacgagtcctcattcaccaccgagagcacaagggactcgttcagcgttgtggactacggcgacaacgctggcctggacccaatctcctcgatatttgggccaagctatgctccggagcatcatcccggtccacctggcagtttcgccgcgtgcacgaggctctcctcgccttccaacccacagacaaggtacttctcggagagcacaggcttcgtctcggactactcttccagcggcattgtacatagaggaagggatccaggtagggcatacacctgttcagcggaaccgctcgcttcggctgcggcggcgcaccagcaccagcggtgaggcgtattaaatnttggctgcatgtcattcctaggctagctcgattcaatgtancgagagagagaggaacaaat

SEQ ID NO: 266170 - DNA, 580 bp, Zea mays
cagacgcgtggcggacgcgtggggggattcgttcagcgtcgtggactacggagacaacgccggcctgactccgatttccaccatattcgggccaagctatgctccggagcacggtgctcccggcagtttcgtctcgcgcacaaggttctcaccttccagtccacagacaaggtacttctcggagagcacaggctttgtctcggactcttccatgccggcccacccccacggcattgtacatagaggaaggtatccggatagtagggcgtgcgcctcttctgcggaaccgcttgcgtcggcggcgcatcagcggagcgggtatggccggtacccccttagtccagatggttttgttcaaacatctggtttttgccaaatgtaatcggctcacatttcattagctgtagctggtgcatcggcagttgcggttcttagcactgccgttaatgctgcctcatgttcttttatttcagatgaggcttattgaatttttagctacatgtcgtttctaggggtagctcgattcgatgtagcgaaaaaaagttagattatgtctatatgcaggtgaaattttagagcc

SEQ ID NO: 266171 - DNA, 265 bp, Zea mays
tgccgcgtgcacgaggctctcctcgccttccaacccacagaccaggtacttctcggagagcacaggcttcgtctcggactactcttccagcggcattgtacatagaggaagggatccaggtagggcatactcctgttcagcggaaccgctcggttcggcggctgcggcgcaccagcaccagcggtacgcacttagcggccgagacggtttggtccagacatctgggttctgccaaatgtaaccggctttacgatttcgtagctat

SEQ ID NO: 266172 - DNA, 460 bp, Zea mays
gacaaggggagattcgtggggggcgttttgttaacccattcctcgaaggtctggttagaatagtctcccggatcacatttgtcttggatgatgatccggatatcattgctgttgctcgtgattacaatcttgcttcactcttcactgatctgcttcagatgaatgggcttgacgtagtccagattgtctctgctgtttcactagagaaactctcgcagcagtcaaaacatcttacgaagatactgcctgctcccagcccagggctgtgcttttcaatatttccatgcctcagccagaagactgtagcaactggggtctgtagagttcactgtgggatttgttcctcaagggagagcttctgtctcttgcatggcaaggcagtggagaagctagttgcctgcttggataataataacgagaaagtagtcgaagctgctctagcagcgctgtccactttact

SEQ ID NO: 266173 - DNA, 1030 bp, Zea mays
ctgacctctgaccgtaattaccaaccactgccagcgacctctcctcggaggcgtgaccgtaattgctccgcaactaccccgataccattcccaaatcctccgtcgacccctctacaccggcgatcggcggcgaacgatggggtgggcgacgcggttcctggcggcggtgtgcttctttgctgcgggcgtcctcttcgtcccagaggctatcggttccccatccggcgcaggagccgtcaccgccgccaagctggcccacgtcctctcctttgccacctcctggggcgccgccctctgggccaccttcatcggcggcatcataatgttcaagaacctgccgaggcacatgttcggcaacttgcagagcaagatgttcccggcctacttcacgcttatctctgcctgcgcagccatctcggtcgccgccttctcgcaccttcacccgtggaagacggcgtccaccgtggagcgctaccagcttggattcctcctatcagcgctcggttgcaatctctccaacctgctagtcttcacccccatgacaattgagatgatgaagaagaggcacaagattgagcgggacctgagtatcggtgaggaagtgggatggtcaaagaatcagcaggtggctaaatccaaccccacccttgctgcaatgaacaagaagtttgggatgatccacgggctgtcatcactggccaacatcatgtcgtttggcagcttggccatgcactcctggtacctggccagcaagctagagctgtgaagaaggggagacaagacgacacctttctccgccttgttgtgaatcttgtcagttgtcacgatggtgttgcttgctgctctcaaaccagtttcaaaattggaataactagaaaatggccagacacatacagacagggttttgtaaaatcacactatctccgatctcgaatattttgcaaaaccgcttgtcctcgtgcaaaaaaaaaaaaaaaaaaaaaaaaaaaaaaaaaaaaaaaagggcgggccgctcgcgatctagaactag

SEQ ID NO: 266174 - DNA, 586 bp, Zea mays
cggacgcgtgggtacacaacagctatgctttattttctactaccaaccaaagttctaattggaagtctgaaactaatttgagactaactagaacatgccctcttctcctacatcttttttcacgcaatttcacttgacgtggttgatcgctgctcgcagtccgtgaagaagaggcacaagatcgagcgggacctgagtatcggcgaggaagtcggatggtcaaagaaccagcaggtggctaaatccaaccccacccttgctgcaatgaacaagaagtttgggatgatccacgggctgtcatcactggccaacatcatgtcgtttggtagcttggccatgcactcctggtacctggccagcaagctggagctgtgaagaggagccaagacgtcttccatctccgcgttcttgtgaattttatcactatggtggtaatggtgcacgtcaggttgtcagatcgctagactaaactgtacgattgcgctattggcttcccaacataataaattgtactcctagttaaaaaagaaatcctgtgttgcatggagctcccaaactagttattcaaaatcagaataattcagcc

SEQ ID NO: 266175 - DNA, 316 bp, Zea mays
gaaccatcctcgaatccaacgtcctctcctctccgtacttcctccgcagctacccccatcacattcccaaaccctccgtcgacccctcctcctcgatctacaccggcgatcggcggcgagcgatggggtgggcgacgcggttcctggcggcggtgtgcttctttgctgcgggtgtcctcttcgtccccgaggctctccttggttccccctccggcgcaggcgccgtcaccgccgccaagctggcccacgtcctctcctttgccacttcctggggcgccgccctctgggccacatttatcggcggcatcatcatgtt

SEQ ID NO: 266176 - DNA, 722 bp, Zea mays
ggcaacgccgcgccgggcaacctgctcaccggcttcggcttctacgagccgtactggctcatcgacttcgctctacgcctgcatcgtgctccacctgcttgggggctaccagatgttcagccagcagatcttcaccttcgcggaccggtccttggcggccaggttcccgaacagcgcgttcgtgaacaaatcctacgccgtgaaggtgcccggcgcgccggcgtcgtggagctacagcctcaacctgcagcggctgtgtttccggacggcgtacgtggcgagcaccacggggctggccctcctcttcccctacttcaacgaggtgctgggcgtgctgggcgccgtcgtcttctggcccctcgccatctacctccccgtcgagatgtactgcgtccagcgcggggtcctgccgtggacgcggacgtgggtcgcgcttcaggcattcagcgtcgtctgcttcgtcgtcggcaccttcgccttcgtcggctccgtcgagggagtcatccgcaagaggctcggctagttgtggtattagcgccttttctgtcgtcaaccatgtcatgaatggtggaagtgtgtaaagagagtgtactgtatctaagttttttttatttccctgtgttcgcttagccatgagcccatgaccatgatgattgatgaatatatccacccgtgcgtgtttaggtcccaaaaaaaaaaaaaaaaaaaaaaaaaaaaaggaa

SEQ ID NO: 266177 - DNA, 1449 bp, Zea mays
tcgttcaatttctgtttgctagactgcagatgcaagtgcaataactgtcaaccaatcagcgcctagcttgaagcctggcgttacccctgtggtagagtattttcctggtacgtggaaatcatcaaaccacctcatttgttgtgtcccgcaacgcacgtacccagacctgtggacaggacgcctcggaccagccagcggtcatggccatgcacctgccagcctcatagtaatcaccttgaagcttgacatactatgctactcatcaatagactttccagtggcggctgctgtatctgaacttgttattccaggattagcagatcagatgattgtaatgaagagaattattgctttagagataacttaacaagcacagcttcaaccattccagtttattccttctggttggcatgttccagtaacagctatatataatacaagatatggtgagactgaggagaggcaaagtgagctgcgaaaagaactgcatttaaggctaggacttcccttagatcggcctttgttgcgaatttctaatgcattgactttcggtggcatgggaaggaggaagaaaagcatgccaagaagtggttcttcgctgcttcgagacatccacagagaacttccatctagtggtgtatccggaggtgttatgtctttgattgatggttcatatgagtattatcattatcttcacgatggtattgatgacaatggatggggatgcgcatatcggtctctacaaacaattgtctcttggtacagattgcaacaatattcatcaatagatgttccttctcacagggagattcagcaagttcttgttgaaattggtgacaaggatccatcatttattggatcttgtgagtggatcggagccattgagttaagctttgtcctcgacaaactactgggcgtgagttgtaaggttatcaatgtgaggtctggcgatgagcttcctgaaaagtgcagagaacttgccaggcattttgaaacccagggaactcctgtgatgattggtggtggagtcttggcttacacccttttgggagttgattataacgaagccagtggagactgtgcatttcttatccttgatccgcactacactggtactgacgatctcaaaaagattgtaaatggcggatggtgcggatggaagaagtctgtcgacagcaaaggccgaagcttcttcttgaaagacaagttctacaaccttctactaccccaaaggccaaacatggtgtgaaacctatgttgttcaatatgttaatagtgcagacgtgcaggttcacgaggcacagatatttatgcttgtgatagaggtttatggttgcgatagcagaagttatgatttgtaaaaaaaatttagtgagacattatattgtttttttaataaatttgtagtgagtaaattaaattaaattaacgaatgagaggggcgcccgc

SEQ ID NO: 266178 - DNA, 968 bp, Zea mays
  unsure (1)..(968): unsure at all n locations
aataagaaaccgnggtccgagacgcacggctggaggactgttgggaagtggctgacactcactgcagctcgttctttcctggttacaagttcccgatggaccttgatctccggattgatcgttacattgctctcctctctggattttcagttccacccgggtgcatgaggacttgccttgtggccgtcaattctaattctgtaaatagtagtttcaacatcgagtgtggagatgctactgatgccaactttgagaaatacaatctcagtagaggctccgtagctggcattcttacacttgatacagtggcagactatcttccgagaaggggacccctgaagcagagaaggacaggtattgcgtatatagcaaacgtcgcggtgcggaaggaggagcgacggaaagggatcgcgaagatgttggtccaagaagcagaggctcgggcaaggagctggggatgccggtcgatggcactgcactgcgacgtaaacaacgtggccgcgctacgcctgtacagaaaccaaggcttcaagtgcatacgagtgccggaaggagctaaatggcccgaacccaagatagctaaaggagcggagtacaacttcatgatgaagctagtgcccaaggcttgagtcttgaaccttataagatctgactagggaaaaaaagggaaaggtttggccgtgtaggttctgcacggatgcacgatttgctctccattcatgtgtacagcatttggtgtatagtggaggctactttgtaaatggtatatataacagctacgtgttggtccatagtgagtgactgagggtgtcggtgtttaaaccatccccagtccttgtgttgttgtgtgttatgttcttcagattctacaaggttccagccagccagaaggctgctggggcgaactgccagttctaaattgtttttttttctggcgaaaaacaaaacaaaaaaaaaaaaggggggcc

SEQ ID NO: 266179 - DNA, 379 bp, Zea mays
cccacgcgtccgcccacgcgtccgcccacgcgtccgctccgccaccaccacagccgttgccggggccgcgagcgaccgtagcgaggtgattgcaatggtggcctccactgcttcccgcctctcgcccccgcgcttcagcaccccttccccgtctcttcatcctccaaaccgccgctcgcgcttctcccctgttcgcgcagcaagttggaagctgtgctgtctattggtgctcatctaatcccacacccaagaaaggctgcaagtggcggagaagatgctttctttgccaatagcgatgctggcggagtatttgccattgcagatggtgtctcgggtcattctcttatctactgacagatgggcagaaaagaatgtcaat

SEQ ID NO: 266180 - DNA, 1643 bp, Zea mays
ggcgcagcagttgttgctgatgcagcaggcactgctcctgcagcagcagcagcagtcgcaggcgcagccgcccttgttccccgggcaccacccgcaccccggcctcctcgccgcaccacagatagagcccatagtcagtggaaacctgcctcctgggtttgattcaagtacatgccgcagcgtgtatgttggcaatatccatcttcaagtgacggacacagtactgcaggaagtcttccaaagcattggtccagtagaagggtgcaagctcatcagaaaagaaaagtcatcctttggtttcattgactactatgaccgcagatatgctgcactagcaattttatctctcaatggcagacaactgtatggtcagccgattaaagtcaattgggcatatacaagtactccgagggaggacacatcaggtcattttaatatttttgttggggatctttgcccggaagtcactgatgctactttgtttgcatttttctctggatactctacttgctcagatgctagggttatgtgggaccagaaaacaggacgatccagagggtttggttttgtttctttcaggaaccagcaggatgctcaaagtgcgataaatgacttgaatgggaagtggcttgggaaccgtcaaattcgttgcaattgggcaacgaaaggtgctaatgctggtgaagagaaacagattctggacactaaggttgacctgtcaaatggttcatcagaatctggaaaagagaatccaaatgaagatggtcctgaaaataaccctcagtttactactgtttatgttggcaatcttcctcacgaggctaccatgaatgatgtgcacctgtttttccattcactgggggctggttcaattgaggaagtccgtgtaactcgtgataaaggctttggctttgtgaggtacagcacccatgaggaggctgcattggcaattcagatgggtaatggccaacttattggcgggaggcagataaagtgttcctggggaagcaagccgactccacaagggacagcatccttgcctctgcctcccccagcactggcaccattctccactggagtgtcggccaccgacttgctggcctaccagcgcctgactctgagcaagatggcctcgaacccagccctaatgggtcagcacgccttgaagcaggtcgctgcattggggattggcggcggagccagccagtccatctatgatggcggcttccagggcatcaatactgtcaccggcacaacttccgcccagcagcagcagcagctcatgtactactagagtactactactccatgaggcacccagctacctatcccttcaagaggaaggcgaggatgaatggatgatgccccttactatacccctatacatatagtagatgatgaagtcattactaggaccttttttccctaatctttttaagacccatctaagtaacatgtcctctctatgctagctatataattgtgtatttctggatacataaagccaaggttcttagtagtataatcttctgtgtttgaccatcttttattgtgatgtatggattttcgttggcaaaaaaaaaaaaaaaaaaaaaaaaaaaaaaaaaaaaaaaaaagggcggccgctcgcgatctagaacaag

SEQ ID NO: 266181 - DNA, 443 bp, Zea mays
ccggttcggaattcccgggtcgaggcacgcgtccgcccacgcgtccgcccacgcgtccggcatttttctctggttactctacttgctcagatggtagtgttatgtggggccagaagaacaggacgatccagaggatttggttttgtttctttcaggaaccagcaggatgctcaaagtgcgatcaatgacttgaatggtgtgttctctagttccatgtttctaacttatgttccattttgaagtcccgagtgtttcaaaaagtgctagcagctagacgtgcctagcaacctaggtggtgctcaggcgttgcttgacatttgtactttctatggacagtatgccatgttgaataaagtatttttggcatgacaaatataatttatatatatctttttgttacctatttgaatacgtatgaaaaatgggcggccgttttagaggat

SEQ ID NO: 266182 - DNA, 677 bp, Zea mays
ggacgcagtactgcaggaagtcttccaaagcattggtccagtagaagggtgcaagctcatcagaaaagaaaagtcatcctttggtttcattgactaccatgatcgcagatatgctgcactagcaattttatctctcaatggcagacaactgtatggtcagccgattaaagtcaattgggcatatacaagtactccgagggagggcacatcaggtcattttaatatttttgttggggatctttgcccggaagtcactgatgctactttgtttgcatttttctctggttactctacttgctcagatgctagtgttatgtgggaccagaaaacaggacgatccagaggatttggttttgtttctttcaggaaccagcagatgcgttaattgatcacgaaatacggagggcacgagatggattaatctcaagtgaagctgatgaatgaacttgaagattggatgatctgatcaagtgccaggatgggacatgctcgacaagcgagtatcatctaacaacactaacttagtgttatcacagatacgttaattgatcacgaaatacggagggcacgagatggattaatctcaagtgaagctgatgaatgaacttgaagattggatgatctgatcaagtgccaggatgggacatgctcgacaagcgagtatcatctaacaacac

SEQ ID NO: 266183 - DNA, 2246 bp, Zea mays
ttctcgcgtccgctctaccttatcgacgctgggggcgcctagtcgcccacgtgggctgctccccgagacaatccccacgccaccgcgcaccggagacgaacctgaggagagaaaaaatctgcgcccgtcagtgtgctcgcctacttctacgctccgctcgttcccccaaatagttcctcggcttcgctcccttcccctccctgctccggctccggttcgcacacagtaagaaaagatggcgctgccatccatgagtcttgtggcaaagggtgtgcttcccttctcagcacgtacctcgagtggtgtcacacaaaggccggtgtcagtgactgcttccttggagcacaaaaccagcgatgccagaaggaagttcctaaaacttgcgcttgggaaccttggagttggactgcccaccttgttgggcgctaagaaagctctcgctgatgagcaaggcgtctcgtcctcgaggatgtcttattcgaggttccttgagtatcttgacaaggatagagtgaagaaggttgatttgtttgagaatgggacaattgctattgtggaggccatttctcctgagcttggtaaccgcgtgcaaagagtccgtgtgcagcttcctggtctaagccaggagcttcttcagaagttgagggagaagaacatcgattttgctgctcacagcaaccaggaggactctggttctcttctgttcaaccttattggaaatttggcattcccgcttatccttatcggtggtctgtttttactttcaagaagggcacagggtggcctcggtggacccaatggtcctggctttccccttggttttggtcaatctagggccaagtttcagatggaacccaacactggtgttacatttgatgatgttgctggtgtcgatgaagcgaacaagacttcatggaagtggttgagttcttgaagaaacccgaaaggttcactgctgttggtgctcgcattcctaagggtgttctgcttgtcggtcctcctgggacgggtaaaactttgcttgccaaggcaattgcaggagaggctggcgtgccatttttctcaatttcaggttctgagtttgtggagatgtttgttggtgttggagcttccagagttcgtgaccttttcaagaaggccaaggagaatgctccttgcatagtgtttgttgatgaaattgatgctgttggaaggcaaagaggtacaggtattggtggtggaaatgatgaaagggagcagactctcaatcaactactaactgagatggatggtttcgagggcaacactggaattattgttattgctgccactaaccgggctgacatattggattccgctttacttagacctgggcgttttgatagacaggtgtctgtcgacgttcctgatgtacgtggaaggacagagattctaaaagtgcatggtagcaacaagaaatttgattctgatgtttctcttgatgtcatagcaatgagaacacctgggttcagcggagcagacttggcaaaccttctgaatgaagcagccattctggctggaagacggggaaggacagcaatttcttcaaaagagattgatgattctattgacagaattgtagctggtatggaagggaccgtgatgacagacgggaagagcaaaagtcttgttgcttaccatgaagttgggcatgcaatttgcggaactttgacgcctggccatgatcctgtccaaaaggttaccttagttccaaggggtcaagctcgtggtcttacatggtttatcccgatggatgacccaacactcatctccaggcagcaactttttgccagaattgttggcggccttggtggtagagctgctgaggaggtcatatttggagagcctgaggtgaccactggagctgctggtgacttgcagcaaattactggcttagccaagcagatggtggtgacattcggtatgtctgaaattggtccatggtctctgatggagggtggagcgcagagtggggacgtcatcatgagaatgatggcaaggaactccatgtcagagaagctcgcggaggacattgattcggccgtgaagcagttgtcggatgaggcctacgagatcgctttgaggcacattagaaacaacagggaggccattgacaaaatcgttgaggtgctcattgagaaggagacagtgaccggagacgagttccgggcgatcctttctgagtttgccgagatccctgttgagaaccgggttcccccagccacacc

SEQ ID NO: 266184 - DNA, 310 bp, Zea mays
cgctgtggccaccgaaccgcccacgtcacccccttccgtcctcccccgagacaatccccacgcaaccgcgcaccggagcggcggaccgtgacgagtctacacaagcggtggggggagcaaaatctgcgccagttcgcctcgcctacttatacactccgatcgcccccgtaagcaaagatggcaccaccatccatgtgtcttgcggcaaagggggtgcttcccttctcggcacttatttcaagtggtgttacacaaaggccagtgtcagtgaccgcttccttggagcacaaaaccagcgatgctagaagga

SEQ ID NO: 266185 - DNA, 294 bp, Zea mays
caagcggtggggcgagcaaaatctgcgccagttcgcctcgcctacttatacaccccgatcgcccccggtagttactcgacctcgctccctttccctcctcccagctccggccccggctccggttctcacgcagtaagcaaagatggcaccaccatccatgtgtcttgcggcaaagggggtgcttcccttctcggcacttatttcgagtggtgttacacaaaggccagtgtcagtgaccgcttccttggagcacaaaaccagcgatgctagaaggaagtttctaaaacttgcgct

SEQ ID NO: 266186 - DNA, 1139 bp, Zea mays
ggcatacagtatccatggtgagaatagatattttgatacaccggcaaatcctgccgctccagatcgagtaccaggaggatgttcaagtggatcagctgttgcagttgctggtggaatggtagattttgccctgggtattgactcgattggaggtgtaaggatacctggtgcttattgtggtgtcttagcattcaggccttcgcatgctgtggtttccaatagtggtgtcattcctgttgcacctagcctggacactataggttggtttgcaaaggatccaagtgttttgcatctcgttgggcatcttcttcttagacttacttatgctggtatttgccaaccgagaattttttacatagcagatgattgctttgaactttcaaagatacctgctaggagacttactcaggtggtgacaaaatctgtggagaagctctttggaagacaagtccggcatgtgaatctcgaaaattatttgagttcaagaatatccagcctgggtaactattcaaatgggcataagaatggggattcaaagttccgtctgttgctagcactttgtaactccatgatatcacttcacaagcaggaattcaaagataagcatatggagtggataaattcagttaagcctgctgtggatgcacgcatagtcagtgatttgtctgaggatggtgattcagatattgatggctgccaaaatgtgaggaaagaagcgcgctctgctctaagtggacttcttaaggatgatgggattctggtgattccaactgctttggggtgccccccgaagcttaacgctaaggaactctcgtctgaaagctacaattctcagacactacgccttttgtctttagctagcatgtcagggtgttgccaggtttccattcctttgggtacacatgataagtgccccatttcagtttcgttgattgctaggcatggtggtgatcggtttttgttggacaccacacaaaccatgtatacaaccatccaagagcaagtggagatactagcgaaatctagtgtttcaagtaaacaggcgatgaatgaagaagcagctgaagctgctaaagagaaaggtaatgctgcatttaaggaaaaacaatggcaaaaagcagtaaatttctacactgaac

SEQ ID NO: 266187 - DNA, 741 bp, Zea mays
cagcccaacgatttccttttgcaaaccctgctccaactccgattcgtcactccaccctcgtcgccaccctcgccgcgccgccgcctgccgcgtccccggccagcctcgcagccccgtggtctgctagcggctagccacagcggagagaccaggagccatggtgatccctccaccagcaagggcagctagagtcacccgtttcctcaagccctacctattgaggatgcatttctcaaacaagtatgtatctgctcaggtcgtccacaccccaacagcaactgttgcatgttctgcaagctcgcaggagaagctgttgagaccaaacatggagtcgacccgcgacgtcgcagcagctgcaaagattggaaagttgctcggcgagcgcctgctcctcaagggaatacctgcagtgtccatccacatgaagagagaacaaaagtaccatgggaaagtgaaggccgttatagattcagtcagagaagctggagtcaaactgttgtgattgcgatgttgaaaacattggacttagcatttgtgcaatggctgagctgtaatttttaagtgtttatcaatgcaaaatggctggacgttgctgttctgaaattctgggccaattgttactcaggtcaataaaggactttgtttggacttgatgcattgtttcctttgtgtattggtgtgcggcatggaccaggaatgttatacatctgaatatatggctgttttcattttttaggcagt

SEQ ID NO: 266188 - DNA, 912 bp, Zea mays
cgcaacaccaccccattctccagcaacgagacaacaaatctcctcctcttcctctccgtatccgcatcagtccatcaccttcaatggcggcggcggcggctgctgccacctccttcaccaccctcgccgtcgcgcgttcggcggggcagcggtccctccttgcctccaaggccgcaccttcgccgctcctctccctccgtggcgcccgcatcccctcgcaggccgtctccttctccgggggccttgcggcgtcgccctctcacagccgcgcgcgcttcgctacatccgccagcgccgagcccaaggaagcagatcttcagtctaaaatcaccaataaggtgtattttgacataagcattgggaaccctgtggggaagaatgttgggaggattgtcatcggcttgtatggggatgatgttccacaaacagcagagaactttcgtgctctttgcactggagagaaagggtttggatacaagggatccagtttccaccgtgtcatcagcgactttatgattcagggcggagattttgacaagggcaatggtaccggtgggaaaagcatatatggacgcactttcaaagatgagaacttcaaattggttcacactggacctggagtggtcagcatggctaatgctggaccgaacaccaacggcagccagtttttcatttgcactgtcaagacgccttggttggatggaaggcatgtcgtgtttggccaggtcgtggaagggatggatattgtaaggctgatcgagtcacaggagactgacagaggtgaccgtccgaagaagaaagtagtcatcagcgagtgcggggagcttccagtggtctaagcgttactcatctgttgtccgtctcacctaacctcggatggatggcgatatttcccccacctgaacttgtcgt

SEQ ID NO: 266189 - DNA, 431 bp, Zea mays
atcctaaccctcctagtcctctccatccccatcccctccaatggcggcgactgccacgtccttcgccactctcgccgtcgcgcgctcggcagggcagcggttcctccttgcctccaaggccgccccctcgccgctcctctccctccgcggcgcccgcctcccctcgcagggcgtctccttatctgggggcctcgcggcgtcgccctctcatagccgcgcgcgcttcgccacatcagccagcgccgaacccaaggaagcagaacttcagtctaaaatcacaaacaaggtgtactttgacataagcattgggaaccctgtgggcaagaatgttgggaggatcgtcatcggcttgtacggggatgatgttccacagacaacagagaacttccgtgctctttgcactggagagaaagggtttggatacaagggat

SEQ ID NO: 266190 - DNA, 2357 bp, Zea mays
ggttattctgccaatttggccaattcatctacaatgagaaaccagattaatgctggcagtttcacatcttttgatcatgtttgtctcttggatctggctttccttcccctaggattgggtctagatccccttggagggactgtatcttctcgacaaaatttagctgcgatgtctaacatgctaaactataatggaattggaagtccaactgcctcaccttctcttcagacttctattgatccagcgtatatccagtaccttgctcaaattgcagctacctgggatgatcctctaatggacaggagccatctgggaaattcttacatggacttacttggtacacagaaagctaaccttggccctttacttcagtcacaaaagcaatatggttactgtggcaatcttggatttaaccttggtggttatgctggaagtccattggcaagtcctgttcttccctcttcacctattgcaccaggcagtccacttaggcatggtgaccgcaacatgcgctttccatcaggcatgagaaacttcggtaattcctttggttcatggaattcaggcatgagtggaaagatggatgctaatttgatgccctctctcctggaggaattcaagagcaacaaaagtaaatcatatgagctctccgaaatagctggccatgttgttgagtttagtgctgatcaatatggaagccggttcatacaacagaagctagaaacagccagtactgaagaaaaggacatggttttttcagaaataatgcctcaagctctcacattgatgactgatgtatttggaaattatgttgtccaaaagttttttgagcatggaagcactacccagataaaggaattggctggtcagcttattggacgtctccttgctcttagtcttcagatgtatgggtgccggggttatacagaaggctatagaagttgttgatttggatctgcagactaaaatggttgcggagctggagggtcatgtcatgcgctgtgtacgtgatcaaaatgggaaccatgttatacagaaatgcatagagtgcattcctcagcatgctatcgagttcattgtctcgacattctatggccaagttgtaatgttatccactcatccatatggttgccgagttattcagagggttctagagcattgtgatgatcctaagacacagcaaataatgatggatgagattctccagtctgtttgcttgctagctcaggaccagtatggcaactatgtggttcagcatgttctggaacatggcaagccccatgagagatcagccattattgagaagctaattggccaagttgtgcaaatgagccagcaaaagtttgcctcaaatgtcattgagaagtgcttagcctttggaaatcctgtagaacgtcaggttctgattggtgagatgcttggatccactagcgaaagcgaacctcttgaggtaatgatgaaagaccagtttggaaactatgtggtgcagaaggtgttagaaacttgtgacgatcagcagagagagatgatcctaacaaggataaagacacacctgaacacactcaagaagtacacatatgggaagcacatagtagcacgcgtagagaagcttgttgctgctggagagaagcgccttgggcttcaaccagcatgcaccgccgcctgaagggcaaactctctagttgtacagctaacagttgctaggtttgcactcacatttgtttctctctactaaaaaccctagatgaaggccccttttggcctcgccagaaaataaacactgtatgtttgcgggaagagtgtacattaattctgtagcagaaagaccccccctacccatgcggcggaatcaagggaggagtgatgcgtgcgagtccgatcgatcgatgaaggctgctgtaaagaggaagatggaaggaaggagtgagaagcatgtcagttactctgctgctgtacaaattaaacttagctcttagagtgaggagaaagtaagctgttagctgtctgcctaaaggaaagaaaggaaaaaaaaaagaagctggaggccattggcaccctgtttcatgtgttggtatagctgctgtggctctcctgttgtctgtctggcctttgttgtaacataaagctgaggcgcactagcctgccttcgttttcacagttaagctgaagttattagtatcagctttcctgaactgcttggtatgtaatgtgactctgtttcttccttgtactaatgcttgtctcatgtaatccaggcccctaatgtctgaaatgtaaaaaaaaaaaaaaaaaaaaaaaaaaaaaaaaaaaaaaaaaaaaaaaaaaaaaaaaaaaaaaaaaaaaaaagggcagccgct

SEQ ID NO: 266191 - DNA, 569 bp, Zea mays
ctgtagcacaagacccatggggcggaatcaatggaggagttatgcgtgtgagtccaaaggctgctgtaaagaggaagaagatggatggaaggagtgagaagcatgtcggttactctgccgctgtacaaattaaacttagctcttagagtgaggagaaagtaagctgttagctgtctgtctaaaagggaaaaaaaagaaggaaatggtgaggccatcagctccctcctgtggcttttcctgttgtctgtctggcctttgttgtaacataaagctgaggcgcactagcctgccttcgttttcacagttaagctgaagttattagtatcagctttcttgaactgtttggtatgtaatccaggtccctgatgtctgactgttttaattgcaatattcatcaccctgataaacttaaaaaaaaaaaaaaaaaaaaaaaaaaaaaaggggggccccccgaataggggcccctgccccccgggatttatttcgggccgggaacctgggggggtacaagtttccccaaaagggggccttttaaaactttggggaaatcagggcaaaagtttttccct

SEQ ID NO: 266192 - DNA, 500 bp, Zea mays
ctgctttcaaacctttatgcttctataggaaaatgggatagtgtgtctgaaattaggagaaagatcagagggctcatgattgaaaaggagcctgggcttagctggattgagattgagaaaatggtacatgtgttttctgcagacgatgaatgccacacacgcattgatgattgtcgtgatgagttacttagaataatggaaaacatggtactgttggatagttatgaaaatgaaatagtgttaaatggttaggttgcctttgttgttaatggaaatggggttgacttggtcagaaaatgcctaagttgctatgaacttatttctgttgcatgccatgctttctttcatggcactaagaaagctgatgagtataaccagatttttcagcacaacaaatgataggagaagctatatatcaagcgtccaacaattttttgagggcttggaaaatatcaatctctggacatttaatggaccaggttaattgggattatccaacc

SEQ ID NO: 266193 - DNA, 445 bp, Zea mays
cacacgatgtctgctgcctacgcctgcttcctggaccacgccgtgggcagcctttctgaagggaaatacgccgattttgtggtggtaccttctacatcgtgggacgaattctccagcgatttagccggggcatgtcctggcgacgtacgtgagcggcaggcaagcttatccatgacagatagcagttgtgtaagtgttggagaccaaaaagagcagcgcggacagtccggccctgaggccggaaggccggacgatccgcggtccggacagtccgcggtgatggcgcggacggtctgcgcgtgcgcagagtcagttaggatttctagtttctcgcgggatttgttacctaaaaccgcgggattaactcggaaatctgttggaagcggatccagacctcccctttatatcgatgaagggctacggccgattgtactccctaacaaaa

SEQ ID NO: 266194 - DNA, 519 bp, Zea mays
  unsure (1)..(519): unsure at all n locations
cccacgcgtccggccaaacacacgcgaaaaaaaggagatagagtacaggttacagacaggcagagagcaaagatgtgtggtggtgcgatcctcgccgagctcatcccgaccacgccggcgcgccgcggcggcgcggcgtggcccgccggcaagtgcaagcggcggaaggcgaacgacttcgaggccgcgttccgggagttcgacgaggactccgaggaggaggaggaggacgacgagggggtggtggagagcaagcccgccttcgtcgtccgcgcctcgtccgcggcgacgcagcccagggcgcgccaggagcagcggagccggcgccgggcgcccgaccagcagcagtacaggggcgtccggcgccgcccgtggggcaagtgggccgccgagatccgcgaccccgtcaagggcgttcgcgtctggctcggcaccttcccttccgccgaggccgtcgcgcgcgcctacgaccacgccgngcgccacatctcggggcccagggccaagctcaacttcccc

SEQ ID NO: 266195 - DNA, 825 bp, Zea mays
cacgcgaagaaaaggagatagagtacaggttatatgagaggcagagagcaaagatgtgtggtggtgcgatcctcgccgagctcatcccgactacgccggcccgccgcggcggcgcggcgtggcccgccggcaagtgcaagcggcggaaggcggacgacttcgaggccgcgttccgggagttcgacgaggactccgcctccgccgccggggcccccgccagccgcaagcgcgcccgcgccgccgacgccgtcatcgacctcgaggaacaagagcagcgcccggccgcggcggccctgaagcacgaggccgccgagtgctccggatccgacgcgctcccggacttctcgtggcagggcgtgtcggcggcctacgacgagccccccgcgccgcgcccggccttcgacttcgaggcgcggccggagagcgccgcggacgaggcgtcgccccgggcctccgactccgagtcggacgcgctgttcgactcgctcctcttcggcgaccagttcgccttcttcgacgccggcgcgtacgagtcgctggacagcctgttcagcgccgacgccgtgcagagcaacgccgccgccgcggcggaccaggacatgccgctgtggagcttcgacgacggctgcctcgtcgaggacaacctctcgttttaagcttcggcgactgttgttgtgtcttgagttttgtaaattacgacctgttttttttttggagtttctgctcatgtatatctgtatcgatggtgagctgaatgaaatcatccttctcaggaagtaaaacaaagaaaaaaaaaaaaaaaagaaaaaaaaaaaaaaagggcaa

SEQ ID NO: 266196 - DNA, 572 bp, Zea mays
aagaaaaggagccagatccagagaagaagtggtagtggcgatgccgccgagggcagtgccgtcgtcgtctcccttgcctcttgcactcgccgccgtcgccatagtcgtcgtagcacttgccgtttcctcctgttccgcgaccaccgatgctccaggcctgggagtgggagcgagagagatggtggcacgggacgaccccaagtgcgaggagatggtgccctgcaccttcaggcgctgcatccagtactgcgtcagcatcgggctgcagcccaaggggttctgcaactccaagcccaacatgcaggtctactgctgctgcgtcatcccctagcatcatagctcctcgtcaacacacctaaatctgcagccctgctagagaagatacgatctctatgcagattagctgcagcgatatatatagatggatgaatcgtgcaagcggttgaactatggtgctggaatctgtaatatatataagcggatcatccaaagtgcaaaacatataagttttgcattgccaaaaaaaaaaaattaaaaaaaaaaaatattaaataataaaaataaaataaaaa

SEQ ID NO: 266197 - DNA, 452 bp, Zea mays
tgataataaggctccagcaccgatgccaaaacatgcacgagttggtcacgagtcagagccttttgttgctggcttaactttgttctttaatgttgcaaagataagataatgtaattactggttatgtgatgttgcatatgatatgagaatatgaggattggtgataaaaaaaatagtgccctgaaccttcaggcgctgcatacagtactgcgtcagcatccggctgcagcccaaggggttcttgaactccaagcccaacacgcgggtctactgcggctgcgtcatcccctagcatcagagctcctcgtcaacacacctaaatctgcagccctgctagagaagatacgatctctatgcagattagctgcagcgatatatatagatggatgaatcgttcaaacggttgctctcaaccacaaaagaagaaaagaaggctagtagcggcgcgccgc

SEQ ID NO: 266198 - DNA, 333 bp, Zea mays
tcggtccttagttccaggcacgacgtcacgcgtacggccgcagttcgcgcttgtggggctcgccgaggcgttcggcgtcatcggggagatcgagttcgggtacaccgagctgcccaagagcatggccagcttcagcatgtcgctgctgtacatggccttcggagtgggcaacctggccggcgccctcatcgtgaaggtggtgcacgtggccaagcgggcaaggcgtgggaacgggctggctcgtcgacaacttgaacgtcggccgctacgactattactactggctgctcacgggctacggcgtggcgaacttcgtgtacttcgctaggtgct

SEQ ID NO: 266199 - DNA, 1473 bp, Zea mays
cggacgcgtggcgggaggagaccagcagcagcccatccgaccccccgcctcctcctcctcctcctcccgggttcgcgtgaggctgtgtgctgctgggaggcggcgccggcgccggcgccatggaggcggagaagaagccgccggcggtgtccgacgtgggcgcgtgggcgatgaacgtcgtcagctccgtcagcctcatcatggccaacaagcagctcatgtcctcctccggctacgccttcgccttcgccaccacgctcaccgggttccacttcaccgtcacggcgctcgtcgggtggatctccaacgccaccggctactccgtctccaagcacgtcccgctctgggagctcgtctggttctcgctcgtcgccaacacctccatcaccgggatgaacctcagcctcatgctcaactccgtcggattctaccagatctccaaactgagcatgattccggtggtctgcctcatggaatgggtgctcaacagcaagcactacaccaccaaggtcatctcggcagtggttgtcgtggccgccggtgtcgggatttgcactgtcacggatgtcgaggtcaatgccaaggggttcatctgcgcttgcgtggcagtgttctgcacgtcgcttcaacagattacaattggctcctttcagaagaagtacaacattggatcatttgagctgctgagcaaaactgcgccaattcaggcactttcactcattatactgggcccctttgtggactactatctaaatgggcggtcattgttgaactaccctttttcaggaggggcaactttcttcatactgctttcctgctccctggcggtgttctgcaacatgagccaatacctctgcatcgggcggttctcagcgacctcgttccaggtcctgggccacatgaagaccgtgtgcgtgctgatcctgggctggatcctgtttgactcggccctcaccgtgaagaacatcctcgggatgctgctcgccgtgatgggcatggtggtctacagctgggccgtggaagcggagaagaaggcggcagccccggtcccccggatcaagagcgaaatgctcgacggcgaggacgtacctctcaaggccagggtgagcggcgtgcccgcagtcgacctcgaggacggcgagatgaagagctagctgctgcggctgccgcagctgccgctgattcgttcattcttcttgttcttttgtaactgtgcgcgcgcgatcgctcgatccaaagttgcttgtccgtcagccctcagctatcgacactacactgttatttttggccccttgttggggagagtccagttcctacgtgacgacgaccacccccagttcggcgtagatgaaacacaaactagcagaatgcagattgttaggatttttttttttcaggcggcggggtggagccattcattgtcatggtgacaggactcataatagaaatacaggtaacatgtgtatctccgtc

SEQ ID NO: 266200 - DNA, 812 bp, Zea mays
ctcgtgtatcatctgaatataacgaagaagataaccaaggataaccagagtgtgctggtttattgcttctcatgggttgtaattttcgttgttttactcgttatgaagaccgtatcagtggggaggaggaggttcagtgcagagttccagctagtgttccggctgatcaagggtctcatatttataacttttacagccatcgtggtaatcctaatagcaatccctggcatgacggttctggacatctttgtttgcatccttgccttcatgcccactggatggggtttgctcctgattgcccaagctatcaggcctgtgattcaaaagatcgggctgtgggggtcgatcaaggctcttgcccggggctacgagatcctaatggggcttctcctgttcacgcccattgctttccttgcctggttcccgttcgtgtccgagttccagaccaggatgctgttcaaccaggccttcagcagaggtctgcagatctcccgtatcctgggaggacacaagaaagaccgagggacgcggagcaaggagtagtagggctgctgattgaaggtccgtctatcgggagttatgtcgtcctggagcggtctatcaggttcagagaatattagggtccgtatgtatgtatgtgtgtgtcgcacctagcaccagtagtatgtatgtatgtatgcgtatgtaggttcagagaatattagggtccctatgtatatgtatgtatcaggattgctatggtcttttggattggaagatctgagatttgctggtgcaatggccagtatctgacatccaaatgttgaaactaa

SEQ ID NO: 266201 - DNA, 499 bp, Zea mays
  unsure (1)..(499): unsure at all n locations
ggctcgatcaaggctcttgcccggggctacgagatcctgatgggacttctcctgttcacgcccatcgccttcctcgcctggttcccgttcgtgtcggaattccagaccaggatgctgttcaaccaggcgttcagcagaggtctgcagatctcccgtatcctgggaggacacaagaaagaccgagggacccggaacaaagaatagggctgggctgctgctgattcaaggtttgtgtgcgccactagtatttatgtgtgaatgggtgggtagcatatggctcgagagtatctcctgaatggagattgattgatcctgaagagtagaagagactcgagtgatgtaagatgctgcaggcttgttgctttgttacctaggcgttaggcagaacagatgttttcaggatctctggcctgttaaccacatcttcccctgttcagagtgaattaattcctaatggaaactgatttgtgaattacttcctaaaaaaaaaaaanaaaaa

SEQ ID NO: 266202 - DNA, 614 bp, Zea mays
cggctcgaggggcggttctcagcgacctcattccaggtcctgggccacatgaagaccgtgtgcgtgctgatcctgggctggatcctgtttgactcggccctcaccgtgaagaacatcctcgggatgctgctcgccgtgatgggcatggtggtctacagctgggccgtggaagcggagaagaaggcggcagccccgatcccccggaacaagggcggcatgctcgacggcgaggacgtgcccctcaaggccagggtgagcggcgtgcccgcggtcgacctcgaggacggcgacgtgaagggctagccgctgatccgttcattcttctcgttcttttgtaactgtgcgcgcgcggtcgctcgatgcaaagttgcttgttcgtcggttctcagctatcgacactacactgttaattttgttggccccctgttggggggagtctgctcgtaggtgaccccccctcccccgggttcgacgtagatgaaacacacgcgggcaaattgttaggatttttcaggcggggaggtggcgacatgctgttatagatggtgacaagactttatataatggaaatgcaggtgtttttgaaaaaaaaaaaaaaaaaaaaaaaaaaccaa

SEQ ID NO: 266203 - DNA, 327 bp, Zea mays
cggacgcgtgggcgggacgagaccagcagccggccaccagcccatccgaaccctgctgctcccctctccgggttcgcgtgaggctgtgtgctgctgggaggagggggaagcggcggcggggcgccatggaggccgagaagaaggcgccggcggtgtcagacgtgggcgcgtgggcgatgaacgtcgtcagctccgtcagcctcatcatggccaacaagcagctcacgtcctcctccggctacgccttcgccttcgccaccacgctgaccgggttccacttcacggtcacggcgctcgtcgggtggatctccaacgccaccggctact

SEQ ID NO: 266204 - DNA, 659 bp, Zea mays
aattcccggctcgagccacgcgtccggatgtcttctcttggataagctgtttggatcttcgcactctcctgtgctgacaaatggaccctgtccagctcaagtgagccacataatatatctttccattacttaatacctgaaggaagcatactattagacataccggtatatattattgttcttagtcatcgcacaagactcttgtcaacaagaccaacaacaggatgaggactaccgtgcatgctgcgctttgcattgtgcttgtgataatgtcttcaacactgtcatcttgcgaggacgatgagaaggtatctatcgcatgtgacacaggatgcaatgccgcgatctcccgtctcaaatgcttcctgatggcctattctgaagggaaagtgttggtcagcagcaactgcgaaacgccgaccaggtgcggctgcgtgtttcgtcacaaacaagatgcagcccttatcgccggcgacgttggcaacaaaaagggatactgatggcagacgtgtacttcttggttgaataatactgctagaattaatatgggcaccaacgaaatatctataatgttattcttcagtgtaatgcttccagcatgttctgttttagtataactaaatatctatctttccccgccaaaaaacataaattgaata

SEQ ID NO: 266205 - DNA, 686 bp, Zea mays
cagtacggtccgaatccgggcacccgcgacgaacgcgcgcgaccgtgcgagctggtatttccgtcacaactcacaacccgagccccccaaacccgaagcagcaggagctcccctgaccttgctccgcctccgatcaaggaaaaggaagatgagctactacggccagcagccccccgtcggcgtcccgccgcagcaaggctacccggggaaggacggctacccgccagcggggtacccgccggccggctaccccccgccggcgcagggctacccgccgcagggctacccgcagcagggttacccacagcagggctacccgccgcagtacgcgcagccgcctccacagcagcagcagagcagcgggccttccttcatggaaggatgcttggctgccctctgctgctgctgcctcctggacgcctgcttctgacggaaccatccgtgccgggttcaacacggctgcaagtgaagcaaccagcttacggaagagctggaactgggccgggctattctagctttgtcctgcgttatcggcctcttttcttttcttttttttactctctctctctctctgatataagactactggtattttgtcgatgtcgattggattagactagggctggtgtgtattctgtggatgctccgtgtttctggtggtattcaagttcaaacctgtgattatt

SEQ ID NO: 266206 - DNA, 740 bp, Zea mays
gtacaggtctagaagtcccgggcccacggtcacgcccccaacacccccacaacccgaagcagcgaaagctcccctaaccctctccgcgcatccgatcgcaaggaagaagagggagatgagctactacgggcagcagccccccgtcggcgtcccgccgcagcaaggctacccgggcaaggacggctacccgccagcggggtacccgccggccggctaccccccgccggcgcagggctaccctccgcagggctacccgccgcagtacgcgcagccgccgcctccacagcagcagcagagcagcgggccttccttcatggagggatgcttggctgccctctgctgctgctgcctcctggacgcctgcttctgagagtgagaggggccgaccgacggattcgacacggcgacaagtgaaactactagctttctatgcgagggagagagagagagagctggaactggattgagcctggaatgctatcgtgctattctagctttgtcagagcataatatgtcgccctagttttttatttctctctgtcaatgttgacgggatcagacggtgtgtgtgtattctgcctgtggatgttccgtgtttctggtggaattcaatcctgggatttattgtgcccacttgggatcggtttctttgctattactctgttgccgaggagcacgttttgtagcgatttttgaactgcacacgtcacgccttttaatttatcaccttattctttgtc

SEQ ID NO: 266207 - DNA, 469 bp, Zea mays
cccacgcgtccgcccacgcgtccgtcccgtcacaactcacaacccgagccccccaaacccgaagcagcaggagctcccctgaccctgctccgcctccgatcaaggaaaaggaagatgagctactacggccagcagccccccgtcggcgtcccgccgcagcaaggctacccggggaaggacggctacccgccagcggggtacccgccggccggctaccccccgccggcgcagggctacccaccgcagggttacccgcagcagggctacccgccgcagtacgcgcagccgcctccacagcagcagcagagcagcgggccttccttcatggaaggatgcttggctgccctctgctgctgctgcctcctggacgcctgcttctgacggaaccatccgtgccgggtccaacacggctgcaagtgaagcaaccagcttacggatgaagctggaactgggccgtgctattctagct

SEQ ID NO: 266208 - DNA, 455 bp, Zea mays
ggaacgggaatatatgctcttctttactttatgtaaaatggctgactgtattcttgcttgaacagcttggctgccctctgctgctgctgcctcctggacgcctgcttctgacggaaccatccgtgccgggtccaacacggctgcaagtgaagcaaccagcttacggaagagctggaactgggccgtgctattctagctttgtcctgcgttatcgccctcttttctttttttttctctctctctctctctctgttatgagactactggtactctgtcgatgtcgattggattagactagggctggtgtgtattctgtggatgctccgtgtttctggtgggattcaagttcaaccctgggattattgtatttcttctacctgtcgcatggatcgcgcctctttgctgttaaaaaaaaaaaaaaaaaagggcgcccgctcgcgatctagaactagccg

SEQ ID NO: 266209 - DNA, 580 bp, Zea mays
  unsure (1)..(580): unsure at all n locations
cccacgcgtccgccacaacccgaagcagcgaaagctcccctaaccctctccgcgcatccgatcgcaaggaagaagagggagatgagctactacgggcagcagccccccgtcggcgtcccgccgcagcaaggctacccgggcaaggacggctacccgccagcggggtacccgccggccggctaccccccgccggcgcagggctaccctccgcagggctacccgccgcagtacgcgcagccgccgcctccacagcagcagcagagcagcgggccttccttcatggagggatggtacgttcttggctcccccacttttgtgccgcgcagccgctcataagttgttcctagatcggagtgtcttcgaaaatttcctcgctaggttagatggtaggcaccttccttcggctcaccggcggcggcggcgactgccgtgctggtgcggcacgttggcccctgtggggggggggggtctggacttgacgcgtgaaccacccttggaaaagggcgccgncgncacgccacgccacgccaccctcgtggccttccgtggcgacgtgtcngttgctacacgcaaaggtagg

SEQ ID NO: 266210 - DNA, 441 bp, Zea mays
ctcccctgaccttgctccgcctccgatcaaggaaaaggaagatgagctactacggccagcagccccccgtcggcgtcccgccgcagcaaggctacccggggaaggacggctacccgccgcagggctacccgcagcagggttacccacagcagggctacccgccgcagtacgcgcagccgcctccacagcagcagcagagcagcgggccttccttcatggaaggatgcttggctgccctctgctgctgctgcctcctggacgcctgcttctgacggaaccatccgtgccgggtccaacacggctgcaagtgaagcaaccagcttacggaagagctggaactgggccgtgctattctagctttgtcctgcgttatcgccctcttttctttttttttctctctctctctctctctggtatgagactactggtactctgtcgatg

SEQ ID NO: 266211 - DNA, 691 bp, Zea mays
ggaaagaaggagcatcctcctgtatgtgctatccttggtggtattcttggtcaggaggtgatcaaatcgatatcctgcaagggcgatccagtcaagaatttcttctatttcgatgtggctgacggtaaaggtgtcatcgaaggatatccccacccacccccacctgcaaaataaagcactcagctgcgtaactctcgactcgacttggttcactaatcgttttctgtacccactcagcttcgaacatgtagtagcaacttttagatctagagccatgtgaaaaaaggcaggtttgactttaacccagatgtttagggattgttcgagcagcaaactgtgacagtatgtatgcatcgacaatttaaagctgaagtctggaccggtttccatgcttttgggggcggatttcctttgtcgtccctttacccatttgtcaaatttggtagcggtggttggggggaggggggaatgaagtgagaaggctatgtttataactgtgaaccgacggttgcagctatacataccgtcatgcctgtgtactcaccccgaaaaaaaaaaaaaaaaaaaaaaaaaaaaaaaaaaaaaaaaaaaaaaaaaaaaaaaaaaaaaaaaaaaaaaaaaaaaaaaaaaaaaaaaaaaaaaaaaaaaaaaaaaaaaaaaaaaaaaaaaaaaaaaaaaaaaagggggggcc

SEQ ID NO: 266212 - DNA, 1876 bp, Zea mays
cggacgcgtgggtccaattatatttcagagaacgaaagcaacatgttttgcttatggccaaacaggtagtggcaagacgtacacaatgcaacctttgcctctgagagctgcacaagacatggttcgtctattgcaccaacctgtctatcggaatcagaattttaagttgtggcttagccattttggaaattttgggggggaaactctttgatcttctatctgacagaaggcaactactgatgagggaagatggcaagaaacaagtttgcattgttggtctacaggaatttgaggtgtctgatgtacagatcgtaaaggaatatattgaaagaggaaatgcagctagaagcacagggtcaacaggggccaatgaggaatcatcaaggtcacatgctattctacaactggctgtgaagaagcatatcattgtaaaagataccaggagacagagagatcgtgatgctaatgaagctaaaaatacaaaggctgtggggaaaatatcatttattgaccttgctggaagtgagcgtggtgctgatactaccgataatgatagacaaacaaggattgagggagcagagataaataaaagtctgttagctctcaaggaatgcattcgagcacttgataatgatcagatacacattcctttcagaggaagcaagcttactgaggtccttcgtgactcatttgttggtaactctaggacagtgatgatttcttgcatttctccaaacgcaggctcatgtgaacacacactaaataccttgagatacgctgatagggtcaaaagtctttccaagggtggaaacacaagaaaagagcagcccacaggaccaactaccacttctagccgggagtcttcgtcagctccatcatattcattgcctgctgaagctgaagaaattcctaaccaggttcaagagaagagaccagtcgatacttataggaagggcactgaaaattttatctccaacccttctgtggagtctgaccgaaattcctttagtacgattccaaattattccaatagagggagagaagaaaatggtgcagcatctggtaatgacagggagaggtatgatttgaagtccacccaaactgcttacactagtaaggcacagttggttcagaattcaacaaacacacaggaggagaaagtcacaaaagtctcacctcctcggagaaaggcttataaagaagacaaatctgatcggcagggcaactacgtgaaaaaggataatggtcctgagacaggtcgggctgggtataagatgcagcaggcaaagcagctgcaacagcagcaaaggccagcatctgcttcagcttcgtcaaggcaatctgaaaaggaaagttcttgtgatgatgtagaaattgatgcaattcttgaggaagaggaggccctcattgcagctcacaggaaggagatcgagaatactatggagatcgtacgggaagaaatgaaccttttggcagaagttgatcaaccaggtagcctgattgacaactacgtgacccaactgagctttctgctgtcacgcaaggctgcaggcttggtcagcctccaagcacgcttggcacggttccagcaccggctcaaagagcaagagatccttagccgcaagaaacctcccagatagtatgatgatcagcaatgactctgtccttgtgccttgtaatctgattgcttggagctcagttgtggtccatcagctgttttttacgtgtgcgctccagtaaattctatagccccaagcaggccaagacatgtgggagtggcttagggcggtcttgatgccgagggcgtggtcctggttgatatcacctgaccctttttgtcagggccaataaccagtttggtaatagtcctttttct

SEQ ID NO: 266213 - DNA, 636 bp, Zea mays
ggctgcaggtttgggaagccttcaatcacacttggcacggtttcagcaccggcttaaagagcaagagatccttagccgcaagaaaccttccagatagtatgctcaacaatggctctggattttgcctggaaatcttattgcttggagctcaatcgcagtctattagttggttttctcctgtgcgctccagtaaatgttagacccaagcaaagcagtgatagagaggacacatgggagttgcttgagggtgtggtgatcttgatgttgaggatggtgtggtcctggttgatgtctccactttgtgtttgtcagggttgacaaccagtttggtagtagtcctttttacagtggggctgcttgggtgtttttttttggcagatgtcatgtatggcttgcccactttgcctttttttttcttttccccattttgtacgagaaactggaatgtctggaatgttgtttgcagacaccggtgggtcgatattcaccgagggggtctgtggaaaccgatacattgttgtatactagtcggttgaccgtgcgttacaacggcttacaaccatatccacgtaaactattcataaaaaatttttaagattttttaaaaaaaaaaaaaaaaaaaaaaagggcggccgc

SEQ ID NO: 266214 - DNA, 439 bp, Zea mays
atcactatcagtcgacgccgacgctcctccatcctctgccagtaccaggtcgccttttgttttgcagttcttcctcgctctgctccaaggccggcgcagcgcaggagatcgaaggggaaggatgatggcggcgatgggcggcgcggtgcgggtgctgtgcggcgcggagaaggagcgggtggtgggcacgcgcaaggcgcccggggcgtgcccgcgctgcggcggggccgtggtggccgtcgacgtggagagcgagcgccgcttcctcggcctgccgctgtgcctccagagcaagcgcaagtactcctgcacccgctgcctccgccggctcgtcaccctctacagctgagagctcaagaacgagctacactacgctacacatgcacccctcgatctcttcttgccaagcgcccgtcggccccgccgtcggcgatgacaa

SEQ ID NO: 266215 - DNA, 662 bp, Zea mays
gagctctgagggaagaaaggtccacacaggacactcctccttcgtctttctccttcctcgccgctctctgctgcattcgcgaacacgcatcgaccctacgactacgagtagcgagagaggattgatggcggcgcagctgcggtacatgatgagccattattttggtaccccacctagcaaggaggtgatccaagatctgtactacgccttgaggacaaagggaggtttgacccccaaggaggaggagacgctcctggcttgcaatttacttcctggtgtttatttcatcgtgggttcagtactgggcactttcgcgatgttgttgggttcccacaaaggactcaaattgcttgggcgtccacctaattctccattaagatctttgactgtttatggctacggttttattgtcggaaaggcctgtgctaatgaaacctggcatcaattgcctgaactgcttttagacagggaagaaggacgcatgaagacagagctagcctaaataatactcaataagcatagtgatgacatatacctggtttgaagttgtgagaagacactttttgtcgagcatctgttcgatgatctgcatcaaggtcaaccacttttcaggtggcgcctacgacatacgtatgttgacagcacctttgtagaaagaacga

SEQ ID NO: 266216 - DNA, 848 bp, Zea mays
aaaggcatatccaagctatgtttagatgagagacaaattaataatttctgcatcattaatagtgaatgtggctcttttgtattgatggcaggatgagtgagtcaacatgattaggaaatacctacaatgaaacctacacagttaacaatgatgataattattcacatatctaatttctatctaacattgtgctggtaggccccagatgaacagttagccataaacaatactgctatagtactattggaatgtaataccttttttataaacattcaatacttatacatcttaaaagaggaaacacaggtagtatgtagaatacaatgacattaaatgtatgttactgattcattatgtatgatagtttttatgttcaaagtaatttgttgccactatttgctcatgaagttataacagatccatgctgtagttgaaagcaaacagatagcttgttaggttaacagagcagtagatggaaccatttggcataaaatattggatgcatcgacccttcaacattgatacgttgctgaagaatattttttttcatcctttcattgcaaatgtgaatttattgaagctacttctcaggctacggttttattgtcggaaaggcctgtgctaatgaaacctggcatcaattgcctgaactgcttttagacagggaagaaggacgcatgaagacagagctagctaaaataatactcaataagcatagtgatgacatatacctggttgaagttgtgagaagacacttttttgtcgagcatctgttcgatgatctgcatcaaggtcaaccacttttcaggtggcgcctacgacatacgtatgttgacagcacctttgta

SEQ ID NO: 266217 - DNA, 2015 bp, Zea mays
cccacgcgtccgaatcatgcttccatgtctggttggattcgtgaaagggatccaacaagactcctccattatgagggaggtggttccagaacatcatccacagatattgtgtgccccatgtatatgcgtgtctgggatgttgttaagatagcaaaagatccatctgaaacaaggcctctaattctttgcgaatattcacatgctatgggaaacagtaatgggaatattgatgcgtattggatggccatagacaacacttttggactccaaggaggttttatatgggactgggctgatcagggtttactgaaggaggactcagatgggtctaaattttgggcatatggcggcgactttggagatactccaaatgactccaatttttgcctcaatggcattgtgtggcctgatcggacgattcacccagctcttcatgaagtaaaataccttcaccagcctatcaaaatatcatcagcagataatatgcttaagattgaaaatggacacttttttgagacaacagaagctttggacttcagttgggttcttcatggagatggttgtgtcttgggctctggtccattgaatattccaactttggcaccacaaactagtcagctcatcaacatggaatcatcaccttggtttgccctttggagtgcttgtgcagcaaaagaagtatttttgtctgtgaatgtgaaacaaaggcatgaaacacgatgggctaaagccggtcatctcttggcttcagcacaactgtgtttgcctcagaaaaatggctttgtccccagcgtgatagcattgtccagtagccctttggtctgtgaacgcattggtgataatgtaaccatctgcaagaataatgcctggaaaattaaagtaaacagtcagttgggaacaatcgacagctggaaggtcaacgacgttgagcttatgagcaaggggatactcccatgcttttggcgcgcaccaactgacaacgacaaaggaggtttcttcaccaagccatatgcctcacgatggagagaagccttcctcgacaatgtctcgttccacagcagccagttctctgtcaaggagttgccggacaacaccgtggagttctccaccctctaccacggtgttcccgggcacctacccaagcctgacgacgaagcctccgagtccattctcttccgggtgaagatggtctgccggatccacgggtcaggcgacgtggttctcgactacgaggtaaaccccaggagcgacctccctccccttccccgggtgggcgtcgtgttcagcgccgggaggtccctgagccacgtcacgtggtacgggcgcgggcccttcgagtgctacccggaccgcaaggcggcggcgcacgtcggcgtgtacgagagcagcgtggaggagctgcacgtgccgtacattgcccccgtggagtgcggcgggcgggcggacgtcaggtgggtggcactccgcgacgccggcgggctcggcctgtacgcgtcggctcacggcggctccccgccgatgcagatgagcgcgagctactacggcgccgcggagctggacagggcaacgcacgtccacaggctggtgaagggggacgacatcgaggtgcatcttgaccacaggcacatggggctgggcggcgacgacagctggtcgccgtgcgtgcacgagcagtacctgctgccgccgacgcggtacgccttctccctgcggctctgccccctgctgccgtcgtcgtcgtgccatgacatctacaggtctcagctccccagctgatggtgccgtgtgccggagacccgtcgacgtcgagccttgggaaacaacaatgaacgcaatggcctggccagtgaatgaaagtatataatattgtaataaagcagagacgtattagctcctgcaacggcctcgcgatcgcctggatatgtctatgctgagggggtgtttagttaactaataacctaactacatatggcgccaagttactaaaacttaataaataactattactaactaat

SEQ ID NO: 266218 - DNA, 944 bp, Zea mays
ggacgcgggcattattctcaagttgggctcagccatgtaggaggagcattccatccgggccccggcgtcatcggaccgagtggcgtcttcctcctcccttcgtaaccttccagacccgaccgcagcagcccggggcaacaagcgaaccggcggcggcgatggggatcggtgagcacttcgagggcgtcaagcagcactgggcgagcaacttcgccttcctcgactacttcaagaaggtctacggccgcgccgagcccctccccaagtggtccgacgccgacgtcgacgagttcatcgcctccgacccggtctacgggccccagctcaaggccctgcgggagtcgaggaagttcgcgctcgccggggccctcgtcggcgccgcccacctcggcggcgtcgcgctcaagtactccaaggcgccgcacggcgtcctgctggcgaccggcttcggcgcgatcaccggcgccgtgctgggatccgaggtggcggaccactggtaccagctctacgagatggacaagcagggggccaacctcaggttcatctactggtgggaggacaaggtctcaggccagaagagctgaaccacatcgagtgatgcctattctactgagcacaccagcgtgacaacaaaacattgacgtctctcatgccgagttcttagtttttctttcctagttttctctaataagtgtggaattggttgaggaagccaactggacaatgcatttttcatctccgtcatgggttatgttcatccatggtcaatctggtgtaaacagcaaatcctatccgttttcgagatatgttttctcaaactactgatggagtttagagtgttcattccacctctgctacaaaactgtagctattgctgtatcaattgacgaggaagaagtagcacaacattagagcttcaaataaaaaaacaaaaaaaaaatcat

SEQ ID NO: 266219 - DNA, 666 bp, Zea mays
cccacgcgtccgcccacgcgtccttagatcaaccatctgcggcggcgatggggatcggtgagcacttcgagggcgtgaagcagcactgggcgagcaacttcgccttcctcgactattacaagaaggtctacggccgcgccgagcccctccccaagtggtccgacgccgacgtcgacgagttcatcgcctccgacccggtctacgggccccagctcaaggccctgcgggagtcgaggaagttcgcgcttgtcggggccttcgccggcgccgcccacctcggcggcgtcgcgctcaagtactccaaggcgccgcacggcgtcgtgctggcgaccgggttcggggcgatcacgggcgccgtgctggggtccgaggtggcggagcactggtaccagctctacaagatggacaagcagggggccaaccttaggttcatctactggtgggaggacaaggtctcaggacagaagagctgaaccatgttgaattgaatgatgcctatttgagcattccagtttgacaaaaacattgatgtctattatctgtaatccttattgttttgttttgtttcctagtttttctctaataaggtgcgtatcggttgtggaaaccaactggacgatgtatttttcatctctgtcagtagtgacatttatccttagtacttac

SEQ ID NO: 266220 - DNA, 714 bp, Zea mays
gcctcctacgcgtacggcatcggcacgggcggtaggataaagtagcatagcataccacaaaaggtgctgcttgacagatggcaagcttcccacacctcacgcagatggagcatggcctagccagtggtgcctcccatggcacgccgagcttcttcttctgccatggcacagccacggcggattcagcctcgctggagacctcgtctggtgttctcgacacctccccacgaggcacttcttctgacgacaacaaggcctgcaggaagcacaaggaagatagtggtgccagcttcagctctgctcgctccaaggactcaaactcaaaggaaagcagcaaaaggagcggaggaaaaagagacagaagcagcaagaaggtggacgaggaggagcccaaggggtacatacatgtcagggcgaggagaggacaagcaacggacaaccacagccttgcagagagggtgaggagggagagaatcagtgagaggatgagggtgttgcaggccctggtccctggctgtgataaggtcactggaaaagccctcattttggacgagatcatcaaatatgtgcagcccttgcagaaccaagttgagttcctttccatgaggattgcttccctgagccctgtgctgtatggctttggcatggacagtagtgatgctctcagtgaccttagaactcagaagaccgaagggatggtccaccatgaggcgt

SEQ ID NO: 266221 - DNA, 1001 bp, Zea mays
  unsure (1)..(1001): unsure at all n locations
ccgcaatcaaggttgtcacgcccgacgaggatggctgccagtcaccgcacggccggtgggggccccagcgacggctccagcgcaggcgcgaggaagaagctccaactcaccaatgagcagtcgacgctgctcgaggacaccttccgcgcccacaacatactctccaacgcgcagaagcaggagctcgcacggcaggtggatctcagcgccaggcaggtggaagtgtggttccagaacacacatgttcagataacatgttttgcatgaactaccctctgtatctaacaaaaagaagttcaagtttgcaggaaacaaccacaatcgaattgttgcaagtgcgtcccacgatctgaagacaaaaagatctgctgtccataagcaacaaagtgctgcagaggctgtgttctgtgcaccagtacttgatagtgagtttcagaatgaacctataactatttcctacatcgacaagaaggatggtgaaaattttcatgatatgtataaatgtgttggcaaggctgttccgtgtcctttgttacctcatgagcaccatcgtcatctgaatacacagagaacggaatctgcaggaaatttgaaagtctgcacgcttcctgatcatcaaactgcaaatgaattggcagacaagagtaatggtgacctgctgacatatggaccaaagccaaagaagggctcttgcaaccgaagaagcctctatttattcgaaaagttaacgattccttccaaatcacaaagtgcatatcctaaaaattctgcgtcttcaggaaaatctagcggctttggagtttgtatgtacggcaccaatattggaagccagttattcggagcacagaatcaatctttatctaagactgaaacattgcacagcgatgctcttattgggtccaaatcctcagcaggcattgcttcattatcggcacaaaaggacaacggntgcccagccccagccccagccccagccccagacgaagcgataagcgagcagc

SEQ ID NO: 266222 - DNA, 1263 bp, Zea mays
ccgcacgcctgcacacattccgcgcacaccccggcagccgcaaacgccttcgccgtcgcgtcccgctcctccgcccgcccgacgcgacccctaggacctggagagagaggtcggcatggctgccgcagtggtcgacgacgctggtatggacgccgtccagaagcgcctcatgttcgaagacgaatgcattttggtggacgagcaggacaatgttgttggccatgagtcaaagtacaactgccatttgatggaaaagattgattctgagaatctgctacatagggcattcagtgtgttccttttcaactcaaaatatgagctgctacttcagcaaaggtccgcgacaaaggttacctttcctttagtttggaccaatacctgctgcagtcaccctctgtaccgtgagtctgagcttatccaggagaactaccttggtgtgagaaatgcagcacagaggaagctactggatgagctgggcatcccagcagaagatgccccagttgaccaattcacccctctgggccgaatgctttacaaggcaccatctgatgggaaatggggggagcatgagctcgactacctgctgttcatcgtccgggacgtgaaggtgcagccgaacccagatgaagtcgctgacgtgaagtacgtgaaccgcgacgagctcaaggagctcatccggaaggctgacgctggcgaggacggggtgaagatctccccctggttcaggctggtggtggacaacttcctcatgggctggtgggaccatgtcgagaaaggcaccctcggcgaggccgtggacatggagaccatccataagctgaaggagtgaggggccgccggccggccggctccgatgacctcaccacctgttgatgttgctgctgctgctgcactgcatgtttatcaaaagttatcgctcctgctcgcggaaagtgagcttgactgttgccggggtggaagtgtcgttttggactgatgatgagtgctgcggaggggtttgttgtttgtttgtttgttcggtgaccgaatcgcgagctggacgcctgtttaatccgtgcttatacatcgtctgagtaaacagcaataagagggacatccgtaagctctttccgtagctgcttttgcgactcgtctgctgctactgcagttccatttctgtatatttttggcagaagatccttgtgcagcctaggctagcggcatcgtgactgtgaggtagggaagggaacgacgcttgtggttgtgcatgttggcttgcttctt

SEQ ID NO: 266223 - DNA, 514 bp, Zea mays
gtcgcactctattttaaggaaggccgccgcccgctgctgccggggaccgacccggccgccttcggcctccactactcccagttcagcttggacagtctgaacccaaaggagaaaatcatggaactaggcaccaggagcttcttcctgtgcccaagatcttgggctgccggtcaggacgcttcgtcgtcctccggcacagcgaacggggtcaccagtgcggcatcagggaaaacaccggcctggcttagctacatgccgttctggccgaccatgtgatcggctagcacacgcacaccccaaactcttccaggtcctaaagaatctccaagtattgcatttgtgagacagatggctacaaggacattgtaaatgtatatgttttggagtttgtaagcatcttgaatggtgcacgtgcgatcctgcaaatcatctgtggcccatgttacaacccacagattcagggaaaaaatatcgaatgattatgtaattaaaaaaagtttaaaacagttttaat

SEQ ID NO: 266224 - DNA, 806 bp, Zea mays
actagttctagatcgcgagctagaactagtgttttttctggcattgatgcaccagaagacgaactgcctggtataatgctaacgaacgatgactatgatccaagaagtggtctacgagcaacagatggaggacacgattatgaagcaggtcttccagacttcgatccactaaggcaccacaacgattactgtccttgggtgaatggaaatgttgctgctgcatgttgtattagtaccggttcgagcacagctctttcaggctggcagctcacggtagatgccatcgagactctgcagtctcttggccaggctcaaaatcagacgatgcagtcagactctgcggcttcattatataaggacgatcacgtcccgcctagccggaagctgctgaaaagtgcgaaccacagcaagagctgagctctggagcaagattcttcaatgctcatagaaaagttgtcttgtcgaggccctaacctgagcaggggcgatggcttgcgtttctgtgaaatttggtcttagtgtggtcgtgctgcatttaccggaagagcttagaaaccatggacacgcgtgataagagataattcttaggccgtgatgtgtgcacgtgacatggcttgtcccccgccatcttgccaaattgtttatgtcaggttgattgtatctatctacatacatgttatgttatttcagtctcctggagtctgtaacatgtagcttgccatttcgttgatggtttgtcctactgaataatattgacacagacgaccacatttatgtattttgtgcgaaaacttgcaaggcccccc

SEQ ID NO: 266225 - DNA, 853 bp, Zea mays
tccttacctgttggttgacaaaaagtacactgggagggtctgtgactttggtgggtggagattgaaggcaaacacatttctgtcttccaagactgcagcagggactcctgagtggatggcaccagaagttctacgagacgagccctcaaatgagaagtctgatgtttacagcttcggtgtaatcttatgggagcttatgacattgcagcagccatggagtaatttaaatccagctcaggtcgttgcagcggttggtttcaagggacaaaggcttgagatcccaagcagcgttgatccgaaagtggcggcagtaatcgagtcctgctgggtcagggagccctggagacgaccctcttttgccagtatcatggaatccctgaaacttctcatcaagacattaccacccaatcagctcctcgaagaaaattagttaccacccaagcaacttgcaaattatgtcacctctagagttttctcgatttgtttagatccgatatgcgccaggcctctcaaaccattcgtcttcggcgccacgtattccctgatgagaaatattcaaaactacacctgtcacaaaaggggaaaaactatggttggacaataagattcatgaaaaaaatatgtgatccaaattaagtgtacatctcttttatcaaggaaccaaatgtaagttggtcaaatatatacatataagtactaatatttatggaatatatacttttacaataaaattattaaagatatacaatatagagcttgaaccatacaaaccctaactgataatgagtaaccataacatatgtatatgtactccattcgttaccaacaataaggtgtcttacatatcaagtaa

SEQ ID NO: 266226 - DNA, 1671 bp, Zea mays
cccacgcgtccgggcaaccttatttttgctgtcggcagattgataatggtgacatcaaaccttttgatgtcacacagctgcaaggctactggagccaggaagtacttaggaccatgttcaatgcaacttcctctctgaaggtgcgtttcaaggtccctaaatccagacccagttcagatggagggctgaagaggaagcgtgatgcattcaacgatgatgctatgccacagaagttcatttcttctggtgcttctacttctaggttttatggtgagaacatccaacaattgtgtcctggttgccatgtggaagtactctctcaagatagtggtataaggggatgttggtttagatgtttgattctgaagaggcataaagataaaatcaaggtgcgctacctagaacttcaggatgctgatgagactggaaacttggaggagtgggttatgctaacacgagttgccaaacctgatcaactgggtgtacgtttccttggaaggccaatggttcgtccacagcgcgtggaacaaagcaaggcctcatgctttgatgttggagccattgttgatgcgtggtggcatggtggctggtgggagggaatcgtgctgtaccaggtgggcagtgggcgtctacaagtttattttccaggagaaaagcgaacagctgaatttggtgaagatgagctgaggtgttcccttgagtgggttggtaacaaatggaatcctttgaagggaagaaaagatgtcacaagcaagctgacctccactgcagattgtggaagtgaatatttgattgcgaaacaagatccactgaattttcatgtgcctaaaaattcagaacctcaactagagggacatcaatatgacaagaggggtattgagaaatcttcagtcagcacaatttcacgagatcagaaacgtgtccttgccgacctgactaatgatttgaagttagataacttgaggtggaggccaagaaagaggagcagaagatctggctcaagaaagcagtcggacacaagcagtggaagcagcagcggggacatggacctgttcagccccagccccagtggaagctttggtcaacataatttagtgcctgacgaggagacatgcaagagcagtggagagcagacttttatgggtgtgcctgtgcaggttcccaatcttgtgatgtccaggtgaaagccatcttagcaccggttgaagattaacatgttagcttctggagttacaccgaccttggcgagatgtggttttgtgcatccccaggttatttttgccagcacaacccagatccagttttctgcagtttttttggaggctcatcagctgtgatcagttagatgtgaaaatgtctcaccaagaaccagtatacagtttgtatgtagggagagaagaaaatgctcggtttggttttggttttagagctttcagttttttttcttttcttttcaatcctagtctttgttgtttgaaggacaggtcctagatttgacatagcctctttacatcggttattctttcccatagttgtcagtacttggtagtccttgttttttatttgtccatgcagtcttgtagcagtcgcgcgccttacgtaaaattatcctgaactgaactcagtgaaatgtcccaaaatagtgcttattgcctatttctgtgttctttt

SEQ ID NO: 266227 - DNA, 291 bp, Zea mays
gtccaggtgaaaaccgattctgcaccggctgaagattaacatattagcttctttctggagttacgccgaccttggcgggatgtggtttttgtgcatccccaggttatttttgccagcacaacctagatccaggtttctgcagttttttgaaggctcatcagctgtgatcagttagatgtgaagatgtctcaccaagaacaagtatacagtttggatgtattactgacctagattagttttcatctgttccctataatttctagggttgatagctttcttaacattttctag

SEQ ID NO: 266228 - DNA, 603 bp, Zea mays
agattcgctctggtgtcgacgctggactgagaaccgccatgtcgcgcgctgtggctcgtccaggcgtagcgcttggaccgcccagaaacgtgctgctccgccattcggggacccgcatcttccgtcattcgtccagaactcggcgctgatgctggtggcctgcaccgcggggttcgtcctccagtggcgcctcgcgctcgtgctcctcgccgtgttcccgctcgtcgtgggcgccaccgtgctgcagaagatgttcatgaagggcttctcgggggacctggaggccgcgcacgccagggccacgcagatcgcgggcgaggccgtggccaacctgcgcaccgtggccgcgttcaacgcggagcgcaagatcacggggctgttcgaggccaacctgcgcggcccgctccggcgctgcttctggaaggggcagatcgccggcagcggctacggcgtggcgcagttcctgctgtacgcgtcctacgcgctggggctgtggtacgcggcgtggctggtgaagcacggcgtgtccgacttctcgcgcaccatccgcgtgttcatggtgctgatggtgtccgcgaacggcgccgccgagtacgctgacgc

SEQ ID NO: 266229 - DNA, 513 bp, Zea mays
cttccacaagcacctgctatagttgtgtggtgcaaacaccaaaatgttgcctgccaaagtgtcatttgttttcctgatagtgtactgcgcagtaacattttcgctaggtcagatagctgttggcgaggcatgcacagtggatcagagggacaagatcacaacggactgcagagagttcatcaagctgaaaggccccgtcacagccccgtcgtacaccgacgactgctgcgtcgccataagagcggtgcccaatctcgacatggagtgcatcattcgcctgctctccaataaacagaagaagaagtacgacgtggacaagatccggcggctcggcagcgtcctctgcaatccacatccggtgatgacgtaaaatggggtgtggcagtagtttctgatggagtgcatcgcgtcaacaatatggagcttgaactatacaaaccctactgataatgtgtcaccatttcatatgtatatgtactccattcattaacaaaaaaaagtgtcttatatatc

SEQ ID NO: 266230 - DNA, 494 bp, Zea mays
cccacgcgtccgcccacgcgtccgcccacgcgtccgcccacgcgtccgcggacgcgtgggcccgcgatgtgctactgtatattacacgaggacaacgtcttgggagctatattcagcctgtggaaggagatgagggctgcaacgtcctgggaggacgttgagaacctggtctggggagagctgaaccggtaccaggactctgcagttcgctcagcataactaaacaccagcaaaaaaaaaaaaaaaaactttctgaacatacgtgtatgttgttgttcctccgacgaatgtaacttccaaatataaaaaaaaagtgtagggaaaataacgaaggctcgacacggcatgcccgtattttcctatggctggtgataatattgagatccctgaaatggttctatgaaatgaaccgcagaccgttgatgattggcaaaacaaaacagaacccatggatctacgagaagtaaacattgaaaagttttacatcaaacctt

SEQ ID NO: 266231 - DNA, 1397 bp, Zea mays
tagttctagaccgagctctgccccgcccaagttcactacccgacccgccgcgccgcagtctagaagcttctgccggccgtctgcggcccgcccatccgcaacccatggctgtcgtcgaagaagacgctgcggcgtctgcagatcccgccgccgcgtccgatcccgccgctggctccagcgaaaacgagatcacagtagaagaggcttctttcgtgcattctgaacctccccaggatggcagcgccccacccgtggtttcctctgacatggaggcccttcacgacaaggttaagaagcaaatcatcaaagaaggccatggcaggaaaccgctgaagttcgcgacgtgctttgtgcactatagagcatgggttcaaggatcatcgcataaatttgaggatacctggcaagagcaacatccatttgaactatgtacttggaaaagagaaaaaacaaatgtcgggtttaggcatcggtgttggcagcatgaaaagcggggagcgtgcattgttgcatgttggttgggagctaggctatggcaaagaaggaagtttttcattcccaaatgtccctccaatggcagaccttgtttatgaagttgaactcattggatttgatgatgttaaagagggtaaatcccgaagtgacatgacagttgaagagaggattgcagctgcagacaggagaaagattgagggcaatgcatatttcaaagaaaagaagcttgaggaggccatgcagcaatatgaaatggcgattgcatacatgggagatgatttcatgtttcaattatttggaaagtacagagacatggccttggctgtgaaaaatccatgccatctcaatatggctgcatgcctgatcaaactaaagagattcgatgaagctattgcgcagtgtagcattgttttgacagaagatgaaagtaatgtcaaagcgctgttcaggcgaggaaaagctaaatctgaacttggccagacagaatcagcgagggaagatttcctcaaagcgaagaagtactccccagaagacaaggagatcattcgggagctccgtttgctcgcggaacaagacaaggcactataccagaagcagaaggagctctacaaaggtctctttgggccaagtcctgaagcgaaaccgaagaaggcaaagtacctcgttgtgttttggcagtgcctggtgtcatttatcctttatctggctgggatgttcaaacggaagaacgagtaggataatttaccagaaaattgtgtagaactggtggcctaattgaccaaccttgtattataaggagtgttgaattttctgtagaactgtcggccggtccggatcaattagttgttatgaactctatacgatgttgttcactattatgccatagtttcatacagtctttc

SEQ ID NO: 266232 - DNA, 720 bp, Zea mays
tcccacgcgtccgcccacgcgtccggccgcgcgccgcttcctcgccaccgcgctccttgtcgaccccaacaaccagttcttcgccctcctgtcgcagtcctgcatcccgctccacccgttccccaccctctacaacgcactcctctccgacaatgctggccctcatagccgccaccgcagcttcatagagataatggacaacatggacaacgacaccaagctgctgcatgacaggtactatgcccggggtgacgatgtcatgctcccagaggttccatatgaccagttccgtgctgggtcgcagttctttgtgctcacgagaaggcacgccatcatggtcgtgagggatatgcggctttggaagaagttcaagttgccctgtctgatcgagcgcagggattcatgctaccccgaggagcattacttccccacactgctggatatgcaggatcctgaggggtgtactaagtataccctaacaagggtaaattggacggattcggttgcaggccacccacacttgtatgggcctggagaggtatctgcgagcttgatcagggagctgaggaagtcgaacatgacacactcttacatgttcgcccgcaagttttctcctgagtgccttgagcctttgatggagattgcagactcagtcatcctacgtgactagtctgaagcagacaccatttgacggtcggagtttgtacactgaaatgaatg

SEQ ID NO: 266233 - DNA, 1519 bp, Zea mays
  unsure (1)..(1519): unsure at all n locations
acggctcgaggtcactgcaaagttttaaattcagttattggacaaggctgcaagattgggaaaaatgttctgattaacggctcatttatatgggacaatgtcataattgaagatggatgcaaagttagtaactctttagtctgtgatggtgtccatctaagagctggtgctgttgttgaacctggttgtgtactgtcatttaaggttgaagttggaaagaatgttgttgttcctgcccactcaaaagtttcattacttcctcagccttcaaatgaagatagcgatgaagaacttgagtatgctgacactaactctggaattgcagatagtccaccattttccagtatgaggagtaatggtgatcaagcaactgttccttcagaagaagatgagttgggaacatccgagactggcacctgtggtgttgtcggttacatatggacaagtgttgatagtgggatcatggaagaatggagacaatcaattgccccgattcctaaagaaaagcttgaagagctgcagcatgctgtgcctgatgatgataggtcagaagatgaatccaacaatccaactctaccagataaagatgattcttcagacagtctggttgaggatgatgatcatatttctaagtttgagaaagaggtggaagagacattccaacgagctctgggtggcggcgttaatcgagataatttgatactagagattaatggcctaaggttagcctacagccttcaacatgcagattgtgctggagctgtgttctattctgtcatgaagagtgcattactggctgcacaatctagtaatgatactcttttgaagacaactgctgatgcacttggcaagtggaaggatcttttgcgcaattacaccaagacagttgatgaagagatggagatacttttaaagtttgaggaaatgtgtcaagagaccacaaaagatttttctccgctgtttccaaagatcttgccatacctctatgatacggaggtagtaagtgaagatgcaattttgagatgggcggaagagaaagaacatgctgatgagtctgataaagtttttgttaaacagtcagaggcttttattcagtggctcaaggaagctgaagaggaggatgacgaagaagaggaataaccctggagttgagctggcactcgaattctttcatgcattgtgagcgcaggatctgatttgagtgggtctctcggtgagttctcgcgagcagcaagttttgcaacctgtaattgcctgtacatcaacacaacacaattttgtccctaaccgcaactggtggagagtagcaaggagcgatttggcgtgaatgaaccaaaatgatcccagtgtagatgacatgctataactgtgctatctttgcttggttgacgcttgggcgaagtcttcgccacatttgtttaactggccatcacctgtttcttggcacccagccggcactcgcacagatctttaataaaagcttgtttagataaaaaaaaaanaaatatattattttaat

SEQ ID NO: 266234 - DNA, 734 bp, Zea mays
tcgtcggcgtccgatctttcctttccttttggcgcttttctcctgcccaccaccccgccacaaccctttcccttctctgcttgcttgctgctgcagtgctgcctccccctcgcccagcagcagggagcagccatgccaggggaccacggctccaagggcgacatctccttcgccggacgcttcacggccagcgccatcgcagcatgcttcgcagagatatgtaccatcccgctcgacacggccaaggtcaggctccagctgcagaagaacgtcgtcgccgccgccgcctccggggacgccgcgccagcgcttcccaagtaccgcggcctgctcggaactgccgccaccatcgctagggaggaaggggccgcagcgctctggaagggcatcgtcccgggcctccaccgacagtgcatctacggggggctccgcattggcctctacgagcctgtcaaatccttctacgtcggcaaagaccacgttggggatgtccctttgtccaagaagatagccgccggcttcacaactggtgccatcgctatcagcatcgccaaccctactgaccttgtcaaggtcaggctccaggccgagggcaagcttgcgcctggtgtgccacgccgctacactggcgcaatggatgcttattccaagattgctagacaggaaggggttgccgctctgtggactggccttggaccaaatgtagcgcggaatgctatcatcaatgctgctga

SEQ ID NO: 266235 - DNA, 687 bp, Zea mays
cggacgcgtgggctcgcccagcagcagggagcagccatgccaggggaccacggctccaagggcgacatctccttcgccggacgcttcacggccagcgccatcgcagcatgcttcgcagagatatgtaccatcccgctcgacacggccaaggtcaggcggcactacgagctgctggtggaggacgtcgacggcatcgagtcgggccgcgtcccgcttccggcgtacgcggctgacggcgctgccgaggaagggggcggtggcgggaagaagggaagtggcggaggagggacccatggggacaaggggtcggcgaagtccgccgagcaggagcgtaggaagggcatcgcctggacagaggacgagcacagattgttcctccttggacttgaaaagtatggcaaaggtgactggcggagcatctcgcggttctttgtgatctcaaggacgccgactcaaggagctagtcatgcacagaagtactttatccgtctgaactcaatgaacagagaaaggcggcgatcaagtatacatgacatcaccagtgtgaacaatggagatccatctactgcacagggtccaatcacaggccaaacaaatggtcaggctgcaaatcctggaaaaccatctaagcaatccccgcagccagcgaatacacctccacggcgtcgatgcttatggcacaacaat

SEQ ID NO: 266236 - DNA, 1276 bp, Zea mays
gatcagaaagaaagaagcacgcgcatctctcacccgagcagcacaaggaagcacgcactgccccacacttgccagcccgctgcactgcacacacgccctcccactcgctccccggtctagcctcgtcccaatcccacatcgtctccgaaatctctccatctaccggcggcgcaagcccgaccgcgctgcctctccttctctctccctctccccagtctccgcgcgaagttctcttctctcgcgtgctcgcatatagtcgcatcgttagggcacgtcctgggagagggaggccttcgctacctccgtggcagcgacagacgaccatgaaggcgctggtggtgacggtgcttctcctcctctcttccaccctcgccgcggcacagtggtgcgtgtgcaggcaggacgcgtcacaggccgcgctgcagaagacgatcgactacgcctgcgggtcgggggcggactgcaactccatccacgagacgggggcgtgctacaaccccaacaccgtcgcggcgcactgctcctgggcggccaacagctactaccagaacaacaaggccaagggcgccacctgcgacttcaccggcaccgccgccctcaccaccagcgacccaagttcttcaggctgctcttaccctaccggtgcaagcgccgttggaaccatgaccccgaccactgcaggcaccatgggaggaggaaccgcagggacctccacaggcacaggcacagccggcgctggcatggggacaggcactgccaccggaactgcgggtacggggttcggcggcctaggaccaggcacggacgctagcatggacaccgcggcggcggcgggcttgctcctccccccaagagctgctggtgggctggccgccgccctcgtcgcgcttctcctctccgccatggtgctcgcgtgacgcttttggtatggcctcggaaacatggcctgcctgttgctagtagaaagctagcactgcccttttggtaacggcgtttcaggagtactgtgctggactattgagagagaggctcctcctctgtgactgtgactgtgaccacctcacgttctgcgtactctgtaatctggtaggatgcctgtctctatcatgattcatgaaggacgattggtctgtctttcttttatcgtgctatttattaatcgtgtaaatgtactaccagcgaagggaaggcactggtagctaggttagctcgagtccggatggaatgataatgctactaatacaaacaatgccgtagtgtgtgcgcgtatttttcc

SEQ ID NO: 266237 - DNA, 425 bp, Zea mays
gcgacggctagtccgaccgcactgcccctctccgtgcggagatctctcgcgtgctggcaggcgcgtcctggtgactgggacacgggagaagagaccttggtgggtggcagcggcaggccatggaggcgctgctggtgacggtgcttcttctcctcctctcctctaccctcgccgcagcacaatggtgcgtgtgcaggcaggacgcgtcgcaggccgcgctgcagaagaccatcgactacgcgtgcggctccggggcggactgcaactccatccatgagagcggggcgtgctacaaccccaacaccgtcccggcgcactgctcctgggccgccaacagctactaccagaacaacaaggccaaaggcgccacctgcgacttcgacggcaccgacaccctgaccaccagcgacccgagctcttcgggc

SEQ ID NO: 266238 - DNA, 494 bp, Zea mays
cgttaagtttccggcccaacaacctttccgactggcccaaaccaactcccaagtcccatcccaaccgaggcgacgcagccgccgccggctgaacctaaacccctcgacgcagccgccgccggcgtaggggagaggggcacgggcacggcacggggacggaaatggcggaggggaacggcggcagtcgcgccgaggctggcgtccgcgagtcctccgagccctcgccgaagcgctcctcgatccccgccatgccgcacgaagaatgcgtcgagggcatccggtccgcgctcaaacatcccacggtgcggttcctgagggagcggatggagagtgccgggtgcctggtgtggccgcgcctcatccgggcggcgacctgctcctccgccggcggctaccctagccagcgagggatacaagttcgctgccatcacatgacctgtctagatgagattgctcaggtcatgatgcatgaactgatacatgcttatgatgac

SEQ ID NO: 266239 - DNA, 1246 bp, Zea mays
ggtacatcttcttctccaaaccccattcaatccacaatccgcagaagcactagacgcgcctcgctgctgctttgcttcctcagattctggagaaaggggaactccaggtctccggcaaggagagggaggcgcagctctccagccagttccgcgacatcgcaactattgtcatggagaagaccatcaacccagagacccgccgcccctacaccatcaccatgatcgagcgcctcatgcacgagatacacttcgccgtcgacccaaacctcacctccaaggaacaggctctaaaagttatcaagaagctcacagagcatttccccataaagcgtgcaccgctaagggtgcggttcactgcaccaaaacccaattttccaggccttacggagaagattggcggatggaatgctaccataatttcaaaggatgaattgagcactcagccttctattgtatgcgagatcgagccatctcttctgcgctcatgtgaggagcggttgaaggatgtccaagggagggtcgaagtgctgtctgtctccacgcacgtagaaagtggcccatctgtggaacaacacaacagtgtggaagtgccacacgcggctcctgtaaaggaacctgatgctgttgctcagataagtgagaccatgcagaaacagagcatttctactgaaagccagggcaatgcacaaggcaagcaacagagaaggtgcaaggagtgtgatgtactcgtggaggacaagctttacagagagcactgcaagagtgggtggcacaaacacaactacacacgccacaagaatgggctcccgcctctcagccaagaggagtgtatggtggagatggaattggccgactccaagaaagaccttaaagactacgatttctgatgaggatggttaacaaggggtgcacagggcatgaagttgtttccaatccgtttttattttaacgaggaagtgaggagtgaggcacatggtcgttttctgatgctgtataggaattattagaatgagatggtttagccacatctttgaactgagggtagaacctgtctgtctgtggattgctttggctttgtatcgtggacgagtgaacttggtagtggcattccaaattcgacattctatgcgggctagaaacttcgcttgttttaatacttatcggcatcctttctttttggttttggtttgtgatagcgttgccttttgttgttgctacacctgatggcaatttcatttgagatggc

SEQ ID NO: 266240 - DNA, 1280 bp, Zea mays
gtaaccctagccgcctgaggccgacgccaaatctctcctgaccgcaacggggaactcgacccccgcctccgccaccgccaccgcgccggtcgccgacccactcagatgaacacgtctccgtccagatacagggcaatgatgggaggctgggggggttcggatgggtacgagggatcaaagaggacgcgaatgatgatggaatcgaatccctacttcgcagtgaacgcagggagcccactggatgtctcaaagagggccaggatgatggaaccaggtgctccctattttggggctatgggaagcagcgccactggtgccggcggcggcttctaccagccctttaacagcaacctagctggtgcagggtctagcaccggtatccaaagcttcccatgtgtccggctgcgaggcctcccctttgattgcaacgacattgacgtctgcaagttctttgtggggctggacatagtggactgcctcctggttaacaagaatggccgcttcactggtgaggcttttgtggtcttcccaacagctatgcaaacagaatttgctctgcatcgtaacaggcagaacatgggccggaggtatgttgaggtgttcagatgtaagaagcaggagtactacagtgcaatagccaacgaggtgagccagggtggttattttgagtcggagtaccgccgctccccgcctcctccgaggcctaggaagccgtctgaagataagggcagcatggagtacacagaggttctgaagctccgcgggcttccctactctgccaccactgaggacatcatcaagttcttcctggagtacgagctggcagaggagaacgtgcatatcgcctaccgctccgatgggaaggccacgggtgaagcctttgttgagttcccaacagctgaagttgccaagacggcgatgtgcaaggataagatgactatcgggacgaggtacgtggagctgttcccgtctaccccagaggaggcgagcagggcgagaacccgaggcaggcattgaagaaacgaatggcttggctgaatgatctctggttgcatgtggctgcaatcgactgtagttttcacttcgcatgcttatctgtatcgcttttagattgtgttagttgtgtgtatttgacttcttatatgcgaactgaactgtaacaactttcctttgttggccggccgcacatgtacggcataatcatttatggattttgctacgtttgagtttcaaaaaaaaaaaaaaaaagaaaaaaaaataaaaaaagaaaaataaaagga

SEQ ID NO: 266241 - DNA, 428 bp, Zea mays
atcatcttttctcatttttttctgttgggtttcaactgtagcctgacatgacttattgccacaatcaactgttatgtagtctttagtacgaattcttctaggatttttgaaccaggcccgccctattttggggccatgggcagcaacactggtggtgccagtggtggcttctaccagcccttcaacagcaacttagctggtgcaggggctagcactggcatccaaaactttccaggtgtacggctgcgaggtctcccttttgattgcaatgacattgatatctgcaagttctttgtgggactggacatagtggactgcctcctggttaacaagaatggccgcttcactggtgaggcttttgtggtcttcccaacagctatgcaaacagaatttgctctgcatcgtatcaggcagaacatgggccggag

SEQ ID NO: 266242 - DNA, 498 bp, Zea mays
cggacgtttgggttctcgtgttctcccctccccgcgtgcgctccctttcgtggcacgactgggcgaccgccgctgtacgccagctgctcagatctcgtcgggccccttcgccggcgaccatcacctgttagggcaatgatgggaggctggggggtttcggatgggtacgagggatcaaagaggacacgaatgatgatggaatcgaatccctacttcgcagtgaacgcagggagtccattggatgtctcaaagaggtctaggattgttgaaccaggcccgccctattttggggccatgggcagcaacactggtggtgccagtggtggcttctaccagcccttcaacagcagcaacttagctggtgcaggggctagcactggcatccaaaactttccaggtgtacggctgcgaggtctcccttttgattgcaatgacattgatatctgcaagttctttgggggactggacatagtggactgcctcctggttaacaagaat

SEQ ID NO: 266243 - DNA, 313 bp, Zea mays
cggacgcgtggccctagccgcctgaagccgacgccaactctctcctgaccgcaacggggaactcgacccccgcctccgccaccgccaccgcgccggtcgccgacccactcagatgaacacgtctccgtccagatacagtgaacgcagggagcccactggatgtctcaaagagggccaggatgatggaaccaggtgctccctattttggggctatgggtagcagcgccagcgttgccggcggcggcttctaccagccctgtaacagtaacctagctggtgcagggtctagcaccggtatccaaagcttcccatg

SEQ ID NO: 266244 - DNA, 337 bp, Zea mays
ctctctctcccgcggctgcactgcggcttggatcacatcctcgtcggagctaccatggctgggaagcttattgcaaacctgattgtcatgggctctacgtttataggaagagctatgcttcaggcatatcgtaaagcacttgataatgcaaataaatctggtgtggcccatgaggcaataaacaatattcgtagagcaagcaaaacaatgaccgaacaggaagcgaggcagatactgggtgtctcagagaattcgacgtgggtagagatcgtacagcgatacgataacttgtttgaaaagaaacggctatctgggatcttctacctacaatcgaaag

SEQ ID NO: 266245 - DNA, 623 bp, Zea mays
ttcacgcgtccgggtgaaatcactggtgtcaatatccgctgatctgatgcatgacttcaagactggacatcttacattaacatcacctagatcaatgattattgctcaggctattggcactgccatgggctgtgtcattggaccgctgacatttttactgttctacaaggcttttgacattggataccctgatgggtactggaaggcaccatatgctctaatctaccgcaatatggcaattcttggtgtccagggcttctctgctctgcccctgcattgtttgcagctgtgctacggattctttggatttgcagtggcagccaatctgatgagggacctcttgccaccaaagtacggcaaatgggttccattaccaatggcaatgggggttcccttcctagttggtgcgagctttgccatcgacatgtgtgtggggagcttgatggtcttcatctggcacatcattgacagaagtaaagcatctttaatggtgccagcagttgcatctgggttgatatgtggcgatgggctttggatcttccctgaatccttgcttgccttggccaagatcagtccaccattgtgcatggcattcaggtcttcacactagagtaacaaaatgc

SEQ ID NO: 266246 - DNA, 1628 bp, Zea mays
cttaagttgatggatctaccaggtgtggaggcgctgcaggttccagggaactctgatggacaaacattaatcgttcgagaaggggataatggtgttgcatattcatggaattcagcagagttaaaatggaacaaaattggtgaagtagtggatggacctggtgaagctgctcaaggccaagttcatgatggtgttcggtatgattttgtttttaatgttgatattggagatggagaacccatacgaaaactaccctataatcgttcagatgacccatacacagtcgcggacaagtggctcctgaaagaaaatctgcctttgacatatcgccaacaggttgtagaatttatactgcagaattctggccagaacaactttgttccagatccatcttttcgggatccctatactggggccaatgcatatgtgcctgggcaaccatcatcatcatccaatggtaatactccggaaccaattttcaagcacataccgaagagtggaatgctgtcatttgagacagctcactttgatggaatcctaaagaaagttgcagagtttaattcacaactttcatctgactcggaacagaaacaattatctctgtctgagacggagatgtcaagattacctgccatagtgaacgtgttgaaagagacatcattttatcacacaagtaagcttgcagatgctgatatgacattgttggtaaagatattgaagtcttggcctccacaaatgatgtttccagtcattgattttctgagaatgttcgtgttgcatcctgatggagcttctttacttctcaagaccatcgaaactggaaatgatatacttttggaaacctttcgtaaagctgttgcgtcgcctgtacagccagcaaatttgcttacagtcctcaaagctgtgacaaacttgtttggcaactcatgcttgcaccagtggctgaggacccactgtgctgagatcattgattcggtgtcaaactgcaagtcttcttttagcaagaatgcacacttggcatatgccacgcttctactgaactacgctgttctttcgattgaatcaaaggaggaacagagtcaggcgcagattctttctgccgcccttgaaatcgccgaagatgacacccaagatttcgactcaaagtaccgggcacttgtcgcaatcggttctcttatgctcaagggccttgtgaagtcccttgccctcgaccttgatgttaagagcgttgcaagcagcgccaagtcttcaatggaccagaagattgcggaagtaggaggtgacatcgaatcgctaacaagatgactacaataggtttgcgtgcacttggtcgttgcggacattgttgctccttcgctcgaggcgctaccatgcataacttaaagccggtctgtgttgcagaccaattcagacgccctccacgtctctaccgaaaaatcgcaatgggttatgattattttttcacctttgtaaccatcatggaagtgtggattttgggtggtagcgcttagattttgtaaattgaatagctgggctactctgcagatacagttcaatatttcccccggagggatgcagatcagacacgcagcccccgtttcgatatcatctgcaagaaaaagagaaaa

SEQ ID NO: 266247 - DNA, 435 bp, Zea mays
cccacgcgtccgagccaacaagatggccgcggacctgctcgtcatgggcagccatggttacggcttcatccagagggcgttcttgggcagcgtcagcaaccactgcgcgcagaactgcaaatgcccggtcctcattgtcaagaggcccaaggagtagaaaggctcctcgcatgtacgctgcagcttagccaataatgtttcatgggcgaccatataggcatatatgtacacacttcacatcccattgcatggcagtgtcttcccttccctagttcaacaactagctttctgctggaataaggtgttcagagttcagacagagtatgtactgtacatactatcttcttgcatttggtactcttgtttagagaaaagcgttccgtaaccttcggttgcctaaaaaaaaaaaaaaaacaaacaaaaaaaaaaaagagt

SEQ ID NO: 266248 - DNA, 407 bp, Zea mays
gagggccccgccccgacgccctccgccgaggtgccccctgcccccagcgccgccggcgccgtctcccccgccgccgccaagtggttcgccgccgctgccgccgtggccgccgccgccgccgccttctactgagagaagggagatctgcactgccccgtgctgtaatttatttgttatccgtgttgagccgttgattccttctttttttttcttttcaccattttttttcttccatccgaatatccatattccattcggcattcgattcagtaggactggcggcatctgttcgttcgtgttgctacagtgtaggaccgtggctcggacagattggttgggctggctcggtggtgttgtgctccgttcatccatttgtataataccctgttgattctctttcgcaaaaa

SEQ ID NO: 266249 - DNA, 299 bp, Zea mays
gttcatgtgaggaccatcaacaaaagacgggtcataaatttatgcttccttgttttgtggctaggcaaagcagtggtgatatcggttactaactgtagaatatacgtctgttgagatgtcctagtatgactggcttcggcgggcagctgatttgtgttttgccttttgttacttattgccaaatttatagaggttgatttgaggtgccaacaatttatcgtaaaaaaaaaaaagtagttaaaaaaaaaaaaaaaaaaaaaaaaaaaaaaaaaagtaaaaaaaaaaaaaaccacgcgtcc

SEQ ID NO: 266250 - DNA, 401 bp, Zea mays
atcagataccatgggacgtactgtagtcaagatgtagctatcaaagtactcaagcctgagcgggttagcgttgatatgctacgtgagtttgcacaggaagtttatataatgaaaaaggttcgtcacaaaaatgttgtgcaatttattggtgcatgcacgagacctcctgttttgtgtattattacagaattcatgcatggaggcagtatttgggacttcctttacaatagacgaggaaattttcaactcccggatgtgattagaattgcatctgatgtgtccaagggaatgaattacttgcatcagattaatattgttcatagggatttgaagtctgcaaatcttcttatggatgatcaggttgtcaaggttgcagactttggggttccagggttaaagac

SEQ ID NO: 266251 - DNA, 423 bp, Zea mays
ggtgatctagcaatacttgaagatgaacaaccgtatttccattctagtgatgctcatcgtcgatgtgtctgttgtcctcctgctcaattcccatgtagggttatgcagctgctacaaccgcatctttagttttggtgacgataccatggacactggaaatttcattcacttgattgggaaggccccatctaagtacaaggaagccccctatggcaagacattttttagacatgcaactggccgcatttctgatggtcgtgtcctcattgatttctatgcggaagcactaaaactgccaatgataccacccattttacctgagaagaactccgggtgtttcccacatggcgccaacttccctgtgtttggtgccacggcacgtggcaaagtcttctttttagggagccccttgtgtataggcac

SEQ ID NO: 266252 - DNA, 922 bp, Zea mays
cttgaagatgaacaaccatatttccattctagtgattctcatcgtcgatgtgtctgttgtcctcctgctcaattcccatgtagggttatgcagctgctacaaccgcatctttagttttggtgacgataccatggacactggaaatttcattcacttgattgggaaggccccatctaagtacaaggaagccccctatggcaagacattttttagacatgcaactggccgcatttctgatggtcgtgtcctcattgatttctatggtaaacctcccaaggatggaaatatcatttcagatgtcatcgcagacataagccatttcatcgaggagcttattgtcgttaatggggcgaaagcattcgtggtcgccaataactttcccgttgggtgtctggcatcatacctaagtaggttccacagtgacgaccatgaggactacgatgagcatgggtgccttaagtcgttcaatgagttctcccaaaagcataatgagcaactttattctgccatcggaacaaatcagatactcttacccgaatgtgaaggtaatctatgctgactactccaacgccaccatggaattcatcaagaagcctagcagatctggtattggtgatcctctagtagcatgttgtggcggcaatggaccataccacaccagcatggagtgcaatggcacagcaaagctttggggtgacccacaccactttgccaattgggatggcatgcacatgacagagaaggcatacaacatcattatggaaggggtgttaaatgggccatttgctgatcctccatttccacttagttgctaggattgttacgctaggaattccttacaacatgtagccaatattttttataataatggaagtattttggatttatactaaaaaaaaaaaaaaaaaaaaagggcggccgc

SEQ ID NO: 266253 - DNA, 732 bp, Zea mays
ttttcatccgtcctcgtcggcatcccagccacacacacacactcacacaccgcacctagccacctaccctgctgtcccccgtgccgtcgccgatggagtccttgggcgtgctgctgctccaccccttcaacgcgtacctggagcaggagctggaccgccgcttccgcctgtaccgcttctgggagacgccccgcgaggagttcctccgcgcgcacgcgggcgccgtgcgcgccgtcgtcggcaacgccagctacggcgccgacgccgcgctcatcgacgcgctcccggcgctcgagatcgttgcctccttctccgtcggcatcgaccgcgtcgacctcgccaagtgccgcgaccgcgggatccgggtcaccaacacccccgacgtcctcaccgacgacgtcgccgacctcgccgtcgggctcgccatcgccgtgctccgcaggatcccgcaggccgaccgatacgtccgcgcggggctctggaagtccaggggagactacaccctaaccacgcggttcagcggcaagcgggtgggcatcatcgggctgggcaggatagggcaggcggtggcgaagcgagtggaggcgttcgactgcccggtgagctaccaccagcggacggagcagcgggcgacgtacccgagctacacctactacccgtcggtggtggagctggcggcgaacagcgacgtgctggtggtggcgtgcccgcttgacgcgcagacgcgccaca

SEQ ID NO: 266254 - DNA, 1501 bp, Zea mays
  unsure (1)..(1501): unsure at all n locations
gactgcaggagccgcctccagtatcccccgtcaggggttgcaagacagaanacaggggacctgatctgaccaggcagatcgagtgggttgccgtcncgtgcaaccgcaaccgccgctgggattatatagagacccctattacatatatcggccgctgtggcgcttgtcgtcgatcgttccatcgaccggccggccggccagcctagctcttggctcttgctccgatcggatcgagcgccggacaaggcaaggcagccgtacacgtacgacgatggcgcagggcagccgcagcgctaccgtgcccgccgcagcgtccttcttcgcccttgtcgccgtggccccgctgctcctgtgctgcgcgccggccgccgcggagctggcccggctggagcacccggccaaggacggcggctcgctcagcctgctcgtcgtcggcgactggggccgaaagggcacgttcaaccagtccagggtcgcccatcagatgggcagggttggggagcagctcagcatcgacttcgtcatatccaccggcgacaacttctacgagaacggcctgacgggcacggatgacgaggcgttcgagcagtctttcaccgatatctacacggcgaagagcctgcagaagccgtggtacctggtgctgggaaaccatgactacaggggtgacgcgctcgcgcagctgagcccggtcctgcggaagatcgacagccggttcatttgcatcaaatcattcgtcgtcaacgcagaaatcgtggagttcttcttcgttgacaccaccccgtttcaactcaagtactggactcaccctaaggacgatcactacgactggagaggggtggcgcctcgggaaaactacataaacaatctgctcaaggatttggacggggccatgaagacatcgactgcggcgtggaaggttgccgtgggccaccataccatgaggagtgtcagtgatcatggtgacaccaaggagctactgcagctactgcttccagtcctccaggccaacggcgtcgatttctacatcaacgggcatgaccactgcctggaacacatcagcagcagagacagcccaatccagtacttcacaagcggaggcggttccaaggcatggagaggagtgcagaaccccaccgaagatgacctcaagttcttctacgacgggcaaggcttcatgtccctccagctagaccgtagccaagccaagttcaccttttacgatgtcgacgggaaggcgctgtacagttacacacggtcgagcctgatggaaacaggccaccacctccaagcctccggctacgtcaacgaggaatgaagcaggggcgagtcagcatgcaccgctggagaactgagatcgatatatgcagttcaagcgtacgtattaattctcgagtgcttgatgtggttcatctgtcaagggcaccttttgttaggtgtggttgtgtcttttgtgttgaaatgtacaatgcattgggagcttaaaaaatggttgatgaat

SEQ ID NO: 266255 - DNA, 631 bp, Zea mays
ccgaagatgacctcaagttcttctacgacgggcaaggcttcatgtccctccagctagaccgtagccaagccaagttcaccttttacgatgtcgacgggaaggcgctgtacagttacacacggtcgagcctgatggaaacaggccaccacctccaagcctccggctacgtcaacgaggaatgaagcaggggcgagtcagcatgcagcgctggagaactgagatcgatgcagttcaagcgtacgtataaattctcgagtgcttgatgtggttcatctgtcaagggcaacaacagttaggtttatatgtgtgcccttgcatctctcgacatctgtcactgccgtccggtactatttggggtcatgccatcgattcgaaaacatgacatggtaggggcagccatgatgtagcaaaaaaaaaaaatagtgcaaatattcattatcgaggagttaaaacattaattgtgtggacagcggccgagcataggaccaaaatcagcagggggcaatcaacagattatgtaaaaattacatggttcagtggtgcgccaataaagacccagtatatatatggaaatatatcgtatgcaatcaagcgatgtgctaaaaaaaaaaaaaaaaaaaaaaaaaagaaa

SEQ ID NO: 266256 - DNA, 960 bp, Zea mays
tcccacgcgtccggcgccgaatcgcagataatgtagagtgcgccgcgccgtgacggcgtggatgagaaagcctccaaacctctctgtttcgggctctccgtccccggcgtccaacacccatactctccccaggttgtgtgccacacccacactcaactatatacgaaaaccgccggcgcctggcccctaggccctagtcacagacccttgttctttcttcgacgcgcccccgggcatggcgaaccgcagtgttgccatgggcttggccctcgcgttcgtggccatgaccgcgctctgttgcgcgccgggcgccgcggagttgccccggctggaccacccggccaggagcgacggatcgctgaagctgctcgtcgtcggggactggggacgcaaggggactcacaaccagtcccgggtcgccgaccagatgggaagggtcggggagaagctcgatatcgactttgttatatccaccggggacaacttctacaagaacggcctcaagggcgtgcgcgaccaggcatttgaagaatcgttcgtggatatctacacagctcaaagcttacagaagccatggtactcagttctaggaaatcatgattacaggggcaatgcgctcgcgcagcttatcccagtcttgaggaagatcgacgaccgattcatttgcatgagatcgttcatcgttaacgcagaacttgtggacttcttctttgtcgacaccactccgttccaactggagtattggactcacccgggcaagcatcgttatgactggagaggggtggcgcctcgaggcaagtacattgccaatttgctgaaggatctggatgtggctatgaaggaaatcaacttgcaaggtggaagattgtggctgggcatcacaccatgaggagtgtgagtgagcacggggaccccgaggagcttctggaattactacttccagtcctcaaggacaatggc

SEQ ID NO: 266257 - DNA, 405 bp, Zea mays
tcgcagacccttgttctttcttcgacgcgcccccgggcatggcgaaccgcggggttgccatgggcgtggccctcgcgttcgtggccatgaccgcgctctgttgcgcgccgggcgccgcggagttgccccggctggaccacccggccaggagcgacggatcgctgaagctgctcgtcgtcggggactggggacgcaaggggactcacaaccagtcccgggtcgccgaccaggtaagtaacggcagcgccatcttatacattcctagttccgagcttccgttgactggaagttagtgcgtacttcaaacaccttggcctttaacgccgttactgttcatccaagtagaacatttgtttggcttcggcttatgccgattaatctttgtttatttgcacctggaacgcc

SEQ ID NO: 266258 - DNA, 354 bp, Zea mays
tgcacattagcagcagagacagtccactccagtatttcacgagcggaggcggttccaaggcatggagaggagtcttccatccaaacaaggacaagctccgattcttctacgacgggcaagggttcatgtccctccagctgaaccaagaccaggctcactttatcttttacgacgttttcgggaacatactgtaccgatggagctcgagacatccccagtcttccacgtatctcgatgaggaataaattggattgattttgcgccattgatatgtacaaaacaccgcctgccaactgtcatgtatgtgaaatgatgagtgttagacgcaaagaaggttatacaccagttagggtt

SEQ ID NO: 266259 - DNA, 544 bp, Zea mays
cgttccggtattgaattctcggagtcgagccacgcgtaagcccacgcgtccgacctctagtaaaaactcacctctatgaacgtggatcttactattgctttgacccagaatcctgggacacaatacgcaaggacaactttgttctccactatgagatggtagagaaaaggccagttctgccttcaacatcaccaaaccttagatgaaaagaaaatctaggacggggagaggaacaaagaaacatataacgatctgcaggaaggactaaggaggcaggaagtcgcagaacagaattggggatgtccaattaacaccccttgtaattactaaaactgtgagcgaatgttgcgtttttcttgcactccccccttcgccctcctaattaaactgcctaatgttcaggattagtttttctccagcttcaaaataacaacgcatagatggttttgatgttctgtcctctgtccaaccatatcatgtcgatgctcagcgaaagataaaatcataccaaaaaaaaaaaaaaaaaaaaaaagggcggccgctc

SEQ ID NO: 266260 - DNA, 1087 bp, Zea mays
cacatcccacaaccattattcttgttccactgcatcaggtcgtccaactcaccaagcggcaagcgccatgccttcttccgcgcaggttctgctctgcctcgccgccgtgctcgcggcggcggcggccaccaccgccgaggcgcactcgcagtgcctggacaacccgccagaccggtccatccacggccgccagctggccgaggccggcgaggtcgtccacgacctccccggtggcctcagggcctacgtcagcggcgccgcgagctcgagccgcgccgtcgtcctcgcctccgacgtcttcgggtacgaggcgccattgctcagacagatagcagacaaggtcgccaaggcagggtacttcgtcgtcgtgcccgatttcttgaagggagactacttagacgacaagaaaaactttacagaatggctcgaggctcactctccggtgaaagctgcggaagacgctaagccactgttcgccgctttgaagaaggaagggaagtccgtcgcggtgggaggctactgctggggagggaagctgagcgtggaggtggggaagaccagcgacgtcaaagctgtgtgcctttcgcacccgtacagcgtcactgccgacgacatgaaagaggtgaaatggccgatcgagatcctgggggcccagaacgacacgaccacgccgccgaaagaagtgtaccggttcgtgcatgtgctgcgtgaaagacacgaggttccctactacgccaagatcttccagggagtcgagcacgggttcgcctgcaggtacaacaccaccgaccctttcgccgtcaagaccgcagagacggccctcgcctacatggtcagctggttcaacaagcacctcaactgaatgaagcctgcactgcacccaccagactgaattcaataaaccacagcagtgctgtgatattttgtttcgattcatggctccccagattgatttgtcatggctaagacctctactactgtaatttccttcattttttgtctcttcaaactctctgtattcttttttttgctttttatgatcgcaataaagttcagtaggggtatacacctcctggacgctttaaaa

SEQ ID NO: 266261 - DNA, 773 bp, Zea mays
cttcgtcgtcgtgcccgatttcttgaagggagactacttagacgacaagaaaaactttacggaatggctcgaggctcactctccggtctgttctatgcacttttcgttactctgtccctatcaatatatatatatcgatatctttttttcttcttcgcgtcgcaagaaactactgcaagcaaaattgattggttggtcgcggaccctatcgatctttacaggtgaaagctgcggaagacgctaagccactgttcgccgctttgaagaaggaagggaagtccgtcgcggtgggaggctactgctggggaggtatgtgacatccacgccaactgaaacgaacactccattcagttcaggcaacccgcccggagcgttctgtttctcacatccggccgaccttgttgctgctgcttcctcttcgctggcatggcacctggcagggaagctgagcgtggaggtggggaagaccagcgatgtcaaagctgtgtgcctttcgcacccgtacagcgtcactgccgacgacatgaaaggtgcagtgcagtgcagtgtgctcctcctcttcttctatgctgcttcactagcctcaccgcatgtgttcgttcgaaatcgaaacagaggtgaaatggccgatcgagatcctgggggcccagaacgacacgaccacgccgtcgaaagaagtgtaccggttcgtgcatgtgctgcgtgaaagacacgaggtgagctccaagctacgactgattgcaatgacactgtgtggatcggataccggccag

SEQ ID NO: 266262 - DNA, 394 bp, Zea mays
aagctatcttatcgttcctgcaactatttgtttgcttcttttccattggatcttaccgttgtggagtatgcatacgagaatttggttggtgcaatatcagattgattagaaggtgtagcttgtatgatttgtacgtataataatgtgctggatgtattgtaatacacggctatgcatattgcaacacctaccatttgccgttacctatcttgagtgcgtcctaaattgtaattgcagccaagcagcgaaatgtgtagaactaaagaaccctgagcgtcaaaaaaaaaaaatataaataaatgaatcaaaaaattgatatgataaacgcaaaaatatctactaatgaaatttccataataagttaaagggtccaaacttgttgggtttctaaaat

SEQ ID NO: 266263 - DNA, 1291 bp, Zea mays
ggagcacaagtatttcgaagatgcatccattttgtatgaaaggggcgtgaaaatattcaagtgtgggctcatgttaaggccatgtgggtaacctaccttacaaagtttgtacatagatacaagagaagcacgttagaacgagcaagagaacttttccatgaagctgtccaacaggctcctccagaggaaaagaagcccctatatttacaatgggcaaaactggaagaggactatggtcttgcaaaacgtgctatgaatgtatatgatgaatctgtaagagctgttcctggcagtgaaaaaatggccatgtatgaaatctatatagcacgtgctgccgaactctttggtgttccaaggacaagacaaatatacgagcaagcaattgaatccggcctcccagacaaagatgttctgacaatgtgcatgaagttcgctgagctagagagaagccttggggaaattgatcgttcgcgtgccatctatgtgcatgcatccaactatgctgatccaaacaatcctgacttttggaagaagtggaatgattttgagattcagcacggtaacgaagatacattcagggagatgcttcgtatcaaacgcacagtggctgctagccgcagtcagacacatttcatactgccagagtacttgatgcagagggatcagaagttaaacctggacgaagcagttgacactctgaagcgtgctggcgtccctgaggacgagatggcagctttggaaaggcaactggctaccggaccatctactgccccaccagcagcaccaagcactgccccagcctctgctaacaggatgatgaactttgtcagtgctggagtagaggcccaggttgagagcagcaggcaacaggctgctaacaatgaggacattgagctgcccgatgagagtgacgatgaggaacccgatgtccaaattgcggagaagagcgttcctgctgcagtatttggtgagctcggcaagagagctgccgagaacaatgaggaaagttcagctgcccaagggaatgagcagctgggcgccctcgagaggataaagagacgacgccaatagtctacctctgcctgctaagatgagagcccatgtgtgcaccatggcatccgtacgatctttagagatgttgtacttgttacatgtaaacattttttcgagtggaattttactcctgtgcaaagcatttacgtaagttgttcggggtatacccgctgctaatatgatgccgaaatgttattataaaaaattataaaaaaaaaaaaaaaaaaaaagggcggcc

SEQ ID NO: 266264 - DNA, 877 bp, Zea mays
cccacgcgtccgcccacacgtccgcccacgcgtccggtcaagcagcagcagtttgttccaaaggattggtgggtcgaagatctgacggatctcgacattgacgcctacaagcaagtcataacagcagtcaaaaccaagggtacggtgcccaaggatgtgatcggtgaggcgattaaagcctacacttacaagaagctcccgtcactaagcaaggtctcgatgatccatggcgacgcaaaagttcgggctatgctagttaccatcacatgcctgttgccatccgagaaaggttcggtttcgtgcagcttcctcttgaagttactgaaggcaacaaacttgctcaagtgtggagagatgtgcaggaaagagcttatgaagcgcatcgcacggcaactggaagaagcgtcagtgtcagatcttctgatccctgcagtggatggggacaccagtgtttacgacattgacctgattcttagcattgttgaagaatttgtcagacaagatagcaagaatgcccagagacataatggtggcgaagtgaatgaccatgtatcagctcctagtgcatcaatgattacagtggcaaaaattgttgatggatatctcgcagaggttgcgagggacccaaatataccggtctacaagtttttcagcctcgctgagacggtctcggccggttcaaggccggtccatgacgggctgtatcgcgccattgatatgtatctgaaggagcacccaagcttgggcaagagcgacaagaagaggctctgtgccctcatggactgcaagaagttgtcgcccgatgcgtgcgctcatgccgtgcagaacgagcgcctgcctctgaggatcgtggtgcaggtgctgtaccacgacagac

SEQ ID NO: 266265 - DNA, 1560 bp, Zea mays
cgctcggttgctcgggagctttccccttcctgttcctgaagcttccgacatccgaccgcctcctcctcctcgttctactcgccgccccttctagaatcatccagaggcgtgccggtgaagcgcgagagcggtgaggcatggcgatgcagacgggggtcgcgacctccaaggtcctcatcctcgtcggtgcagggatgacgggctcgatcctgctgcggaatggccgcttatctgatgtgttgggagaactccaggagattatgaagggtgtaaatcaaggaacttcttcgggtccctatgacattgcacttattcaagctcagattcggaatttagcccaagaagtcagagatttgacattgtcaaagcccattaccatactgaatggcaaatctgactcgggaggcagtttatcatcctacatactgccagcagcagcagttggagcaatgggttattgctacatgtggtggaaggggttgtctctctcagatgtcatgtttgtcacaaaacacaacatggcaaatgctgttcagagcatgtcaaagcagttggagcaagtttcatcagcactagctgcaacaaaaagacatctaactcaacggcttgagaatttggatggcaaaatggatgaacaagtagaggtctccaaagctattagaaatgaggtcaatgatgttaaagatgacctgtctcaaattggatttgatgtcgaatcaattcagaaaatggttgctggattggagggaaagatcgagttacttgagaacaaacaggacgtggctaatactggtatctggtatctctgccaagtagcaggcggtttaaaagatggaataaacaccaggtttttccaggaaaccagtgagaagctgaagctctcacattcagctcaacctgaaaacaagccagtgaaggggcttgaatttttttcggaaagcaccatggaacagaaagtagctgactccaaaccaattgcggtgacagtcgacgctgagaagcctgagaaaaccgctgctgtaatgggcaccacagtgcacaggtctatcaggttctcatatcggaaggcaggccttgctttgtgatcaaatcctctccgcttgagatgcacgtggccttcctggttgctttttcttttttggcaacaaccttcctggttgctttgtgtgatggtcagaaaacatagaagaataacctgcaactggagtgacagaatttcttttccccgcagtagacaggtgtgcgttatttggttggaattatctccagtcccctatcaattttttttccttggattttgattcattttatgtttcgatttgttgccttatatactgtaaagtcattggaaagaataaataaaacccgaatgttttttttgtcaaacaacaaaaaaaaaagaaaaaaaaaaaagagaataagactaaaaaaagaagacctgcaaatggtatgcactgaaacatatgaaaagagaacatcaataagattttatttttaaaggggcggcccttttaaaggatccaagtttacttacccgtgctttcaaagaaataccttttt

SEQ ID NO: 266266 - DNA, 383 bp, Zea mays
caaaccaattgcggtgacagtcgacgctgaaaagcctgaaaaaacccctgctgtaatgggcaccccagtgcacaggtctatcaggttctcatatcggaaggcaggccctgctttgtgatcaaatcccctccccttgagatgcacgtggccttcctggttgctttgtgtgatggtcagaaaacatagaagaataccctgcaactggagtgacagaatttcttttccccccagtagacaggtgtgcgttattggttggaattatctccagtcccctatcaattttttttccttggattttgattcattttatgtttcgatttgttgccttatatactgtaaagtcattggaaagaataaataaaacccgaatgttttttttgtcc

SEQ ID NO: 266267 - DNA, 2219 bp, Zea mays
cccacgcgtccggtctccagtctccactgcatctaaaaaaaaacgtaaaacccccaccacgccgtagcggagagaagagaagagaggagcgcgcgatcgatgtcgggctccggcgatcgtcgcggcggcggtcctccgggttcccatagtggctgggaaaccatggggaagaagtcgaagaaacccgggcaagccggggggagacagtgggcaccatggagttccacaaatgtgacacctaacacagcaaggccagcatggggtggcagtggttcctcgcacccttctggaaccagctgggctcaagctccagatcatggtgctgctaccagaggcaatcctagaccgccatcacaaacatcgcgccctgttctggctccacctctggcaaatggttggcagtggcaatccaggcctcgcccatctggatctgaagtcaagaaggatgatgctcctccatctggttctgtccctgaggtggagaatgttgatggcaacaatacatcagatgatgatgatgatgatgacgatgatttgagtgatgatatcagtgatgactatgattctgacgcaagtgagaaaagttttgagactcgaaaaacgaacaagtggttcaaagagttctttgaagtattgaatacattgagtttggaacaaattaatgaacaaactcggcaatggcattgcccggcatgcaaaaatggacctggggcgattgactggtacaaagggctgcagcctttagtgagtcatgctagaacaaagggttctacaagggttaaacttcacagggaattggctgcattgctggaagaggagctttctcgcaggggaacttcagtgttaccagcgggtgaacaatttgggaaatggaaaggactgcaagaaagcactgatcgtgagatagtgtggccaccaatggttattgttatgaataccttcttggaaaaagatgaagatgataagtggaagggcatgggaaaccaagagctccttgattattttggagaatatgaagcaagtaaagcacgtcatgcctatggtccctctgggcaccgtggtatgagcgtgttaatatttgaaagctcagctgtgggctacatggaagctgaacgtctgcataaacactttgttaatcaaggtacagacaggaattcatggcacctacgcaaggttcgatttgtgcctggtgggaaaaggcaactatatggtttcttagcaaacaaagaggatatggaggcatttaacaagcattgccatggtaaaagccgtctgaagtatgagatgaggtcttacaatgagatggtggtgattcaaatgaaacagatgagtgaagacaaccaacaactgaattacctgaagaacaagatggttaagacagagcagcgatctaaagcagtagaagaatcattgggtgttgttacccagaagctacgtgagactattgaagaaaatatatttgttaggagtaaagcaaaagagaagcacatggagtacgaggaagagatgaagtcccaggaggaaatttttcatggtctaattgaggatattcacaaggccacagaggataaagaaaagcagtttgagaagttgttgcaggaagagcgctcaaaggccagacgctttgatgttgattctggaactatgaaagatcgtcagctaaggaaggaatatgtgcagaagttcattgattgccaagtcaaggatgtggcagagtttgaagttgagcgagatgagctgatcaaagtccacgaggacaagaagttgaagctcaagaaagaatacatggatctggagctggagctggagaaggagtttgacgcagccctgacgggcctgatggagaagcataagccagataccttcgaggcctccagctcgtaagggggcttcagcggctaagcgctttccttaggccccagctaagcttggagcagtctcgtacatgctcctgcttgcttatccatgaaataatgcctggacagtctgtagatgttgcgaaaacatggtgccccctgtggttgccgcgtgtgtagtaagtatctctcagtcgtagtgtggttgaagcatctgaactcttgagcggtttgcctgtgatggcatatgggtcaaactacaactggagtgtgatatctagtttatatggtccagcgctcttgttgactgcgggtggtggtttgccccggataatttactgattatgtctgctccgatcgtcc

SEQ ID NO: 266268 - DNA, 312 bp, Zea mays
gctcgtaagggggcttcagcggctaagcgctttccttaggccccagctaagcttggagcagtctcgtacatgctcctgcttgcttatccatgaaataatgcctggacagtctgtagatgttgcgaaaacatggtgcccctgtggttgccgcgtgtgtagtaagtatctctcagtcgtagtgtggttgaagcatctgaactcttgagcggtcaaactacaactggagtgtgatatctagtttatatggtccagcgctcttgttgactgcgggtggtggtttgccccggataatttactgattatgtctgctcc

SEQ ID NO: 266269 - DNA, 798 bp, Zea mays
aattgccgggtcgacgcacgcgtccgagaaagactccctaaggtcgaccgagacccctgcggacctgcgcttcggccgttgcggaccgcaggagtgacgattccatggcggaggagatggcgcaggcgcaaccgagactcacggcgccacgttcggtccgctgtattgtcaagctaggtggagcggcgattaccaacaagggcgagctggagagcatcaacgaggagaacctacggtcggcatgtgcgcagctgcggcatgccatgtccgaatctgacggcgatggcgccatggggccggttctgggaatggactggagtaggaagcccggagatcctgtcgacccggccgttgacgcggagtggatcgcggggatagctaggctggggctcgacactaacttcgtcgtcgtgcacggggccgggtcttttggccactttcaagcaagtagatctggagttcataaaggagggttacattcgacactggtcaaggctggctttgttgctacaagaatttcagtgacatctctcaaccaggaaattgttagagccctagcaagagaaggaataccatctgttgggatgtcaccatttgcttgtgggtggtctacccaacaaagaaaacttgcatcagcaaatgcttctcaaataattcagtcactccatgcaggttttgtcccagttttgcacggtgatgcagttcttgatgaattattggtgaattttcaaatcaaagcttgctgcgttgttgttagggtttatggactatgaagtcaatttatttaataaaaataaa

SEQ ID NO: 266270 - DNA, 549 bp, Zea mays
cacagattgtgtgagggatgtcgcctgtgcaccagttttgggattgtccaagtcgaccattgccagtggttcacaagacgggaaggttgtcatctggaccaagggaaaggatggagacaagtgggagggaaagctcatgcgtgacttcggttcccctgtctggagggtgtcgtggtccttgactggcaacatattatgcatagctgctggcgagaacaacataaccctctggaaggaagggtcagatgggcagtgggaggaggcgatgaaggttgaaccataggatgaccggcaaggtttctgaatttcttgtagatccatgtttcgacaaagacaaagcttgctactgttttactagtgtttcgacaaagtttaagtttgccattgtgttttactagtgtttcctgcggatccatgtttcgataaagacaaagcttgacattgtgtttccatagacactcaaattcacatattttagtaattcctgatgagcaattatgatcttggatggatctggtgcgctttagactggcaattttttattcagga

SEQ ID NO: 266271 - DNA, 514 bp, Zea mays
gcgcttcccgtcttgtgaagcgctggcaatggtcgatttggcccaggggaaaggatggagacaagtgggagcggaagctcatgcgtgactttggttcccctgtctggagggtgtcctggtccttgactgggaacatattatccatagctgctggtgggaacaatataaccctctggaaggaagggtcagatgggcaatgggaggaggtgatgaaggttgaaacataggatgtccgtcaaggtttctgaagataaaatgtgttttactagtgtttcctgcagatccatgtttcgacgtggacaaagtttgccgttgtgtttcgacagaacatccaattcacttattttggtactttctgacgaggcaattatactcttggatggatcccgtgcgctttagagtggtaatttcagatcggtgagcctatttagttctgtatatcctcaccttttttttggtggaacatcacagcggctgcaagtaatgttatctaataagacctgtagcaatttct

SEQ ID NO: 266272 - DNA, 1248 bp, Zea mays
gcggcggcgaggaggctctaggggcgccagcgaggtggtggtccgtggggactgggaggggagggcggcgatggaggagaaggcgtcgtcgccgctggttccgccgccgtcggagatcgacctcgaggcgggcggcggcggggagcagctccagtgccggatctgcctcgagaccgacgggagggacttcatcgcgccctgcaagtgcaaggggacgtccaagtacgtgcaccgcgactgcctcgaccactggagggcggtgaaggagggttttgcattttcccattgtaccacctgcaaggctccatattacttgagggttcattcgcacactgacaggaaatggcgaacactgaagtttcgtttctttgttactagagatatattattcatctttgctctagtccagattatcatctctgcattggcatatttggtacattttattgatgggtgccaacaatattggttgaggacagcctgggcttttgataatgaagttagtttttattatatctgtggtgcattaatgttttttgctttgttgggactatcgggttgcttcataacctgttatgaccgaagagtacggaacgacctggctcagccttgtcgagaattatgtctttgttgctgtcagccagggatgtgtgcggattgccacctacctggcacgctgtgcatgtggactgactgcactacctgcttcgaaggctgtgctaccacagccggcgagtgcggtggttgcttgggaggggctggggaagccgggctaccgcttctcctcatcatgggggtcattgtgctggggcttttcacggtcatcggcatattctacagtgtcctggtcgcgaccatggttggccagcggatctggcagcgccactaccacattcttgccaaacggttgctaaccaaggagtatgttgtagaggacgtcgatggcgagcgcacagactggtgtccgccgccactgcccgcggagcacatcagccagctgaagtctctggggcttctgtaatatggaggctggtgaccctaagctaggaccggcgtggcgttacccagctccagctgtacaggagggaggctatactgtcaggcattctgcgttgaaatgtgtcaatattgatacttttcctctttgcttttcccttcttttttgtacattgcaatggcaaagctttctccctgacaaaacccagaacttataccccgtgaaaccgcctacatttttactggggaaaa

SEQ ID NO: 266273 - DNA, 827 bp, Zea mays
  unsure (1)..(827): unsure at all n locations
cagcacatgcagatttagtcctcgcgtccgcggacgcgtgggctcgggtggctgatcctgatggttctcgaacaattggtgttatcacaaagttggacataatggacaggggcactgatgcccggaactttctgctgggaaatgtgatccccttaaagcttggctatgttggtgtcgtcaaccgcagccagcaggatatcaactctgacctcagtatcaaggatgctctggctcgtgaagaaaaattcttccgtactcagccagcatatcatggtattgctcagtactgtgggataccacaattagcaaagaagctaaaccagatcctggtccaacatataaaaacagttttgccggggcttaagtcacgcataagcaggcagttgactgctgttgctaaggagcttgctgtgtatggtgatccttgttgatcaaaggctgtccaaggtgctaagctttttacattctagctatattctgtgaatctttctcctcatgtcgtgaggtatatatgatttacttttttccttttaactctttgttgtacatgatttatctattttttcgtcctttttgcaattaatanannnagnnaannctccacccctctactcctatcatctttttaattccttatcaccctccccccttgttattttttatattttatcttttatcttactcccatcttaatttggggcccccctttttattttttattcttttcccgaactccccccccccccccccccctttttntggtgtgtttggggggggnaaattatanaattattattattatttattttttatttcccccccccccc

SEQ ID NO: 266274 - DNA, 830 bp, Zea mays
  unsure (1)..(830): unsure at all n locations
ttcttccacgcgtccgcccacgcgtccggatccccttaaagcttggctatgttggtgtcgtcaaccgcagccagcaggatatcaactctgacctcagtatcaaggatgctctggctcgtgaagaaaaattcttccgtactcagccagcatatcatggtattgctcagtactgtgggataccacaattagcaaagaagctaaaccagatcctggtccaacatatatccgccctcgcgcccgggcttaagtcacgcataagcagtcagttgactgctgttgctaaggagcttgctgtgtatggtgatcctgttgattcaaaggctggccaaggtgctaagcttttgaacatactagctaaatactgtgaagctttctcctcaatggtggaaggaaaaaatgaagatatatcgacaattgaactctctggtggagcaaggatccattacattttccagtctatctttgtcaaaagtttagaggaggttgatccttgtgaggatgttacagatgaagatatccgcatggctattcaaaatgcaactggtcctagaagtgctctgtttgtacctgaagttccatttgaagtccttgtacgtaggcagatcagcagattgcttgatccaagtcttcagtgtgcacaattcatatatgatgaacttgtaaagatgagccatcgctgccttgcaacggagttgcagcagtttcctatactccgcagaagcatggatgaagtcattgggaagtttttgcgggatggacttaagccagcagaaaatatgatagcacacattattgagatggaagaagattacataaacacgtnacaccca

SEQ ID NO: 266275 - DNA, 827 bp, Zea mays
gcgtcattctcggagcctacggagtaccaaccacgttaccgaaactgtagacgatgagtacaagggtcaagggaaagaaagccaaccgccccaatctcgcgtcccgccggcggccaccaccaccaccgccatgatcagcatcctcgcgcaggagcgcctcctcgggttcgccctgggctccgtctctatgggaggtttcgtcctccaccagcgccgcgccatctaccgctcaatcgctgaagccgatgggtcgtcctacttctaccagcctggtgaaattgccggtcgtagaagttcaactgaactggctcatgtatggaacaaggcggtggacgagactcttgggcgacttgttgtgtaccttagctctcgtggatggtgatccaagcaccatgtcgaacatggcaactgaggaggcacgggtggaggaagactcttttttgaagccactgatgtgctcatatttctctgtacccggattgagcatgttttgttttaaaagaaaaagatgctcccagtgaccgatttatctcgaactgagctgattctactgcatgtttcccttaactggtgcatgttacttcgaggtcaatgttctggcccctgtgaaaggcaggattcgtctaactattttgcatatatctattggtaataaagaatgtatgttactttgctgacgttgccaacacttcaatggaaactatggtcgttctctaaaaaaaaaaaaaaaaaagaaaaaaaaaaaaagagaaaaaaaagaaaaaaagaaaaaaaaaaaagaaaaaaaaaaaaaagaaagagaggagaaaaggaaaaagtgggagggg

SEQ ID NO: 266276 - DNA, 782 bp, Zea mays
taactcggaatcggctcgagttttttctatccacggcggccaagctgtggaaacgagggagacgaggaggacaagggaaagaaagcctaccggctcggcggctccggctcacctcccacacccccaaaaaaaatctcgcgtgccgccggcggccaccaccatcactgccatgatcagcatcctcgcgcaggagcgcctcctcgggttcgccctgggttccgtctccatcggcggcttcgtcctccaccagcgccgggccatctaccgttcaatcgctgaagccgacgggtcgccctacttttaccagcctggtgaaattgccagtcgaagaagctcaactgaactggctcatgtatggaacaaggcagtggacgagacccttgggcgacttgttgtgtaccttagttcgcgtgggtggtgattcaagctccatgttgaacatggtaaccgaggaagactctttttcaagccactgatgtgctcatacttccctgtacccggattgaacatgtttttttttttaaaaaaagagatacttccaatgaccgatttatctgaaattctgaaccgagctgattgattctaccgatgcttccctgagcaggtggatgttacttcgaggtcattgttgtagccctgtgaaaggcaggactcgtctaactattttttacatatatgtattggtaataaagaatgtatgttactttgctgacgttgccaacccttcaatggaaactatggtcgttctctaatggtcagtccatccgtggtcaccctgagtg

SEQ ID NO: 266277 - DNA, 692 bp, Zea mays
ctcggccgcagaagcgaaacagcctctggccgctgcccgaccccgacgccagctgcccagttcttcgccggcgacgagcactccaccagacgagaggggattccaagatgccgagggccaccagcgacgcgaagctcctgatccagtccctcggcaaggcgtacgctgccacaccaacaaatctcaagattattgacctctacgtgggttttgcggttgccactgcccttattcaggttgcttacatgggattggttgggtcgtttcccttcaactccttcctctcaggagtcctttcatgcataggaactgcagttcttgctgtttgcctccgcattcaagtgaacaaagacaacaaagaattcaaggaccttcccccagaaagggcctttgctgatttcgtcctatgcaatctggtgctccacctggtgatcatgaatttcctcggataagcaactgctgcaccatgttggttaaaggttttgtagccccaggttgtggtcgctgattgttgcctttaaatgtttggaactgttgtgatcgtgatgtcgaatatccatatgatctgttgaaggattacttgtgtaagctgagtattcccggaggaactattagtcgaatggacagtttgcccagcgctgagaatgtgacctagcatgttctttatttgaagaagatataattcatttttc

SEQ ID NO: 266278 - DNA, 1762 bp, Zea mays
tgcgttctcgtgggcggacgcgtgggcggacgcgtgggcgctagccgcgccgtggtttgcttgcccacaggcggccaaaccgcaccctccttcccgttttctcgctcctcacaggctcatctcgctttggatcgattggtttcgtaactggtgagggactgagggtctcggagtggattgatttgggattctgttcgaagatttgcggaggggggcaatggcgaccgcggggaaggtgatcaagtgcaaagctgcggtggcatgggaggccggcaagccactgtcgatcgaggaggtggaggtagcgcctccgcaggccatggaggtgcgcgtcaagatcctcttcacctcgctctgccacaccgacgtctacttctgggaggccaaggggcagactcccgtgttccctcggatctttggccacgaggctggaggtatcatagagagtgttggagagggtgtgactgacgtagctccgggcgaccatgtccttcctgtgttcactggggagtgcaaggagtgtgcccactgcaagtcggcagagagcaacatgtgtgatctgctcaggatcaacaccgaccgcggtgtgatgattgccgatggcaagtcgcggttttcaatcaatgggaagcctatctaccactttgttgggacttccaccttcagcgagtacaccgtcatgcatgtgggttgtgttgcaaagatcaaccctcaggctccccttgataaagtttgcgtccttagctgtggtatttctaccggtcttggtgcatcaattaatgttgcaaaacctccgaagggttcgacagtggctgttttcggtttaggagccgttggtcttgccgctgcagaaggtgcaaggattgctggagcgtcaaggatcattggtgtcgacctgaaccccagcagattcgaagaagctaggaagttcggttgcactgaatttgtgaacccaaaagaccacaacaagccagtgcaggaggtacttgctgagatgaccaacggaggggtcgaccgcagtgtggaatgcactggcaacattaatgctatgatccaagctttcgaatgtgttcatgatggctggggtgttgctgtgctggtgggtgtgccacataaggacgctgagttcaagacccacccgatgaacttcctgaacgaaaggaccctgaaggggaccttctttggcaactataagccacgcactgatctgccaaatgtggtggagctgtacatgaaaaaggagctggaggtggagaagttcatcacgcacagcgtcccgttcgccgagatcaacaaggcgttcgacctgatggccaagggggagggcatccgctgcatcatccgcatggagaactagatttcgctgtctagtttgtgatctggcctgggcttggggttaataaaagaggcaatgctagcctgccctttcgatgaggaggtacatacacgctggcgatggaccgcgcttgtgtgtcgcgttcagtttggcttttgccaagcagtagggtagcttcccgtgtcggtaattatatggtatgaaccatcaccttttggctctacatggtatgaacgtaagatacaaattccaactacctctagctcgcttgtgtggtatctgtatcagtattcatgtgtttgtttgcttatgtgtttgtttgcttgtatttgctggtgcttgtatcgcgggatgcaataagttgatgtttggttgttgtcaataagaaaattaataaaaagggcgcccgcccgcaccggtaagtac

SEQ ID NO: 266279 - DNA, 544 bp, Zea mays
acgtttcggtttacggaccacggctatgttccactccaggtggaggctgcagccccggtttcgcaagccgcgccgtggtttgcttgcccacaggcggccaaaccgcaccctccttcccgtcgtttcccatctcttcctcctttagagctaccactatataaatcagggctcattttctcgctcctcacaggctcatctcgctttggatcgattggtttcgtaactggtgagggactgagggtctcggagtggattgatttgggattctgttcgaagatttgcggaggggggcaatggcgaccgcggggaaggtgatcaagtgcaaagctgcggtggcatgggaggccggcaagccactgtcgatcgaggaggtggaggtagcgcctccgcaggccatggaggtgcgcgtcaagatcctcttcacctcgctctgccacaccgacgtctacttctgggaggccaaagggcagactcccgtgttccctcggatctttggccatgaagctggaggtatcatacagagtgtttgagagggtgtgactga

SEQ ID NO: 266280 - DNA, 264 bp, Zea mays
tgatggttcataccatataattaccgacacgggaagctaccctactgcttggcaaaagccaaactgaacgtaagatacaaattccaactacctctagctcgcttgtgtggtatctgtatcagtattcatgtgtttgtttgcttatgtgtttgtttgcttgtatttgctggtgcttgtatcgcgggatgcaatgagttgttgtttggttgttgtcaaaaaaaaaaaaaaaaaaaaaaaaaaaaaaaaaaaaagggggggcccccc

SEQ ID NO: 266281 - DNA, 510 bp, Zea mays
ccggacgccttggccgaccccttggccgacccctgggcaccgaccgcggtgtgatgatgggcgatggcaagtcgcgtttttcaatcaatgggaagcctatctaccactttgttgggacttccaccttcagcgagtacaccgtcatgcatgtgggttgtgttgcaaagatcaaccctcaggctccccttgataaagtttgcgtccttagctgtggtatttctaccggtcttggtgcatcaattaatgttgcaaaacctccgaagggttcgacagtggctgttatcggtttattagcctttggtttttcctgttcatatgtttcatcagtattgtttgctctttttgtctatttttaatatattttcgttttttttattttttctttatttttgtgcgttgttctttttattcatttattttattattattttttataattcttatttttatctttttatttattttttttttttttatttttttttttttctttgctatttttctcttttt

SEQ ID NO: 266282 - DNA, 1085 bp, Zea mays
ttcattttcacccctgcctctgtatccgagcatactagcggatcctggcccgatccctcttcccaccccacccacctccgcttctctccaagtgaggaaccccaagccctcgccatggcgtcgcggatcctggcccgatccaaggcccttcccctcgtcgccgccctcacccctgccgctgccaaagcagcaacgcctatcgccggagcccgcgcgctctcgtccctgccccgctacccgtctgccccgtcgccccatgggctcggcaaggttctgggatatgaaccaacatctcacctcagtggaccacaagttttacctcgttggttttcctctctagcatccaatggatctcaggtgcagaagtcacagatctctgagacatacaagtcaggtggtgaaatgaaacagtctgagacacggaaatcaagtgaggaagccacaccaaaagttgtggcgttcagtccgctagaagcagctatcgctaaacctagaagtagtcccctgacaagtgagagttctaaagtaaggcgatcagagatagcaacccaagtcaccttttacatgatcccagccctgcttcttgtctccaagaacagcataagtacctcccttctggtcggcgccgtgttccatcaagtatacatgttccacaaggagattcttctggactacgtgcaccatgatatcaccagaaagtgggctttgatttacttcaagctgcttttgctggtgatggcgaaggacaccatcatgtacttcaatctgttctaagctcaccttctcagtttctcaaatatccagcaatgcatccgtctctgcactcgtagaataatgatgatggatgaattatgcagccttcgttcttgtattctccctaatgagcttgcttttttccagctgccagtttcactcttattaagtatatcagtctggatgggattgatagtgaccagtcagatgatatccctgattctgcacctctgtaataatgattaatgtcaattgtgcaactaaggttgtctatggtttgaggtaaaagtacgatgaagcggagtggcaccgttcgctcgattttttggggc

SEQ ID NO: 266283 - DNA, 407 bp, Zea mays
aaaggaaaaaaatcaaacgagaaggaagccaccgctccccaatcgcctgcttgccttcccatcctccgcgtaggtctccggcaccgggcaccatgagctcctactccggcgaccgctcctcctcctcctccttgcgccccaccaacacctccttcgactcctacaagttcgacttcggcatcaactcctcccgctcctccggctctcgccccctccgcgaccagcggccgggcgcggctaccaaccctccaacgaggcccgccaccggcgccacgtggatgcaccagcccgccagcgccaagccgacgtggacccaccagccttcctccgccgcggcgtctgcgcccaccatggctgggcctggatccgggccaaccttcatggtctgcgacatcttttgcctgagc

SEQ ID NO: 266284 - DNA, 686 bp, Zea mays
  unsure (1)..(686): unsure at all n locations
gcggaaaacttctgcggaaagtctgaaggatgtgaagcaggaggattgtctggagccagacgggagagcaccatgcagagggtaggcttccaatcatccatcatctggctggttctttcggtggctgtgctgctgcttctctattgtggcgtatggatgagtatgatatgtatcctggtgcggtgttttgcgcacatgggttcctggcatcaacctgatgtgtgaacttctgtcataacatgcgtttgacagcagtaagacatcccgacatatgccaatgcagctaaaaataaaaaaaagaggtagcaagtgaagagggagaaaaaagagatgtgttattgtaggtcttagtacatcctagtcttgccaatgcagctcaaaagaaaaaagaggtagcaagtgaggagggagaaaaaaaaagaggtgttattgtaggtgttactaatgttgtagctgttgtgcagttgtaaatcccccttcggcagctggttttatttccctgatgtaattgtaagccaagagccaagggtcctgtcagatgcgtgcgctgaaagtctgaacctccgataatatctgatgcttcttgtagatagctgtttcagaattttcggttaatgaacccagttactgcttgcttgttgatctattttctgtgttgctatctgatgggatngttgtggtgaaaa

SEQ ID NO: 266285 - DNA, 560 bp, Zea mays
cgacgactacggctacggctacgccgacgaggacctcggcctcatctccaagaaaggcaacatcaacagcggacgcgctagccaggtccagggaggcgccgccgctaagaaggacgacgacgagtaggcctcgccgcctcggctcgcccgcccggtcccgtcgatcgccagcaagaaccaacaagcccttctgtctgtttaattccagtatcagttcgattctcatgttgaataatcatgatcatgtgggtttaggtgtcgtgctcacgagtatgtagtgtagctcctgctagcacagagcacagcacagagccactgggcgatcgacgggccgtgcatggcctgtagataccatctcatatgttcaccactgctactttgctcatgttgggggcctctcctgaactgggttcctggatgaactgattttctattagtttccggaatcgatgctccagttgcgatccttgctcttactcgcttcagacccagctcttgactgtgaaaccgacgacagacgtctctccagtttcagatgagatgcaatatgaagcaaactt

SEQ ID NO: 266286 - DNA, 412 bp, Zea mays
actagttctagatcgcgatcctagaactatcccgtgtccgccgccggcgagtctacccagccgcggggctcggtgccccggccatccatcccctgcgaatctcgatccgccctcaaagggagtcaagcctcctccagcctttcctttcaaatcggatttgtttgctcaagttgcaagatggataagatgaccaaggttgcagtttgtgttgctgctgcacataacttactgtcaatgatggccgtgattattgcgtctagaaaaagaaaacgaaatgcaaggagcgcacagattacctatgcaccattgcatgtgagtggtacaggctgggatgaagataattttgttattactctggatgaagagcactataatggttatgttaaggatgacaaaagcgatgctgattgtt

SEQ ID NO: 266287 - DNA, 407 bp, Zea mays
ggtccggaattcccggttcgaccgacgcgtacgcgtacgcgtgggttttcccatcacccatgcctacgagtacagcctctttttcgccaactgggcgccatagaccagcgtcacgatggaggtccgcaccgacatgtacaacaccaacctggacggcaccaaggactacctatctgtcggcatggcctctgtcccggcgatctacgcctacttcgccgtctgctatgtcgtgttcctggccgggtggctctacgtcaccctctaccgcaaccgactctccgcgcaccgcatgcaccacctcatgtcgggcctgctcgtggcgcggatgctctactgcatctcggcggccgacgaccagcactacattcgcaccgccgggacaccgcatgggtgggatgttatgttct

SEQ ID NO: 266288 - DNA, 1088 bp, Zea mays
cttctagaatcgtgtgcgagctggacagcaggaagagccgtagagttcgacgcgaggagcgagcgagtgattagctcgtgcgtgctgtgcaaggaaagtaacccagcagatcgatcggtcgaggcgggtaggacaggatccagaggtagctagccatggcggaggaagcgtctgcgcctgcggcggggacggaagcgccgccggggaagatgacgatggtggtaggggtcgacgagagcgagcacagcttctacgcgctgcagtgggcactgcagcacttcttcccgccgggccagccgcagcagtaccgcctcgtcgtcgtcaccgccaagcccaccgccgcctccgccgtcggcctcgccggcccaggcgccgcggatgtgctgccgtacgtggaggcggatctcaagcgctccgccctgcgcgtcgtcgaaaaagccaaaggcctctgcacacaggcgagcgacgctgtgtttgaggcgctggagggggacgctaggaacgtcctctgcgaggctgtcgagaggcacggggccgagatgctcgtcgtcggcagccatggttacggagccattaaaagggctgttcttggaagtgtgagcgactactgtgcccatcacgcgcactgcaccgtgatgatagtaaagaagcccaagcagcacaagcactgatcaatgccgactgatcactacgtgtactgcaaataatttgtactactgcaaagttatgtgtgcgtccgtccgtttgtgaataattgggtcatcaaccatcacatcttcggttgcttctacaagtatccgatccaatccttctacgagtggattgggatttacaaataattgattgctctctgaacctgaaaacaatgtatttgtattaatgtgttggaacacgtatatgtagttgcaacttcaaaaaatataaataaaaataaggacaaaaaaaaagcattagattagtaaaaaaatcatgaatgagtaatgcactgatataaaagaaatatatgttaattttttttccggggggctccccgcccctgggggatttttttatttttccaggtggagcccccaaaattttggggtata

SEQ ID NO: 266289 - DNA, 229 bp, Zea mays
tcatcaaccatcccatcttcggttgcttctacaagtatccgatccaatccttctacgagtggattgggatttacaaataattgattgctctctgaacctgaaaacaatgtatttgtattaatgtgttggaacacgtatatgtagttgcaacttcttttctgtgagccgtgggcgtgtatgcacgttttaggtggagaaaatggtataaatcagatgaaagggtgaatgc

SEQ ID NO: 266290 - DNA, 910 bp, Zea mays
cttttcagagagttagctgatgacaatagcaagtttgggaagttgacattagcccggctattgcttgcttgtgctgctataaaatcccgtggaagatctctaattgaaaggaagggatactgtgaagaggcactggggctcttcactgacttgattcacctggatccatctcataagcagtactatgaggatgaacggagcttagccctgatggataagttaacatgtgacatggagactttcacgaagcattgttctgttcaggttcaaccaaattcagctcccctgaatcatgtgcagctttgcagattatctctaacatgcattggatttgctgaacgcctgttgtgggttcaaatgctggacctaagccataatagtctgagatcagtcgaaggattggaggctttgcagcaccttgtgttcttgaacatcagcaacaaccagatcagtggtttcacagcacttgaatcccttacgaagataatctcattgaaagttctggatttatctttcaacaagattggagctcactcaattgacacaacacggtatatctgctcgtctccattctcacacaaaatggaagcaagtgaagcttttgaagcgtaccagaaggtaaatatcaacgtggaggaatactgggatgccatactgtttttcagatctctgaagttggcacagcttgatataaaaggaaatgcagttgcaagcaaggagaacttcagaactattgtcatgatgctcattccttgtctaaaatggtttgatggtgaagatgtcaattaaaatggagttgagcaatgatagtgtcaaggctcacgctgtaaaccattttttgctagaaggcattgatttgcatcatatgtactccgccggttcgggaaagaccgtccccctgtattatatc

SEQ ID NO: 266291 - DNA, 443 bp, Zea mays
accggtccggaattcccggggggacccacgcgtccgcccactcgtccggacgcttcttgcagtgatccagccgatcgtgccagacaaggggggtctattgcaggagtcatgcgaaaacttcaagatgggtcagattaagaaagaccagttcatccagttcctccgcaattacgtcggagaccaagtgctgaaaaccgtggccaagaaacttcgacgatgctaaatttctagtgcgcggtgcgacatcattatctccttgatttctactcgagctgtctgtagtagtgctcagtagagatgaggaggttcacttctgtttctgttgattcaagtttctgtcaagggcttatagggggtttggcgcgctgttcttacattaaccaacagtccatcacataggatagatgcagtttctgatactgagacgtttgattcttctttta

SEQ ID NO: 266292 - DNA, 420 bp, Zea mays
ccattgttggagccccggcttcagattctcgtcgtccagccgctcctctatgcagaggaatgctgcttctgtgccacctgacgagagcagcccatcaccgccaccgccgcatgcccaggctccctatgcctctccaccaggggtagactcgaggcatggatattctcaaccggaggcaagacctgcatactcgcagccataccccccatcctatggggcgacaccgcaacagccgacgtatggtgcacaacaccccgggcagtaccagccgcctcctggccatgactgcggtcagccggcatatcctggatggcgcgggccatacccatactacaatgccccccagccgcagcaatctgtgccttgtccacaggcgccgtacaatgccactggggcttacccttcgcaccagagcaacta

SEQ ID NO: 266293 - DNA, 569 bp, Zea mays
  unsure (1)..(569): unsure at all n locations
cggatcccatcccgtcgcggtcgccgcactagttcgacgaacagaagcgaaggtctcgacgaatccgtgacgccgacgtgggtttgcctctgtacttctggaatcggaaagaggtgtgtcgtgcggtgcgtgtccaattctaaccccttcctatcgaccatcattctcccctctgcctgcgtcgtcctcgccgccatggaccttgcggacgggcgagacgacgccctcaatggaggcgtcggcgtcggcgtcggcgtggaggagacaaggaggaggaggaaggtggagctggtgcaggaggccatccgtggcttcctggaggagaagaggagcgatggccagggaggaggagaggagcgcttgacggccaggctcagggaggaggagcaggagctcctgttgtcgttgctctccaagttgggcgagctaaaaaccgaccccgatccagacatcttggaagaaccgagctccttccgcccggaccacggtcaccagcctgcangaggaagcgaacgcagcaaggaggtggagccagctgacatcggccatgacctgagcaggatcaagag

SEQ ID NO: 266294 - DNA, 568 bp, Zea mays
  unsure (1)..(568): unsure at all n locations
cccggaactgaattcctcgatccacccacgcgttcactttctcagaaatataagagtaaattgcggacggttccatatacactggctggaatactgaaatttctatgtgtgcctagctacttctatgaactggaatatcttccttcgccaaaggagatggccgtgaatggaaaaggtacagatcaagacaaggcccacctgtccaatgtctataccgatgtgatgcacagcagatcaaagaaagaaggaattccaagagcctccagtttgtccagtattgattctattatgactccaagtcggatgtcgcttggggatgttgatacatcaggtagtacagtggcaagcactgaaccatcagactatgtaccgtggtctcgatccgaaagcaaaacgcttgtcttgggaaagaagtaacattgtttcagaaccgaaagaagtgctacaccctcaccacacnaatggatcattctggccaagaaccaggtccaaagcaagggctgtaagaatcagttggtttaacgtctactaatgcaccccngtcgtcttgggcagccccataatgcat

SEQ ID NO: 266295 - DNA, 586 bp, Zea mays
tcggtttaatggtcttctcattaggagtgatagagcagaagctgtatcaattccagttggaataattcctgcagggtctgacaactcacttgtctggactgttttgggagttagagatcctatttctgcatcattattaattgttaagggtggtttcacagctctagatatcttggctgtcgagtgggttcaatctgggcaaatacattttggctcaactgtttcatactatggttttgttagtgatgtcctggaactttctgagaaatatcagaagaaagttggtccactccgatattttgtggctggaatactgaaatgtttatgtttgcctagctacttctatgaactggaatatcttccttcgccaaaggagatggccgtgaatggaaaaggtacagatcaagacaaggcccacctgtccaatgtctataccgatgtgatgcacagcagatcaaagaaagaaggaattgcaagagccttcagtttgtccagtattgattctattatgactccaagtcggatgtcgcttggggatgttgatacatcaagtaatacagtggcaagcactgaaccatcagactat

SEQ ID NO: 266296 - DNA, 602 bp, Zea mays
ttcaactttcagagagtgggcaacttcagaggatccacgacgagtggttctcacggtctagttgctccgcagatgacagcgaagtgggagcaaccaggcttggcctcggaagcttttggggccttttccttgtgtgtgccctgatatgcctcttcgctctgctggtgttcttcatacgagtctgccggcagtataaccagtactccagttctgaagctgccggcgagcccagcacagctgctgcggatcctgtcctaagacagcggcgaccatcacgccttggcagcttcaaagacctgatccagttcgtcgacaagaaggaggaggagattaagaaaacgatgaaacgaagatcaggcgagaaagatagccaagctgcaggattctcatacgctcagtcagtggcttcagcataggacattgctccaaccatattgaattaggttatctccaaaagcataggacattgctccaaccatattgtaaatagtagtggtgtactgtgatcagaacgaagatcagggttctcatacgctgtttgtatttgacacctgttttcggtgattggtcattgctccaagctgtgcgaagtggcttatttt

SEQ ID NO: 266297 - DNA, 446 bp, Zea mays
gcctaattcaaatagcaaaggaagtgataaacacccagcggttaatgatattactgctgcagtttgcaagcaaaagatggatattcaagaagcagaaacacttgtaaaacagtggcaagacataaaatctgaagctcttggccctgactatcaaactgacatgctacctgagattcttgatggttcaatgctctctaagtgggaagacttagcgttattagcaaaggaccagtcttgctattggagatttgtgctgctaaatcttaatgttgttcgagccgagataatcttggatgaaataggtgctggtgaggcagcagaaattgatgctgtacttgaggaagcggctgagcttgttgacgattcccagcccaagaaaccgagttattacagcacatatgaagttcagtacgtattgaagaggcagaatgatggatcttggaaaa

SEQ ID NO: 266298 - DNA, 1800 bp, Zea mays
cgacccacgccacccttgacgttggatcgctcgccaggttatgaggagacacagtctacagactgatggaaattcttggagcacaggaccagcgccacctccacctccatacacagcgccgtctcctcctccaaaccattggaatgctgatggttcatcaagttcatcaagttctggtggaagatctgggataggtggtggaggtgtagcaggaatcattatatcgttgctggttgttggatcagttgttgcatttcttgtgatcaaaagaagaaaacgcacagctgctatgaaagaacattttgaacagcaccagccattcacttccttcccttcaaatgaagttaaagacatgaagcctgtctacgaggccaccacagtagacatagagtctttggcttcacctgcttcagttaatctgaaaccacctccgaagatagaacgaaacaaatcatttgatgatgacgatgatttttcaaacaagcttgttgcaaagaaaagtaatataacacctataaatgcaactgtttattcagttgcagatctacagatggcaacagatagctttagcttcgacaaccttgttggagagggtacttttggacgtgtttacagggcacaattcaatgatggaaaggttctggcgatcaagaaattagatactactgtgatgccatttcaatcatctgatgactttgctgaactggtctcgaacatttcaaaattgcaccatccgaatctgaatgagcttgtgggctattgcatggaacatggccagcacttgcttgtgtatgatttccacaggaatggatcacttcatgatctactccacctttcagatgagtacagcaagccacttagctggaacactcgtatcaagatcgcactcggctctgcccgtgcactggagtaccttcatgaaatatgttctccatccatcatccataagaatttcaagtcgtcaaacattttgctggactcagaattcaatccacacctttcagatgctggacttgcaagctttattcctgatgctgaattccaggcagcagaacaaagtgccggatacactgccccagaagtggacatgaccggtcagtacaccctcaagagtgatgtctacagctttggagttgtcatgcttgaactattgacaggacgtagaccatttgacagctctagacccaggtcagagcagtcacttgtgcggtgggcaacaccccagctgcatgacatcgacgcattggacaggatggtcgatcctgcactcaagggtctatacccagccaaatctctatcccgatttgctgatgtccttgccctgtgtgtccagcctgaaccagaattcaggccaccaatgtcagaggtggtgcaagcattggttcgacttgtgcagagggccaacatgacgaagaggatgcttgatggggatacttctcggcgaccagatgacctggaccaagatttcatatgacaagctgaactcttgtcagattgtatttatttcgttcgactagcggcccagcagagacataatcacacaagaggaagaaacagaactctgtcagcttcgccagtacataatcacaagtttttcttggtagcaaagttgtgctatatggttgtactgtgtctacaaaatagtaccttgatcttacgctaatggcatattgttataattctttggtaacttatatgcaaatgccccagataaacaaaactatggtgaagtgtgccgaatgttaaaataactgattagtccagtactgctgcatcaacagaaaaaaaaaaaaactcgac

SEQ ID NO: 266299 - DNA, 519 bp, Zea mays
ctacagactgatggaaattcttggagcacaggaccagcgccacctccacctccatacacagcgccgcctcctccaaaccattggaatggcgcaggtcagaatgctgatggttcatcaagttctggtggaagatctgggataggtggtggaggtgtggcaggaatcattatatcgttgctggttgttggatcaggtgtggcattttttgtgatcaaaagaagaaaacgcagagctgctatgaaagaacattttgaacagcaccacccattgacttgcttcccttcaaatgaagttaaagacatgaagcctgtctacgtggccaccacagtggacatagaggatttggcttcacctgcttcagttaatctgaaaccacctgcgaagatagaacgcaacagatcatttgatgatgacgaagatttttcaaacacgcttgttgcaaagaaaagtaatataacacctgataatgcaactgtgtattcagttgcagatctacagatggccacagatagctttagc

SEQ ID NO: 266300 - DNA, 1737 bp, Zea mays
cccacgcgtccgcttcgagctctgcatttgtcagacacagacactaatccaagcaaaattggccgtttggtatatacaaataagggggttgcactcttggctcttggctccaatgctgttcataagttgtggaaatggcaacggagcgacagaaatcctagcggcaagtctactgcatctgttgcacctcacctgtggcaacctgcaaatgggattctgatgacaaatgacacgaatgatggcgacccagaagaagcaaccgcctgcattgcattgtccaaaaatgactcctatgttatgtctgcatctggtggcaaagtctcgttgttcaatatgatgacatttaaggtcatgactactttcatggcacctccacctgctgcaactttccttgcattccacccacaagataataatatcatcgccattggaatggaggactctaccatccaaatctacaatgtccgcattgatgatgtcaaaagtaagctcaagggacatcagaagaagattacggggctggccttttctcaatcaatgaacgtgctagtatcatcaggtgctgatgctcagctatgtgtgtggagtattgatggctgggaaaaaaagaaatcaagatatatccaacccccagcaaaccgacctggcactttggttggtgacacaagggtgcagtttcacaatgaccaaacacatcttttggtcgtccatgagagccagttgggaatctatgatgggaatcttgactgtttgcgcttgtggtctccaagagatgcactcccagctccgatatcgagtgcgatatactcgtgcgacggtctcttggtttacgctgggttctgcgatggtgctatcggagtcttcgaagcagaatctcttaggctgcgctgccggattgctccttccgcttacattccaccttcaatactagcctgtgctggacgggtctacccgttggtagtcgctgcacaccccatggagcctaaccagatcgcgatcggcatgagcgacggcaaggtccatgtggtggagccattagacggggacccgaagtggggatcggcacctccacaggacaatggagcgcacccgcacccgcatccagcgatatcagcggcaccgtcgaccgccaccaaccaggcatctgatcagccaacaaggtgactctggcctgcagcactggaggagattcgttagcgcagagactggtaggacctgtaggagatagggagaaaaggtaaacgattagatgacgagaggatgatgctatatttatcaagtccgcagcgccctgcctctcttgtgacggcccgcgacacaagtgtggtgattgacagtgacatcgctcgctctaagttaggttttggttcttccctggcccccggaaatcatcacctggcgccgccacattcgaatggagatggatctgctggcatcatcttgcttcctcttttgtaaagcttttcctgctgagtttagtggtaccttagattgtcgtccatttctgccctgttctccgggcagctatttgtagtgtaaaaatatggtggcgtgctggatggtgttatttatgcgtgcgtggcctgtcatgacgaattcccccatgtttggggctatttgatggatgtttactgatcatggctcgaaattgtgttttttcttcgtgccatttgcaattgtaaaaccaaaaaaaaaaaaaaaaaaaaaaaaaaaagaacggccgctcgcgatctagaa

SEQ ID NO: 266301 - DNA, 612 bp, Zea mays
cggtccggaattcccgggtcgaccgcacgcgtccgcccacgcgtccgctggcctgcagcactggaggagattcgttagcgcagagactggtaggacctgtatgagatagggagaaaaggtaaacgattagatgacgagaggatgatgctatatttatcaagtccgcagcgccctgcctctcttgtgacggcccgcgacacaagtgtggtgattgacagtgacatcgctcactctaagttaggttttggttcttccctggcccccggaaatcatcacctggcgccgccacattcgaatggagatggatctgctggcatcatcttgcttcctcttttgtaaagcttttcctgctgagtttagtggtaccttagattgtcgtccatttctgccctgttctccgggcagctatttgtagtgtaaaaatatggtggcgtgctggatggtgttatttatgcgtgcgtggcctgtcatgacgaattccaccatgtttggggctatttgatggatgtttactgatcatggctcgaaattatttttttcttcgtgccatttgcaattgtagaccgtggacccggtgtgagttgatgaaatttgctggtgagctgtttctgg

SEQ ID NO: 266302 - DNA, 359 bp, Zea mays
  unsure (1)..(359): unsure at all n locations
cgatcccctctcccccacctgccagactccccgccgtccaccgctcgccgcccccggccgccatccagccgccggtacagggctcatcctcccggtcgcagccgtgtccacttccttcacgaagagaggcgcgtagactggggagctggagcgaggacaaggagacgagggaaaggatgcagcagctgcaaccgaagcagatgcactgggtgagggccgactcctccgacttcgggggcgaccgtcccgccccccgcagcgggcacactgcggttatcattggcaagtccaaggtggtcgtcttcggaggattcgccgacaagcgcttnctcgctgatgtttccgtctacgacgtcgag

SEQ ID NO: 266303 - DNA, 1153 bp, Zea mays
ccctttcgttcgtccacgcgtccgcccacgcgtccgccagcgccggccctgcctgcagccagccaccgttgtccgttccctcccgcgatccactcctctcgagctctaggggacggaaggaatccggcgggggtggggtgcgagcagggggagggagaagagcagccgcccgccccgcgagggggcaacagctgcccaagaacctgaccggaagagttgtgggagcggcggcggaaagatggggcaggccctgcgcaggctcttcgactccttcttctccaccagggagatgagggttgtgatgcttggtctggatgcagctggtaaaacaacaatactgtacaggcttcacatgggagaggttctttcaacagtccctacagtcggttttaatgtcgagaaggttcagtataagaatgtggcattcactgtgtgggatgtgggtggacaagaaaaactcaggtcactgtggaagatgtacctgagtaattctgatgcactgatctatgtatgtcgttgattctctggacagagaaaggatcagagatgcgaggcaagagttccagaccattatcaaggaccctttgatggcaaacagcataatcttggtatttgcaaacaaacaggacctgagaggcacgatgagcacggacgaggtcagcgaagggctggggctgcacgacctcaggaacaggatctggcacatacaggggacctgcgcgctccgcggcgagggcctctacgacgggctcgactggcttgcgtccaccctgaagcagctgcaagaatcgggccacgcgacttcggtcgctggcccttccatctgatccagcgcaagtgagctcagtgcctcagccaactgacagcaagcccacaagaatatgctccagcgcgagcgcattcctttggtgggtgtggctgcccgctggtggtggtggagttccttcggtcggtgttgccgtgttggtatcatatgagccagttgttcatccggcagggactcgcgtacttttttttctctcctgagattgtttgtaaattgttgaacggatgcaatgccggcgatgttgatcttgtgtgctggtggtgcacgtggttgttttgtctacttttttttacaataaaaaagagatcgtctgcggttctggtgatt

SEQ ID NO: 266304 - DNA, 658 bp, Zea mays
cgctttttctgttatcgagagagtaatggagcacctgcatcttgtggttctcgacaaattcaaaggtgtacctcgaacaatcattaaggcatacagatggatttgcagaatcagttcgtcggtgttctcaaacttcaatggcagagtttgttgctggaatgacagatacacctagttaaacatgtgcagcgggatgcttcaaaagtctggaataaactgcaagagcattatacaagctcatgtagaatgtattaggaacgcaaaattggctgaactgagagctaactttgagaagaagctgtcagacgcaatttctgggcctgtacaatccatactggaaactggcgagagagactcctgggcatgcattaggagactatataggcgtgagattgaaaatgctgctctttcattctcagcttccctttctgagtttggcctagaccaaacaatttccaataagatggtctcagatttgagggaatatgcaagaagtgtagtagaaactaaagctagagaagaagctggaaatgttctgatgcgcatgaaagaaaggtttttcactgtgttgagccatgataaggactcgatgccaaggtcatggatgctagatgaggatatccgtacaatcactagagaagcacgcttaggggcttta

SEQ ID NO: 266305 - DNA, 887 bp, Zea mays
cccacgcgtccgcttctacgaccacgtcgccacgcccaccgccggcgtgcccagccgcgacggcatccggggcccgccggccttccgcgtccggttcgaccgcctcggcgtcagggtgcccaccatcatggtctcgccgtggatcaagaagggcaccgtcgtcggccgcgccctcgggcccacggacacctccgagttcgaacactcctccattccggccaccatcaagaagatcttcaacctctcgtccgatttcctcaccaagagagacgcgtgggccggtaccttcgaccacatcttcaccgagctcgaccaaccaagaacagattgcccagagacattaccggaggtgccatttgagagaccaactccacccaaagaacacggctggctctcagatttccagcgggagctcgtcgagctcgcgagcttcctaaacggcgactacatgctgacgagccttgcgcaggagaaccgtaagaagaagatgacagtcaaacaggccgatgcgtacgtgcggcgagccatcacgagctttctgcaggcgagcaacaaggcggtgcggttgggcgcaaacgaatctgccattgtcacaatgaggtcgtctctgacaagcaagagcacacgctcatcaagcccttgagttgattcagtctgctaatacatatagctagtgaacagatggatttgagtccacggtctaatgtatattgcctctgaaatgtttatagctgaatagggagctagcagagcctttttaaatataacttttgtttctcttgtcacatattaccaatgtagtataagagttttctgttgacctcaaatgtacatctgcaacctcattttgatctaaaaaaaaacggacgcgttggcggacgggtggc

SEQ ID NO: 266306 - DNA, 1151 bp, Zea mays
tcgcacaggtgggcgctggggaggagctgccgtccgagcggagtcggtcagggagcttttcttcctcgtcctcgtcgtccgggactcctggtgtatcaagcgagccaccgctgttgagttttagtgttgataatatcgatacagttaaactgttggaacttctaggcccagaaaaggttgatccagttgatgtcaaggcaattaaggaaaaactctttggttatacgacattctggttgacaaaagaagaaccttttggtgatcttggtgaaggagttcttttcattgggaacctccgcgggaagagagaggaaatctttgcaaaacttcaacggcaggtacgtgaacttaccggtgataaatacaatctttttatgggtggaggaacccaattcagaaggggatgacccacgtgggggaccacgtgttagttttggtttgcttaggaaggaagtttctgagccaggacctactacgctatggcagtatgtcatttctctgttacttttccttctcactatgttctcctgcattgagctaggaattgcgtcaaagattagcagtcttccaccagaaattgtttcatatttcactgatccaaatgctactggaccccctcctgacatgcaacttctgctcccatttgtggagtcggctttgccagtggcttacggtgtcttgtctatccaactatttcatgaaattgggcactttttggcagcatttccaaaaaatgttaaactgggaattcctttctttattccgaacttcacccttggaacttttggtgcaattactcagttcaagtccattcttccggatcgaaagacaatgtttgacatatcaatggctggtcctgtggctggagctgcactttccttttcaatgttctttgttggcttattactctcttcaaatcctgttggggcaagtgatttagtagaagtacctagccagctgttccagggttcattgttgcttggactcattagtagagcaacacttggatacagagctatgcatgctgctacagtttcgatccaccctctagtgattgcaggctggtgtggtttaactactactgcatttaatatgcttcctgttggatgtcttgatggtggaagagcattacagggtgcttttggcaagga

SEQ ID NO: 266307 - DNA, 1589 bp, Zea mays
gcccccgattgagccgccgccgcctcagattcgccgtcgccacctcagattcgccgccgccgccgccgatttggacgctgtcgccggcgattcagcctccgccgccctggatttggcctccgccgctcccgattcggcgctgccaccctgaaacagcgccgcccctttcccttcccctatgccctatgccctcttgctgcttctcacctaggcgacggggacgccttggatccttcgggcgcctggacgcctaggcgacgcctttaaaacaagggtcttctctgtattaaatattttctgatgttcagtagctaccttggggacgcgtgggtttttcggcatttgggtttgttcacaagatagctacttttgagaaagcagctggtttccaggcacttatccagtatactgatgccccaactgctcttgaagctaaaaactcattggatggaagaagcatcccaaaatatttacttccagaacatatcggtgcctgccacatgcgcataaccttttctgcgcataaggatttgaatatcaaatttcagtcgcatcgcagcagggattacaccaatccttaccttcctgtgaaccaaacagcaattgaggggattgtgcagcccacggtgggccctgatgggaaggtaaaggagcctgagagcaatgtacttttagcatcaattgagaacatgcaatatgctgtgacggtggatgttctgcacactgtgttttctgcttttggagctgttcaaaaaattgccatgtttgagaagaatggtggaatgcaggctctaattcaatatccagatataacaactgcagccgttgctaaacaagctttggagggacactgcatatatgatggtggttactgtaagcttcatctgtcatactctcgtcatactgatctcaatgtaaaggctcatgatgagagaagcagggactacactctttcagaccctaacgtgcagctgcaagctgctgcacaaacgccagttctaaggtctccgggagtggcatggcagaacactgcatcagtaccagctgctcctttttatgcaagcacagcgacttcaactcctattggagttggacaggtggctgcttggaatcctaacatgcaggcagggagttttgcatctgcatcgactgcataccccaaccaaccattaatggccaactccatgcctcactatcctgctattggatcgagttccggtgccccaccagtagcatttcaggcttcgcagcagatgacacagtatagcatgccccctggtgctccgccgcacgcaccaccagctggccaatcgatttactacccgaagtaagcggttttggttcaatattatcagagagcaatcaggcattgttacctgcgacaattgtggtccgcaaatgcaatcttgcgaattttgcaagtgcgctgtagcacttgtaacttgcgagcgcccttcgcaagaatgcatcagcgtctgctgtgtctgtaaaactgtcaaagatagtgtttacctattagcttgcatggtatattggtggtgagatatgttggagtaaaaaaaaaataaccccaatgttgcttgatctaa

SEQ ID NO: 266308 - DNA, 596 bp, Zea mays
  unsure (1)..(596): unsure at all n locations
cggtctcgtgggcggacgcgtgggctgccgctgcccccgattgagccgccgccgcctcagattcgccgtcgccacctcagattcgccgccgccgccgccgatttggacgctgtcgccggcgattcagcctccgccgccctggatttggcctccgccgctcccgattcggcgctgccaccctgaaacagcgccgcccctttcccttcccctatgccctatgccctcttgctgcttctcacctaggcgacggggacgccttggatccttcgggcgcctggacgcctaggcgacgcctttaaaacaagggtcttctctgtattaaatattttctgatgtacagtagctaccttgttaattcatgcctccagcatgatcctccgttgtgctccatctggtttgttgcttgaccttgcgccttgttattctgccatttggttgaggataggttaatccccaattgtctgacaattgttcacgtctaatttaggttttttcggcatttgggtttgttcacaagatagctacttttgagacagcagctggtttccaggcacttatccagtatactgatgccccactgctctngagctaaaact

SEQ ID NO: 266309 - DNA, 515 bp, Zea mays
actggttattcccaaattgaacggcccaaagggaaaccccaccacaaccggtctcgagtctcgacagatcggcgtcgatgaccctaccactcgctggccctcccacgccttccccggcatggccgagcccaccccaccgtccctcccctcgtccgactgcgcagacgtgctcgtgggatcctccgccccctccttcccctacatccgcggctggtcattcacctccgactcgggcgctgctatgggttctgtagaggaacatctccaacccaaggtgtgcgtgcagacgagcacctccgcggggcttgagcagatcctgccctggctcttctatcacaaggtcgtcggcgtcgcgcagttcctgctcttcgtggagggcaaggcggcgaaacccaatgtcgcgggagtcctcgagtcaattcctggggtaaaagtggtgtacagaactaatgatcttgaggagcggcaggcacggagtcgaatctggaatgagacttggctttcaggatttttct

SEQ ID NO: 266310 - DNA, 938 bp, Zea mays
  unsure (1)..(938): unsure at all n locations
ctcgcccccatcatagccacgcccctcctctcccactcctcctcctcctctttcccttccatctagtagcatctaccggcctcctcttctctccgtgtcagtctctgccttcgtcgtcgccgtttcagtcgtttcctaaaccttctttagcttccatgcacttccctactgctgctagcaaagacctttattagtagtgtcaattaagttacgaaagaagaagaaagaaagaaaatttcgaggccgagaaaaaagacggctttgatctctctgctagtgtggtgtggtagtgtgtgcttctagtaagtaagcgagccagggatcaagaagcagagagctgctttgtctcttttgtctcttgcaagaatggcttcctccagcgggagcgggagctcgggctccctctcggcggcaacggcggccctggccgccgcggcgggcacggaggaggagctgcgcgcgctcatggagcagcgccgcgcgaagcggatgctgtccaaccgcgagtccgcgcggcggtcgcggatgcgcaagcagcgccacctcgacgagctgaccgcgcaggcggcgcacctgcgccgcgagaacgcgcacgtggccaccgcgctcggcctcaccgcgcagggcctcctcgccgtggacgccgagaacgccgtcctccgcacccaggccgccgagctcgccgcgcgcctcggctccctcaacgacatcctcgcctgcatgaacaccaacgccgtcggcgccgtcgccgtctccctcacagccgccgccgccgccgccgtcgcttcctccgacccctgcctcgccttcgacggcgccaccgtcctggacgacctnctcagatcctgccccgagaacatgttccagtaccagctctgctagctccagaccgcgcgaagtcaccatggcagcgcaaaacaccttcttttcttttcttt

SEQ ID NO: 266311 - DNA, 473 bp, Zea mays
cggacgcgtgggctattgtagctcatatcatctgtcacccatggcgaagtgcagcagcttccaaggattattctggttgctttccatgattcttctagcatcctttgttgctcatgcacgcacaacaagtgggcacaccaaagaggacagcaatgctaggaacatgacgatgaccaagacgagggcatcgggcaacatacttgttagccgtaatgacgacgggccatgctatctagattccggtcttaatgagtacgtctgcagaaagactaataagtgctataagagcttggtgctctgcgtggcgagttgtcaaccatcatcatgaattcatgatactgcggagacatcatgatactgcggagacagacggcgagagatgaggctagctagatgctgtttcaccaaaatattatgtaacacccaaatctcccattttaagaaataaataagattttcgaaaggcaaatggg

SEQ ID NO: 266312 - DNA, 1217 bp, Zea mays
ggcgtgcactccctctctctgggacgactacggccgccgccgcagccgcccccacctacgccaggtgccgaggcattcgttggcctcttcgccggtgacgagaacctaccagacttggagcaagcctctcaacatgtcgtgggccgcaatcgagaatgatcctggtgtttttacggaactgttgcagcagatgcaactgaagggtcttcaagttgatgaactctactcacttgacctggatgctctcaatgatcttcagccaatatatgggctaatattgctatacaaatggcgacctccagaaaaggatgagcgtcctgtcatcaaggatgcaatcccaaaccttttctttgccaaccagataattaacaaagcctgcgcaacccaagctatcgtttcggttctcttgaactctcctggcattacccttagtgatgagcttaaaaagctcaaggaatttgcaaaggatttgccacctgagctcaaaggactggctatagtcaactgcgcaagcattcgtatgttaaacaattcgtttgcgaggtcagaggcctctgaggagcagaaaccacctagcggggatgatgatgtataccatttcataaactacgttccagtggatggtgtcctgtacgagctcgatgggctaaaggaaggaccaataagcctagggaaatgcccaggtggtgttggtgatgcagggtggtggcttaggctagcgcagcctgtgatcaaagagcacatcgaacctgttctctcagaacgagataagattcagcgtgatggcgatcttgaagaaccggaaggagatgttcacggtggagatcaaagaactccagaggaagagggagggcctcttgcagcagatgggcgatcccaacgcaagcaggcatgttgagcagtcactcgcggaggtggcagctcagatcgagtctgtgacggagaagatcataatggaggaggagaaggtgaagaagtggaaagcggagaacctgaggaggaagcataactacgtgcccttcctgttcaatttcctcaagattctcgaggagaagcagcagctgaagcccctgatagagaaggcgaaggcgaagcagaagtcccacggccccagctaggtgaaaagccgcaatgcacctacgtactgtctcttttagttggggttccttgtaagattggagttcgcgtatatgctttctggttttagtttaagacaa

SEQ ID NO: 266313 - DNA, 718 bp, Zea mays
ctgctcacccctctggcctcgctctgtgccgcccttccgcccgcccgtgtgccagtgggggtctggtacactccttcagtcgtcgcctagctagctactatatagtacacgacctgcctgcctagctcttgcactgtgagcagcggcgagcgatcgatcgatcgaggcagtcgtagtaataagccaacaaacaaaccggccggaacgccatgctggaggagtacaaaccgtgtgcggccatggtggtgacgcagtgcatctacgccgctctagcgctcttgtccaaggcggcgttcaccggcggcatgagccccctggtgttcgtcgtctacaggcaggccgtcgccaccattgtactcgtccccgtcgtcatcgcggccaacaggaagaagatgaaggagatgacgacgggccttggactgacgggcttctcgctggtcttcgtcgcctcccttgtcggggcaacggtgaaccagtgcatgtactaccaaggggtgaatctgggctcgtcgtccatggcaacggccatgaccaacttgatccccgccatcaccttcgtcatggcggcatcagtcggcctagagagggtggaggccaggaggccgaggagcctggccaagatcttcggcacggccgtctgcgtgacggcgccatggccatggctttcttcaagggcccgaagctgctcggcgacggccccaacgctctccagctcctc

SEQ ID NO: 266314 - DNA, 956 bp, Zea mays
accattttctacaaccaggttaatgtcgtgaaaggcttgaagatatatgaagatgcgtttacgacatcagagatcatgaaagttgcagatttcatcaacgaaattcgtcaggctggcagaaatggagaactttcaggtgagactttcatattcttcaacaagcagatcaaaggaaacaagagggagatcatacagcttggtgtaccgttatttcaacctaccacagaggatgctaattgtcacacagaaccaatcccccttgtcctgcaggctgtcattgaccaccttgttctttggcgtttaataccagaaagcaggaaaccaaatagtgtcgtcatcaacttcttcgatgaggatgaacattcgcagccctacttcaagcctccccatcttgacaaccccatttgcactcttctgctgtctgaaaccacgatggcatttggcaggtcacttgtcactgacagcaacggtaactacaaaggacctctcacactttcactaaagcaagggtccttactagtgatgcgtgggaacagtgccgacatggcgcgacatgtggtgtgcccgtcgtccaaccggcgcgtgagcatcacgttcgcaagggtgaggccatcgacgccggtggacatgagcccactcccgtcccccaccaaggccatgacaccctggcagccgcagccggtcacggcctcccaggtgccgtcgcccgtgagcatgacgcagaagcccccggtcagcggtgccataatcggttatgccccgaccccgcaggccgtgctggcgcccgcagcctggggcatggccatgcgcgcgcccgtcatgatggtggctgcagcgcctgcgaggcccatggtgatggcctcatcgggcaccggcggcggcaacatcagcaagcggatgggccgcagcggcaccggcgtgttcctgccttggacggtcggcccgaagcggtacaa

SEQ ID NO: 266315 - DNA, 450 bp, Zea mays
aaaaaagaagaaagaagagcgtaagaagaagcgtactgttcaagaggaggaaagggaacgtggaaaagtgagctccaaagtttatttgtcatacatgggggaagcttacaaaggtacactgataccactaattatcttggctcaaaccatgttccaagttcttcagattgcgagcaactggtggatggcatgggcaaacccacaaacagaaggagatgctcccaagacagatagtgtggtccttctggttgtttatatgtcccttgcctttggaagttcactatttgtgttcatgagaagccttcttgtggctacgtttggtttagcagctgcccagaagctttttataaaaatgcttaggtgtgtctttcgagctccaatgtcattctttgacaccacaccatctggtcggattttgaacagagtttctgtagatcaaagtgttgtgga

SEQ ID NO: 266316 - DNA, 756 bp, Zea mays
cggacgcgtgggcggacgcgtgggcgtcgtcaccagcagggtgtcccggccctctctagtttctaccccggcccccaacattggcctgatgctgctgccatgtagcccagcgctcccccctcggcttcaccggcggcggcggcaacgacggtgaaaactacatcgggtgctagctccgacggtggtgcgtgccctgttgacgatagggcacgcggggcgcgggcagcttgtaagcgttcgatcggccatgtagggcaactatacatctttggcaggtctccatcatcctccgtgggagagaagatggtaatggagtgcgtgtgtatgtatgtgtatgcccagggcgcgcgcgcgcggctctgggcgagtcacagtagagatgcaatatcatgtatccagtatctttcttacaacacaaacagtgagaaattattagtaaagtgtgcattgtggtgcagccactgttccatgtccgtagcgacaggtcacggcccgttgcctttcggagcttcccggtcccggcatgcgctccaaccgtaagggcaaggcgtcaggagcgacaggtgcaaggcggcggatcggaagaactcggcagtcggcactgggtgcggccgtggagggaaggggatggtcgccgattttatgccaatttactcgcgccccacgccgcgagtctttgatcgatgtgtttgtacagtcgaaagagcattgctttacataggaccatcaatatatatatatggatacattcgcctt

SEQ ID NO: 266317 - DNA, 750 bp, Zea mays
gcgcccacgcgttcttccacgcgtccgggaggattcacatgcccttttgttccagtgctaccagttttgtgtatcctgataaatacgtatctgttaataaacctgagtggtgacacatggatgagagttggcatatggctgctgctgggtgttcttgtgtacgctttctacggccgaacccacagctccttaatagatgttgtctacgttccggcagcgcaagctgatgagatatacaggagttcatcaggatatgtatcatagaaaagaacagctgcagctgcagtcatgtgacacgatagagccacagaaagaccgagcggatgacagttacttaaaaggtggttgtccatcagctgtagaaaattggttatcagccggggaagacggaactgactgttatttctttcatgctcggctagcatgatctcgtggatgcaactttgcaagatatgtatgctgctcacgagccaggtcaatttatacattgttggagtgtgtgtagatgtggtgtatataaaaccaactgggtggagtatgtgatgtcatacataataatttgtctaattcatgtaaaagccctttgtgcagttgtgctgaaatgtgagggcatttaaaggacctattgaaaacagtacacggacggcaaaagaagccacctttttttatatcatgtatatgtcgtccacaaacattctcttcatgtatcatgtatatttgaccaaggtccccccaggggttcatggatgt

SEQ ID NO: 266318 - DNA, 607 bp, Zea mays
aattcccggttgctagccactggttcgcccacgcgttcgctggaggattcacattccgttttgttgcagtgctgccagttttgtggatccgaataaatacgtgggtggtgataaacctgggtggtgacacatggatgagagttggcatatggctgctgatgggtgttctcctgtacattttctacggacgaacccacagctccctaacagatgtcgtctacgttccagtagcgcaggctgatgagatgtacaggagttcatcaggatatgtatcatagaaaagaacagccgcagttacttcaaggtggctggtcattcagttgtagataattggttatcaaccaggaaagaggggaattggctgttatttctttcatgcttggccaacaagatctcgtggatgcaactttgcaagatatatatgatgttcacgagcctggtcaatttacacattgtttgttggagtgtgcgtagatgtggtgtatataaacccagctgggtggaatgatgtggtacataatttatgcaattcatgtaaaagccctttctacctttctactgaaatgggagggcattttaagggcatattgaaacatttcatgaatgg

SEQ ID NO: 266319 - DNA, 534 bp, Zea mays
accggtttcggaattcccggcgggagccacgcgtccgattccctcttcactagctcgtggtaataagggaagcttgatcatctttccttatggcggtgatgaagagcagcacaatcgtcgcgcttctgttggctgttgccattctgtcctcgctgtctccatgctacgaagccggcggctgcatcgggaaacccaagaagtcaccgccgccgccgagaaggccatacctctcgtcctattccgaggaccaccagaactgccgcttgatctgtagctcgaagggtttcaaggacggtggctggtgtgacgaaagcgtcgagcacaaagtgtgctgctgctcccattagaaatataatagcgtatgttatgttgatgcatatatatgcatcatccatctacctgtgtggtgcaaaattctgaataaaatctacctgtgtggtgcaaaaaagaaataaggtgatattaatctacaaaaaagcaaaatatccaagatatgaacaatcgcgcatataaaaaacaaaaatggggccccct

SEQ ID NO: 266320 - DNA, 424 bp, Zea mays
  unsure (1)..(424): unsure at all n locations
accggnccggaannnccgggncgagccacgcgtncgcccacgcgtccgtataatctctcttcgtcactagctcgtggtaataagggaagcttgatcatctttccttacggcggtgatgaagagcagcacaatcgtcgcgcttctattggctgttgccattctgtcctcactgtctccatgctgcgaagccggcggctgcatcgggaaacccaagaagtcaccgccgccgccgagaaggccatacttctcgtcctattccgaggaccaccagaaggaccaccagaattgccgcttgatctgtagctccaagggtttcaaggacggggggctggtgtggacgaaagcgtggagcacacagtgtgctgctgctcccattagaattgccgcttgatctgtagctcccattagaaatataatagcgtat

SEQ ID NO: 266321 - DNA, 821 bp, Zea mays
aacagcgaaaccctagttccaactcggccgcctctactataagtagctccactctctgtcctccgcggaaaccttgctcctcacgccgccgccgccgccgccgccgccgtcgccgccaccacatccgtagcgcccagccgccggagaagaggagggagccagcaccagccaccatgggtcgcgtccgcaccaagaccgtgaagaagacctccaggcaggtgatcgagaagtactactcccgcatgaccctcgacttccacaccaacaagaaggtgctggaagaggtctcgatcctcccctcgaagcgcctccgcaacaaggttgccggcttcaccacccacctgatgcgccgcatccagcggggccccgtccgtggcatctcgctcaagctgcaggaggaggagcgggagcgccgcatggacttcgtcccggagaagtcagcgctcgaggtcgaagagatccgcgtcgacaaggagaccatggagatgctcgcggcactcggcatggccgatctcccgggcgtagagcgccaggctgaggtctccagcgtccccgcctacggccgcccgcagtacggtggtccccgccgtgaccgcgtttagacttcgcggtggttgcctcttgatcgcactgctattcgtagttgttgtcctactatgctaaacttcttttagatctttggttgcatctgtggcggttaagttttgaacttgcctgttatggtataaattctgaagtgtttgggtctgcgtgtgatgaacatgataatgtatattctggcgctttataaggtactatgagatgctcatatttttttgact

SEQ ID NO: 266322 - DNA, 798 bp, Zea mays
ttaatctctctagcccaaactcgaccgcctggggtggaggtaaatacactctgggtcggcccgccctcccgcacgcgccgccgccgccaccgccacctgccccagcgcgccgccgccgcagccaccatgggtcgcgtccgcaccaagaccgtgaagaagacctccaggcaggtgatcgagaagtactactcccgcatgaccctcgacttccacaccaacaagaaggtgctcgaggaggtctcgattctgccctcgaagcgcctccgcaacaaggtggctggcttcagtacccacctgatgcgccgcatccagcgcggcccagtccgcggcatctcgctcaagctgcaggaggaggagcgcgagcgccgcatggacttcgtgccggagaagtccgcgctcgaggtcgaagagatccgcgtcgacaaggagaccatggagatgctcgctgccctcggcatggccgacctgcccggcgttgagcgccaggctgaggtctccagcgtccccgcctacggccgcccgcagtacggaggtccccgccgtgaccgcgtctaggttcaccgccgatcgcagtggttgcgtcgtggtcgcaccgttactcacagttgttatgctactatgttaaacttgttttagatctgtggtttcttctggcgattaagttttgagcttgtctgttatgctttaagctctatagttggatctgcgtgtgatggccattagagtcatgttcttgcgccaatgaagtctcaaaagattactacgtttagataataaaaaaaaaaaaaataataaaaa

SEQ ID NO: 266323 - DNA, 325 bp, Zea mays
caaatagcgaaaccctagcccaaactcgaccgcctctgctataagtagctccactctctctcctccaagcctaccccagccgccgccgccgccaccgccaccgccaccgccacctgccccagcgcgccgccgccgcagccaccatgggtcgcgtccgcaccaagaccgtgaagaagacctccaggcaggtgatcgagaagtactactcccgcatgaccctcgacttccacaccaacaagaaggtgctggaggaggtctcgattctgccctcgaagcgcctccgcaacaaggtggctggcttcagtacccacctgatgcgccgcat

SEQ ID NO: 266324 - DNA, 1556 bp, Zea mays
cccacgcgtccgcttcgcaccttaccttctattctcaaggaaacctttatccatggcccgaggtatcatactgctcctgcttgtgacccccctcgccatctccatggcactgccatcactatcaacgagaatcgaagggagtgtcataggggagagatccaacttgttctcacagctgcactccgataattctagccctacagaaaacaaactccaaccaggtgaaaagtcctttgcatcggaggcatatgcggggaactggaacgaaccaccagaccaacaatcgcaagactccctcgagcagctagagccgtatcgagtgatatggaaacaaccagtgcaaggtgaaaagtccttcgtatccgaggcatatccggcgaaatggaacaaaccaccatcaccaagcaagcaatcgcaagactccttcgagccagaggcatatcgggtgaaatggaacaaatcaccaccaccacaccaacaatcgcaagactccttcgagtcggaggcatatcgagtgaaatggaacaaatcaccaccaccacaccagcaatcgcaagactcctttgagccggaggcatatcgggtgaaatggaacaaatcaccaccaccacaccaacaatcgcaagactccttggagcaggaggcatatcgggtgaaatggaacaaatcaccaccaccacaacaacaaacgcaagactctttcgagcaggaggcatatcgggtgaaatggaacaaatcaccaccaccacaccagcaatcgcaagactccttcgagccggaggcatatcgggtgaaatggaacaaatcaccaccaccacaccagcaatcgcaagactcctttgagccgaaggcatattgggtgggatggaagaaacatgcgcaaggagcaacggacgttgctgatgagacaacgccagcacgtggtcatggtctgcatgtcgcgaccgggatgctcttcacgaggaagagcttgcttccagggacagccctaccggaaggtaccaagttctgcggccacggcttcctcgatcccgagaggtttgaactacgagcggatgcggatgccatcccgttcagctacagccagctcgacaccatcctgaggatgtttcggatccctcgggggtccaagaaggcagagcaagtcgccgccacgctccggacatgcgaggctgagtccccagaggctcatgcctgcgccacctccgagcaggcggcggccgacttcgctgcctcctcgctcggggtcagggccagcaagctggtcgcgctcgtcaccaccgtccatggggggaaggacgccactagatacgtggtggcgcccaacggcatcacacgcatcggcaaggcggcaggggccgcggccgtagtgccgtgccacccgatgccgtacccgtacatggtccactactgccaccagccggcggacgtggaggcgctccgtgttgagctgaccgggctcggagacggtggcgtgacaaccgcgatcgccatgtgccacgccaacaccatgaactgggacgatcgctacttccaaatgctgaacgtgacgcgcg

SEQ ID NO: 266325 - DNA, 882 bp, Zea mays
tcttgtattctcaaggaaacctttattccatggctcgaggtatcatactactcctgcttgtcatccccctcgtcgtgagaattgaagggagtgtcatgggggagagatccaactcgttctcacaggactccaataattctagccctgctgaaaacaaactccaaccaggtgaaaagtccttcgcatcggaagcatatgcggtgaactggaacgaaccaccagacctgcaaatgcaagactccttcgagcgacctgagctatatcggaagcaatcagtgctaggtgaaaagtccttcgcatcggaggcatatccggtgaaatggagcatattaccatcacttggtcagcaatcacatgagtctttcgagccagaggcatatccgatgaaatggaaagaaccaccaccatcaggccaacaatcgcaagactctttcgagccagaggcatatcgggtgaaatggaacaaatcaccaccaccacaccaacaatcccaagactccttcgaaccagaggcatatcgggtgaaatggaacaaatcaccaccaccactccagcaatcccaagactccttcgagccagaggcatatcgagtgaaatggaacaaatcaccaccaccacaccaacaattgcaagactccttcgagccggaggcatatcgggtgaaatggaacaaatcaccaccaccactccaacaatcgcaagactccttcgagccggaggcatattgggtgggatggaagcaacatgcgcaaggggaaacagaccttgctgatgggacgacgccagcacgcggccatggcctgcatgtcgcgaccgggatgcttttcacgaggaagagcttgcttccagggacagccctaccggatggcaccaggttcagcg

SEQ ID NO: 266326 - DNA, 874 bp, Zea mays
accggagttacttgacgattttgactttgagcagaatgaagctacacccattaaggataaagatgtctacaagcaaaaattaaagcgacgcgcaagtcgttataagatcaagctcttgaatccgtgccgcaaaggaaagaagctgcttgtccttgacattgactatactctgtttgaccataagtcaacagctgagaatcctatggaactcatgcgcccatatcttcaccagttcctcacagctgcatatgcaaaatatgacatcatgatatggtcagcaactagtatgaaatgggtggagttgaaaatggaacaacttggagttcttagcaaccctgacttcaaaattactgcccttatggatcacttggctatgataactgtgcaatctgaaaatcaaagtagaaagaagacttttgactgcaagcctcttggtgtcatttgggctcagttccctgagtactacaacgaaaagaacaccataatgtttgatgatctaagaaggaatttcgtcatgaatccacagaacggtctcgtgatcaagccattcaggaaagcgcactcgaacaggcatgatgatcacgagctggtaaagcttacacactacctgctttcgatcggagacctagaagatctcagcaagcttgaccacggtaaatgggagtcctttgtagatgagagcgtaaagagacgcaagcgctcttagtttccgtcagtatagtgactgtcagaaagaaaaacagaacccccattttcttttcttttcagtgctatggatacctcgcagattagagtacccgaatgaccaggatttactttgaacaatatggggcttcagcctcgtcaagctacagtgcttccaaaacccccgctc

SEQ ID NO: 266327 - DNA, 802 bp, Zea mays
ggccggtgacatggcagttctttatttccagagggttacaaactatgctcagacaaggtcttatgaaatcttgcagtatattgcctcacagtcaccgactcaaagacaggcacatcagcagcagcaacgcccaccaccgccacggactcggcaggtcaaccctgcacctccacctattcccgcaccctccgcgcctccgatgccaccacagcctgcccaagcccaagttcctcccactccaccaaggcccctagttccagtggttcctcctggcgcagtgcctcctgccccgccaccaactgctcctgaagccaccgccaccaacggtcttcaggacaccgaaaccatgcaggtcgacccacctcgtgcttcactgagcggcccaccactaccacctgaggagacgctcatcgaggaggcgatccggctgacccggggccggctcaggaggcgcttggctgggggatctggaccaccgcaaaattagcgtcgatcaagatttccatctcacgcgaattgcaccacactggtctggttcttggtgattgactgagaagagggggaatgctgagttggttgaacagagtttgggtttcctcgcatgcgttctccgttgtacgaactggaaccggtttggtctcgaattgtgaatagtatcccagaaacagaagtggatgatcaattcaattcacagggtagcgctaggaaatatggttgggaaccatcttctgcaagacgcgcatgcgcgacatgtcatgagcatttagcaacgatgatactactggtcacagtagtgtagtct

SEQ ID NO: 266328 - DNA, 2069 bp, Zea mays
cccacgcgtccgcccacgcgtccgcccacgcgcccggatggctactaatgtcgagaatcctgatgttagtactcttaagttgacttctgtgtacattgcaattggaatcttctcggtgttcttcttgctatttagatcattagcagttgttgttcttggggtcaagacatcaagatccttattttctcagttactaaactcattattccgtgcaccaatgtccttttatgattctacccctcttggaagaatacttagccgggtttcttcagatctgagtattgttgaccttgatattccgtttggcttcatgtttagcattggtgctggcataaatgcatatagcaatctaggagtattggctgttgttacatggcaagttctgttcgtctctgtgccaatgattgttttggcaatcaggttgcagaagtattatttagcctcatctaaggaattgatgaggatcaatggcactaccaaatcagctctggctaatcacttgggcgagtcggttgcagggtctataacaataagggcttttgaggaagaagatcgtttctttgagaaaaattcggaacttgttgacaagaatgctgcttcatatttctataattttgcagcgactgaatggctgattcaacgcctggaaacaatgagtgctgcagttctttctttttctgccctcatcatggctcttcttcctccaggaacttttagccctggctttgtaggaatggcattatcttatggtctgtccctgaacaattcctttgttttctctatccaaaaccagtgccagctatcaaaccagataatctctgtggaaagggttcatcagtacatggacataccaagtgaagcagcagaggtcattgaagaaaatcgaccagcaccagactggccccaagttggtagggtggagcttagagatctgaagatcagatacagggaagatgctccccttgtactgcatggaatcacatgcactttcgaaggcggagataagattggtatagtcgggcggacaggaagtggaaagacgactttaattggtgcactgtttcgtcttgttgagccaactggagggaaaataattattgactctatagacatcaccacaataggcttacatgacctgcgttcacgtttgggtatcattccgcaagatccgacactctttcaaggaaccataagatataatctagaccctcttgggcaattctctgatcaacaaatatgggaggttctaggcaaatgtcagcttcttgaagctgtccaggagaaggagcagggattggactcacttgttgtggaagatggttcgaactggagcatgggtcaaaggcagctcttttgtttgggacgtgcacttctaagaagatgccgtatcttagttcttgatgaggccacggcatctatagacaacgctactgatgctatccttcagaagacgatcaggacagagtttagagattgcactgtcatcactgtcgcacaccgtatacccaccgttatggactgcgatatggtacttgcaatgagtgacgggaaagtagtggagtacgacaagcctacaaagctcgtggaaaccgaaggatctctcttccgtgatcttgtcaaggagtactggtcatacacatcgaattgaaatatctaggagaaactgtgacaatcacatgttcactcgttgcagtctcttaaaaaagagataacaggagcctgttctcacacacatccgatgaactattctatctcaagtccgaagtagaggtgtcaggcattgtcgggaagtgcttttgttaactagttgaacagggggaaacctgtcgtcccttaataaaaaggaaacctccagcgtttttttgctccgggtttgagcgaataaaccgaaatatctagtggaaggcgcatcaagtatgcatccttgatactgctgatactgcatgttcacagaaatgcttgtgcggcaggctgttccaaggctttaaactttatggtgctttacattcctaataaaccgaattgtgtatatgatgtttgggaaaattggtgatttttaaggttcaaaa

SEQ ID NO: 266329 - DNA, 421 bp, Zea mays
tagagaaaacaaaggaattgtttagggacagaccataagacaacgccattcttataaagccagagctaaaagttcctccagggaggagagccatgatgaagccagaaaaagaaagaactgcagcactcattgtttccaggcgttgaatcagccattcagtcgctgcaaaattatagaaatatgaagcagcattcttgtcaacaagttccgaatttttctcaaagaagcgatcttcttcctcgaaagcccttgttgttacatggcaagttctgttcgtctctgtgccgatgatggttttggcactcaggttgcagaagtactatttagcctcagctaaggaactgatgaggatcaatcgcactaccaaatcagctctggctaatcacttgggcgagtcggttgcaggatctataacaataag

SEQ ID NO: 266330 - DNA, 349 bp, Zea mays
gagttcagagactgcactgtcatcactgtcgctcaccgtatacccactgtcatggactgcagtatggtacttgcactgagcgacgggaaactggtggagtatgacaagcctacgaagctcatggaaaccgaaggtctctcttccgtgacctcgtcaaagagtactggtcgtacgcatcgaatgggaatatctagaagccacctccaaactacgaccgtttgcatgtttccactcgctgcatcctcttgaaaggagattcaagaatttgggcttgcacatccgaagaactattgtatttgaaatcttgagaaaaggggtcaggcattgtcatgaaatgcttgttgaaaag

SEQ ID NO: 266331 - DNA, 639 bp, Zea mays
gttagcttccttgttagccagaacactcaggcatttcacatgttcattactgcacttttgcagttatgtgatcgggctggaatgctttatggtgagcttgcaagatttgttctacgtttgctggggatcaaaagaaaaccaaagaagagcggtgttaagggcccaggagctccatcatcggagggacgaggccagcagcttgttgaggcgccgaaagttaactcgtgggacagcgtgtggactgagaatggcaagggaaagtaaagggcccgtttgggcaagagtgaggcagttctcctgaaaggagaggaggacgagtttgcttgtggaagagaaatctgcgaatatctgttcggatgcgttttgcatatgcatagaaggcataaacaaggaaccccttatgcctttttgtatttgtcatgttcttccatggtgtacatatagatcagtgtgcaatgagaaatgtgagcgggtaatgtacggctttcccccccaaaatattactgcaatagtaccgtttgtacttaaaaaagacggaaaacacaatatagatgatcctttttgtttggcctgttgctacatataaggttgtttatacatggagtcttggcatgtggtggtgccaggtattagcaaaaa

SEQ ID NO: 266332 - DNA, 1614 bp, Zea mays
ggagcacggtggctgctgcagctgttgcttcccccagagacgcaagatcaaagcttcagccgctgcaccggaggagacccgggctctaaggatggcagacttcgacgaggatgaaatgaacatgtcgtcgttccccaagaagtttggtaactcgagcttcctcatcgactccattccgattgctgagttccaagggcgcccgcttgctgatcaccctggtgtcaagaacggccgccctcccggtgctctcactgtcccccgtgaccttctggatgcatccacagtcgctgaggccgccagtgtcatctcatgctggtacgaagacaagaccgagtggggccaccgtgttggttggatctatggctcggtgacggaggatgtggtcactgggtaccggatgcacaaccggggttggaagtcggtgtactgtgtcaccaagcgtgacgccttccgcggcaccgcgcccatcaacctgaccgaccgtctccaccaggtgctccggtgggctactggatcagtggagatcttcttctcccgcaacaacgcgctgctggcgagccgcagaatgaagttcttgcagaggatcgcgtacctgaacgtgggtatctacccgttcacgtccatcttcctgatcgtctactgcttcctgccggcgctgtcgctgttctcggggcagttcatcgtgaagacgctgaacgtgacgttcctgacgtacctgctggtgatcacgctgacgctgtgcctgctggcggtgctggagatcaagtggtcggggatcagtctggaggagtggtggcggaacgagcagttctggctgatcggcggcacgagcgcgcacctggcggccgtgctgcagggcctgctgaaggtggtggcgggcatcgagatctccttcacgctgacgtccaagtcgggcggcgacgacgtggacgacgagttcgcggacctgtacatcgtcaagtggacgtcgctgatgatcccgcccatcgtgatcatgatggtgaacctgatcggcatcgcggtcgggttcagccgcaccatctacagcgagatcccgcagtggagcaagctgctgggcggcgtcttcttcagcttctgggtgctggcgcacctgtacccgttcgccaagggcctgatggggcggaggggccgcacgccgaccatcgtcttcgtctgggcgggcctcctctccatcaccatctcgctgctgtgggtggccatcaacccgccgtcccagaaccagcagattggtgggtcgttcacattcccgtgaaagctctctgggccaatggcggattcatgcatgcttcgtcgcagtgggatccttgcgttgctctgcatcagttcctggttgcagcggttcactatctgaggacgaagctgctggggggaatgtgggatcctgactgtcgaactggctacttttttgttgtcgaagctgataatactcttatgatgagctatagtagtagttcttttgttcttttgtttttgctatatataaaatacatgttctggtcccataatttggttatgttggacaattaaacgtggagccacaaatttccagtcttttgttgcctgttaaaaaaaaaaaaaaaaaaaaaaataaat

SEQ ID NO: 266333 - DNA, 1968 bp, Zea mays
aagtagacgcgagcggccacgcgaccgcccaggcgggcgtttacgcggccgcccacgcgaccgcccacacgcagcgcgaaacccggcaagtgagcggcggaggcagggacggccatggcatgcagtgggtgcagctgcgaggcggcggcgggggcgatggcgtcggaggcgtacctggagggggcgccggtgcgggaggcgcgggagctggtggcggagctctgtcggcacttctacgcgcagggatgggtcacgggcaccggcggcagcatcaccgtcaaggtcaacgaccccgccgtgccgctcgccgaccgcctcatcgttatgtcaccctccggtgtgcagaaggagaggatggtagcagaggacatgtatgtgatggctgcagatgggaaagtgctttctgcgcctgtagcaaagccatggccaaacaagcctcctaagtgcacggactgtgctcctctgttcatgaaggcgtatctgatgagaggagctggggctgtcattcacagccatggaatagagacttgcatcgcaacaatgctcatccctggtgcaaaggagttcagagtgacccacatggaaatgatcaaaggaatcaaaggtcatggctaccatgatgaattggtcattcctattattgagaataccccttatgagtatgagctcactgactccctaagtgaggcgattgcagcatacccaaaggcaactgctgtgcttgtaaggaaccacggaatatatgtatggggggagtcttggatcaatgccaagacacaggctgaatgctaccattatcttttagatgcttgcatcaagctctatcagctaggtattgattggacaacccctgaacatggttcaataaacaatccaaggagaccgcacagcattttgagccctgaaatttgtaatggatgtcatgctgctgattcatcaaagtgtgttgtactagacattgaggggacaaccactccaatatcatttgtgactgatgtcatgttcccttatgctcgtgataatgtacgaaaacatctgacttctacatttgattttgaggaaactaaagaagacatcaaactattgcgcatccaaattgaagatgatctacgaaatggagttgctggggctgttccagttccacctgatgagggtggcaaagaagaggttatcaattcattggttgccaatgttgaatcaatgattaaagcagaccggaagatcacatcattgaaacaacttcagggtcatatttggaggattggatttcaaaagaaagagctacagggagttgtctttgaggatgttcctgtggcgctaaagaactggcatgctagtggcataaaggtctacatatactcaagtggaagtagagaagcacaaaggcttctatttggcaatacaacatacggtgacctgcgaaagttcctgtgtgggtattttgataccacaactggaaacaaaagagaaacaaggagttattttgagatctctcagtcactgggcgtggacagtccatctcaaatcttattcataaccgatgtcttccaagaagccattgctgctaaaaacgctggttttgaggtgataatctccattcgcccgggaaatgccccacttcctgacaatcatggtttccgcactatcaaatcattcagcgagatctgaggaatctggtgatctggacatgtctagatatatgtaattcgcgagtgctttagcccgcggaccagttcatgcagtagaagcattatagcaccgcagcatgtcaaaacgatgtgacgtaacaataagttacatggcgaaataaaaactttggttcgttgtgtatttgcggctcatctacaattggatagtttgcatttccttgttcagcatctgtaggttgtggctgtgatcatttttaggtctcgtttgacaatgcttaacttcacgtaaatcagttttttagcttcagctgttttggtg

SEQ ID NO: 266334 - DNA, 1804 bp, Zea mays
  unsure (1)..(1804): unsure at all n locations
cgctcccggaccaccttttataagcaccaaccatctggtttcgctgccccgattcgccacgaagccgcactgtgagagagggacgcggcccgttgtcctcggcttgtacgcaatccttccgtcgctgcgaagctgatccctcgtgttcgccatggcccccagcgtcgccgtggaaaacctcaaccccaaggtcttgaaatgtgagtatgcagtccgtggcgagattgtcatccatgctcagcgcttgcagcaacaactacaaacacaaccagggtctcttccttttgatgagatcctgttctgcaacattgggaatcctcaatcccttggtcagcaacctgtgacgttcttcagggaggttcttgctctttgtgatcatccatgcctcttggaaaaagaggaaaccaaatcattgttcagtgctgatgctatttctcgagcaaagcagattcttgcaactattcctggacgggcaacaggtgcatatagtcacagtcagggtatcaaaggactgcgtgatgcaattgctgctgggatcacctcacgtgacggattccctgcaaatgcagatgacattttcattacagacggagcaagtcctggggtccacatgatgatgcaattactgattaggaatgagaaagatggcattctgtgcccaattcctcagtaccccttgtactcggcctccatagctcttcatggtggagctcttgtcccctattaccttgatgaaaaaactgggtggggtttggagatctctgatcttaagaaacaactcgaagatgctcggtcaaaaggcattgatgttagggccttggtggttatcaatccaggaaatccgactgggcaggttcttgctgaagacaaccaatatgatatagtgaaattctgtaaaaatgagggccttgttcttctagctgatgaggtatatcaagagaacatctatgttgacaacaagaaatttaactctttcaagaagattgcaagatccatgggatacggcgaggatgatctccctctagtatcatttcagtctgtctccaaaggatactatggagagtgtggtaaaagaggaggttacatggagattactggcttcagtgctccggtaagagagcagatctacaaggtagcttcagtgaacctgtgctccaatatcactggtcaaatccttgcgagcctcgtcatgaatccaccaaaggttggggacgaatcatatgcttcctacaaggcagagaaagatggaatccttcagtctttagctcgccgtgcaaaggcactggaagatgcattcaacacgcttgagggattttcatgtaacaaggctgaaggagcaatgtaccttttccctcagatccatctgccacataaggcaattgaggctgctaaagctgccaagaaagcacctgatgcattctatgcgctccgtctccttgaatcaactggaattgttgtggttcctggatctggatttggccaagttcctggaacatggcacgtcagatgcacgatcctgccgcaggaagataaaatccccgcggtgatcacccgcttcaaggctttccatgaggcgttcatggctgagtaccgtgactgaactgttacagtggctgagtaccaccgtgtagaccgaaacaaaataaagctcccccctctctctgtgtctgtgcgtgtgtgtgaactgatctctgaatggacgaacaatgtactctgttggcgcctttaatggcaattgaggaaaatttaaaaaaactaaaaaaaaaanaaaaaaaaaaaaaaaaaaaaaaaaagggcggccgct

SEQ ID NO: 266335 - DNA, 478 bp, Zea mays
  unsure (1)..(478): unsure at all n locations
tgtatcttttccttcagattcatctgccacagaaggcaatcgaggctgctaaagctgctaagaaagcgcctgacgctttctacgctctccgtctccttgaatcgactggaatcgtcgtggtccctggatctggatttggtcaagttcctggaacatggcacatcagatgcacgatcctgccgcaggaagacaagatccccgcggtgatcagccgcttcagggctttccatgaggcgttcttggccgagtaccgcgactaaactgttacgctgtgtgtgagttaagttggaggttcagtagaactgtagaagagctcagtgacagcgcagaaagaggcagtgttagaaaggcttaggtccttcttcacaggagcaacagttgtcttgtctccatcaaggagaaataaaaattttagttttacaacttcaaaaaaaaaaaaaaaaaaaaaaaaaaaaaaaaaaaaanaaagggcgcccgc

SEQ ID NO: 266336 - DNA, 266 bp, Zea mays
cgttttgatggattcttcggtgggaagtttgggctttgacgagacagaaagaagcactgtggatgtgctgcgttctgcatatccctgattcatctgagccgcggctttgattctcgtttgcttgagaaatttggggtgaaaagattatccttgattcgctgcagtggtcttgaaatgtgagtatgcagtccgtggcgagattgtcatccatgctcagcgcttgcagcaacaactacaaacacaaccagggtctcttccttttgatg

SEQ ID NO: 266337 - DNA, 929 bp, Zea mays
gaaataaatttgtgtaaaagttattgaataatggtaaaataaaatgatattattattaagaaggaaaaaaagaaaccatatggtgataaacagtttaagggctttcaatgaggcgtttttggcagagtaccgcgactaaactgtaacgatgtgtgtgagttaagttggaggttcagtagaactgtagaagagctcagtgacagcgcagaaagaggcagtgttagaaaggcttaggtccttcttcgccggaccaacagttgtcttgtctccatcaaggaaatccgactgggcaggttcttgctgaagacaaccaatatgatatagtgaaattctgcaaaaatgagggccttgttcttctagctgatgaggtatatcaagagaacatctatgtggacaacaagaaatttaactctttcaagaagattgtaagatccatggggtatggcgaggatgatctccctctagtatcgttacagtctgtttccaaaggatactatggagagtgtggtaaaagaggagggtacatggagattactggcttcagtgctccggtaagagagcagatctacaaggtagcttcagtgaacctgtgctccaatatcactggtcaaatccttgcgagcctcgtcatgaatccaccaaaggtctgctattatggcattatgccctgattagaattaggaaacgccaaactgtccagttaaaacccattgcctcattcttcaggttggggacgaatcatatgcttcctacaaggcagagaaagatggaatccttcagtctttagctcgccgtgcaaaggttcgcctggttgcatttctactatagatttgagtaacttcctaaacatattcaaggtcttttttttggtcgttttacaggcactggaagatgcattcaacacgcttgagggattttcatgtaacaag

SEQ ID NO: 266338 - DNA, 465 bp, Zea mays
tctgtgcttcagtttgttgaggtcacgtttgggtacacaccagataatctcttgtacaagaagcttgactttggtgttgacctggactctaggattgcattggttggtcccaatggcgcaggggagagcactcttctgaagctgatgacaggtgagctggttccattggacggtatggtgagacggcacaatcacctgcgcatcgcacagttccaccagcatctggcagagaagctggacctggacatgtcggccctgcaatacatgatgaaggaataccctgggaacgaagaagagcggatgagagccgcagttggtaagtttgggctgtcagggaaggctcacgtgatgccgatgaggaatctgtctgacgggcagaggagccgtgtcatctttgcgtggctggcatacaggcagccgcagctattgctgctggacgagccgacgaaccatcttgatatcgag

SEQ ID NO: 266339 - DNA, 453 bp, Zea mays
cccacgcgtccggaagaagcttggggcattcatcaagcaccagatcgaaacggattcttccgaggcatacggaggtggttttagagctggctatccggctgttgagcgctatggcttgaaaagaacccttgatcatatgaagttgacagggtctttcccctattaaagcccccgaagtaaaggagggggctttcttcccgttgtgaggataccctcccccttggagggtttggtttgggttatacataactgatatgcattccccaccaggggaattgtctgtaaatcaggagaaccctctgctgcgcggaaacttattgccaactgtctttttataggaaaaccatacatgccagttttcagacagggaccttgagaggatcatatgtaatttttgggcccctgtttttgacccccttggttatccaaaacaaggccccataataagatttt

SEQ ID NO: 266340 - DNA, 686 bp, Zea mays
cggacgcgtgggcggggatcaacgccatcatgttctacgcgccggtgctgttcaacacgctggggttcaagagcgacgcgtcgctctactcggccgtcatcacgggcgccgtcaacgtcctctccacgctcgtctccgtctactccgtcgaccgcgtcggccgccggatgctgctgctggaggccggcgtgcagatgttcctgtcgcaggtggccatcgccatcgtgctgggcatcaaggtcaccgaccactccgacaacctgggccacggctgggccatcatggtcgtcgtcatggtctgcaccttcgtctcctccttcgcctggtcctgggggcccctgggctggctcatccccagcgagaccttcccgctggagaccaggtcggcggggcagagcgtcaccgtctgcgtcaacctgctcttcaccttcgtcatcgcgcaggccttcctctccatgctctgccacctcaagtacgccatcttcgtcttcttctccgcctgggtcctcgtcatgacgctcttcgtcctcttcttcctgccggagaccaagaacgtgcccatcgaggagaagaccgagagggtgtggaagcagcactggttctggaagcgctacatggacgacgacaaccaccacatcgtcaacggcaagctcaccggcgccttcggtaactactccatctgctct

SEQ ID NO: 266341 - DNA, 1143 bp, Zea mays
gtggttctactattcgcacgctcgccgacataaaccgtggccctgccggtttcccaggtgccggaagcagcatcaactataacgacgagccctatgattactacaccggcggcgagaagagtggaatgcttgttcaagatccaacaggaagaaatgacgtggatgcaatatttgaacaagcaagacaggcgggcgctatccatggaatgcccccttttgctggtggcgagtcttccagctctaggagctttactgggactggccgacttcttacaggggagacagtaccatctgctgcacctcaggaaccagtaccagttcgaatacgccacaatatacatttgtggaacaatggctttactgtggatgatggtccactgagatactacgatgatcctgaaaatgaagagttccttgagagccttaagatgtcaaagtgccccaaggagctggtgcctactgatggagaacatgttgatgtgtctgttattaaaaggatggaagattaccgggaacctgtaaggcctcaatcagctttccagggtgttggaagaacccttggtggtggaccttccccagatgagagtgcaacacctgctcctgcaccagcggcccctgctgcttcgaggtccgctggcatagtcgtggatgactcccagccatttacatccatacagctgaggctggctgacggcactcgcatggtcgcccggttcaacatgcaccacaccgtgggagacatcaggtccttcatcgacgcatctcggcctggaaccgcaaggccgtatcagctgcagacaggtttcccacccaagcagctggctgacccaacgcagaccgtggtgcaagctggactggcaaactcggttatcatgcagaagatgtaatgtttcgacaacatgggtaactaggatgcatcgtactgcatcttttgagaactgtcttattgtggttgatatactgctctggtgcgtcattcatggtcttaaagagtttatagttcatctatgacccgaattatgctttctgatttacagcagatactgaagtgtcgatttaacgtttatgcatgtctggatataatccaccgttgttgcttgcaaaaaaaaaaaaaaaaagcggacgcgtgggcggaaaagtggg

SEQ ID NO: 266342 - DNA, 983 bp, Zea mays
gagcgggaggccatgtgggagcagcagcacgagctcggcgcccagaagatgtattccgtctgctccgagctcggcggtcttttcctcaaggctgctcaaattctggggaaacctgacctggcacctatggcttgggtgaagagacttgttacgctgtgtgacaaggccccagccacgccatttgatgtggttagagatgttgtggagaaacagttcgggaagaacttcgatgacatgttcgaattcttcgatgtcgagcctgttgggtctgcttctattgcacaggtgcatcgagcaaggcttaaattgtcaaagactgacgttgctgtcaaaaggttcaacatccaggagccgaacatctgatgatggttgatattcggaatatgcaagcaatggccttgtttctgcagaagcatgacctcaactttgatctattctctgccaccaaagagatggaaaaacagggatgtgatgagtttgactttgtgcgcgaagcaagagcaatggaaagaatacgagaatttctacgtgtcactaataagaaacctccggttatggtgcctcgtgtgattcctgggatggttagcagagaagttttgataatggaatttatcaaggggaccccaataatgaatcttggcaatgaaatggctaaaaggggcatagatcctggtggtaagattgcagcaatggcaaagcagaagattttgtcagatcttactcttgcatatggtcaaatgatcttgaaggatggctttttccatgcagatccacacccaggaaacatccttatctgtaaggatacagaggtggctttacttgattatggacaagtgaaagaaatgccagaagatttacggcttgcttatgcaaatcttgtagttgcaatggctgatgatgatttctcgagggctgaggaaagtttcagggagcttggtattcgaacatgggccatatctgacaacaggtagaagaattgttca

SEQ ID NO: 266343 - DNA, 779 bp, Zea mays
attgtttcagtgtcagcatgtgccgatttaactttaccaagtggtgctggcctctgtatagaagctattcatggtcctacgttcttggtatgtgtctgatagctcatgctacctttcgtttgttcatcttttttctatcatattttgttgtgttcaagtgggtaacatctgttctacagtatctagacataggttacactttaaaatccgcttgttcttcaatcaactgactgaacagtccaaccttctagagttaatgggcggcaaatgtgcaattctctactatagtcaagttgacgaccgctagtgaagataaatggtgtggagtaccgtaattcacccgattcctttttctctcccacaacaggttgcccatagttgggaggctcttgacggctggctagacgccatacgccttgtctacactatttttgcaagagggaagagcgacgtacttgccggtattattactggttaaatgtcttgctgcaaatgcaaaactgccaccgaagagccgcaaagttttggagattcagcggcagccttatccgttgaatgccctctttggtttgtgttattatttttcccgtctgtgatgtcagtcttcctagatttagccatttagggtattaggtatatcatatatattcatttgtaactactttccactgattggcgataggtccgttttccttttgtaaaagtggccgtgtgactgtattgtgcattcacaccagatgtatcggacattcttaagtttgtgattttgtttctctgta

SEQ ID NO: 266344 - DNA, 644 bp, Zea mays
cccacacgttcaccgacacccgggcgaacactaccatgacgagtactagactctctagggacgcttcatggtcctacgtgcttgccagtgctttcctgagaggctcccggcgtgtgtcctaacgcgatacgcctatgtcacactatatgtgtcagacgcaacatcgattaccactgccgtattatgactgtatgaacgggtttctgtactagggaatagcgattaactatccgggtgttgatactgccactggagaggcgcgaagttttggtgattcagcgtcagccttatcagttaaatgcccccttcgatttgttagtatgcctaccatcttgtgaattgtcagtcttcctagatatagtggtatatcaatcatatattcgggtgtaactcgtactttccagtgattggcgataggtccgttttttctttgtaaaagtggccgtgttactgtattatgcattcacagcatatgtatcggacattctttaagtttgattatatttctctgtaacaatgaatcgaggcaagatgggctctggccctgctgggctccacctccaatatgtagagccgaggaacaggagggaaagaacaaggatatactccctcattcccaaccataatgtgtttttgtttgcttt

SEQ ID NO: 266345 - DNA, 672 bp, Zea mays
caattccatcgcaccacacggggattgggaggtatcacagttcattttgaatcatgagggcctccagcaggctgatgcttctgaccagcctccatcgcaatcccctgggcatttggacaggggcagaaagcctgtcagaataaacgttgcagatattgtttcagtgtcagcatgtgccgatttaactttaccaagtggtgctggcctctgtatagaaactattcatggtcctacgttcttggttgcccatagttgggaggctcttgacggctggctagatgccatacgccttgtctacactatttttgcgagagggaagagcgatgtgcttgccggtattattactggttaaatggcttgctgcaggagggaagagcgatgaactagccgggtgttgttactgccactggcagaggcgcgaagttttggtgattcagcgtcagccttatcagttaaatgcccccttcgatttgttagtatgcctcccatctgtgatgtcagtcttcctagatatagggtatatcaatcatatattcggttgtaactcgtactttccagtgattggcgataggtccgttttttctttgtaaaagtggccgtgttactgtattatgcattcacagcatatgtatcgggcattctttaagtttgattatatacaaacacaccaat

SEQ ID NO: 266346 - DNA, 2340 bp, Zea mays
cacacgctgccacgcacccacggtccgcggaccgcgacccacccgacccgcgatcgccatcgcctcacgcactcgcatcctcccggactacccataaaaccaccgcgacggcgacggcgacgggtcctccgcttcgcctaccccatggccccgaaccaaaccaaaccaaaccaaaccaaaccagcccagatcagcgaaacacactccgctctcccgagaccggacacatggcggcggcggcggtgacgtccaacggcggcgcagtggccgcaaacgggccggcgcccggccggctggcctccgtgtacagcgaggtgcagacgaaccggctcctgcacgcgcttcccctcccctccgtcctccgctccaacttctcggtcgtcgacggccccgccagctccgccgcgggtaaccccgatgagatcgccaagctcttccccaacctgttcggccagccctcggcgtcgctggtgccgtcggccgagcccgcggcgaccaggccgctaaaggtcggtgtcgtgctctctggtggacaggcgcccggcgggcacaatgtcatctgcggcatctttgattaccttcaggagcgtgcaaaaggtagcaccttgcttggattcaagggaggccctgctgggatcatgaagtgcaaatatgtggaactcacttcagactttgtgtatccctacagaaaccagggcggattcgatatgatctgcagtggaagggacaagattgaaacaccggagcagttcaagcaagctgaagacacagccaacaagcttgatttggatggacttgttgtcattggtggtgatgattcaaacaccaatgcctgcctccttggtgaatactttaggtcaaggaacatgaaaacccgtgttattggttgcccaaagactatcgatggagatctgaaatgtaaggaggtaccaacaagctttggatttgatactgcttgcaagatatactccgaaatgattggcaatgttatgactgatgcaagatccacaggaaaatactaccactttgtgaggcttatgggtcgtgctgcttctcacattacgctggaatgcgctttgcaaacacaccccaatgctgcactcattggggaagaggttgctgcaaagaagcaaacccttaagaatgtcacaaactacattactgatatcatctgcaagcgtgcagatcttggttacaactatggtgttatccttataccagaaggcctgattgatttcatcccagaggttcaaaaactcatcgcggaattgaatgaaattttggcacatgatgttgttgatgaggcaggggcctggaaaagcaagcttcagcctgaatcaagggagctgtttgagtttttgcccaatactattcaggagcaacttatgcttgaaagggatccccatggcaatgttcaggttgcaaaaattgaaaccgagaaaatgctcattagcatggtggaaactgaactggagaagagaaaggcagaggggagatactctgcacatttcagagggcaagctcatttctttgggtacgaaggaagatgcggccttcctactaattttgattctaactattgctatgcattaggctatggtgctggtgcccttctccaaagtgggaagacaggacttatttcctcggttggcaaccttgcggctccagttgaagaatggactgttggtggaacagcattaacatcactgatggatgttgagaggaggcacggcaagttcaagccagtgatcaagaaggctatggtcgaacttgatgctgcacctttcaagaaatatgcatcgatgcgtgatgagtgggccctcaagaacagatacatcagccctggccccatccagttcagtggccctggaagtaatgactcgaaccatactttgatgctggaactcggtgctgcgctatagagatgcgtcctttactttgttcttacagtttttgggagtggagactggccactggagcagcctgcaggtctccatattgtgtgtgaaattgtttaataagaggtttgatgggagttttttgcgtagccgactggatgtggtagcaaaataagaactgggttttttagttttttttgtatgatttacgcaccaactgaccggtcttgtagctccgattctgttccccctggttggctggttgcaatctcttgagaatgaacaaaatgaagttgaaccatgagactgattcagttcgcttgcttccagtagcaggttattacacattgtcgtttctgaggtccagaaatagcacgtgtcctactcttgaataatgtattccctctgttttaagttataagtccagacttcactttacatt

SEQ ID NO: 266347 - DNA, 714 bp, Zea mays
tcgtctttccacgcgtccgcccacgcgtccgcccacgcgtccggattctaactattgctatgcattaggctatggtgctggtgcccttctccaaagtgggaagacaggacttatttcgtcggttggcaaccttgcggctccagtagaagaatggactgttggtggaacagcattgacatcactgatggatgttgagaggaggcacggcaagttcaagccagtgatcaagaaggctatggtggaactcgatgctgcacctttcaagaaatatgcatcgttgagggatgagtgggccatcaagaacagatacatcagccctggccccatccagttcagcggccctggaagcgatgactcgaaccacaccttgatgctggaactcggtgctgagttatagagacgcgtccttcacttatttttgttcttacagttttgggagtggagacttggacactgggtctcctggagcagcctgcagtgcagtctccatattgtgaattgtctaataagaggttcgatgggagttttttgggtaccgactggatgtggtagaaaataagaactggttctagtttttttgggtatgatttatgcagcaactgacttgtcttgtagccctgattctgttcccatgtttgcaatctcgtgagaacgacccaacaaaaaaaaaaaaaaaaaaaaaaaaaaaaaagggcggccgctcgcgatcaaaga

SEQ ID NO: 266348 - DNA, 656 bp, Zea mays
atcacggcgggcgccgacgtgctggtgatgccctcccgcttcgagccctgcgggctggaccagctctacgcgatggcatacggcaccgtccctgtggtgcacgccgtgggcgggctcagggacaccgtggcgccgttcgacccgttcagcgacgccgggctcgggtggacttttgaccgcgccgaggccaacaagctgatcgaggcgctcaggcactgcctcgacacgtaccggaactacgaggagagctggaagagtctccaggcgcgcggcatgtcgcaggacctcagctgggaccacgcggctgagctctacgaggacgtccttgtcaaggccaagtaccagtggtgaaccctccgccctccgcatcaatatcttcggtttgatcccattgtacatcgcgcgtttgacggtctcggtgaagaacttcatatgcagtgacgcccccctggggtcggtagcagtactatgggattgcattgagctgtgtcactatgtgctttcgacaggacagtagtgaaggttgtatgcaagtttattttttttcattactgatatttggaatgccaacacaataaatgaagctactatgtgtttcgtaagaataatcttacttatttttaggtgagacttcatccaaaaccaaagtttttttt

SEQ ID NO: 266349 - DNA, 482 bp, Zea mays
  unsure (1)..(482): unsure at all n locations
gtgaactgggactttcctgcaaagcctaagttatttgttcatagagttggtcgagtggctagacaaggtagaagtggaacagcttatacatgtgtcacttcagaggacatgccatatttactggacctacatcttttcctttcaaggcctcttagacctgctccaacagaggaggaactcctaaaagacatggacggtataactatgaaaatcgatgaagctattgcaaatggggaatcaggttatggacgatttcctcaaactgtccttgatcttgcctctgatggactaaaagaagttattactggatgtacggagttgatagcattagaaaagccatgtgctaatgctttccggttgtatctcaagactcgtcctatgccttcaaaaganaatctatcaaaagggtaaaagatttgcctcgtgagggtcttaatccaattttcagggatgttctccggtcaaatgaactttcagctctt

SEQ ID NO: 266350 - DNA, 1020 bp, Zea mays
gtttatgttcgcgagcggcccccctttattttttttttgtttttttttttttcacgagcacaccagtacataatatcagaaaatgttggatacacataatccggaaagcaagcttgggagcaacaacactaggactgactgacgcactccgcaaaagtgacacaatcttgagcgagaacacgagctgtgcttaggccagggcagggaactgagcctggtcttcgatcgctggagcagcagctggtccccgataaccgccgttgtaaccaccacggaaccccccacggcccctaccacggccacggccactagggttatagtacctttcgccttcagctggcttcaagaactcgttgatgctcagggacttcttgccccgttcttctctttcagcactttctttctttttcaagtccttgtcagagcccagcttgataaacacttcatcgccatcctttttaactgacagttgttgcatggcctgtagctccttgtcaatttcaacttttctctcctcagccttaagggagagtaaagcttttcgtttttcctccagtaccttttcatattcctccaaagtcatctccttatcctcaggttccttttcttcttcattctccgcgccctccttgtccttctcaacctcagactgtggtgcatcttcaggtttcttttcatcctccaccacggcagtagtctcctcaggattaacagcatccacagtgtcctgttcaaggccttcatcagttgcagttccccaatttccacgcccagccccttcacgcttcatcccgtagccacggcctgtgccgctgtggcgctcatatgcccggcgaggacgtccgaactcattcccagcctgcccatcgctgtacccaccacgtcgcccacctccacggtaaggctggcggggcccacggcccctctctgcctgcctaccctcaccattttcaccgcgagcaactccaccgtccccaaaaccgccgcgacccatccctgccacctgtgcgctgcttcttc

SEQ ID NO: 266351 - DNA, 522 bp, Zea mays
ggccgccctttttttttttttttgatccaaggaaaaaagtaaataaatctggagaccggtcaggctcgaaggatgtgtgacaagtctgtcaacagccatcagccaggcaaacagaacacgacacccctcagctgagcttagcaaaaccatgcaatcacgagcacaccagtacataacatcagaaaatgttgcatacacataatccggaaagcaagcttgggagcaacaacactaggactgactgacgcactccgcaaaagtgacacaatcttgagcgagaacacgagctgtgcttaggccagggcagggaactgagcctggtcttcgatcgctggagcagcagctggtccccgataaccgccgttgtaaccaccacggaaccccccacggcccctaccacggccacggccactagggttatagtacctttcgccttcagctggcatcaagaactcgttgatgctcagggacgagagtctggcattgaacaatgggacgaagagggccagcagttggtcgtgg

SEQ ID NO: 266352 - DNA, 906 bp, Zea mays
  unsure (1)..(906): unsure at all n locations
cacacacacagtcacacacacaccgtcctccctccttggtccttggctccccttgctaccttgccttcacagatctcccgctccccaacagaactgtcacgtctcgacgcccgggggccgtggtattacggctcgtcgcggctcggcggtggtggcgcgcactagaccggatcgagcagcggatggacggcggcggcgggctgggcggcctgcggtggaccgcggaagaggcgtcgacgatcggaggcatcgccacggtgtcgctgctgcactccttcatccccacgcactggctccccttctccatcgtcgcgcgcgcgcagcgctggccgctctcccgcaccctcctcgtcactgcatttggaggtgttcttcatgttgtttctacggctcttcttgggataactgctgttactatggcaaatactatagctggcgaagaaacagtgcataaacttgcctcgctgttgctgatctttcttggagcaagttatatcctcttgtttgccttaggaaaaggtggtcatagccatgcccataatcatccaatggaaaaaatggcagtcgccggtcttgtacttgtacctgcattatcaccttgtgcaacaactcttccagtttttcttgctgttggcaactcttcctcaatgatgattcttgcaatcattgtgctcctcttcagcaccatcacagtgatgacatccttggtggccctttcattctacggtgctagccagtatcaagttccactgggtggagcgttacgacaagatcctcgtcggcacggtgctgtgccttgttggagtcttaacatatgtgttccatcatcacgatggtgatgagcatgtgcaccagaaactcgtatctcnctagatgcatacatactgaagttccatctctgttgct

SEQ ID NO: 266353 - DNA, 1358 bp, Zea mays
ggggattggggaggccgtctatgttgcgtgttgtttagacgcgccaaaaggctacagcgtggaggaggctcatcaagcacaagcacgccacgcgatccacacacggcaagcaacgcccagggctcgtgctcgccccgcgacccgcgaaagatctgtgctggttcgctcgctcgctcgcgccgcgccgccgcgtgggggtgccgatgagctgcgcggggcaggccggcgggtggctgctcgactacgcgctggtggaggaggagatccagggctccgagttcatctacatggtcgacgacccggccgtctccagcgtgatactggggtttgatgctcccaggaaggaggacggcgtccaggacaaccccggcgccaagaagagatcccggccggagtccagcgcgccacccggcaccaaggcttgccgtgagaagctccggcgagacaggctcaacgaaaggttcaacgagctctgtgccatcttggaacccggcaagccacccaaggccgacaaagtcgctatcctaagcgacgctgcccgtctcctgaaccagctgcagggcgaggcccagaagcttaagcaatcgaacgaatcgctccaggagtccatcaagagtcttaaggctgagaagtccgagctgcgagacgagaagacgaggctcaaggctgagaaggagaggttggagcagatgctcaagggcgtcgtcagccacgccgcggtggctgctccggggcccttcgtcccgcaccctgctgcggtcgctccatctttccaccaccacccggcggcgtttgctcaggctggaaagttcgtcccgtaccccagctacccgccgccggctgcgttctggcagtggataccgccgacgtccctcgacacgaccaaggaccccgcacactggccgccggtcgcctagccgacctaccacctcaccgtggcatcattcatcggtgatgcgttgccgtgtgtactgaatttgatcgaagcatgcctgaaaaaagaaaccttggctgctgctcgtgtcaaggacgtgatgtgctgaagttcaggcgatctaggtcggctggagaagtctatgtaacagccataatgctaaagcaatgaaagtgatatattaattgaatcgggctagtgtttcctgaaactacggttatttagacattgcctggaaggctagaacaatgcaaacttgggtaacattgtgacaaagatcttaagtagtttaccatctccatattcaaactccactacgcgcagagtgcaaaacagtgttcagacaatgaccatataactgaactgctggaggtctaacaatgcaaatttggctaacattgtgggctgcaatatgagaatatgt

SEQ ID NO: 266354 - DNA, 871 bp, Zea mays
cggacgcgtccgcccacgcgtccgcccacgcgttcgcgcactcctgccagagaccaaactattcgtatcgtgcgtaggtgttgcttgctgttgcaacggaccatccatctagtgcttgcattgctgtcgcactcgctcagctatctccaccgctattggttgttgtttggttacccacgccctgctctctgataccagttgatagcagcagcagctagctataggttgtcagcaggatcgaccagatagatagcgcggatcggaattaacagcgctgcaggaggatggtgaagagcacgacgacgatgggggcggcgagctgcggcggcggcgtgctgccgctggcgtcgctgaaccacatcagcatcgtgtgccggtcggtggaggcgtcgctgcgcttctacacggatgtgctcggcttcgtccccatccgccgccccggctctttcgacttcggcggcgcctggctgttcaactacgggatcggcatccacctgctgcagtcggaggaccccgccagcctcccgccggagaagggagagatcaaccccaaggacaaccatatctccttccagtgcgagagcatggtggcggtggagcggcggctgaaggagatcggcatcccgtacgtgcagcgctgcgtggaggagggcggcatcaacgtggaccagatcttcttccacgaccccgacggcttcatgatcgagatctgcaactgcgacaacctccccgtcgtcccgctcgccggcgaccagcagcgcgcgccggccgcctgcaggcgggctccggcggcggtcaataccgtcaagcagcagcagcagcagggcagcgtggtgcctgcttcttccgctccggtcacgacggaggcggc

SEQ ID NO: 266355 - DNA, 416 bp, Zea mays
gaacaggcaacgcactactcgttcgtatctttaagcttgctgctgcagcgtaagaaaaagcagtctgcactcggtcggtcggtcgctctgttcagctagctgcatgctcggccaccatatctcctccagtacgttcgtcgttctccacgccgctatctggtctgcggtaagcagcagctagaggccgttgtgtaggctacacagaagatcatcgaggatgctggtgaagaagaacaacagcacggcgatggcggcgggcgtgctgccgctggcgtcgctgaaccacatcagcatcgtgtgccggtcggtggaggcgtcgctgcgcttctatgcggacgtgctcggcttcgtgcccatccgccgccccggctccttcgacttcgacggcgcctggctgttcaactacgggatcggcg

SEQ ID NO: 266356 - DNA, 1947 bp, Zea mays
gcctcatcatcagtatcacatgtggtgcagaggagcgtactttttgatggacaattgaaagaaaaaagaaatagtttaaggaggtttctagaagcaacggtaaaagaaagtttattgcttttaatattaggttaggtgtagaattgattaattgcatgagtagggtttctcactcagcttggtgattgcatgcagggtttcataactgaccatgagagggcattggaagaactttttagtgaaaatgcagaaggatctcacaagtataatgcttgtctgaacacaatggctactcgtatatccacagtatttgcatcaatgagggaattccctcgtgtacactaccgtattgccaagacgattgatgcttctacaatgacaacaccccgagacttagtccccacaaagcttgctgccagtgtatggaattgtcttgcgaaatataaaacgacaatacctgaatttcctcaaacagaaacttgtgagctacttatagtagaccgttcaatagatcagattgcaccaattattcatgaatggacttatgatgctatgtgtcatgatctgctttgtatggatggcaacaagtatgttcatgaggttccaactaaaaatgggtcggcaactgaaaaaaaggaggtcctgttggaggatcatgaccctgtctggcttgagcttaggcatgcacatatagcagatgcaagtgagaggctacatgataagatgaccaacttcatttcaaagaacaaagctgcacaattgcatcaagcacgaaccgatggagaattatcgacaagagatttacaaaaaatggttcaggctcttccacagtacagtgatcaaattgataagctttccctgcatgttgagattgcaggaaaactcaataacataataagggaacaatgtcttcgggatgttggacagctagagcaagatcttgtgtttggcgatgctggaaccaaagaactaatcaactttttgagaacacaattggttgtaagtcgtgaaaataaattacgcttgctgatgatttatgcagcacttaacccagagaagtttgaaagcgacaagggtgcaaaattaatgcagttggcaggattatctgctgatgacatgattgctgtaaataatatgcgttgcttatgtgggcctgataccaaaaagtcttcagtagggggttttacactgaaatttgatgttcacaagaagaaacacacaaatcgaaaagagcgaacaggggaagaatcaacatgggcactctctttcgattttaccctattttggagcaattgattgaaaatcttagcaaaggtgagctgccaaaagatgaatataactgtatgaatgaccctagtcctactgttcatggactgccaaccagtagctctgcccgaacaagccccgctcactcaatgcgatccagacgaacaggtggcacatgggcaagacctcgtggctctgatgatggatattcaagtgattctgtgttgaagcatgcctccagtgacttcaggaaacttggtcagcgtatatttgtttttgtaataggcggtgctactcgatcagagttacgtgctgcacacaagctttcatccaagctgaagcgagacatcatccttggttcatctagccttgatgatcctccccagttcatcacaaaattaaagttgatgtcagtagaagaattgacacttgatgaccttcagctgtaaatggtgtccgcccacacggagtgtaaccttttattttctctgttctgtcagctcttatttgtgggggcctgtcatattcattcggtgaaatgcattcttaataccacttttactggtgaatgtaagaaaaaaaactgttatgcaattaatcttttcatgcaattattgtgcaaccaaaataccagaagtcatgagaagttctcaaaattttattgatgaattttatttactc

SEQ ID NO: 266357 - DNA, 1774 bp, Zea mays
ttcactcgtccgcccacgcgtccgcactgattgggctccaagatcggccgctgccaactggggggcctcaccgccacccgttcttggaaaacagcacgctacttacttgaaagtaaagggagatacttgccgcgttgggattctccaactccaaccaagacgaacgatttcatcccactaatcctttttcttttcttttcgtttttatttttaatttcttggttcggttcttgatcacctgttcttccttatgaccttatccaggaaattagattatcaggtgcttctatttgtttgtgcatctcttgtttgcgcctgcgatctggacctttgtgggctcgtcaacaaaagagaagatgagcctttcttgttggtagttacaaccggtggcgtctcttgttgtgcaggtgcattttgtgtgaggatccagacgcaggaggatggctctcaagaagttgctgcagctcttttgtgtcggaaagaaggattccaagaagaaaggtaaattcatcgatccactctggcaagcctctgcctcccgctcctctgtgaatgtcactgcaaacaagactcatttggatccctgttcaagtgggaatgacactgtaagcgtgcaaaaccatgaagttgaatcctcaagtacggtttcctcgtgggcaaggacagagcaaggaactgagattgctcatcatacgccctttagtcaatttgatgttgtccaagatttctcggatcaccactatgcaaagacttcagcaggaaaggtcacaaaggattgggtgaaggcaatccaaagtgaatgggatcttctacagaaaaacctacctgaatctatatacgttagagtctatgaggacaggactgatctgctgagggctgccatagtcgggccagcaggaactccataccatgatggtctgttcttcttcgatgtccgttttccttgcgaatacccaaagtgcccaccaaaagtatactaccattctggcggacttcggctgaacccgaacctgtacgagagcgggaaagtgtgcctgagccttctgaacacctggtggggcaaggggtgcgagaagtggggcaagtcgagctccagcatgctgcaggttctggtctccatccagggcctcgtgctgaatgacaggccatacttcaatgagccaggatccaagaactcggctgaaacgacaggtggtgagaggtgttccctggcttacaatcagacggccttcgtcagatcatgcaagacgatgctgtattcactccggaagcctccaatgcattttgagacccttgtgttgtggcacttccacgagcatgagcgtgccatcctcgacgcttgcagggcttacatgtctgggacagtcgttgggtcgtctgctgggactgggagcaaccgcagatacgtccatgacaagtgctttgcagaattccacaagtcgctgacgctctacactgaacatctcagggctgagtttgctgcaaacacaagacgagtgatggagctggaaacagaagacgagatcgtgcctagcatagcagctagcgtgaaatcgtgttgaaggcaaatgccccacggtgttgtatgttgctctcatcatcagatatttgctggcttagctatttctagcctcattctacttcattcatgtcacttgaataatctaattcatggcaattgtacctgtccctatacctagatggcttaaaatctgaaggtttattacagtttctttctgatgaaaaaaaaaaaaaaaaaaaaaaaaaaaaaaga

SEQ ID NO: 266358 - DNA, 739 bp, Zea mays
cactgtttgggctccaagatcggccgctgccaactggggggcctcaccgccacccgttcttggaaaacagcacgctacttacttgaaagaaattagattatcaggtgcattttgtgtgaggatccagacgcaggaggatggctctcaagaagttgctgcagctcttttgtgtcggaaagaaggattccaagaagaaaggtaaattcatcgatccactctggcaagcctgtgcctcccgctcctctgtgaatgtcactgcaaacaagactcatttggatccctgttcaagtgggaatgacactgtaagcgtgcaaaaccatgaagttgaatcctcaagtacggtttcctcgtgggcaaggacagagcaaggaactgagattgctcatcatacgccctttagtcaatttgatgttgtccaagatttctcggatcaccactatgcaaagacttcagcaggaaaggtcacaaaggattgggtgaaggcaatccaaagtgaatgggatcttctacagaaaaacctacctgaatctatatacgttagagtctatgaggacaggactgatctgctgagggctgccatagtcgggccagcaggaactccataccatgatggtctgttcttcttcgatgtccgttttccttgcgaatacccaaagtgcccaccagtacgtgaccactagacatccatcatcctgcctctgcctctctggtatagtttcttccattcaaagtgagcagc

SEQ ID NO: 266359 - DNA, 750 bp, Zea mays
tcgtccacgcgtccgcccacgcgtccgcccacgcgtccggtttaagcaaataatgattattgttaattggagaatttacacctgaaatgagctgatcttctgttgctgctagaatctatatacgttagagtctatgaggacaggactgatctgctgagggctgccatagtcgggccagcaggaactccataccatgatggtctgttcttcttcgatgtccgttttccttgcgaatacccaaagtgcccaccagtacgtgaccactagacatccatcatcctgcctctgcctctcttgtatagtttcttccattcaaagtgagcagcagtacttgattgatgtcgtgtgttcagaaagtatactaccattctggcggacttcggctgaacccgaacctgtacgagagcgggaaagtgtgcctgagccttctgaacacctggtggggcaaggggtgcgagaagtggggcaagtcgagctccagcatgctgcaggttctggtctccatccagggcctcgcgctgaatgacaggccatacttcaatgagccaggatccaagaactcggctgaaacgacaggtggtgagaggtgttccctggcttacaatcagacggccttcgtcagatcatgcatgacgatgctgtattcactccggaggcctccaatggtgaactgaacaaatatgaatggatactccatctcttgattgattgattgattgattgatatagcttcatctccttccctgcaac

SEQ ID NO: 266360 - DNA, 613 bp, Zea mays
cccacgcgtccgcgcaccgcactgattgggctccaagatcggccgctgccaactggggggcctcaccgccacccgttcttggaaaacagcacgctacttacttgaaagtaaagggagatacttgccgcgttgggattctccaactccaaccaagacgaacgatttcatcccactaatcctttttcttttcttttcgtttttatttttaatttcttggttcggttcttgatcacctgttcttccttatgaccttatccaggaaattagattatcaggtgcattttgtgtgaggatccagacgcaggaggatggctctcaagaagttgctgcagctcttttgtgtcggaaagaaggattccaagaagaaaggtaaattcatcgatccactctggcaagcctctgcctcccgctcctctgtgaatgtcactgcaaacaagactcatttggatccctgttcaagtgggaatgacactgtaagcgtgcaaaaccatgaagttgaatcctcaagtacggtttcctcgtgggcaaggacagagcatggaactgagattactcatcatccgccctttagtcacattcgatgtgtccaagaattctcggatcaccactatgc

SEQ ID NO: 266361 - DNA, 387 bp, Zea mays
tccatgcgtccgccaagatcggccgctgccaactggggggcctcaccgccacccgttcttggaaaacagcacgctacttacttgaaagtgcattttgtgtgaggatccagacgcaggaggatggctctcaagaagttgctgcagctcttttgtgtcggaaagaaggattccaagaagaaaggtaaattcatcgatccactctggcaagcctctgcctcccgctcctctgtgaatgtcactgcatacaagactcatttggatccctgttcaagtgggaatgacactgtaagcgtgcaaaaccatgaagttgaatcctcaagtacggtttcctcgtgggcaaggacagagcaaggaactgagattgctcatcatacgccctttagtcaa

SEQ ID NO: 266362 - DNA, 1031 bp, Zea mays
cttgtgtacgagtatgtggacaatggtaatcttgaccagtggcttcatggtgatgttggagaagtaagcccactaacatgggacgtcaggatgaacattatgcttggaaccgccaaagggttggcttatcttcacgaggggctggaaccgaaggttgttcaccgtgacatcaaagctagcaacattcttcttgaccagcagtggaacgctagagtatcagattttgcggcttgcaaagctattgtggtcagagaaaagctatgttacaacccgtgttatgggaacctttgggtacgtggcgcctgaatatgccagcaccggaatgctgaacgagaggagtgatgtatatagctttggcgtactcataatggagatcatcactggtagatctcctgtagactacacaagagcagctggagaggtcaacttggttgagtggctcaagaccatggttgccgagaggaaagcggaggaagttctggacccaaagatggctgaaaagccttctcccaaaacgctgaaacgggcgctcctggtcgcgcttcgctgtgtcgaccctgatgcgaacaagaggcctaaaatggggcatgtgattcacatgctcgagatggacgatctcctcttccgagatgataagaagcccgggagagacgttcatcctcacggttcagacagatacagctccaaggaggaagggagcatcagcaagcgcgagcaccaccaccaccaccaccatcggcacagatgatacacagcaagcgcgagcatatgaggattgccattagagagtagcgacattaaccatgttccccacttctttcccctcccgttcaatctcactggtctttgattgtattatatgtgagcatccatcattctgtgacgatacttgatacttgaatcgcacacacagacacaatgacacgcgagtgtaggggaaaagataggcatgatgttgtgactgactaacatgcccaggccaggccaaaaccctgcagattttcaaaaaaaaaaaaaaaagcgcgcccgct

SEQ ID NO: 266363 - DNA, 485 bp, Zea mays
cccaatcagaagagcggcggcgcgggcggacaaggagcaggcggaggaggagttgtgccaagccacaatgggtatctcgcgtgactcgttgcaccagcaccatcggcacagatgatacacacagcaagcgcgagcatatgaggattgccattagagagtagcgacattaaccgtgttccccacttctttcccctcccgttcaatctcactggtctttgattgtattatatgtgagcatccatcattctgtgaaaaaaaaacaaaaaaaaaaatataaaaaaaaaaaaaaaaaagaaagccctataaatgatccaagacaaagtcatgcaagaatgcgacgacaaacacattctctggtgaaactgatttataacttagctctcgtactggagctatgacttgactgctaaatccctggggtcatccaacgtattcgatatacggcaaatacctcttgtaccagctcacgctgaccctaactgact

SEQ ID NO: 266364 - DNA, 664 bp, Zea mays
  unsure (1)..(664): unsure at all n locations
ccttaaaactaccaggcctacactgcagaggaggcatatgctccacagaccagcaactatgtggcaccttgggcccagaccggagcatatccacctcagcctccggcatatgcatctggctatgcctaccctgcaccgncatgggtggcgcctacacatcctgttgattctaacccttttctttcggtcaattaccaagatccacgccctgctgccacttctgttgctcaaacagcaacatatgcacctcccccagcttcatatcccccttcaatatcttatgcacagtttgcaaccccccagtcaattcagcatagcaattctgtggcttcaccgagcaatggtcagattgcaaatcaagcacaaatgaatgtgaatcaacaaccaaaagattcttcggcagcatctagcagaccatactacatacctgataatctattcagtgatttgatcgatgcaaaaagttttggcggtggaaacaagatgggcgggcccactacaatgggtagctcaaatggtggccagcctatgattggtggaaagaaatagggttatttgtctatatatatacagctgatggtgatcggtagctgccttgttatttattatgattactttgtctggtgtacatttgtacttgtatatcgccattcccccttttgac

SEQ ID NO: 266365 - DNA, 715 bp, Zea mays
aaggaattgggaacggaccccgcaagggggaagatgtgtgctccagaagagtgcaaagcatgctggtagtgctactggcagtgattcattacccactcctaacaaggtcttgcatcatgcactccattatcgagttgctggccatcagtctagcattcatcagtttgtgcccattattcgatggccacgaatcattccttctggttttggctatggattatcgcttgggattccatcagttgctcctcaccttggcaagggaatactgggcaagccaccaatcattccttctggttttggctacggattgtcgcttgagattccatcagttgctcctcaccttggtaacggaatactgggcaagccaccaagtaatataacacccttagatcaacggagctcaactcaactagtgcacgtacggaatccacaccagcatacatgtcagcaatcatgtggcggagctatggagccgagcagctccggcgtggcttaatgataaggtccggtgatgagcagctctagtagcggttaggagtttgaggttagatttagggtgtgtttggtttgacttttggctttggcttttgccccctaaaagttaaaagccaaccaaagggctggatacaggaagcagcttttttctaaaagccgactttctcgtagtgtaaatctgaaagcacccctgaacctgcttttagtggcttttgggatg

SEQ ID NO: 266366 - DNA, 1007 bp, Zea mays
  unsure (1)..(1007): unsure at all n locations
atacctgcttacaagatcctggtacaagcatgntgtgaagcgattatcctgagccacttttgttaggttctttgtttacagctgattcaacaaatttcttatctgcatctggaagcataagtaaccagcaaaattctggatccagctctagttccatgctcaggcctgctgttaatgttggaacacatgtccctgagttcaacgtatctcagccaagtacaactttaagaggttcatctgatgtgttcaggaggtccttaatttctgctggcatttctcattctagaagttcaagcatcccattgcagcaccgtggaaattcatccacatcacatgagattaggaatcatcagccaggatcaagctctcgtgcacatcagcagtaccccttaagacccggtcattcctcggtagacaggcagagctctggttacttggaccttcagtcttttatgcagtccatagcttcaagggaaggaggcagaccaatgtcagagatccgcaatgtcttcgatcagattcgtcaggggagaaatgcacgattggaggatttgcttctcattgaccggtcacttattatgagacgagctaatttgattgatagacatcgggatatgcggcttgatgtggataatatgtcctatgaggaattgctcgcactaggtgaacgcattgggtacgtaaacacaggacttactgaggaaaagatcctgagtaacttgaaacaacggaaatgtgtcttaatatcattggaagatcctccaacaggtgttgaaccatgttgtatttgccaggaagactacgcggaaggcgaggacttgggcagactggactgtggtcacgacttccacaccgcatgcatcaaacaatggctggttataaaaaatgtgtgcccaatctgcaagaaaacagcactggacgcctaagacatggctgcattttccctccctagggaaaatccggtagccggcactaagggcaagtggttgtcatctaaccacaccatg

SEQ ID NO: 266367 - DNA, 982 bp, Zea mays
caaaccctatttttggaattttatagcattgtttcgtgatcagtcagttatatttaacatatgatctaattatcccaagcacgcttcctcgacttcctatctcgactctcccaagtcacaaccctcgacctcccccctactccaactactggaagcgccgatccatcaggttctgatcgattcttctgccccgatccgcagcggcaagcggagatgaactgcgagacctgtcagctgaaagaactggagctggaactgacggagatcagggatgttctgcgctgtattttgcacaccatattcttccatagaaccctcagcctggttcgccccaaagatgttgactgtgatttcctcgatattacttatgtacaatgtggtctaccggaactagaaaaggaagttgacgaaaagatagaccagttcagtgcatgggtggagaaacacccaaaccgcagaagccagatctgcctctcctttttcgacgagaaacacagacaccctggttggtttgtcaacaaaacagagcgcatctattgggagcaatggctcatcaatttgcaagtcatgttccccaaaagatacagcaagtcaaacagctccaaagggctgacaaacatccaaggtaattttgttaactaaagtttcacagacgtcatgaggctaccataagcatatagaatgtagcagtaacattttgtgcaatatgctcctagcaaatgccgtggaggagaccagcacaaggcgtgctgcattggaggcgtcgattaacgaagtgctgttccagatcataaagttcgccaacgagaaaaaggaccacattcctgctatccctgacaggattttcaatcacgagatcatgatcccaagctcggattctgtatttggatggaacacggacgtcattcgcagagttctgaatagcgggcacccatactcgctttaactgaagacgacatctcagtgggcgcccgtattcagt

SEQ ID NO: 266368 - DNA, 741 bp, Zea mays
cacgcttgccttatcttctcccgttcaccgcgccgtgcgcgcgcgcccccgcggcgacaaccgggcgaccgccgccgacctacgccaggtgccaagccgttcctcagtcccatcacgaggccttcaacgaacccttcgccggcgacgagaaagtacaatgtggtctaccggaactagaaaaggaagttgacgaaaagatagaccagttcagtgcatgggtggagaaacacccaaaccgcagaagccagatctgcctctcctttttcgacgagaaacacagacaccctggttggtttgtcaacaaaacagagcgcatctattgggagcaatggttcatcaatttgcaagtcatgttccccaaaagatacagcaagtcaaacagctccaaagggctgacaaacatccaagcaaatgccgtggaggagaccagcacaaggcgtgctgcattggacgcgtcgattaacgaagtgctgttccagatcataaagttcgccaacgagaaaaaggaccacattcctgctatccctgacaggattttcaatcacgagatcatgatcccaagctcggattctgtatttggatggaacacggacgtcattcgcagagttctgaatagcgggcacccatactcgctataactgaagacgacatctcagtgggcgcccgtattcagattattagcgtgctgccgccctctttggaagacggctctgctaaccatcgtggcgaaccatataatat

SEQ ID NO: 266369 - DNA, 572 bp, Zea mays
cccacgcgtccgctaaaatatggatgagtgatacaacatgtgtgaacatgcttagacttggtaggtctagtttctttcgcttttgtaagggctttagagactgaggtttacttgaagatacaatacacatgtgtgttgaggaacaagtggccatgtttttgaacacagtgggacagaaccttaggaataggttggtgggaacaaattatggtagatctggtgagactgttagtcgctacttcaacaaagtgcttcgtgctattggagagctacgagctgaacttattaggccaccatcattagagactccatccaaaatagcaggaaatccaagatgggatccctactttaaggtgtgatattcagctattcaatattctccttcaagaattttcactatttaaacccataagacccttaattgtattttggcttgtattggataaacataggattgcattggagctattgatggcacacatataagagcttcggtttccatagatatggaaccttcatttcgtggtagaaagtcttatgcccctccaaatgtaatggcggtcgttgatttt

SEQ ID NO: 266370 - DNA, 651 bp, Zea mays
agtcagaatagctgatggtatagcccagggactcctgtaccttcacaacctctcctgaatacggcgcgtccatagggtcttgaaagcaagtaaaatcctgttagatttctgatctaaaccctaagatttctgatgttgggatggcaaggatatttccatcggatgccactcaagcaacagccagcagacttgtgggcacatagtaaggtggatacatggctaatgaattgcatctgatggccttctctcgatcaagtcagatgttttcagtttagtattaatggtgtatctgtatggcatgttaaaaattatttccttccttcagacctgggaactgtggaaagacaggagatggaataagttcaatgatcaatcatttggtgatgactacgaactggaagagctgatgaaataccttgctgagttgctgtggtattgctgtgtgttatgagaaaaaaaacaatagatcatcctacaatgcctgatgttgttgcaactcttagcagtgatggcatcacattgccagaaccaaagcagccagctgactcctatgcgaaattaaatgtgtcagtccctgtattgagtagcagaaatgatgtcaccatcactgctacaaatggcatatcacagaatgtgaatatgctgttaatc

SEQ ID NO: 266371 - DNA, 622 bp, Zea mays
  unsure (1)..(622): unsure at all n locations
ctgtacccggtggccccgctgctgctgccgcacgagtcggcggcggactgcacggtcggcggcgacgacgtgccccgcggcacgctgctgttcgtcaacgcgtacgccatccacagggacccggcggcgtgggaggagccggacgagttcaggccggagcggttccgcgacggcaaggccgagggccggctgatgctgccgttcgggatgggacggcgcaggtgccccggggagacgctcgctctgcggaccgncggcctcgtgctcgccacgctcatccagtgcttccactgggacagaatcgatggcgctgagatcgacatgaccgagagcggcgggctcaccatgccccgggccgtcccgttggaggccacctgcaagcctcgcgaagccatgcgtcatgttcttcagcagctctgattggtctatgtgctaaacattctcatccctattctctcttgtgtgtgtggcagtacgaacagcacgtgctagctaaataagctgcgagcaatagctatccgcgtaacagtatggttcgtcaaagttgttatctttcaaaagttatctagtactataaacaaattgttcgtgtcttgttcattcgtctgtctcttatgtaaaa

SEQ ID NO: 266372 - DNA, 470 bp, Zea mays
  unsure (1)..(470): unsure at all n locations
atgcccttattcagatggaagtggtagaactggaaggtattctcccggttcaaggtatggtggtggcgctggtggacgtggtgatcgctttggaggatcagatcgttttgctcgctatgatgatgatcgatatgatggtgggcgctatgtggacagcagggatacttattatggttccgggcgcgatcgctatgcaccggcagcagaacgctattctggtgacaggtacagtggtgcagatcgatatgcgtccagcggctttgccagagaaaggagctatgagagagatggagggaggtccaatggaggttactaccgtgatgaaccgaggggcactggtggctatggcagaggtggttcacgtggcggcggcggcggtgggcctgctcgctttggtgggagttaccgagataggcctgcttcatacgatcgtcccagcangggatgagcagctcgtgcttatgatgatc

SEQ ID NO: 266373 - DNA, 892 bp, Zea mays
caatcgtctgacaaatcttgcggagattgatcccctggcatctcttccaaagctacagttccttagcttactggataatactgtaactaagcagccagattacaggctgtatgtgatccataaattgaagcatttgcgtttgctggatttcaagaaagtgaaacaacaggagagagttgcggcagcgaaaaagttccactcaaaggaagcagaggaggaggcaaagaaggtgcctgccaaaacgtttactcctggtctgcctgatgctcaggacatcacaatggagccacaaggtcctaaagtagttgctccaactcctgaacaaatcacagctatcaaggctgcgtgtgcaaatgcccacactctcgaggaagctgcaaggctagaacaggtactaagcactggccaagttcctgctgaatttgcagtgcccaggcccgatgcaaacatggccgaagcttcagatggagccgagaagatggacacagatggtgagaaccaagagggcggtgaggctgatgggcagaaacaaggcgaaggaagcaccccaattcaggaggattgaaggcatggtgacatgggctgggtcatccattgtctgagttaggtttgccagttttcgtgggggtgcaggaaagagctagagccttgttgccgcagaactccccctctatggatcgcatgtggatgctaacaagattcttgcttatttttgcagtagatggtactgagaacagaatcagatgttgtaaactatacatacagtcgtgcatgttgccgaatggaccattgtttcggtcgtagcgcttgtgtcggtgcctgacgtcagtctgcagagcgagatgtcgccctgccgcctatccttttctcggagtgctttattacaagtttg

SEQ ID NO: 266374 - DNA, 368 bp, Zea mays
gcattgtgaagcccgggtgctcgcaggatgtccttaaagcagcggtaagcgccatggcttctgtgacggagatgttgaccatcatgtcttccctttcatttagtggtcaggcgaccatctgaaggccaagctgaagatgtcatatgctgttgcgctctcatgtcccgaacatatttgtgtttttttgggaaagtagcatacaattttttgttctcattctagtatcgtctacctatgtcaaactacaatatgataggacccttgcgaaataatcgttccgtttgctggtatttctcatctttgatgctaagggtaaaaaaaaggacatattgtgtaagaaagttcaagggtgcacatcacaccaatat

SEQ ID NO: 266375 - DNA, 517 bp, Zea mays
agttgcaggagtatttgagaaggtgaaaagcattgtgaagcccgggtgctcgcaggatgtccttaaagcagcggtaagcgccatggcttctgtgacggagatgttgaccatcatgtcttccctttcatttagtggacaggcgaccatcggaaggccaagctgaagatgtcatatgctgttgcgctctcatgtcccgaacatatttgtgttttttttgggaaagaaacatacaatttttgttctcattctagtatcgtctacctatgtcaaactacaatatgataggacccttgctaaataattgtttcgtttgctggtaaaatatacctaatatacagagagtaaaacaacaagagcagcgaaaaccgacgacgggcccgacctcgtcgacgaaggcaatggctacgccttcgacgacttacatgcaaaagttgtacttcgacagcctcgaacgtaagaaaggtgttcctttgcactgaagaagaacacctgaagttattgctgggattacaaaagc

SEQ ID NO: 266376 - DNA, 504 bp, Zea mays
ccaccatgtgtcttctttgggcttatcttcactcatggatggccgaagatctctccggaaaataaatgtcgcacacagcttgcgtgagatagaggcttgtgttctgagcaagttatcaacaataggagaaaccttgactgttttaagactcgacggcctcgaaatcttcgcctcgaatctccaggcagttggttccacctgcaagaatctggtcgagattgggcttagcaaatgcaatggcgttacggatgatggtatcgtttcgctagttgctcgttgccgcgacttaaggactatcgacgtgacgtgctgccatcttcttacaaatgctgcccttgctgcaatcgccgagaactgtagaaagattgaatgccttcggcttgaatcctgccctttcgtaagcgagaagggactagagtcgatcgcaactctctgttccgaccttaaggagattgacctcaccgattgtcgtattaatgacgcagctttgcagcagttggcaag

SEQ ID NO: 266377 - DNA, 465 bp, Zea mays
ctcatttccctccaatacttccaagatcccattaggcgagcggaacagaaattgtagaagggaatacaaaaaactgcaaatctagccatggccaacaagttccagttgtaatagtggagttttcgcactgagtatcttgacccttcatgtatgcgttggtgtcattggagccaagaggttgtgagccatcgaggacattttgacacaaccatttcagtttagaaaatttgatgcggagctgacttcagtggaagagtgttagcttgccatttcagtgtatccaattgttgtccactgtagtctatatcgctgtttcatacctttgaccctgtactagaacgacacggaggatcactgttaacaccagagcgtcatgcatgccttgataaagtttttcttgtgccttcaataatttgatatagaaattggtagtcaatcccgcaatgccattgatttggagtcaat

SEQ ID NO: 266378 - DNA, 632 bp, Zea mays
atagccagcgaacggcagacggaatcgcgcctcccatcctctgctttccccaaaggccagctccaccgcggcggcgccgctcctataaaccgtcagttccctctaggcgcgctttccccgcggcagcctgagcagccagccatgccggggcggcgggcgatcgaggtccggcagctgctgccggccggcggtgacgccgcgacgccgaggtggcgcatgtcgctgctggagaacacgttcagcgggttcgtgcagggcgccggcgccgaagccgtgttcgcggatgggtccctgttcagcccgttcctgttcggcaagttctttgacccagccgacccgttcccgctgtgggagttcgagcccgacgtgctgctcgccgcgctccgccgcggcaacgccaggaccgccgtcgactgggccgagaccgactccgagtactacctcacagccgacgtgccaggtggaaggagatgcgacgtggaggtgagcggggacgcgatgaacgtggtcgacatctgcggcctctggcgggcgccggcggcggacggccgggactggcgctgcggccggtggtgggagcacggcttcgtccggcgggtggagctgccggaggacgcggagtggaggaaagt

SEQ ID NO: 266379 - DNA, 704 bp, Zea mays
cggacgcgttttgtgcgttctgccggtctctctcgccgctgtctcgctctccggcgactggtgggccgccgccgccgccgccccgccaggtgcggaggttttcgttggtccttcgccagcgacgagcacccaccaggcttgttgtatatgtgctgcaatggcgtctctggggcgaagagccgggagctacatctgctcggagctgtgtggcacaactctgaaccagagacgctactccacttcgagggtggattggaagcagctgcggccaatgatccttaagaggattaagaaccggacaaaggaatacccaatcaagagcatgatcccagtcgcggaggaggtggtcagggctagggagattgtcaatgagggcgtctccagactgctcaaggttgttcctgttcagtcatgcaagttgttgaacaccttctgtattggtttggactgaaggttttgtcatgaagttcacattggaaccacgggtcatcagatgaaaacatgctatggtttcaagcgtatgatcaaggacagaccacatgaatgggaaccgggcaacttgaatgacatccttgttcctgttcaggctttccaccagaaaaatatgtttgagcatgagataaaacatgaccagcggttcgacttcactcgcgttccagctgtacttgagctgtgccatcacgcaggtgcagacatacctgatg

SEQ ID NO: 266380 - DNA, 667 bp, Zea mays
  unsure (1)..(667): unsure at all n locations
tgcgttctgccggtctctctcgccgctgtctcgctctccggcgactggtgggccttcttcgtctcctccccgccaggtgcggaggttttcgttggtccttcgccagcgacgagcacccaccagtgcttgttgtatatgtgctgcaatggcgtctctggggcgaagagccgggagctacatctgctcggagctgtgtggcacaactctgaaccagagacgctactccacttcgagggtggatgggaagcagctgcggccaatgatccttaagaggattaagaaccggacaaaggaatacccaatcaagagcatgatcccagtcgcggaggaggtggtcagggctagggagattgtcaatgagggcgtctccagactgctcaaggttgttcctgttcagtcatgcaagttttgtcatgaagttcacattggaaccacgggtcatcagatgaaaacatgctatggtttcaagcgtatgatcaaggacagaccacatgaatgggaaccgggcaacttgaatgacatccttgttcctgttcaggctttccaccagaaaaatatgtttgagcatgagataaaacatgaccagcggttcgacttcactcgcgtcccagctgtacttgagctgtgccatcacgcangtgcagacatacctgatgagattctatac

SEQ ID NO: 266381 - DNA, 740 bp, Zea mays
ccctcgcttccgcccgccgcatcgcccttttcgtcgagccgtcgccctgcgcctatgctcccgcagctcctcggcatcacaatcgctgcctcccgtgatgcgcccttggatccacttcgcgtgcgacgcccctgatcggcaagcacgtcgtacgttcgcaccgtctccctcaccggcatgcacgtcatggctccaggcacttgcagcctccgcgcttcttcgaccagcaagcacgcgaccacgcctcccactgttcagtcgtggtggttccaggtgcttcttgcctccgtgtctccctgactggcaagtgtgtaaggagggacctcccctgccctagctccaaacagaattagggaatacggtcaacctcccatggctactgccgtgtaggcgatctgacagtccacaaaaacctaagattcggcaccaagtcactaaccgaaggaaggtcgagatgaggaaggatgtgatttgatctcgaatatcaactacatctgtctagcgtcgagacacatgtgcggtagtgctaagttggttctgtctttcagtttctttctatatcctatttctgtgaaaatattttatgtgagtgatgtaaactgattgccagaattaatggatgttttgcagctacgccagaagctgatggttgtgggtaaaacatttttgttctgtaatccccaggctagcaagtttcacttaaacaaaggttcaggctttcgttgtttgcaaggtactat

SEQ ID NO: 266382 - DNA, 587 bp, Zea mays
gcttcaggtcaatataccctagcgcctctcttcccccacagggctctttcccgtatgaacggggcccatatcgccgccgcctcgccggaggccggcgggtcgtcctcgtcggcctcgtcttccggcgtctcggcgtccgggcgctcctggctgctcaagggggtgcacctgcggcggcggcgccggtggcggcggcaggtggccgttaggggaggggtgagagccgatggcggcgatgtgcaggatcttgcgctgcctctcgggatgtccttcgcggcggtgcttgcccaggttctaaatagatgcgctggttctcaagggggattacgacctgatgtcctctcaaagatgtgtacctcggcagtgaaggagtccttaaccaatatttatggtgacagatttcagagcttcatgagtaactttgagaaagcttttgggtagtacattgagaaccattcaccttatcaatgaaacacctgtttttgagcaaggcgtggagcaatgttcttacaaagatgatgattctgtacctcaaatcaagttgggtggtgctgattcattacctgaaataaaggttggtggtgctg

SEQ ID NO: 266383 - DNA, 585 bp, Zea mays
actagttctagatcgcgagcggccgctccgatctagaagggaggagctgtaccccacaccactaggcactagtccactacctaacgctacctgccttttcaccgcgtcgtgcgccaccgccacgttgagctcgcgtccgtcccagatccgccgtgctcctccatcgctcgcgcaagatgaagatcacggtgcgggggtcggagatggtgtacccggcggcggagacgccgcgccgccggctctggaactcgggccccgacctggtggtgccgcggttccacacgcccagcgtctacttcttccgccgcgaggacgcggacgggaacgacctggcgggcgcggacgggagcttcttcgacggggcgcggatgcggcgcgcgctggccgaggcgctcgtgcccttctacccgatggccggccggctggcgcgcgacgaggacggccgcgtcgagatcgactgcaacgcgggcggggtgctgctccaggaggcggacgcgcccgacgccaccatcgactacttcggcgacttcgcgcccaccatggagctcaagcgcctcatccccaccgtcgacttcacggacgaca

SEQ ID NO: 266384 - DNA, 1631 bp, Zea mays
cagcagcagcgcagaaaaaaatttctggaataatttttcttccctttggctccgtgaggttccggtgctcgcacgcacgcctgaagttgcttcacagcatgaaggatgtcccaaatgtggctgaaaaggcctgtggagccctctattttcttgcacaaggctatgttgattctgggtctgcatcgccactatcccctttctttcaagatattgttcagaaccttcttatggtcactcacagggaggatgctggggaatctcggctacgaacagcagcatatgagaccctaaatgaagttgtcaggtgctccactgaggagacggctgctattgttatgcagttagtacctgtgatcatggtggaactccatcagacacttgaagctgaaaagctgtcaactgatgagagggagaagaggagcgaactgcagggcctcctttgtggttgcttgcaggtcattattcaaaagttgggagggatggagtcaactaagtactctttcttgcagtatgctgatcagatgatggaactgtttttgagagttttcgcatgtcgaaatgccacagtgcatgaggaggctatgcttgctattggtgcattggcatatgcagctggtccaaactttgcaaaatacatggcacagttttatcagtatttggagatgggtcttcagaactttgaggagtatcaggtgtgtgccattaccgtgggcgttgttggtgacctctgtagagcactggaagacaaaattttgcccttctgtgatggcatcatgactcaactcctgaaggacctgtccagtaaccagttgcacagatctgtgaaaccaccgatattttcgtgctttggtgatatagcactggcaattggggaggactttgagaagtatttgatctatgcgatgcctatgctgcaaagtgctgctgatttgtcggcccataccactgcaactgatgatgagatgctcgactacaccaatcagctaagaaatggaatcttggaagcctactctggtatcctgcaaggatttaagagttcacctaagacacaactgctgatgccattcgctccgcatattattcagttccttgatgctctgtacaatgggaaggatatggatgatactgtgatgaagactgcaataggtgtcttgggagatctggctgacacattaggtgtccatgctggccctttgatcaatcaatccacctcaagccaggcatttttagaggaatgcttggcatcagacgatcctttggtgaaagaatctgccgattgggcgaggatagcaatcagccgtgcagtttcgggttgatgccacagtgagtctcgagtctgcacttgcatcccatccacatgtcatcatgcctgggtctttgattgcatcatgtccagacatgctcttgggagaaatccaacatttttacagcagagtctgagggtcctcactaactcatgcatcactacatgtgtcaacccgcccttcttgcttctgcgagaaaagagggttcaagctggccgtctgctaactttttctaaaggcatctgcaaccttcatttcttattggaggtgagatgtgagcttctattgtcgcatgacatgctgaccagttttcttggcatgtcaagc

SEQ ID NO: 266385 - DNA, 406 bp, Zea mays
aacataaccaagtctgagtggagacaaagagaggctgcaacatatgcctttggctctatcttggagggcccatcagctgataaactggctcctcttgttaatgttgcattgggcttcatgctgtctgcactgatgaaggatccaagcaaccatgtgaaggacacaactgcttggacccttgggagaatctttgagttccttcatggttcagcgcttgaaactcctcctatcatcacggccgagacttgtcagcaaatacttactgtgctgcttcacagcatgaaggatgtcccaaatgtggctgaaaaggcctgtggagccctctatttccttgcacaaggctatgttgatgctgggtctgcatcgccactatcccctttctttcaagatatcggtcagaacctgc

SEQ ID NO: 266386 - DNA, 493 bp, Zea mays
agtcaagaatcttggcagttgtgcttgtcaatataccgttggtgccagctacagcttgcggagatttctgaagcctgacattcagctgtcaacctaccgtccgtctcaggccttttgatattgtggctagagcctagtggtgcattcctactcggtgttgttaccaagcatataagctctcggctgattccatctcttgtttttgtttgagacaaagcctgctgcattggagataattagatttttgccaatcataatattgtcttcttgttataattaccactgtgtctatgaattgtgggtctagctgggtctatgaaatgtgagtctgatgacaattttacaaacttgtttcttgctgatggtaaatatcagaatctctcgctgcattgtgagtgtgttaaaaaaagatacaaaatgctatagaaaaaaataaaacaaaacactcaacaatgcatgctaataaaaaatgatacaaaaggacaatagcata

SEQ ID NO: 266387 - DNA, 1117 bp, Zea mays
ggcagcaggagcagtagcgtccgtccggtcctcgcgcgttcccctccccgaccggcaggttccccgtccacgcccggccattcatccgtttcccactgctcctccgtggctcagctctgctccctgtatctcgcggtctgcccctctgccctcccggtctctcctcttcccgtcccgcccagcgcgtcccccaaggaagccccgacgccacggcatggggatcgtggaggaggcgcacaacctgcgcgtggtgggcgaggggaagcgcggggtcatcgtgctggcgcacggcttcggcaccgaccagtccgtctggaagcatctggtgccgcacctcgtcgccgactaccgcgtcgtgctcttcgacaccatgggcgccggccccaccaacccggactacttcgacttctcccgctacgccacgctcgagggctacgcgctcgacctcctcgccatcctccaggagctcggcgtccgctcctgcatctacgtcggccactccgtccccgcggtcatcggcgcgctcgcctccatctccaggcctgacctcttcaccaagctcgtgctcctctccgcgtccccaaggtacctcaatgatgtggactactatggcgggtttgagcaagatgagcttgatgagctgtttgaggcgatgcgatcaaactacaaggcctggtgctcaggttttgcgcccctgtgtgttggcggagacatggaatcagtggcagttcaggagtttagcaggacgctcttcaatatacgtccggacattgcgcttagtgttgcccagacgatcttccagagcgacgtgcgcagctcctcccgcacgtcactgtcccatgccacattgttcagagcaccaaggatctcgcggtgccggtcgtggtgtctgagtacctgcacaggcaccttggtggcgactccatcgtggaggtgatgccctctgaaggccatcttccccagcttagctctcccgacattgtaatccctgtcttactccgacacatccagcatgatatcgcagtctaggttggtcaagcgttcctccaaggcgatgagcatccgaagctgtctacttgtctgtctgtatcttgcttaattgttcaacgtaggctag

SEQ ID NO: 266388 - DNA, 1135 bp, Zea mays
gccgccgctccccagcacatcgctcccagcgcgccaaatcggcggcaacctcggacccttcactcacccagctatggcggagcgaggcggcgagcgtggcggagaacgcggcggcgagcgtggcggttttggccgcgggttcggtcgcggcgggcgcggcgaccgtggtggtcgccgtggtggccggcgcggcggccgccagcaggaggaggagaagtgggtgcccgtcaccaagctcgggcgcctcgtgaaggagaaccggatcaacaagattgaggagatctacctgcactcgctgcccgtcaaggagcaccagatcgtggagaccctcgtcccggggctcaaggacgaggtgatgaagatcacgcccgtccagaagcagacccgcgccgggcagcgcacgcgcttcaaggccttcgtcgtcgtcggcgacggcgacggccacgtcggcctgggagtcaagtgcgccaaggaggtggccaccgccatccgcggcgccatcatcctggccaagctctccgtcgtgcccgtcaggaggggctactggggaaacaagatcggccagccgcacaccgtgccctgcaaggtcaccggcaagtgcgggtccgtcaccgtgcgcatggtgccggcgcccaggggttctggcatcgtcgccgcgcgcgtgcccaagaaggtgctgcagttcgctggcattgaggatgtcttcacctcgtcccgtggctccactaagacccttggcaacttcgtcaaggcaaccttcgactgcctgatgaagacctacggcttcctcactcctgaattctggagccagaccaagttctccatggccccgttccagcagtacaccgacctgctggcaaagcccaccaagggccttgtgctcgaggccccaactgagacagtagaggcttaggatggtttgagtggagagctctactcgtcgggtgcttgtctaaatgcggtatctatattatagctaagaactgccggagtcgattttgggttctgttttgtcctggatgctgttctgtactgtcaagttttggattatgctatggcactttttatcgatgaatgctacataatgatctcatgatagtagaaatttaaaaaaaaaaaaaaaaaaagggcggcc

SEQ ID NO: 266389 - DNA, 572 bp, Zea mays
ctggccaagctctcggtcgtgcccgtcaggaggggctactggggaaacaagatcggccagccgcacactgtgccctgcaaggtcaccggcaagtgccggtccgtcaccgtgcgcatggtgcccgcgcccagggggtcccggattgtcgctgcccgcgtgcccaagaaggtcctccagttcgccggcattgaagatgtctttacctcgtcccgtggctccaccaagacactcggtaacttcgtcaaggcaacctttgattgtctgatgaagacctacggcttcctcactcctgagttctgggccgagaccaagtatgccaagaccccgttccaggagttcaccgacctcttggctaagccgacaaagggtcttctgatcgaggctcccaccgagacagtggaagcttgaacgtcttagtttactgttccaagtgtcgcgaaaagagttttctgtactagctacatattttaaatgttattttgaattatgatgagaaaccaaggtatgcacccaagataattgatgtccaaaaaaaaaaaaaaaaagggcggccgtttagaggttccagctta

SEQ ID NO: 266390 - DNA, 449 bp, Zea mays
  unsure (1)..(449): unsure at all n locations
cggggctggtccggtggctccactaagaccctgggcaacttcgtcaaggcaaccttcgactgcctcatgaagacctacggcttccttacgcctgaattctggagtcagaccaagttctccatgactccgttccagcagtacacggacctgctggcgaagcccaccaagggtcttgtgcttgaggccccaactgagacagtagaggcttaggatggtttgtgctgtctaaatgcactttctatgttatagttaagaactgttgtcaactttgggttttgttttgccctggatgttctttgttgtcaagttttggatataacagcactcttttttaatcagtgaatgctacataatcatctcaattctcttgtcacggtgaaggctttcggaaaaaaaaaaaaaaaaaaaaaaaagggcggccgcccgggaatncggacggtacgtgcggc

SEQ ID NO: 266391 - DNA, 317 bp, Zea mays
ccctcatcccccatcaatctcaggggcgccccagccaccccgcccttcactcacctaaccatggcggacgcggcggcgagcgtggtggagagcgcggcgggttccgccgtggcccgcgccaagaggaagagaagtgggttcccgtcaccaagctcggccgccttgtcaaggagaacaagatcaccaagatcgaggagatctacctgcactcgctccccgtcaaggagcaccagatcgtcgagaccctcgtcccggggctcaaggacgaggtcatgaagatcacgcccgtccagaagcagacccgtgccgggcagcgc

SEQ ID NO: 266392 - DNA, 419 bp, Zea mays
ccgagaccaagtatgccaagacctcaggggtgaggaagccgtaggtcttcatcacccctgagttctgggccgagaccaagtatgccaagaccccgttccaggagttcaccgacctcttggctaagccgacaaagggtcttctgatcgaggctcccaccgagacagtggaagcttgaacgtcttagtttactgttccaagtgtcgcgaaaagagttttctgtactagctacatattttaaatgttattttgaattatgatgagaaaccaaggtatgcacccaagataattgatgtcctgttgttttcgtatgtgggtatcgaaccccaagggcggccgccctttttttttttttttttttttagcagcaaccatgagataaaaatccttcgcttgaacttgtacacgaggcaatatacga

SEQ ID NO: 266393 - DNA, 271 bp, Zea mays
ccccgttccaggagttcaccgacctcttggctaagccgacaaagggtcttctgatcgaggctcccaccgagacagtggaagcttgaacgtcttagtttactgttcccaagtgtcgcgaaaagagttttctgtactagctacatattttaaatgtcattttgaattatgatgagaaaccaaggtatgtcacccaagataattgatgtcctgttgttttcgtatgtgtgtaaaaaaaaagggcccaaaaaaaaaaaaaaaaaaaaagaaaaga

SEQ ID NO: 266394 - DNA, 415 bp, Zea mays
cccacgcgtccgggactcctcagttccttcgctcctctgtaacccggggcggccgacgaggccgggaccaccgacggcgacgatgggcggcggcgagggcaagtccaagaaacgccgctcttctacctcctcagcggaggaagaagggggggaacggaagaggcgggacaagaaggagagcaagaggaggagccgagacgacagggaggatgacgatgacagacacaagaagaaggggaaacacatcgacaggaacaaaggaaaagagagagattcgaaggataggcattccaaggagaagacgagcaagagaaaagacaaggacgctgccttcaaagaaatatccaaggatgactactttgcaaagaacaacgagttcgctacctggttgaaggaggaaaagggcaaatatttc

SEQ ID NO: 266395 - DNA, 461 bp, Zea mays
gatgaagtggagaaagcttcacttccaggcttcaaggttctaccgctccgccaatttgggacctggggaccagttatgacagacgagtttaatcctcaaaaggacacttatgttctgtgccaccatggcatgcgctcaatgcaggtggctaaatggttgcagtcacagggtttcaaaaaagtttacaatgttgcgggtggaattcatgcctatgcggttaaagccgactcctccatcccaacgtattagaggatcctcatggtgacactttagcacggctgggaacttctcatatatcttaggcattggcgttgatcaatgcttgaattcagagctcaattttatttctcatactgtgtatcagaaagttttgggactcctagggaggaaaaatatacagctatttttgttaaaaaaagatacttgagaaattgctttattgaacgaaccgtttcatcagg

SEQ ID NO: 266396 - DNA, 705 bp, Zea mays
gaacgcctacctccactaactcacacttctcctaaagtttccccacccccgtccgccggtccaccaccgatctggtctcactgcatcctcctcccctcgccgtccaagagcgccggtccgatgggtcgtccgccgagcaccactggtgctccggccttccgcttcctcccttccgaggtggcggagatggaggcgcgcttgctgcagctcaacaacggcatccccacccgcgccatgctccagactctcgccgataagttctccgcctcgcccgagcgcgccggcaaggtggccatccagcccaagcaggtgtggaactggtttcagaacaggcgttactcgcatcgggccaagaccaccagggtcgtgccgtctccaccggctaagatgaccccctcgggggccgatcaccaccagcacgccgctaacgcctccgccttcagggctgctcagctctcttctgtcgctgctgcgcaccacggctcctcctcgacagggaagaaccctgtggaaggtgtctcagttgagtttgaggccaagtcagctcgtgatggtgcatggtatgatgttgctgcctttctgtcacataggttgtttgaatccggtgacccggaggtgcgggttcgtttttctggatttggggcagaggaggatgaatggatcaatgttcgcatatgtgtgcgacaacgttctcttccatgcgag

SEQ ID NO: 266397 - DNA, 545 bp, Zea mays
tccctaccccgaccgccgatcctcctcgccttgacgtccaagagccccggtccgatgggtcgtccgccgagcgccggtgctccggcgttccgcttcctcccgtccgaggtggcggagatggaggcgcgcctgctgcagctcaacaacggcatccccacccgcgccgtgctgcagaccctcgcggataagttctccgcttcgcccgagcgcgctggcaaggtggccatccagcccaagcaggtgtggaactggtttcagaacagacggtactcacaccgggccaaaactcccagggccgcgtcgtcaccgccggctaagatgacgccctcgggagctgatcaccaccagcatgccgctaacgcctccgccttcagggctgctcagctctcttctgttgctgctgcgcaccacggttcctcctctacagggaagaatcctgtggaaagtgtctcagttgagtttgaggccaagtcagctcgtgatggtgcatggaggtgcgggttcgtttttctggatttggggcagaggaggatgaatggatcaat

SEQ ID NO: 266398 - DNA, 564 bp, Zea mays
cccacgcgtccgcccacgcgtccgcccacgcgtccgcccacgcgtccgctcaaacacagaggatattctgacaatacaagtaaaggctggttggaagaagggaacaaggattacatttcccgacaagggaaatgaagctccaaatatgaaacctgctgatattgttttcatcattgatgagaagccccatgatgttttcactcgggagggaaatgatcttgtcgtgactgagaagatctcactggtggaagcactgactggctataccgcacgtgtcactacgcttgacgggcggagcctatcattgcacatcaactcaataatccatccaaagtacgaagaggtgatgcctggagagggcatgccagtgcccaaggacccctctaagaagggaaatctgcggattaagttcaacataatgttcccctctaggctgacttctgatcagaaggccgggctcaagaggctattgggttcttaggccgtcacctcaaatgacattttatagtgaaaggtattgtgaatatcgccagtaattggctaggtagattatttatttattta

SEQ ID NO: 266399 - DNA, 1169 bp, Zea mays
ccttcctttcgctatacgacctgagttcgcttcacgcggccgccgctctctctctctctctctcccgcgtccgtcccaccgtcgcaagccagccacctccctgagaggcctgaccgtgatttcggcgtggcatccaaaggcggtcaagattcgagaggccggaggaaccaagcgtagggcctccgaccccacgtcgtcgtccgcgcgcgccgcccgccgtcgcagggagatgggggccgattactacaaggtcctcggcgtcgaccgcggcgccagcgacgacgacctcaagaaggcctatcggaagctcgccatgcgatggcaccccgacaagaactccaccaataagaaggaggcagaaaccaagttcaaggagatctctgtggcatacgaggtccttagcgatcccaagaaacgtgcaatctatgatcagctaggagaagaagggctcaaggggcagccgcccccaggagcaggaggttctggcgcattccccttcttccctggcggggctcattccaccgctccccattttaatcacaggagtgcggatgatatatttaaggagttctttggatcccctggcatgggtggcatgagagcggaaccaggattccagaggtcaatgtttggcaacgatatcttctcttcacgctttggcgctgagggttccaccagtatgcagcagccaccacgcaaggcagctggaattgagaacccacttccagtcggccttgcagatctctacaagggtgtcacgaaaaagatgaaaatctcaagagaggctatagatgccagcgggagaatctcaaacgcagaggatattctgacaatagaagtaaggcctggttggaagaagggaacaaagattacatttcccgacaaggggaatgaagctccaaacatgaaagctgctgatattgttttcatcctcgatgagaagccccatgatgttttcactcgggaggggaatgatcttgtcgtgactgagaagatcctcgctggtggaagcgctgactggatatactgcacgtgtcactacgcttgatgggcggagcctatcattgcccatcaactcgataatccatccgagctacgaagaggtagttcctagagagggcatgccaatacccaaggacccctctaagaagggaaatctgcggattaag

SEQ ID NO: 266400 - DNA, 1466 bp, Zea mays
gtttttgaccgtctatttagccatagtgactccatatttggtaatgagatagttgccaacgacagtgattttctttctgcatcttcgaatttgatggatactgctgtgctatcaatcccaattccggtcgaagcacataagaggccagtgtggtcacgtagaaaaccagaggaaagaggtaaaagtaaaatatccagcagtacaagtggcttctcccacagcaaagtagagagttcatcgacgaatttgcaaactcctatggaacctgtacagactcctcaatatgcactgttccaggatagcaagaagataggagaagttcagcatgctaatcagtttatgtttcctggatatgggtatcctgcatatccatttcctaccattccgttagtgtcaaacattcaagctgaaggctatcagacaaaaccagctggcacaagctaccgaacttcggaagattacctaaaacagtcaagttccacagaaatgtcacaagatataccatcgagaccactaacaatgacaccacaagaaaagatagaaaagcttaggcgccggcagcaaatgcaagcgctgatagctattcagcgacaacagcaacagtttggtcaacagggttctggcagtgatccaatggtgtctcaagcatactctcttaggaacaaaaatctggattccttaggtagttcaattgtcatagatgaaaacacaaatgagattttttcgcctgagatgattccgacataccatggcccggttcacaagagttctgcaatttcagatgatccctttatagaggaaaaaatatattatcagctacaagatgctcttggcaagttggataccaaaactcgactatgcattcgagatagtttgcttcgtttggtccatagtgcaacagagagaaagattgatggtgataggagcagcactaacaagacaaataaagatgaagatgaagcttcagaagatgcatttactaggagaacaaggtctcccactaaggaagaagaaacaatcactaatccaactgatcgtatagtggcctatttgctgtttcatagacattgctcccaggttgcagcagcaacaaaagaagaaatcatatcctcaacccccttgacactagaacctgagctgaaggtaccattgggaactactatggtactatcagaagatcaactgctttcagaggatcaacgagatgagcaaaaaaatgtgttgcagccgtcacaataagatgctgattgatcaactgttcagaatcaatatgatagcaaaccccgtgatgatgacagtctgctgatcacctgtggctccggagatcccttgtgtaatatgtaaccatttcaacattgtagcattctttttttttcatcatgtaataacatctcagactgtatacgaacctacaatcgtgtgtcgagccatcaaatgagcaaaccttggacatcgttatgattaaa

SEQ ID NO: 266401 - DNA, 391 bp, Zea mays
atttggtaatgggatagttgccagcgacaatgattttctttcagcatcttctaatttgatggataatgctgtgcagtcaatcccaattccgcaactaccattgaataaacgaccatcatctgatcgtgggccttctttggttctgactaaagaaatttccagtggtgtcaccattaccaaacaagaaaataaggtcgaagtacacaagaggccagcgaggtcacgcagaaaaccagaggaaagaggtaaaagtaaaatatccagtagtgcaagtggcttctccccgagcaaattagagaattcatcatcaaatttgcaagctcctatgcaacatgtacagactcctcaatatgcactgttccaggatagcaagaagataggaaaggttcag

SEQ ID NO: 266402 - DNA, 1099 bp, Zea mays
gcttcttcgctgttcgtcgtctcgtcgacactcaccattgccgacgcaagctgcgactgaacctccgtggcgacggaggagacggccatggtggcagcgatggagctcgagatcctaggcatgaatttcgggtgcgtcctcgcggctctgtccgacgccaagatccccgacaagggctgcctgctcccgctcatctctaagctgctcggctacgccatcgtcgccgcatccaccaccgtgaagcttccccagatactgaaaattttgaagcatggaagtgttagaggactaagtgtggcatcctttgaacttgaggttgtcggctacacaattgctttggcatattgtattcataaaggacttcccttttcagcttatggggagctagcttttctgttaatccaagcaattattttggttgcaatcatttactattactcaccaccaatgggaaccaaaacatggatgaaagctttattatattgtggaatggctccaacggttttggctggaaaaatagatcctgctctttttgaagtcctttatgcttcacagcatgctatcttcttttttgctagagttccacagatatggaagaattttacgaataaagggaccggcgagctaagcttccttacctgtttcatgaactttgctggttccatcgtaagagtttttaccagcatccaggagaagactcccttaagtgtgatcatgggctccgcaatcggcatcgtcatgaatggtacgctcttgggtcagatagtactgtaccagaagcccgctccaaagaaacagaagaaagaagattaagcaacatggagaagctgcagaaagttcttcctggttgtttaggattctgttccaacactcgctccacatctgaacaaatggcaccagtataggaagttgttggcaacttgttacgagaaaagaacatagtcggactattgctatataacaacatttctgtgctgttgtttttagcacttagcagtgtaccatgacttgaatagttcatatgactgcctttagatattgactgcaagctgctgctgaagcgttgtcccttctgcggggccgttccaaattttagttt

SEQ ID NO: 266403 - DNA, 464 bp, Zea mays
tttttgacgcgtggggggagctagcttttctgttaatccaagcaattatttgggctgcaatcatttactattactcaccaccaatgggaaccaaaacatggatgaaagctttattgtctccttcatttctggctgtttatcctaactttgcttttgtgttgccaataaagatgtgccaggttccacggagcagttcaatgaagatcatcaaactttattaatacgttgtctgattacaatgtttcacctgctttccctatacagtggttatttagatattgcggaatggctccaacggttttggcctggaaaaatagatcctgctctttttgaagtcctttatgcttcacagcatgctatcttcttttttgctagagttccacagatattggaagaattttacggtaggatgtcacttttttttacgctttactacatgaaagttacccacattttattttttt

SEQ ID NO: 266404 - DNA, 434 bp, Zea mays
gtaccggtaccggaatgtcccggacccacgcgatcgcgtgtacgacacccggttccggcacgcgctcgacggcgctgagcacggcgctgttcaacgagcggcgccatgtgcggcgcgtgcttcgccatcgcctgcgacgcggggcggtcccagtggtgcaagccgggcgccgcctccgtcacggtcacggccaccaacctgtgcccgcccaactgggcgctcccgggcgacgccggcggctggtgcaacccgccgcgccgccacttcgacatgtcgcagccggcgtgggaggccatcgccgtgtaccgcgccgggatcgtgcccgtcaactaccgccgcgtcccgtgccgcagggccggcggcgtcaggttcaccgtccaggggcgcagctacttcgagctggtcaccgtcgccaacgtgggcggcagcggcgt

SEQ ID NO: 266405 - DNA, 514 bp, Zea mays
gctccatgtaagctccggcccgatcgatgagaggagtctgacggaggcaaggccggggtcggcagcagaggggagcagagagatctcattctccgatccgcccaggccaccatggcggaggatgctacgagcagccacccgtcacgctacgtcaagctcaccaaggaccaggacgcccccgccgaggacatccgccccggcgagctcaaccagccagttcacgtcccgcagctcgaaggccggaggtgtagcgagtgcggtcaggtcctgcccgagagctacgagccgcccgccgacgagccctggaccaccgggatcttcggatgcaccgatgacccagagacctgccgaactggattgttttgcccctgcgtgctgtttgggcgcaacgttgaggctgttagggaggacatcccttggacaactccttgcgtgtgccatgctgtattcgttgaaggagggatcacgctggcgattctgacggcgatattttacggtgttgatccgaggacgt

SEQ ID NO: 266406 - DNA, 423 bp, Zea mays
cagcgcagcacaaacaaacaccgcgccgccgccacagctttgccctacagaatccttttactccgaagattctcaagacgcccctgatggctccccgcgtcgcctccgctctgctcttcgtcgtggccgtcctcgtggcctccgcggcggcgcaggagtccatggcgcccgcgtctgctccggcgccgggaccggtcgctggcgcggcctccgctccggcctccgctgtggccgtggtgtcgtccgcactgctgtccctccttatgacggccctgatgcagtagaagtatcatactagatttgagcgggaatttggttcagtgttgctattcctcattctttttgtatcatatatgtctgcgacatttatatatatgaataaagttggatgatctgctgcatacctttttttatcggattcat

SEQ ID NO: 266407 - DNA, 1773 bp, Zea mays
tgtacttgtaacacttgggtttgaccttaatattaaccatgcctataagcccttggttgaagcaataaggagattcaatattgataaaagaagtccacttcctcaggttgcctggaattttgtaaatgatgggctgcgtacttcgctttgcctgcagtttgagcctcatcatattgcagctggtgctatctatttggctgctaaatttctcaaagtgaatctcccatctgatggtgataagatttggtggcaggattttgatgtcacgccacgacaacttgaagaggttagcagtcaagtgctggagttgtatgagcacaaccgtacaacgcaggcacaatcatcacagggaagtgaagcggaggggagctctgctggtgtgtgtaatcaacgttcaactgtaaagtctgaagcgaactccaaggaaccatctgctcatggtcatcttcaggcatccagaccgccaaatttgcagcactcgtcctcaacaggtgcttcaggtcaccatgacgatgggcagtcaaattcagacaagcatatttctggccacaaaatgcttcaaaatgacaattttaaccatggtggtagcagagaaaagaacaaaagtggaaccaaaactggtactgttatggacaaattgcacaatgacaaaaagttctcgcctggacatcattattccaaggccagccatgagtctcataatccagtggaagaacatcaaccacatggatcagatgataattccaatgaaacaagagatggtgttggtggcaatgaagctcctgttgtgtcaacatccagaatggatgcgatgaataaaattgacaaggataaggtaaaagcagctttggagaagcgaaggaaatcgaaaggtggttttgccacgaaggtaaatgtgattgatgatgatgatctacttgagagagagctagaacaaggtgttgagttggctgttgagtttgagaagattaatcaagataagaagcagaactcgtccgatggtagcatgcatccaccagaccttgaaaacgctgacgaattaatggagaatggccaccatgtcaagcagagtctaccaacgacagctgaagacatgggctgtccgatggacagtaaagaacgacatcctccagcacttcataagcaaaatgatgtttctgagcacaagtcacagcagcttgatgacacattgaaacaccaaaagagctgtgatcatcctcaacctgtaggaagccctgagcaggatggaaaagactacaagaggcctaagcttgacggataggtttatatatatgattttggatgggttttctggaagctgacaagcaatttggtgccggattcattgtatgatgacgtatacatgttgatgagcacgtgtcttcttcgctggtgcctgaagaagtgaagatgccgcgccacaaaattgctgtgctgcggagagcaccaagatgatgcgccccacaactgattgcagctgacagttcgaggaaagtcggccagcaattattggtaggttccaacaaacattggaatataatatatatatgaacgaaacatgctgtcgcgcttctggtatcagctgcattcgtttcttgtatgtaatgttctggttaaagcgatggaaaggttttatcaaggtcgcaaatattaatgcagctttccatttctgggtttacatatttttcaaattaaacggtttactttttttaaaaaaaaaaaaaaagaacaggggaaaaaaaaaaaaaaggggggcccccccattaggggcct

SEQ ID NO: 266408 - DNA, 1012 bp, Zea mays
cccacgcgtccgcccacgcgtccgcccacgcgtccgcccacgcgtccgtgtcgacgccgcacctgagcggcatcgcggccatcatcaagagcctgcacccgagctggtcccccgcggcgatcaagtcggcgatcatgacgtcgtcgggcacggcggaccacgcgggcgtgccgatcaaggacgagcagtacaggcgggcgagcttctacagcatgggcgccggctacgtgaacccgtcccgcgccgtcgacccggggctggtgtacgacctcggcgccggcgagtacatcgcctacctctgcgggctgggcatcggggacgacggcgtgaaggagataactgggcgccgcgtcgcctgcgccaagctgaaggccatcaccgaggcggagctcaactacccgtcgctggtggtgaagctgctgtcccatccgatcaccgtccgccgcaccgtgaccaacgtcgggaaggccaactcggtgtacaaggccgtggtggacatgcccagggccgtgtccgtggtggtgcggcccccggtgctgcggttcgccagggcgaacgagaagcagagcttcaccgtgacggtgcggtggaacgggccgccggccgtcgccggcgccgaggggaacctgaagtgggtgtcgagcgagcacgtcgtccggagcccgatcgtgataccgccggccaaggccgccgcgtaggcgtagctcccaatccaatctctgcttgacggtcggcaggaccgttctctgctcgtgtcgtgtctccgaggatgaaggtcatcagtattcagtagctttaggtaatcgtgagtgtgcccggtgtacgtatggcgaaggaagtaggcaggcgactgttgtataggctggaggcagggtacccgatcatctgcgacgcagcaagctcagctgcaatggcaatggcgcccgttcgttccgtatgtaaaaaaatggcggaaataattaatcgcatcggggaaccccaaaaaaaaaaaaaaaaaaaggacggccgcccc

SEQ ID NO: 266409 - DNA, 512 bp, Zea mays
tcggttacgcgtccgaccgtccgtcgcaccgggaccgacgtcgggaaggccagctccgggtacagggccgtggtggacatgcccagcagggccgtgtccgtggtggtgcggcccccggcgctgcgggtcggcagggtgaacgagaagcggaccttcaccgtgacggtgcggtggagcgggccgccggccgtcgccggcgccgagggcaacctgaagtgggtgtcgagcgagcacgtcgtccgcagcccgatcgtgataccgccggcgaaggccaccgcgtaggcgtagctcccagcccaaatgcccaattgatgagtgccccggcattggtcggcaaacggcatgtatccctccaacaaggtcagtagcggtatgtggtaatcttgagtgtgaccggtgtacgtatggcgaaggaagtaggcaggcgactgttgtataggcagggtaacccatcatctgtgacgcagcaagctcagctgcaatggcaatggcaatggcgcgttggttcctgt

SEQ ID NO: 266410 - DNA, 294 bp, Zea mays
cttcaccgtgacggtgcggtggagcgggccgccggccgccggcggcgtcgagggcaacctgaagtgggtgtcgagggatcacgttgtccgcagcccgatcgtgataccgccggcgaaggccgccgcgtaggcgtagctcccagcccaattgatgagtgccccggcattggtcggcatacggcatgtatccctccctccaacaaggtcagtagcggtagccggtacgtggtaatcttgagtcagtgtgaccggtgtacgtatggcgaaggaagtaggcaggcgactgtcgtatag

SEQ ID NO: 266411 - DNA, 413 bp, Zea mays
gagctctataatcgcaaatatcttcgcagtggtgacacccccatcccggggcacgaaaccctaactgaacccatggcgctctccgccgctcgccggctctccaccaccgcgtcctcctcctccgtcgccgacgcgccgccaaagctctcttcgctgttccagaacccgaagcctcgaccgctgcctgtccgcggcgtcgaggagccgcggcggggggccaggcccaggccgaggcagccctgggaggaggaggcgggggcgctgctgctgcggctccacaaggggaggtacctcccgggccccgacctctcgtcggcgccgcacgctgtctcacccgacgccgtcaagaccgccgccgagtggttcgggcatgaccaccagcccgtcgccaaatggctgtcagggaatgattt

SEQ ID NO: 266412 - DNA, 920 bp, Zea mays
taccggttccgactgcagtcgtagctcaagcatcagcggcaggagctctgggcagcgtgcgcacgtggggtacctagctcgctctgctagcctaccatggctgatcaccaccggggtgcgacgggaggtggcgggggctacggcgacctccagcgcgggggcggcatgcacggcgaggcgcacagcagcagaagcagggcgccatgatgacggcgctcaaggccgcgacggccgcgaccttcggcgggtcgatgctggtgctgtccgggctgatcctggccggcaccgtgatcgcgctcacggtggccacccccgtgctggtgatcttcagcccggtgctggtgccggccgccatcgcgctggcgctcatggcggccgggttcgtcacctccggcggcctcggcgtcgctgcgctgtccgtgttctcctggatgtacaagtacctgacgggcaagcacccgccgggcgccgaccagctggaccacgccaaggcgaggctggcgtccaaggcccgcgacatcaaggatgcagcacagcaccgcatcgaccaggcgcaggggtcttgagagaagaaccacactcgagcggaccgcgcgcgcgacctccttgaaccactgccggcgcggcggcatatggcccttaaaggcggtggctgctgctacgtacgctgccgtagagtctcggtcgccgcgatagctctagctagtcgtttatgtgttgtgctttgtgtgtgcatgcttgtgtctgggggcatgcagtgcagtgcagtactatatgctgtatgcgtctctctttgatcggagaggcggatgtacagcatgctcgatatgtctagtttggatgtcatgtttatgatgaggaataaaatgcagtgttcaggtgaaaaaaaaaaaaaaaaaagggcggccgttcgcgatcta

SEQ ID NO: 266413 - DNA, 712 bp, Zea mays
cagaggctgacaatcctcataatgtcaaaaaccctcacatcggatggatgataggggttctcttccttgtcagtttcattggcctatttgctcttgtgcctctgagaaaggttatgatcgtcgactacaaacttacgtatcctagtggcacggcgactgcttatctcatcaacggtttccacacgccagagggtgtcaagcttgcaaagaaacaagtgaagactctggggaaattcttcttgatgagcttcctctggggcttcttccagtggttctacactggtggagataattgtggattccagaacttccctacattaggccttcaagcttataagaacaagttttacttcgatttctctcctacctatgttggagttgggatgatctgcccccacattgtgaacgtttctgttctactgggaggcatactttcctggggaataatgtggcctctaattggcaaccagaaggggaattggtacgacgccagtctcccagaaagcagtctccatggactgcagggttacagggtttttatatccatcgcaataattcttggagacggcctgtacaacttcgtgaaggtgctcattcgcaccaccgcggggttcatatcgatgatgaagaaaaacagcacgcttccggtttcaaacaatggcagccccatcactgaaggtgtttccttcgatgacgaacgccgcagggacct

SEQ ID NO: 266414 - DNA, 770 bp, Zea mays
cccacgcgtccggttgcaggctgggctccccgagggtgttctgaacgtggtgtccggcttcggcccgacggccggcgcagcgctctgcagccacatgggtgtcgacaagcttgcgttcacgggatcgacgggcacggggcagatcgtgctcgagctggcggcgaggagcaaccttaagccggtgacgctggagctcggtggcaagtcccctttcatcgtcatggacgacgccgacgtcgaccaggccgtcgagctcgcgcaccaggcggtcttcttcaaccagggccaatgctgctgcgccgggtcgcggacgttcgtgcacgagcgcgtgtacgacgagttcgtggagaagtccaaggcccgcgccctgaagcgcgtcgtcggcgaccccttcagggacggggtcgaacaggggcctcagatcgacggcgagcaattcaacaagatcttgcggtacgtccagtccggcgtcgacagcggtgccaccctcgtcgccggcggcgacagggtaggcgacaggggcttctacatacagccgacggtgtttgccgacgccaaggacgaaatgaagatcgctcgggaggagatattcgggccggtgcaaaccattctcaagttcagcggcgtggaggaggtgatccggcgcgcgaacgcgacgccctacgggctggcggcgggggtgttcacgcggagcctgtacgcggccaacaccctgtcgcgggcgctgcgggcgggcaccgtgtgggtgaactgctacgacgtgttcgacg

SEQ ID NO: 266415 - DNA, 927 bp, Zea mays
cgaatgggtgctacggttactgcaattgatgctgttgacaagaatataaagattgcaagtattcatgcggcatctgatccaacaactgcttctattgagtattgttgtgcaacagctgagggactggtaaaagagaaagggctgtttgatgctgtaatttctcttgaggtgattgagcatgtcgccaatcctttggagttctgtgaatccctctcggctttgacaattcctaatggtgccactgtgatttccacaatcaaccgatcaatgcgagcatatgccactgcaatagttgctgctgagtatatcctcagatggcttcctagaggcacacatgagtggtccaaactggttaccccggaggagcttgtcctaatgctgcaaaaggcttccgtctccgtcgaagagatggcagggttcgtttacaatccgttgagtggagaatggtccctgtcagatgatatcagtgtgaactacattgcttttggcgtcaagaagggtgaagcatcatcgacaaatggcagagatgcaagtttatcatagctgaagaaaaacacgtgaccttgaattgtcgggcatcattttcagaggaccaattcatgtcactgaaatcttactgctaaggatgcaaccaagtagcagaagagaattctcttgccctttgttagtcttggaaactggagcttgtggagtgatgcttcctggaagcgccattgagaagtcaagttgacaacaagtgactgctaacaagtagagctatctgccttttttgggtaatgtttcgggcagtttttctcaattttgtggcaatcactgatgatctaaataaaaataatactactacactgctgtacgtgaaaactgaacagatttgctgtctggaaatgtaactatttttaacagttaaggcttgttcgtttttgcgtt

SEQ ID NO: 266416 - DNA, 2526 bp, Zea mays
ggacgctggcggaggaggaaaacccgccctgatactgcaagttgtgggactgcttcaattgaggaccaaatcagcaattatctactgttgagccttattggaatctgtgctaatttgaactctgataatgctcagcattcaaatggccaggagttgctatccactcttttgaagaacctagggtctgttgccaaatcactggagccaaaagaactatgtaaactcctggaggcataccaaagcctgcaaaatggatcaaatgctggaacctctggaacagctaatgccacagaagaggctgcagggccatctaactctaagttgcctttcgtgaatggtagtcattgtggacatgcatcatcatctgttgtgccagtacagtcgaaggctaccatagtggtaactccagagcccgcatcatgcaagcttaaggattttgatctgaatgacacttgtaatgatatggaaggctttgaggatcgacaagaaggttcacctacacctgcctttaagacagctgactctcctaattgtgcatcatggatgcagcaagattctactcaaagtccaccgcagactagtggcaactcagattcaacatcaacacaatcattgtcaagctcaaatggagacgctcagtgccgaactgataagattgtcttcaagctttttgacaaagttcccagtgatttacccccagttttgcggtcacagattcttggttggttgtcaagtagccctactgatatagagagccatattagacctgggtgtattattctaacaatatatctacggttagttgagtctgcatggcaagagctttctgagaatatgagcctgcacctggataagcttttgagtagctccactgacaacttttgggcatctggcttggtatttgtgatggttcggcgtcgcttagcttttatgctcaatggtcaaattatgttggacagacccctggcacccagttctcatcattactgcaagattttatgtgtcaaacctgttgctgcaccttattctgcaacaataaatttcagagtcgaaggatctaatctactcagtacttcctcaaggctaatttgttcatttgaaggacgttgtatattccaggaagacacagactctgtagcagaaaatgatgagtatgaggatagggccatcgaatgcctcagtttttgttgttccgttcctggtccaagaggaagaggatttatagaggttgaagatagtggttttagcaatggcttcttccccttcataattgctgagaaagacatatgctttgaggtttctgagctggagagcatatttgagtcctccagtatcgaacatgcagatgctaacgataatgccagggcacaagctctggagtttctaaatgagctgggttggcttcttcacagagcgaacagaatgtctaaagagaatgtaactgatacatctgtagctacctttagcatgtggagattcaggaatcttggtgtatttgccatggagcgggagtggtgtgctgtgatcaaaatgctgttagatttcttatttattggccttgtcgatgtgggatcccgatctccagaagaggtggtgctttcagaaaatttgttgcatgctgctgtacggaggaagtctgttaacatggttagatttctgctgagatacagaccaaacaaaaactccaaggggactgcacagacatacttatttagacctgatgctctgggcccgtcaatgattacccccctccatatagcagctgccactagtgatgcagaggatgtgttggatgtgcttacccatgatcctggactgattggaattagtgcttggagcaatgcacgggacgaaacaggttttaccccagaagactatgctcggcagagaggcaatgacgcttacctgaatctggtccaaaagaagattgataagcatcttggcgaaggccacgttgtcctcggtgttccgagcagtatatgccctgtaataaccgatggcgttaagcctggcgatgttagcctcgagatctgcagggcaatgtctgcatcagtgccaggttgcctcctctgcagccgtcaggcacggatgtatccaaattctacggcgaggaccttcctttataggccagcaatgttaactgtgatgggagtcgctgtggtttgtgtctgcgtgggcatactcctcccacacctttcccagggtttatgccgcgcccacattcagatgggagctgctggagcgtggacccatgtaaattttaggatgaaataaacctagcagttttgtaacttgagagctctagagtggttactaagatgtaagatcaaaggaacataattaccgtgtgaagaagttcctctgcgtttgccgcaagatccggttgcggctgtaagctttatatacatcgtcgatttcaactatatttacagcctatcatgctcccattccattcatccatattgttgtagaattcattccttgcggagaatttgtgaaccatcagaataaaaaacaggttcttgt

SEQ ID NO: 266417 - DNA, 504 bp, Zea mays
  unsure (1)..(504): unsure at all n locations
agtatatgctctgtaataactgatggtgttaagcctgncgatgttagcctcgagatctgcatgccaatgtctgcatcagtgccaggttgcctcctctgcagccgtcaggcacgggtgtatccgaattctacatcgaggaccttcctttacaggccagcaatgttgactgtgatgggagttgctgtggtctgtgtctgcgtgggcatactccctccacacctttcccagggtttatgccgcgcccacattcagatgggagttgctggagcgtggacccatgtaagttttaggatgagccttagctgttgtttgtaacttgtaagttgagagttttagcgttgtggctaaagatcaaaggaacatgattaccgtgtgaagaagttcatctgtgtttaacgcaagatgctgttgcggctgtaagctttatatacatcgtcgatttcaactatatttacagccaaaaaaaaaaaaaaaagggcgcccgcaccgggaatcccggcgcgg

SEQ ID NO: 266418 - DNA, 652 bp, Zea mays
cccacgcgtcttgcatcccccacctcatcggcccccgcgtgcggcggcgggcgactctacctgacctggcctgcgtcctcccgctttccagccagcaagccagactccgcccctctccgaaggctccgatcgtctggtttcgtccagatggagaaagaaaaggagtcagccttaaatgaagccaagctgaaagtggaacgagaaaaaaaggagcggaatgagctagagaaaaagcttgaagaagaacgaaagaaggctgaagaggcgttgaggaaagaggcgatggaacagcagcagaaagagctagagcggtatcaggagctggagaggcttcagaaggaaagagaggaggccatgaagcggaaaaaaatggaggaagagcagcagaggcaaaaccagatgaaactgctgggcaagaacaagtcgcggccgaagctgtcatttgcttttgggatgaagtagcgttcgagtcaccgaacgaaattagtgttttagtttcctgtaaccctgtatttcctgaaaccaccattgtctaactttggcagacaaattgggacgtcttaaatcctcctgatctgctttgtaaaaaaaaaaaaaaaaaacaaaaaaaaaaaaaaaaaaaaacccacgcgtccgcccacgcgtccggcga

SEQ ID NO: 266419 - DNA, 1750 bp, Zea mays
  unsure (1)..(1750): unsure at all n locations
agcatcccccacctcatcggcccccgcgtgcggcggcgggcgactctacctgacctggcctgcgtcctcccgctttccagccagcaagccagactccgcccctctccgaaggctccgatcgtctggtttcgtccagatccggctccgctgaggctctagatcgcgtcgcgcacgatgcaacgcgacctgtcgcggtcgctgtctccgccgcgccggcgtcggcggtcgccatcacccgagcggtaccgcggccggaggggccgtagggaccgaagccctagccgtagcaggtccccctatcgcccctcgtataggtgaccacatctcccgacacacgccacagaaatctggcgagtcttcgttttatttttttggggtttgtactgtaaaaaatttgaggcgatgctgatcgccttcattcgaattttgtactatagcttggtttgtgactgttagaggtggatagtgtggtagtatattgtgccatatcatacttgaattaaatatgattatgaacgtcaaatttcataacaccatgatttctgatttccaaggggaaaatgatttggatgcttttgcattacagaattaaaataaaaatgcttcgatgcagcatggaatatatcagcagatgaagcttagatatagntatgccatgttttgcattacctgcctatacagactaacaggagttggttttcgtaaaacgcgtgggaatctacaaagattgtactctgtgctgtattgctgtggaatgctctacccctgtaacagtgtctaaggtaactgcttttgcccatgttttagggcttcaagagataatggtaattccttgtctattgttgtgatgatcctaattttatccttacagtgctcatctttctcgtgcagaaggaggagccctttcccatccccgagaaggcgtgagagctgttctccatctcctaggaggcgcaatagtccacctccatcacggaagcgttacagaagaaagagcagtccgagtgtcattagctctccagttactgcatctcagagttcccaccttgggttggcagagaataagaatgctattgatacgcaaaggctacaagaagaaaagaaaaggcgccggaaggaagttgaactgagactattagaggaggacacagctaaaagagttgagcaagctattaggaggaaggttgaggagagtctgaattgtgatgaaatcaagcgtgaaatacatcgtcggattgaggaaggacgaaagaggatacatgaggaggtagcaatccagatggagaaagaaaaggagtcagccttaaatgaagccaagctgaaagtggaacgagaaaaaaagaagcgggaggagctagagaaaaaacttgaagaagaacgaaagaaagctgaagaggcgttgatgaaagaagcgttggaacagcagcagaaagagctagagcggtaccaggagttggagcggcttcagaaagaaagagaggaggccatgaaacggaaaaaaatggaggaagagcagcagaggcaaaaccagatgaagctgctgggcaagaacaagtcgcggcctaagctgtcgtttgcttttgggatgaagtagcgttcgattcaccgaacgaaattagtgctttagtatcctgtaaccgtgtagtgtagtacctctgtatgaaaccgcccatttctaactctggcagacaaattgcgatgtcataaatgctcctcctgatctgcttcgccagttgccggctcttggtgg

SEQ ID NO: 266420 - DNA, 1553 bp, Zea mays
ttcacgcgtccgcccacgcgtccgcttaagcgccgcattctaccaagtgatattacaataaatattggaaaaggagctccagtccctgagtgcccgatacctggagaaagttggaaagaagtcaaacatgacaatactgttacatggttggccttttggaacgatccaattaacccaaaggatttcaagtatgttttcctggcagcaagcagctcactgaaggggcaaagtgacaaagagaagtatgagaagtccagaaaattgaagggtcatatacaaagaattcgtgagaattatacaaaagatttcaaaaacaaagatgtgacgaggaggcaaatagctgtggcaacataccttatcgataaactagcccttagggctggcaatgaaaaggacgacgatgaagctgatactgttggttgctgtacgctgaaggttgataatgttacatgtatgcctccaaatcagattcagtttgactttctgggtaaagattcaataagatactttaacaccgtagaggttgaagagcttgtgtacaaggcaattgagggtttccgtgctggaaagaagccaggacaagatctatttgacaagattgatacatctaggctaaatgctcacttgaaggatctaatgcctgggctcactgcaaaagtgttccgtacatataatgcttccataacattggacggaatcttgcatgaagaaacagaagatggaactgttttagaaaaaatcgctgtctatcagcgggcaaacaaagaggttgccatcatctgtaaccatcagcgtagtgtctcgaaatcacatgagtcccagatgactagaatgaacgaaaagattgatgagttgaagtcccagatggaggagctgaaagcagacttgaacaaagcaaagaaagggaagcctctaggctatgattcagaggggaagccaaagaggaacttggctcctgaagcgattcaaaagaaggttgcaacacttgaaggcaagatagagaagatggagatggataagaggataaaagaggatctgaagacagttgcgcttggaacgtcaaagatcaactaccttgatcctagaataaccgtggcatggtgcaaacgccatgaagtccctattgagaagattttcaacaaatctctcctcgcgaaatttgtatgggcaatggacgttgacccggaattcagattctaggagaccattggctaccatgtgccagccagtttggtccagtttccagcccttctccctggacactaattgcagctaggaaaggaaagagctcggtgtttgttttttcaaagcccccaccccccctgctcgtggaacgaaggaaagcacccgtcattctctttgtaggcccttctttttttctttcggttcaattgcgctaagttcaatatgtattctgctgagaaatctgagctcgtttgagaacggttggacattgaattcatagtgagttttaatcttgaatatagatgacttgttgagggatgaaaaaaaaaaaaaaaaaaaaaaaaaaaaaaagggcggccgcctagaac

SEQ ID NO: 266421 - DNA, 1094 bp, Zea mays
cggacgcgtgggcagtgccgcgagccacagctagcaccaccaccttgcaccgcacccgcaccgagacgaacagatctatcgatcgatagctagatccatggctgccggcggcgacgacaccaccatcgcgcaggtccacagcggcatcgacagcagcaacaagacgctgctcaagagcgaggccctctacaagtacgtgctggacacgtcggtgctgccgcacgagccggagagcatgcgtgagctgcggctggtgaccgacaagcacgagtgggggttcatgcagtcgtccccggacgaggcgtcgctgctgcggatgctgatcaagctgagcggcgcgcggcggacgctggaggtgggcgtgttcacgggctactcgctgctggcgacggcgctggcgctgcccgccgacggcaaggtcatcgcattcgacgtgagccgcgagtactacgacatcggccgccccttcatcgagcgcgccggggtggcgggcaaggtggacttccgggagggcccggcgctggagcagctggacgagctcctcgccgacccggccaaccacggcgccttcgacttcgccttcgtcgacgccgacaagcctaactacgtccggtaccacgagcagctgctccgcctggtgcgcgtcgggggtaccgtcgtgtacgacaacacgctgtgggccggtactgtggcgcttccccccgacgcgccgctcagcgacctcgaccgcaggttctccgccgccatcagggaactcaacgtccggctttctcaggatccccgcgtcgaggtctgccagctcgccatcgccgacggcgtcaccatctgccgccgcgtcgtctgatgtgatgatgatccgacgaccaagatcgtatatcattcgctcgtcgtctctgtcatctttcaactgcctgcctgcctgcccgccgctgtccgctgccgtcgtcaattaataatgcatggttcttgttcttttttttttttgtacttgcactgtgtgtgttgagttgaacatccggcgatgtactgcaacaactggaatgcaatgcaacatcatgcgtgcagctttaactaaaataataatcaataacaac

SEQ ID NO: 266422 - DNA, 310 bp, Zea mays
cgcgagccacagctagcaccaccaccttgcaccgcacccgcaccgagacgaacagatcgaccatggctgccggcggcgacgacaccaccatcgcgcaggtccacagcggcatcgacagcagcaacaagacgctgctcaagagcgaggccctctacaagtacgtgctggacacgtcggtgctgccgcacgagccggagagcatgcgtgagctgcggctggtgaccgacaagcacgagtgggggttcatgcagtcgtccccggacgaggcgtcgctgctgcggatgctgatcaagctgagcggcgcgcgccg

SEQ ID NO: 266423 - DNA, 456 bp, Zea mays
gcgtagtaactcggaatcggctgaggctgctccgctggtgtaggcggggtacgtcgtgtacgacaacacgctgtgggccggtactgtggagcttccccccgacgcgccgctcagcgacctcgaccgcaggttctccgccgccatcagggaactcaacgtccggctttctcaggatccccgcgtcgaggtctgccagctcgccatcgccgacggcgtcaccatctgccgccgcgtcgtctgatgtgatgatgatccgacgaccaagatcgtatatcattcgctcgtcgtctctgtcatctttcaactgcctgcccgctgccgtcgtcaactaataatgcatggttctgctggttcttttttttaattttcttttgggcttgcattgtgtgtgttgagttgaacatcccccccgatgtactgcaacacctcggatgcaatcccccataatgccccccc

SEQ ID NO: 266424 - DNA, 373 bp, Zea mays
cggacgctggcagacagagctcaagtacctgcgccggccagctatagacaagaggcggcttgacgaggcaggcaccatcatccatggcgccctccggtgacaccattgccctcgtccacagcggcatggacagcagcaacaagacgctgctcaagagcgaggccctctacaagtatgtcctcgacacgtcggtgctgccgcacgagccagagtgcatgcgtgagctgcgcctcgtgaccgacaagcacgagtgggggttcatgcagtcgtcgcccgacgaggcgcactgctgcggatgctcatcaagctcaccggcgcgcgccgcaccctggaggtgggcgtgtacacgggctactcgctgctggccacggcg

SEQ ID NO: 266425 - DNA, 377 bp, Zea mays
gagcgccggcgtggcgggcaaagacgacttccgcgaagaccccgcgctgggcaacctggacgagctcctcgccgacgaggccaacctcggcgccttcgacttcgccttcgtcgacgccgacaagcccaactacgtcaattaccacgagcagctgctccgcctggtgcgcgtcggcggcaccatcgtgtacgacaacacgctctggtgcgggaccgtggccatgccgccggagacgcccatgtcggacatcgacaggaggttctcggccgccatcagggacctcaacgttcgcctctccgcggacgagcgcgttgaggtctgccagctcgccatcgccgacgtggtcaccatttgccgccgcctcgtctgatggagtc

SEQ ID NO: 266426 - DNA, 887 bp, Zea mays
atttttccttccttttgcaaagacatgttctgtatactagattctttgaactttaatagtcttattgaagatggatctaccatgaagctcaggattgcaaagagatgtctcattatattttgcgcacttgttacacgtcaccggaaacatacagataaccagatgccacatattgtcaactgtgcaatcaaaatatcaaaacaaagcatccatttaagtaaactcgactctctccccaatcggattgtttcattggcatttgatgtgatttctcgagttttggaaacaggaccgggatggcgactagtttcaccacatttttcttcacttcttgattcagcaatttttccagcattagcattgaatgagaaggatatagaagaatgggaggaggatactgatgagtatatgcaaaagaatcttccttctgaacttgatgacatttctggatggactgaggatttgttcactgccagaaaaagtgcaatcaatttacttggtgttatagcgctatcaaagggtccaccagttgcatctgcagcatcaaagcgtaagaaaggtgataaaaataaagggaaatctgaaatgagctcaattggggagttattggtcatcccattcctgtcaaagtttcctataccttctcatggtgaggatgcatcatcagtagcagtgcagaattatttcggtgttttgatggcatatggaggcctccaagattttctgactgaaaagaaagatttgacaattacattgatcaggaaccggattctcccattatattctttggatccttgcagcatgcagcccatatttgatttcaacggctaattgggttattggtcagcttgcgatatgcctaccagaggacatgagttctagtattt

SEQ ID NO: 266427 - DNA, 559 bp, Zea mays
gtggaatcgacatgatgccacctccgccttcgggcgctggtgctcatcgagagaaagatgacatgtccttcgatgaaaaatttgtgaagagcaaggaggtggatgcctttgaaccatcctcatcaaggaagagacctttcagcgacgtcaaccgaaaaggtgcaggtgctttacctaatggcagtgctacagaccagcatgatgagtccgaggatagtgatcagaagatatgatgctctgctctctgctctaatttttagctcaggctgaagtagctttgctgcttgaatgataacaagtcgaattgtgatccctgcatattctatggctgtatggtatattggcaagttagactttttctgtttatacaagttctgtgagcaactgctataggatatttgagttttcaaatctgctgctgtctattttcttcttaatataggataaatttgttgactattactcgacagttttgtggtatgtttaacttgtaatcattctagagtgttgtaaccatcaagagttataagttagatgcttcttaatcttgcagtattct

SEQ ID NO: 266428 - DNA, 508 bp, Zea mays
ccctgatcccttcgctccccgaagcaaaagcgcagagcgcatcagcgcagagtaggacagccatggcgacggcggcggcgcagtcccatccggcatcgatggacgcgcgccggtgggacgagtcatcgtaccgccgcggcatcctccgtgcccgcgacctctcgtcccgcaccctcttccgtgccgtcttctttgaccacagcgacgacccggataccgacatcctactcgccgccgcctccagcgacggctccctcgcttccttctccctttcatcctgcatctccgcatgttccgctacctcccaggtggagaccgccgccactctggtagatcctgtctgcatcgtgcaagcgcacagcggacctgcctacgacgtcaggttttaccccgatcaacagcagccgctgctcttcagctgcggggacgatggccgcatcaagggttggaggtggcacgagatgcagagcttgcttgtcccgctctccctgcagggggatcatctgga

SEQ ID NO: 266429 - DNA, 513 bp, Zea mays
  unsure (1)..(513): unsure at all n locations
cgnntccggggattatgagggtgcttttnntagttccagtgagtgggcccgtggtgcctagtttttgtggaggatgnnataatggaagtccttgcatncgcanatgccaatatgaaacaaacgagagttactaaaagaaagatgtttggtgatgagagaagctcttatcctgctaaaccggctggcgtcacacgcaaactattcgaaaccaaccttggaagtgctgacgagaagcaagttatgcgcgaacctggacgatcgattgttgcgaaccggctgccccatacgcggatggcaaatgatctcgcggagctggcccagaaattcaggtcgcgagtgtatgctttcatagaggagaaacccttgacaagcgacggttccaatctgggcgcttctaacaagagatgagatacccaggactggcgcagcctgaggtagcttgggtagtaatatggaaagcatattgctagcggctcgacaagtttagtttcttttttttcccttactgacact

SEQ ID NO: 266430 - DNA, 456 bp, Zea mays
ttctatttatttgatcaggcaataacctgacgaccctggtttgttctgtgaatgcattttcgtcgtgcttcaacaacagggaccggactacatggtccgcaacgcaaggaggtccatgctggaggagctggaggggatgctggagatcgtggagcctcagccgccggggaagccgaggacgcttagccgcaggaggttcgatctcccagaaggcgtagccatcgaaaaggagacgcgggaggcgggcaagtgaagtgcatcggtgggtggtggcatgcttgggcagtttggtatatgcgcgatgcggactatagagtttgagtttgtgctgctaccgaaccgtggaccaccttacccccgttgagatgtttgatagctggactttttgtgctgttgtatttgtagaccagaacgttgttctttgtaataaattggcgtgtgctgctttttgctaat

SEQ ID NO: 266431 - DNA, 624 bp, Zea mays
aggagatcaaggggaagggctgcctcgagccttggtccaactcctactccgtcgaggagacctacggtgaggatgaccatgccgacgacgacagggagaagaagaaacccactggcgtccagaagaaagtcaagggggaaaacaagcagcagcagaagaagcagggcaatgtggagatcgtcgagatcgaggacaacactgccggatgcgtcgccatcagaaaggcttttgaaatgaaccactgcaagggcaagaggaaggaactttccccacaggatgccgcactgctcatccagatgaactacagggcgcacctggcccatcgctcccaggtgctccgttgccttcgcgacctcgccgtcgccaaggccaagctcaaggagatcaggtccttcttctacaacatcacataccgccgccgcatcgcatatgacaatgaagagcgccagaggtttgctgagaagatcattgtcctgctactgacagttgatgcccttgagggaccggactacatggtccgcaacgcaaggaggtccatgctggaggagctggaggggatgctggagatcgtggagcctcagccgccggggaagccgaggacgcttagccgcaggaggttcgatc

SEQ ID NO: 266432 - DNA, 660 bp, Zea mays
gccgccggaggaggagccccaggccccgccgtcgccggacacagagcctaccgaggcggcgcccggcgaggcggaggatgagccgcaaaccctagagcgggcgcaggagctcttcgacaggggttccaaggccatcgaggatgaggacttcgtcgacgccgtagactgtctcagccgagcgctcgagatcagggcttcacattatggagagctcgcgccggagtgtgccagcacatacttcaaatatggatgtgccctgctatacaaagctcaggaggagagtgatgttttgggaaatgttcccaagagcttgccaaatgaagactcagtgaagagtacagctactaaagatgacagtggaacctcaaaggtctctggtaccgatgcggaggatgctgcgtcatcagaaaaagttgatgctgaagaaggtcaaaactcaaatggcaaaaatcaggagaatgggaatggtgaagttgagaaagatgatgatgacgacgatgatgatgagaagatgggagatgaagaggataatgatttggatctttcttggaaaatgttggacattgctagggcaatagtggtgaagagcccacgataacactatggagaaagtatagaatatattctgctctgctgaagtggcaacggaagagaggacat

SEQ ID NO: 266433 - DNA, 412 bp, Zea mays
cgccgccgctcgctcctcctctccgactcctccctcgggcaccgtggtgttcttcgtggacagggcaggccggaggcgcctgatgctgatcagcctggtcggaatcgtcgtgtggctcgccgtgctcggcggcacgttcctgggcgccgcacaccacgccccacccgtcagcgacctggagacccgactgttggcgaaccagaaccagacccagacccagacgtgtcccgagttcaacccgaacgtccgctggagctgcatggactgcctcaaggccgcgtccacgtgcggcttctgtgctcaccagggagacaagcttcttccgggggcgtgcttggcgctgaacaacgcgtctcggcatgcgtgccgcgcagaccaccgggagttctacacggaagggtgccccaacaac

SEQ ID NO: 266434 - DNA, 481 bp, Zea mays
tcaagtgagcttgatcaggcagctgctccaaagaaaagaaaaaacagaaaagacggtcaggcagagcaaaaaagaggaaaggttacaaaaaggacaaggaaagaaccttccggggaaggaggtgtggacaagtcgctggtggagcagtaccgtttcaagttcttgcaacatggtgtgagcaagaccaagactaagaccaaaaggtagttgacttgggaactgtgggaagtgggattgatgttgaagagcagcacggtgtctcggaccaccgtataacgtttcgaagagcaagtctccacagactttctgaggcaaaaatttcgattgtgatgcttaatagttttgtgcccatctgtactgatatttataactgatctagttacagccgtataattatgaatcatcttatcatacaccgattatggcttcatgatgacctgactgtgtctgaaattcctgagttggtatttctaacggaaac

SEQ ID NO: 266435 - DNA, 410 bp, Zea mays
gtcagcaccaccaatgccgaggggacagccaggaagaatgcagttgcaacaggtgccgggtgctcagcttggcgctctacaaccaacacaggctacactgaacatgcagtacaggggcatgcatccatcgatgcaaatgaatcatggaatgggcatgtattcccaaccaacgttcggaggatattatggaatgaaccaaacacagctttacggcgttcatatgtctggttatggatatggtcagcaatctgggggctactatattccgaatgctgcatatgcctatactagtgcaaacgaacttgcccagaggatgaatgacctttcagttcaaaacggtgatccaaatggagccgcagcaaataagcagagcagacctgaggatgcactctttggtgatctcttgagca

SEQ ID NO: 266436 - DNA, 553 bp, Zea mays
caggcacaggactaggactcgcgggtcgacacaagcctctacacacacgcctgtgattatggatatggtcagcaatctgggggctactatattccgaatgctgcatatgcctatactagtgcaaacgaacttgcccagaggatgaatgacctttcagttcaaaacggtgatccaaatggagccgcagcaaataagcagagcagacctgaggatgcactctttggtgatctcttgagcatcgccaagatgaagcaaaacaaacctgcagctggcaaggttggcggctaagtttgagtaaagaaggtacataattttatcttaattgccagcagcagaaacctttcctgacagcgcatataattattttgccacgttctatgcaatgccagatggcttctcgatgtaagctcatttggtagaaattcatattgggaactggagattaggatgcttgtggggagcctcatagcaaatatgtctataactctactatatatgaaattcttgagttctcagtagcaatatgtattgtcataatttccctctgcaaata

SEQ ID NO: 266437 - DNA, 699 bp, Zea mays
cacaagccgatgatcctggcgttatcaagaccagacccgaagaagaacatcacgaccctcgtcaaagcggttggagagtgtcgtccactcagggaacttgcaaaccttactctgatcatgggtaacagagatgacatcgacgacatgtctgctggcaatgccagtgtcctcaccacagttctgaagctgattgacaagtatgatctgtacggaagcgtggcgttccctaagcatcacaatcaggctgacgtcccggagatctatcgcctcgcggccaaaatgaagggcgtcttcatcaaccctgctctcgttgagccgttcggtctcaccctgatcgaggctgcggcacacggactcccgatagtcgctaccaagaatggtggtccggtcgacattacaactgcactgaccaacggactgctcgttgacccgcacgaccagaacgccatcgctcatgcactgctgaagctcgtggcagacaagaacctgtggcaggaatgccggagaaacgggctgcgcaacatccacctctactcatggccggagcactgccgcacttacctcaccagggtggccgggtgccggttaaggaacccgaggtggctgaaggacacaccagcagatgccggagccgatgaggaggagttcctggaggattccatggacgctcaggacctgtcactccgtctgtccatcgac

SEQ ID NO: 266438 - DNA, 1542 bp, Zea mays
ttgttgtttttttttttttttttttttttttttttttttttttctttttatattattccatagttagtataaagttcttcagttagtcctgtcaagaacaaagaggatggtcccgatgaacatgataaaaagcaatctggaacaaatgatgtctcaccacgtgagagtatcagcaaccgcggcgcaatggattcccctactcatggagataaaacccatgatggacactcatggggcatggataatgactccctatggaactttgatcataaggagggtgagaatggtgattcagatctcttctttgggccacaaggccttcccccgataagaactggaggttcctcatctggtaattcagttgtcaaggaacagaagccgttctttgattctgttcctggtaccccagtggagaaatccgtctttgattccatcccaggcacgccatttcagaaatccgtctttgattctatcccaggcacgccagttcagaaatccgtgtttgattactctgtccctagcacaccgatgcagaactcagtctttgattattctgtcccaagcacgccgatgcagaagtcactctttgattctgtccctggtacaccggtgcagagatcagttttcgattctgttccgagcacaccaatgcagagatcagtttttgactctgttccgagcacgccgacgcagaaaccattcttcgactcctttccaagcacaccaatgcagagatcactgttcgattctgggccaagcagagcagaatctcctaccgccagcagcatgtatggcaaagagcagaagggattcttcgattcttcagtcccgagtactccaatgtacaactcaagcttcacgccaaggtatagcgaagcaggagacgattcattcgacaccatgtcccaatacagctcatttggcatgcacgagagcaattcctttggacagcgcgacagcttatcgagattcgattctttcagcagcaatgctgacaacggtgggaatgacacttttgcgaggtttgattctttccgcagcacttcagatcagggtgggggcaacagcttcatgaggtacgattccatgaacagcagcagcgaccatgacgggatcggcacgtttgcgaggtttgattcgatgaagagcagtgactacaacagccggggctactcgttcgacgacgacgacccctttgggactgggccgttcaaatcgacagagacctcgagccacagcccgacgagacatgggacggatgcgtggagtgcattttgacaggtatattgtattatagcggtcatgttcttgtgcaccttactgcagatatacatacacgtacaagggcaagacatttttttttgcatgggcctctgctccacaccttttggacgggacggggcttgcttgtgtgtttaattttgtacctaggctgggaacatgtgtttggagggatggtgctgcttataaacattctttataccttgtattgtacaagtacgggcctgtttggtttgtggctaaatgtgacacactttgtct

SEQ ID NO: 266439 - DNA, 564 bp, Zea mays
agtgactacaccagccggggctactcgtttgacgacgaggacccctttgggacagggccgtttaaatcgacagagaccacgagccacaacccgacgaaacatgggacgaacacatggagcgcgttttgacaggcaggggctgtatcatatattcaatagaggtcatgcgcttgtgcaccttactgcagatatatacacacgtacaggggcaagacaattttttgttgtgtgcatgggcctctgctcctccacacctggggaaggggaagggatgggacggggatttgcttgtgtgcttgctttgtgtttaattttgtacgtaggctgggaacatgtgtttggtgggatgatgatgatgatgctgctgctgctgcttataaactcaacattctttataccttgtattgtacaagtgcatgtacaagatgtgagtcgacccgtttgggttgagtaactctcgagtgttttttcttccatggtgtagcgttttcctgtttctccagaattttctgagcaatgtacagacagacaaacttttgtgtgaaaaatgaaatataattataa

SEQ ID NO: 266440 - DNA, 434 bp, Zea mays
gcgtggagtgcattttgacaggtattgtattatagaggtcatgttcttgtgcaccttactgcagatatacatacacgtacaagggctagacactttttttttttgcatgggcctctgctctgcgccacaccttttggacgggacggggctcgcttgtgtgtttaattttgtacctaggctgggaacatgtgtttggagggatggtcctgcttataaacattctttataccttgtattgtacacgtacacctacaagatgcgagtcaacccgttgggttgaagaactctccgagtgttttcttacattgtgtaagttttttttttttctttcagtttctgcaaaaagttctgagctctgtacatacattttggctaagaagtcaacctagttatggggatattgtgagcaattataagtcggttcatcgagaaaa

SEQ ID NO: 266441 - DNA, 537 bp, Zea mays
aaacgactgccctaacctcgtgcagtcgtgcccgcttgtttcccttgctcgccttcacccctcgccgccgccgccgccgtcgccgtcgcaagcgacgatgctcgacatcaacttgttccgcaccgacaagggcggcaacccggaccttattcgcgagtcccagcgcagtcggttcgcctccgtcgagctcgtcgacgaggtcatcgccctcgacaaggcatggcgcgaaaggcagttcgagctggataagatccggcaggagctcaacgctaccagcaagaagatcggcaagctcaaagccagcaagcaagaagaggaagcgaagaagctcatggagagcacagacgaaattaagaaaaggttgacagccaaagaagttgaggtgcaggaggccaagagcaccctcgacgccaaggtcacgacgattggcaacatcgtgcatgagtccgtgccagtcagcgacgacgaggcaaacaataacaaagatggtgtatgggtcggtcatttactctctggttactccttgcccatggacat

SEQ ID NO: 266442 - DNA, 741 bp, Zea mays
ctcatggagagcacagacgaaattaagaacaggttggcagccaaagaagttgaggtgcaggagtcgaagagcaccctcgacgccaagctcacgacgattgggaacatcgtgcatgagtccgtgccagtcagcgacgacgaggcaaacaataaaattgtacggacatttggagaaaagagagtagaggaaaatttgaagaatcacgtggacctttgcaggatgcttgacattgtcgcattggagaagggtgctgatgtggctggtggtaggggtttctatttaaaggacgaaggtgtcctccttaacctggcattgataaattttgggctagcctttctgagaaaacggggatttaagccgatgcaaactccctttttcatgagaaaggaaactatggcaaaatgtgcccagttggcccagtttgatgaggagctttacaaagttacaggtgatggtgaagacaaatatctcatagctacatcagagcagcctttatgtgcttatcacttaggtgatagaatataccctgctgaacttccaatcaaatatgctgggtactccacatgcttccggaaggaagctggttcgcatggaagggacacagctggtatcttcagagtccaccagtttgaaaaaatcgaacaattctgcattacaagcccaaatgacaacgattcttgggagatgcatgaagagatgctaaaaaactcagaagattactataaggagaatgggctacca

SEQ ID NO: 266443 - DNA, 514 bp, Zea mays
tcacgcgtccgcccacgcgtccgcggacgcgtgggcggatcgcctacgtcgagctcgtcgacgaggtcatcgccctcgacaaggcatgacgcgaaaggcagttcgagctgtataagatccgccatggagctcaacgctaccagcaagaagatcgataagctcaaagccagcaagcaagatgaggaagcatagaagctcacggaaattcagccggcacacactataattgtacggacatttgcagagaagagagcagaggataatctgaagacccacgtggacctttgcaggatgcttgatattgtcgcattggaaaagggtgctgatgtggctggtggtaggggtttctatttaaggacgaagttacaggtgatggcgaggacaaatatctcatagctacatcagagcagcctttatgtgcttatcacttaggtgatcgaatctaccctgctgaacttccaatcaaatatgctgggtactccacatgcttccggaaggaagctggttctcatgg

SEQ ID NO: 266444 - DNA, 530 bp, Zea mays
aagagcggtgttcttatgagcgctagtcatggccacgctggtagctcgatgcaacaagtgcagtcttcactcgataagaaagaggcgaaggtgaaggagctgctgaagaagaggaaagggtggaagagcaaggcttggccaggcacgatggaggaggtccagctgctgttcgccctgatcgacatcaaggtcgtgtcgcgggtgctccggatggggaagctgagcaaggagcagctgctgtggtgcgaggagaagatgagcaaggtggacctcaccgagaaccggctacgccgtgacgggtcccccatccttttcccctgttaggccgacgcacccttcctgcctgcctctgggggcgtaagcagagaacctcccttactttgttagttcggcatgccatggcggtggtggcggcaccaggggtgtccgctcgtaccattcctttcggctaccttatcagactatatatgtacatgcttttaggttggatctgaattgaaaatgtccatactaaagtaagggcttaaagt

SEQ ID NO: 266445 - DNA, 1550 bp, Zea mays
caacaaaccgcagcctgagcacccgaggagactccgtgcgaccgaagccagagccagcggaaccgaacgaaagtgagggcggcgagatgaacggcggcggggaggacgggaagcagcagccgcacctggtactggcgcacaagctgttcctcctgtcgcactccgacgtcgacgacctcgccaaggtcgacctacgcgctgacgtgttcgcggcagtcaaatccgatgacatggcagctctgtacgagtcgttggcggcggacggcgtactggagacggacgcggcgctgctggccgagatgcgcgccaggatcgacgaggagatccggaagctcgacgagaagattgctgatgcagaggagaacttgggtgagagtgaagtgcgtgaggcacatcttgccaaatctttgtactttataagggtcggtgagaaggaaaaggccctggaacagcttaaagtcactgaaggaaaaactgtagctgttggccaaaagatggatcttgtgttccacactttgcagattggttttttctacatggattttgatctgatatcaaaatccatcgataaggcaaagaacttgtttgaggaaggaggcgattgggagaggaagaacaggttgaaagtatatgaaggcttgtactgcatggcaaccagaaacttcaagaaagctgccagcttatttttagactcgatttcgactttcacaacttatgagatattcccatatgatacgttcatcttctatacagtcctcacaagtgtcatcacattggatcgtgtatctctgaaacaaaaggtggtagatgcaccagaaatcctggctgtaattggcaaagtacctcacctctccgagtttctcaactccctgtacaactgccagtataagtcgttcttcgttgcattttctggtctgacagagcaaatcaagttagaccgttatcttcagcctcatttccgctactacatgagggaagtgcgcaccgtggtatactcacagttcttagagtcatacaagagtgtgacaatggaagcaatggccactgcgttcggtgtaactgttgatttcattgaccaggaactgtcacggttcattgcagctgggaagctgcactgcaagattgataaggttgctggtgttctggagactaaccgacctgatgagaggaatgctttctaccaggcgaccatcaagcaaggggacttcttgctgaaccgcatccagaagctttcacgggtcattgatctttaaggactgtctgtgttggagctcttcctgcaatcggcgcctgcaaatgtttcccaccctacggcttccacaagacatgaccatttctctcgagcggggaacaagtcttaagaacatctgtgttttaagtgcagaatatttgtgttttaatcagtaaacgctgtcctgtcatttcaagtttcctatctgtggctctgtctgtgattttcttacttaagttgctagcttgacaatctggtgcccttttgacctacatacataatgagctatgatacgcggcccgtaaaaagagttcagttg

SEQ ID NO: 266446 - DNA, 946 bp, Zea mays
ttgtagatgcaccagaaatcctggctgtaattggcaaagtacctcacctctccgagtttctcaactccctgtacaactgccagtataagtcgttcttcgttgcattttgtaagttcagatattgaaataacatgtccatactcctgcagtattataagattactgtcggtgcattttgtggcttgcattgatatggtctataattgtttccagctggtctgacagagcaaatcaagttagaccgttatcttcagcctcatttccgctactacatgagggaagtgcgcaccgtggtatactcacagttcttagagtcatacaagagtgtgacaatggaagcaatggccactgcgttcggtgtaactgttgatttcattgaccaggaactgtcacggttcattgcagctgggaagctgcactgcaagattgataaggttgctggtgttctggagactaaccgacctgatgagaggaatgctttctaccaggcgaccatcaagcaaggggacttcttgctgaaccgcatccagaagctttcacgggtcattgacctgtaaggactgtttgtgttggagctattcctgcaatcggcgcctgcaaatgtttcccaccctacgtcttccacaagacatctctccttgagtggggattggggaacaagccctaagaacatctgtgttttaagtgcagaatatttgtgttttaatcagtaaacgctgtcctgtcatttcgagtttcctatctgtggctctgtctgtgattttcttccttaagttgttagcttgacaatctggtgcccttttgacctacatacataatgagctctgatacgcggcccgtaaagagagttcagttgaaaatggaattcgtattcgcactgtacagccacattcactttcacccttccaagaaaccaaatcaatacccggtgggcccctttcccccc

SEQ ID NO: 266447 - DNA, 488 bp, Zea mays
cccacgcgtccggttgaagtagaaactaccgaaacgagtctagcaaacaaaccgcagcctgagcacccgaggagactccgtgcgaccgaagccagagccagcggaaccgaacggaagcgagacccccggcggctagcgagatggacggcggcgccggcgaggaggggaagcaggagcggcacctggtgctggcccacaagctcttccttctatcccacccctccgttgatgacctctccaaggtcgccctccgcgccgaagtcctcgacaccgtgaaatccgatgatatggcgacgctgtttgagtcgctggtcgccgggggtgtgctggagggggacgccgcgctgctggccgagatgcgtgggaggattgacgaggagatccgcaagctagatgagaaaattgctgatgcggaggagaacttgggtgagagcgaagtccgtgaagcacatcttgccaaatctttgtactttataagggtcggtgag

SEQ ID NO: 266448 - DNA, 457 bp, Zea mays
  unsure (1)..(457): unsure at all n locations
cccgttcggaattcccggctggaggcacgcgtccgcacaagtgcggtgccataagtgacagcctcctcagtctctgtctgtggagctctctcgcgcgcgcgttgccatctcgcgggttcttcatctcgtcgctctgttcaggcggcgacaggagatggacggggagcaggcggcgcggtgggcggcggcgcacgagggggttcccgtcggggcggaccttgtcgcggcggcgctgcggcagctgcgcttcctcgcggcggtggaccgccgccggtggctctacgacgagggcccgctgctcgaccgggccatacgcaggtacaaagcatgctggcttccgcttcttgacaagcacactaagggtgtggctgtagattggtccattgggtgttcctcttgattgtgagtggatatggcactgccatcgncttaacccggttcagtacataagggactg

SEQ ID NO: 266449 - DNA, 591 bp, Zea mays
gaccaactaaaatcgtgacatttgacattcatgtgatgataggcagtggggtgccagagccgtgcagaatgattaaccctagacaaggatccgaggcagaactcagcatggttaacaccactatcttttcaaggggaatggtaataaggagaatgagccgtttattagtgatgtaaccggcatcactgattctgccattctctcaggattaaagaacgacatgcaccaaatacagaggtacagaacctgcaggaatctttatctgatttccaatacgtatgttttgcatacactgaagcgcgcacagaggcagatgcagcactaatctagccagtaaaccaagcacgcacactcacgcgcacgcacacaccaagtgaccataccatcatacaacatgcagtcagggtttttttatcaacagtatgtcgcctcacactattaacaggcctgtgatctacctgaatgcctgagctgacttctgggtccagccttttcttcacagccttgttccccagggacacagacctcaagtctcaatgagcagagaagaccggacaagctatgtgcagcacatcggtggagtgcagaacc

SEQ ID NO: 266450 - DNA, 767 bp, Zea mays
cccacgcgtccgcggacgcgtgggcgtacgcagtgtctcttttccagttccagacctgaagaaactccgaccggccggtgggcggtggcggcacgcggcaggatctgtgccgcgatggcgacgtcgaacacggcgcggatggaggacggcggcggcgacctgcggagcaccatcaagaagtggaatatcatctaccctgtctacctcaactccaagaagacggtcgccgagggccgccgcatcgccgctgccaaggcctgcccggaccccacctgcatcgagatcgctgactgctgttcgcacctcaagatcccccacgccatcgagttggataaggcgtaccctcgggatttcttccaggtggggagggtcagggtgcagcttaagaaagatgacggctcccccgtcaatcctgctattaaaacgaagaagcagctgatgatccaagtagcagagctagttcccaagcatcacggaaggacaaagaagcaggagccagcgcccaatcccggtggcagttcaaagaacacaaaaggcgggaaaaagaaaaagtgatgcagtatcattgtgttgttttttattctgttcgtcatcatacactaagcttctgtgaaaaagaaaaagtcttggacgttgttgttatgttgccattatgccatttttcatgtataagaacttactaagaatcttccattgactcggtaaaatgcaacataaaaaaattggcgtcgctacacagtaatatatatgaaaaaaaaaaaaaaaga

SEQ ID NO: 266451 - DNA, 807 bp, Zea mays
tttcttcccacgcgtccgcccacgcgtccgcccacgcgtccgctcttttccaattccagacctgaagaaactccgaccggtggcggcaggatctgtgccgcgatggcgacgtcgaacaccgcgcggatggaggacggcggcggcgacctgagaagcaccatcaagaagtggaacatcatctaccctgtctacctcaactccaagaagacggtcgccgagggccgccgcatcgccgctgccaaggcctgcccggaccccacctgcatcgagatcgctgactgctgttcgcacctcaagatcccccacgccatcgagttggataaggcgtaccctcgggatttcttccaggtggggagggtcagggtgcagcttaagaaagatgacggctcccccgtcaatcctgctattaaaacgaagagcagctgatgatccaagtagcagagctagttcccaagcatcacggaaggacaaagaagcaggagccagcgcccaatcccggtggcagttcaaagaacacaaaaggcgggaaaaagaaaaagtgatgcagtatcattgtgttgttttttgttctgttcgtcatcatacactaagcttctgtgaaaaagaaaaagtcttggacgttgttgttatgttgccattgtgccatttttcatgtataagaacttactaagaatcttccaaaaaaaaacaacaaatacaacaacttatgctaagaaaaaataaaaaaataataaaaaaaaaagaaaataattacattaaaccaaataaaaaaaggggcggcctttttaaaggttccaagtttactta

SEQ ID NO: 266452 - DNA, 695 bp, Zea mays
cccctcactgagccaaccctgaccttgaccatgggaagaaacaggctgtcgcttcagaccacaactccggatcatttccaacatctgacagtggttgattaagaccctcaatcggaagctcacggtcagtaattgcatgctcgcccattgtaggtggtgggctgttggtattaggaacaggattagcggcggcaccaccccgactggacgtcagcctagcaattagctcatcgactccagattggagaactcgacaccatgaaggtgctgatcgttgcccttgctctcctggcgctcgctgcgagcgccgcctccagtacaagcggcggctgtggctgccagacaccaccgtttcatctaccgcctccgttctatatgccgcctccgttctatctgccgccgcagcagcagccgcagccatggcaataccccactcaaccaccgcagctaagcccgtgccagcagttcggatcctgcggcgtcggcagcgtcggcagcccgttcctgggccagtgcgtcgagttcctgaggcaccagtgcagcccggcggcgacgccctacggctcgccacagtgccaggcgctgcagcagcagtgctgccaccagatcaggcaggtggagccgctgcaccggtaccaggcgacatacggtgtggtcctgcagtccttcctgcagcagcagccgcaaggcgagct

SEQ ID NO: 266453 - DNA, 563 bp, Zea mays
  unsure (1)..(563): unsure at all n locations
cggtctggaattcccgggtcgacgcacgcgtccgcccacgcgtccgcggacgcgtgggggccaggaacacccccaagttcgacgtggagcggaagtagggcggcgacacccgggtggagatctactgcgccgccaagccggggctgctgctgtccacggtgagcacgctggacacgctagggctcgacatccagcggtgcgtcgccagctgcttcaacgacttccgcatgcacgcctcctgctccgagatgcagagggaaatgatcagcgccgacgcgataaagcaggagctgttcaagaacgctggctatggcggaggctgcttgtagaggggcatgtcatcatggcatgggaggaagaagaagaagaggcagcaatgaattaatcttaagcagctgtgggagcagcagtcgtagtatcagttcaggtccagtagcggaaaaggcaggcagggcaaagatttgggaggcctttttgcaatccatcntccccatcataacccacttcgatctatccattgtagcagtacgtgtccgtacgtcctatagcatcatgcaggatgc

SEQ ID NO: 266454 - DNA, 843 bp, Zea mays
acgctccgtcgtgcccaagatcagcaagatggaccggacgtcgatcctgggcgacacgatcgactacatgaaggagctgctggagaggatcaagctgctgcaggaagagatcgggcagcagcaggaggaggcgccaggcatgctcagcgtcttccgggagctcaaccccaacgagatggtggccaggaacacccccaagttcgacgtggagcggaaggagggcggcgacacccgggtggagatctactgcgccgccaagccggggctgctgctgtccacggtgagcacgctggacgcgctagggctcgacatccagcagtgcgtcgtcagctgcttcaacgacttcggcatgcacgcctcctgctccgagatgcagagggacatgatcagcgccgacgcgataaagcaggagctgctgaagaccgctggatattggcggaggctgcatgtagagggcatggcgcggctgtaggaaggagaagaagaggaggagccggagcaggaggaggcggcaataaattaagctctattaaacagcgctagtagcaaggagcagcagcagtatcggttcagacttcaggtccagtagctgaaaaggcaggcagggcatgaggccagtgaagatatggcatgggggacctttttgcaatccattctccccatcagaacccacttcgagttagcagtgtgtgtccgccactccgcctgaatctttctcctatatactgctgtatttaattagcaagagcaaagctctcactgcctttctaatgattgatcagaagtgcctttggcgaccccttgtctttctggacatctatatataataacgttcttctttct

SEQ ID NO: 266455 - DNA, 507 bp, Zea mays
attggaccccgcctgagggtgctggacagtttcatggtgtacccttggatgttaagggtgttcatttcaaaggttccagaaagcgattgatgcttgaggcatggaatttctacagctcaacctctaagctgtctgatatgctatgcctaatcttgagaagtggccggacgaaatatgacttctgaacttttgggttaaaactgacacatgttgatactgttcaaagctgttgtatgttcaagtatagtacaaaaaaatgctgaccatgaggctgtcattgcaagaattcagatcagcataaaaaattgctagtagcattcagtatgtaacaaaaacatgtgagaacccatacgagaaccacgcagggtgaccatcgccttgtgttcttttggtttatccctacctgttaaatatgtaatgtggttccccaccaatgtgcgctatgtaggcaatttcgccgtcagatgtcgtcagcagtattaaatagagctggcgctgtttcaatgt

SEQ ID NO: 266456 - DNA, 509 bp, Zea mays
ccggccccgtcgagcgcctcttcttcttccgccacccggagccggcctccactctggcgctcctccgctcctcgctctccctcgcgctccgccgcttctacccactcgccggcaccatcaggccccacgcgcccttcctctgctcctacacccatggtaccgatgccctcaccatggtcgtcgccgagtcgaacagccccgacgatttcgacagcctcgtagccaggtcacgcagggacctggacaggatccgccccctcgttccgcagttgccgccgccgggggaagacggagcgttcgcgctcgccgccgtgcaggccactgtcttcccaggccgtggcctctccctcggcgtctccgtccaccacgctgcctgcgacgatggcgccaccatgcatttcgtccgcacctgggccgcgtccctgccgcctaggactcgagaacgacgacggatccgaggacgccgtgctaccgccacggccggttctggaccgctccgtcgtcgccga

SEQ ID NO: 266457 - DNA, 639 bp, Zea mays
agacacatgtgacaagcctcatctcagccgtgcaggaccaagtagttttgcttcactccggcattccatccatatccatccatcagaattctcagtctccacagcagcaaggcgcacgaccagcaccagcagccggcaacaaaagacacagcagcgatggcgttcgtgccggtgtgcgtgcagtgcgggacgcggagcaacccgtgccggtgcaaggtggtcgggccgacgctggggttcgtcgcgttcgtggtggccggggtcatcgagtggccgctgggggccgccgtgtacctgttccgccaccgcaagggacgacgcatcatggcgcacccggccaccgtcgtgtacccgcgcgttaccagggccatcccgatctaatcggccgaccgatcagccaggtcgcggtttcatgtccgggtttgtgtcgccaacgtactgagatgtcgtcagtccaaatttgtgaatccttttacacaccgcctgccttctttctcaataagagtcgcaaatgtgtggtttcagtttgcgtacatttgtacttcgattgtaagcatcgccgtcaatgtacgtaatactatgtatctcagtctatccgagtaactttctattactaacttcattcttgagtaataaaaa

SEQ ID NO: 266458 - DNA, 565 bp, Zea mays
cctcgctagctcgctcgctctccttgcaactccagtgctgctcactgccactgccagcagatcgagctgctccgtctcacaaaccctcttgctttgctgctgcacctgcaagtctgcaaccgcgcacacagagatgtcgacgacggtgagccgtgcgtccctcgaccagaagctcgccctcgccaagcgttgctcccgagaggcgaccctcgccggagccaaggcggcagcggtggcgactatcgcctccgcgatccccaccctggccagcgtgcggatgctgccatgggccaaggccaacatcaaccccaccggccaggcgctcatcgtctccacggtggctgggatggcctacttcatcgccgccgacaagaagatcctgtcgctggcgaggcgccactcgttcgagcaagcccctgagcacctcaagaacacctccttccagggcaccggccgtccccacccggccttcttcaggccgtgagacgagaccttcgtccagagctagctacctacctctttttccagttcgccaatgcaagcaccaaatgcccaccgatgcatg

SEQ ID NO: 266459 - DNA, 646 bp, Zea mays
cccacgcgtacggtcctcattattattctcactggtcgatctgctaacacaaacagcagcagctcctcctcactagctagccttctctatttttgctactgcaagtgtccaagtctgcgacgacgtccgagatgtcgacggtgagccgtgcatcccttgaccagaagcttgccctcgccaagcgctgctcccgagaggcgactcttgccggagctaaggcggcagcagtggcgactatcgcctccgcgattcccaccctcgcgagcgtgcggatgctgccgtgggccaaggccaacatcaaccccaccggccaggcgctcatcgtctccacggtggccgggatggcctacttcatcgccgccgacaagaagatcctgtcgctggcgaggcgccactcgttcgagcaagctcctgaccacctcaagaacacctccttccagggcaccggccgtccccacccggctttcttcaggccgtgagacgtggccttcgtccagagctagctacctacctctttcagttcgatcgtcgtcagtgcaaagcaccaccaatgcctgaataaatttaactacgaggctagctgctgaacatcgatctgctactgctagtattactacggcgaggctgctgaacagcgctgtagagt

SEQ ID NO: 266460 - DNA, 443 bp, Zea mays
aggcgctaatcgtctccacggtggctggaatggcctacttcatcgccgccaactccgagatcctgtcgctggcgaggcgccactcgttcgagcaagcccctgagcacctcaagaacacctccttccagggcaccggccgtccccacccagccttcttcaggccgtgagacgagacctccgtccagagctagctacctacctctttttccagtttgccaatgcaagcaccaaatgcccaccggatgcatgcctgaataaactactgtaattgcgaggctgctgaacgtcgatgcgctagtataactactactactacgaggctagctgcgcgctgaacacagcgctgtaaagtagcgtcggtgtgctaaattcagaatgtgtaagtttaatttatgctattaccagttaccccaaaaaaaaaaaaaaaaaaaaagggcggccgc

SEQ ID NO: 266461 - DNA, 672 bp, Zea mays
ccggaattgccgggtcgacccacgcgcccggtcgcacatatctactatactatactctaggaagcaaggacaccaccgccatggcagccaagatgcttgcattgttcgctctcctagctctttgtgcaagcgccactagtgcgacccatattccagggcacttgccaccagtcatgccattgggtaccatgaacccatgcatgcagtactgcatgatgcaacaggggcttgccagcttgatggcgtgtccgtccctgatgctgcagcaactgttggccttaccgcttcagacgatgccagtgatgatgccacagatgatgacgcctaacatgatgtcaccattgatgatgccgagcatgatgtcaccaatggtcttgccgagcatgatgtcgcaaatgatgatgccacaatgtcactgcgacgccgtctcgcagattatgctgcaacagcagttaccattcatgttcaacccaatggccatgacgattccacccatgttcttacagcaaccctttgttggtgctgcattctagatagaaatatttgtgttgtatcgaataatgagttgacatgccatcgcgtgtgactcattattaacaataaaacaagtttcctcttataaaaaaaaaaaataaagggcggccgctcgcgatctagaaccccacgcgtccg

SEQ ID NO: 266462 - DNA, 764 bp, Zea mays
tgctagcgtggccgaccctgatgctgcagcaactgttggcctcaccgcttcagccgtgccagatgccaatgatgatgccaggtatgatgccaccgatgacaatgatgccgatgccgaatatgatgccatcgatgatggtgccgactatgatgtcaccaataacgatagctagtatgatgccaccgatgatgatgccaaacatggtttcaccaatgatgatgccgagtatgatgccttcgacgatgacgccgagtatgatgccaccgataatgatgccaagtatgataccaccgatgatgatgccgagcatggtgtcatcaatgataatgccaaacatgatgacagtgccacaatgttactctgattccatctcgcacattatacaacaacaacaattaccattcatgttcagccccacagccgtggcgatctcacccatgtttttacagcagccctttgttggtgctgcattctagatataagcatttgtgttgtacccaataatgaagtcggcatgccatcgcatgcgactcattgtttaggaataaaacaagctaataatgactatcttttaaaaaaaaaaaaaacttactgtcattaacaataacccttcaacaatcttatacttgatagaaacaatcaatacttagtgcatctgtatcttccaaaaagtgggggttttatcatctacaacaaccattgcatcccaacaatcattttattttttaaatttaaaaaaaaaaaaaaaaaaaagggggccccct

SEQ ID NO: 266463 - DNA, 312 bp, Zea mays
cccacgcgtccgctgcaacagcagttaccattcatgttcaacccaatggccatgacgattcgacccatgttcttacagcaaccctttgttggtgctgcattctagatagaaatatttgtgttgtaccgaataatgagttgacatgccatcgcgtgtgactcattattaacaataaaacaagtgtcctcttattatcttttaaaaaaaaaaaaaaaaaaaaataaaaaaaaaaaaaaaaaaaaaaaaaaaaaaaaaaaaaaaaaacaaaaaaaaaacaaaaaacaaaaaaaaaaaaaaaaaaaacacacaaaa

SEQ ID NO: 266464 - DNA, 388 bp, Zea mays
  unsure (1)..(388): unsure at all n locations
tcgccacgcgncggatgccttcaatgattagccaaacatgatgacagtgccacaatggtactctgattccatctcgcacattatacaacaacaacaatgaccattcatgttcagccccacagccgtggcgatctcacccatgtttttacagcagccctttgttggtgctgcattctagatataagcatttgtgttgtacccaataatgaagtcggcatgccatcgcatgcgactcattgtttaggaataaaacaagctaataatgacttttctctcattataatgtaaaaaaaaaaaaaaaaaaaaataataaaaattgaaaaaaaaaaataaaaaaataaataaaaatattaaaaaatattaaaaataatttactaattatttaaaa

SEQ ID NO: 266465 - DNA, 393 bp, Zea mays
gtattaagcggtaaggcaagcagttgttgcagcatcagggatggacacgccatcaagctggcaagcccctgttgcatcatgcagtaatgcatgcatgggttcatggtacccaatggccatgacgattccacccatgttcttacagcaaccctttgttggtgctgcattctggatagagatatttgtgttgtaccgaataatgagttgacatgccatcgcgtgtgactcattattattaacaataaaacaagtttccttttatcaaaaaaaaaaaaaaaaaaaaaaaaaaaaaaaaaaaaaacaaaaaaaaaaaaaggcgcaggggctgtaggtttacaagttccaagctcacgtacgcgagcttgcaacgcttttatactgcgatacataaac

SEQ ID NO: 266466 - DNA, 147 bp, Zea mays
gttctagatcgcgatctcacccatgttttttcagcagccctttgttggtgctgcattctaggtataagcatttgtgttgtacccaataatgaagtcggcatgccatcgcgtgtgactcattattaacaataaaacaagtttcctctt

SEQ ID NO: 266467 - DNA, 1068 bp, Zea mays
gtccgaccacgcgtccgcccacgcgttcgcggacgcgtgggcggagcgtgggttactgcgatgattttcctgggcccgacaggttatcaaagactcaaggacatggtggatgacaagatacattcgagaggacgtggtcctgtgcagatactcacccggcaaccagcagaggggcggtctcgtgatggaggtctccgctttggagaaatggaaagggattgtatgatcgcacatggagcagctttcttcctgaaggaaaggctgtttgaccagagtgacgcatacagagtccatgtatgcgagaaatgtggtctcatcgcaattgctaacctaaagaaaaactcgttcgaatgcaggggctgcaagaacaagactgacattgtccaagtacacataccctatgcttgtaagcttctgtttcaggagcttatggcaatggccattgctcccagaatgcttacccatgatatgaagacagggaaggatcagaagaagcgctgaacgtgtatcacgtgagatgtaaccagaactcatgccccgttgctatattcctggatcctggttcacacaatagtaccctgttgaggaactttgtggtcacttcttttctgatttggacttcggttcttcgcgatcgatggagggctgttactatctcttgatggattatcatcctatctgtgctcgtgttgcctgaagatcagtgctagcagatcgtcgagttaattttgtacattaggaatgtgttgtaatgtattaatctgtgcgagtagaaagatttttgactaaaggtgtcaatttggaggtgtaactgtacgttaatactaaacgcgatgccattgcaatttcagttttattttgaaatacatggggttttagtggcaaaaaaaaaaaaaaaaaaaaaataaaaaaaaaaaaaaaaaaaaaaaaaaaaaaaaaaaaaaaaaaataaaaaaaaaggaagacaattaaagacatccaatattaacgacaaaagccatgagaacaaaaaagtaataatggtggcctcctaaatgtaattacctttcctatgttgaacaatatata

SEQ ID NO: 266468 - DNA, 623 bp, Zea mays
ccggtccggaattcccgggtcgagccagcgcgtgcgcggacgcgtcggctctgcgtcacagtgaaagtggcatggtagatcaggttctgttaacaacaaatgcggatggtctaagatttgtcaaggttaggatgcgatctgttcgcataccacaaattggcgacaagtttagcagcaggcatggacaaaaaggaactgttgggatgacttacactcaagaggatatgccatggacaatcgaaggcattacacctgatattattgtgaatccacatgctattccatcccgtatgactattgggcagctgattgagtgtattatgggtaaagttgctgctcagatggggaaggaaggcgatgccactccattcacggatgtgactgtggataacatcagcaaagctcttcataaatgtaattatcaaatgcgtggatttgagacaatgtacaatggtcacactggaagaaaactgactgcgatgattttcctgggccccacatattaccaaagactcaagcacatggtggatgacaagatacattcgagaggacgtggtcctgtgcagatactcacccggcaaccagcagaggggcggtctcgtgatggtggtctccgctttgga

SEQ ID NO: 266469 - DNA, 541 bp, Zea mays
ttatttatcaaagaggaatttggtcgtccaaatagggaaaatactatgggaatgcgccatgggtcatatgataaactagatgatgatggccttgcaccacctggaacaagggtctcaggggaagatgtcattattgggaagacatctcctattccacaagatgacgctcaagggcaagcttctagatactcaaagcgtgaccatagtactgctctgcgtcacagtgaaagtggcatggtagatcaggttctgttaacaacaaatgcggatggtctaagatttgtcaaggttaggatgcgatctgttcgcataccacaaattggcgacaagtttagcagcaggcatggacaaaaaggaactgttgggatgacttacactcaagaggatatgccatggacaatcgaaggcattacacctgatattattgtgaatccacatgctattccatcccgtatgactattgggcagctgattgagtgtattatgggtaaagttgctgctcagatggggaaggaaggcgatgccactccattcacggatg

SEQ ID NO: 266470 - DNA, 414 bp, Zea mays
atggcaatggccattgctcccaaaatgcttacccatgatatgaagacagggaaggatcagaaaaagccctgaacttgtatcccatgagatgtaactggaactttgctcccttgctatatttctcgtcccgcgtgcacacggtagtacgctgttaaggaacattgtggtcacttgttttccgacttcgactctggtttgtcgtgaacgatggacaggccattatcgtatcttgatgggctatcagcccaatctgtgttagtgctgttagatgatctgtgctagcagatcgttgagttaattttgtacattataggaatgtgctgcagtgtattaatctacgaatacaaagactttggcgcgctaaggtgccttgtagaattaaatgccattacaatttcagttttatttagacct

SEQ ID NO: 266471 - DNA, 1379 bp, Zea mays
tgatccattaaattgcagctgtcaaaattatttgatgatagccctacttcttcaggtgacagtagcccagagagttctacaaattcaacaaaaaatgaaaataggaatgaaaaacacgaaatagctccaaaggaaaaaacatcaaagaagaaccggaagaaggagaaagaagtggcagagagtgttcctgtaaagcctaaaaaggaaaataggcttttggttctgccttttgaattatctgttatgggtattttattgctcatcgtattaggtggtttctatgtggtccattgtgtatgggcggcagctgaagcgtactccgcgccttcaattgtgttgacatctcgttcacgagatgggttgcatgtttttgatgatttccgtgaagcttacgcatggctgagccataacacagatgttgatgacaaggttgcttcctggtgggactatggttaccaaacaactgcaatggccaacagaactgtgattgtagacaataacacctggaacaacactcatatagcaacagttggtacagcaatgtcgtccccagaaaaagcagcttgggaaatcttcaattctttagatgtcaaatatgtgcttgttgtctttggaggacttgttggataccctagcgatgatatcaataagttcctttggatggtacgaataggaggtggtgtgttccctcacattaaggagccagattatcttagggacggtcaatatcgcgttgatgctcaagctactccaactatgctgaattgcctcatgtacaagctttgttactacaggtttgtggagactgatggaaaaggctttgacagagtaagaggatatgaaataggaaagaagcatttcaagctaacacattttgaggaggtatttacaacccaccattggatggtccgcatatataaactgaaaccccagaagaacagggttcgaggcaagctgaagaagttgaaggccagtgccaaaactagttccacacttgcggccgggcgaaagaacccgtggcaatagatgaagttaccaatagtgtcatttacctgatactttgttggtagatcaagtgcgctaggttggtgaaccagaaaaccacagaactagattagagatctggactattgtattgcaccctcgttatatgttgtcgcaaccggccgggtgctgatgaaatttttgatagaccagaggagtttatcaatcccatgggtttggcggcgataattttctagtgacaggggttgtttaagactacctgttacttgatgttttgtgtaacctacaatttttcttacaaggtacttctctactggggtaaaaaaaaaaaaataataatttaatacataataataaatattaattataattaa

SEQ ID NO: 266472 - DNA, 581 bp, Zea mays
ctccattttctggtcgcctcctccgccactgccatctccctcctctgtcctccgtaccactcgtcttcgtctagccgccgaccgccaccaccatggcacccggcctctacaccgacatcggcaagaagaccagagatctgctgtacaaggactacaacacgcaccagaagttctgcctcaccacctcctcccccaatggcgtcgcaatcacagccgcaggaacaaggaaaaatgagtccatctttggtgagcttcacacccagattaagaacaagaaattgacagttgatgtcaaagcaaactcagaatcagatcttttgacagcaatcactgtcgatgagtttggtactccagggctaaaatcaattatcaatgtggttgttccagaccagaggtcagggaagcttgaattccagtacctacatgaatatgctggtgtgaatgcaagcgtcgggcttaattccaaccctatggttaacctttctggtgcctttggaagcgaagcactatcagtccgcgttgatggctcatttgataccgcgactagcgatttcaccaagtacaacgctgccctgagcctc

SEQ ID NO: 266473 - DNA, 1665 bp, Zea mays
caccttctcgtttctctctcctcccctcgcccgtcttccctcctgtgcgagctcagctcacggtcctcccacccccacgagcgcctccgcggcgaggaagagataatcagcaggcggagcggggggcgcgccgatggatctggagaggccgccgccgccgtcgccggcggaggcggccggggccgcggcgtgctccatctgcctggatccggtgctcgcctgcgtcgcgggccggtccgtcgccaagctgcaatgcggacacgagttccacctagattgtattgggtctgcattcaatgcaaaaggagcgatgcaatgccctaactgtcggaagattgagaaaggtcgctggctttatgcaagtggacgtcacccccctgctgatattgatatgggtggatgggtgactagcgacaactatgatatcacctccgagcttccttttggatttcaatggtgtccctttagtggattcacccggctagcatccatgtttggggagcgtgaagctgagcttacttatcacacaactggagatcgctcaagtgctgcaagcagttcacttgtttgcccatatcttgccctgcgtggttttctgcatcctgttcatgtgccttctacatctaatcctggtgctgaaagcacttcatttcgtcggcacgcaactggcttggaaggccatgccactcttgatttgaataatgctcaacttttccatgcgattgagtcaataaatcatgacagtgagcacagacatttgagtaatcttcctgtatcaggaactcctgaatattctatgactccatttgggataggagtaccaagatatgacagtggcagccaacagggattccgatcatatgcacatcatcatcccctaatccataggctgacccctcgcagcggaagcaatctggtggcaccattagggtcagttccagccgtcgtggcagagactagaggccatggccatggtgcaccgggccatatgtaccagcactcatctgtgcagggcagcccgttccctcctaccaccagaagggttaggcccagagccttgacgattacgtctttcatcgcagcgacttcctcagctgagattgcagggccccttggccacgggtttcccgctcctggagccgtgaacaggagcgtttctgatgccgagggcatcgaccgagcgtacacatggggccgggagggatatgatctgttcccttggacccctgctgaatggggcaccttcaatcccatgcagaaccatacgcatggaagctttaccagaaggcctgctggggagcggatgccgcagagtcgccccgagaacggataccagccgcctgtgcccccttcacagaggatgccaccgttcttgtgatcagacgaggctgcctctccaattgctgtgtataaaattatttgattcggggcttggcagagaacaacgagcgaatatcgaccgcacggcagcatcgaaactggtcggctacgggacctgtgtgtgtgtgatgtttatgatgatgccgctcgtatttttagcgctttcggtccagcggcgctcaggtttcgtcgagcgctgtcgtttgccctgactgatatggtgttgcgttgagaaggactctctcagctaatctgcatatccggccacgggattcgaaagcaaaa

SEQ ID NO: 266474 - DNA, 439 bp, Zea mays
ctatgactccatttggtataggactaccaagatatgacagtggcagccaacagagattcagatcatatgcacatcatcatcccctaatccataggccagcacctcgcagtgggagcaatttggtggcaccaccattggggtcggttccagctgtggtggcggcggcggagaccgcaagaggcagccacatgtaccaacgctcgtccgtgcatggcagcccgttccctcctaccaccactagaagggtgaggccgagagccttgacgatcacatcgttcatcgcagcgacgtcctcaggtgagatcggaggcccccatggattctccgctcctggagccgccatgaacaggagcgtctctgacgctgagggcatctctagacccattgaccggccgtacaatgcatggggccgggaggtcttctttccgttcccctggat

SEQ ID NO: 266475 - DNA, 1482 bp, Zea mays
gcctcccaccacttgatatgagtcaacatcccccaaatcaagaattggtggccaaggacctgcatggggccgagtggcggttccgtcacatccttcgaggtcagccacggagacacctcctgcagagtggttggagtgtttttgtgagcgccaagcgtcttgtcgcgggggatgccttcatatttctcagacgtgacaatggggagctccgtgttggagttcggcgtgcactgaggcaccaaaccactatcccatcttcagtcatatcaagccacagtatgcatcttggtgttcttgcaacagcatggcatgcagtgaacactgggagtatgttcactgtctactacaaaccaaggactagtccagctgaatttgtggtttcgcgagctaggtactgtgaatcactgaaacgaaattattcaatagggatgaggtttaggatgagatttgaaggtgaagaagcggcagagcaaagattcactggcacaatagttggaatatgtgtttctgatccatctggctgggctgactcaaaatggcgttcccttaaggtgagatgggatgaagcttcttctgttcctcgtcctgaaagagtttctccttggcaaatagaacctgctgttagcccatctcctgtgaaccctcttccagtcagattcaagaggtctcgatcaagcgttaatgcctcgccatctgacgtgtctactgtaaccagagatgtcgctgctaatgtcatggcagactcgcggcaaaatagtctcccaacggccttgcacagtccaggctggcctccattgacaggtcgctaccgtgatagcactgatgtggcgactactcaggatcttaccgtgtggtcttcaggaactgagcaacagagaaacaatattgctgcccagacaaagctatgtctggagggttggacgccaactagaagtcctgaaggctacaatcagatattctcggcatttaaaccactgaaagatatacataacccacttggtccttttcctagtcaaatatctgggactcactcaaatagctgggacacagctgatgctcgttatccagtccaacaagctagttacagcatgttacctggcacatggtctttgaggcctcataacagtggttttaggatgaatcaacaaaattatctactgatgcctgaaggtgcaaattttacggggaaatcagctttcacttcacttcaggaccatggcactgataaatgctccacaggctgctttggccatattgagtcaagttcccacacagaccatgcatcctcaagtttgatcaggccccagcctttggtccttggaaatggtgttcagaaaagcaaaggcacttcatttaaattatttgggattccccttggcagcccagaaaaatctgaacctctggtatccccaccaaggggcgcatatgacgggaaacttcaaacttctacatcagaaaaagggaatcagttagacgtagttg

SEQ ID NO: 266476 - DNA, 1660 bp, Zea mays
cgcttctcctctccgggaatggcgtcggcgcgaggtccttgcggaattagtgtccgttctgacttcagttcagcctgccttattcacaaggctggagccccatcgaattctgtttctggcgtgatggctgttcaggttcaccgccaccgtaacaaggtccgcaatggccaagctatcaggtgtgcaatggcaactggaaaagagcagggtgcaatttccactgccagtagcggtgatcaaaccaagggcggtttgcgtggaaaattaaacaaagttgttttagcttatagtggtggtttggatacatccgttattgttccatggctcagggagaactatggttgtgaagtcgtttgtttcactgctgatgttggccagggtgccattgaattggaagggttggagaagaaggcaaaagccagtggtgcatgtcagcttgttgtgaaggacctcaaagaagaatttgttagtgaatatatatacccctgcctgcgtgcaggtgcagtttatgaaagaaagtatctgcttgggacttcgatggctaggcctgttattgctaaggcaatggttgatgttgccaaggaagttggtgcggatgcagttgcccatggttgcactggaaaaggcaatgatcaggttcgctttgagcttacattctatgctttaaatcctgaacttaaagtggtggcaccttggagggagtgggatatcacaggacgtgaagatgctattgaatatgcaaagaaacataatgtacctgttccagtttcaaagaaatcaatatacagccgagaccgaaacttgtggcaccttagccatgagggtgacatcctggaggacccagcaaatgagccaaaggaagatatgtatatgatgtcgattgctccagaaaatgcgccctcgaaacctgagtatttggagattggtatcattgctggtgttcctgtttcaatcaatggccgagacctctcaccagcatccctcctcgcggagctcaatgaaatcggtggaaagcatgggattgggcgtatcgacatggtggaaaacaggctggtcggcatgaagtcacgtggggtctatgagacccccggtggcaccatcatggcagccgcggtacgcgagttggagtccctgaccctggacagggagaccatgcagtggaaggacatcattgccctcaagtacgccgagctggtctatgctggccgctggtttgacccgctccggcagtcctttgatgccttcatggagaaggttaccgcgacgaccactggttcagtgaccctgaagctgtacaagggttccgtgaacgtcgcgtcccggaagagcccctacagcctgtacagggaagatatctcctcgtttgagaacggggagatctacaaccaagctgacgccgaggggttcatcaggctgtacggcctaccgacacgggtccgggcgatgctggagaagggtatctgagtagttgcctgcttgatttagaaataaaaacatctgtttcccagtgattgcagacagatgggtgtttggtggggagttcaccatgctgttttaccatccgtttacattgtccaaaccaaaatattatcattgctacatcagctgcttttctcattggtttatattgagcagaccattctggtcgattatcgtcaaa

SEQ ID NO: 266477 - DNA, 727 bp, Zea mays
  unsure (1)..(727): unsure at all n locations
cccacgcgtncgggaaggtatcaaaataacaagccaactacacctatgagatcacctgctagtaatgaagcccaagaatctttgaccattggtatagccgatgaacacattggtgctgttgtaggtcgagcaggaaggaacataacagagatcattcaggctagtggtgctcggatcaagatatcagataggggtgactatatatctgggacatctgacaggaaagtgacgattactggaacacccgaagctatccggaccgcggagtccatgatcatgcagagggtgtcagccagttcagagaggtgatgagccccttctgaaggaagggcgtaggccattgctgtgtccgagcacagcagcgtgtttgatgcaagttaggaggatgtgggaactgctttcctttttattttccccccttttttcttttttcctagcaagctcgagcagaaaaaagaaacaagctgttattgtttgttgcattgcgtccaaccgatggttttatgttagtataaactgctagtcgaagataattaggtgcagcgtttgaattgatttgggtttacggttgagttatatcccgtgtatgccataacaaaggcagtcgccgctctgttgctagtggcaagcgctgcctgtcctgtgtctgtttgtacgttgacaatttgattccgttgctcaaggatagaagaatattgatacaaaaaaaaaaaaaaagggcggccgc

SEQ ID NO: 266478 - DNA, 966 bp, Zea mays
aggccaccacgcacaaccgctccaaccatggacgccggccccgcgcgtccatcggcaccgtcgaccgccgcagtcgcgggggcctccgtcgcggacgagccccgggacgcgcgggtggtgcgggagctcctgcgctccatgggtctccgcgagggcgagtacgagccccgcgtcgtgcaccagttcctggacctggcctaccgatacgtcggagaggtgctcggggacgcccaggtctacgccgaccacgccgggaaggctcagatcgacgccgacgacgtccgcctcgccatccaggccaaggtcaatttctccttctcccagccgccgccgcgtgaggttctccttgagctggcccgcagccgaaacagaatgccgctgcccaaatcaattgctcctcctggctcaattccgctcccgcctgagcaggacacactgttggcccagaactaccaactcctgcctccgttgaagccgccacctcaatatgaggaaaccgtggatgagactgaagaatccaccccaagtctgacaccggacccggcaaattctaatccaaccttgtcgcaggatcagcggagtaacgagcaacagcacactccccagcatggccagagggtttcattccaactcaatgctgtggcagctgctgctgcaaagcgacctcggatgaccggcgaccagctgaacatcggctaaccatcattcaacgttatcgttgtttagactgtagtatctttttccccatcttctagtctggtgaatcatgtttcgaagagatttagtgttgtagtggtatgatcttatttaccacccacctatttaaccacgagatgtgcagtacagcagcagcatcataaagtttctgactgcaagaacgttgctgtagggaaggaaagtaactgtgctagtagtgtacttgcttacttcaaggttaatatctgccaaaattgtatctgggtctcc

SEQ ID NO: 266479 - DNA, 579 bp, Zea mays
ttgtttcgcgtccgctaccgaccactggtgtgcgagtaagcagctcatttctaagaagccgacccaggccagccgatatcgagcaccaacgacacaccccattgacgtacagctatgatgcggccgacgtcgacccttgctatggtcgtgccgtcgctcgctgtagccatcctctgcatcctagtccggtccgcctccgcggagttctggctcgacgagttcaccacggacggcgacgtccgcagagactacgaccgttctggccggcaggtggcgtcgcttgtcctcgaccagcgttctggcgctggcttcaactccacgcgcaagtacctcttcggcgagttcagcgtggagatgaagctcgtcggcggcaactccgctgggactgtcacctccttctacctgacgtccggcgagggcgacgagatcgacatggagttcatgggcaactccagcggctccccgacggtgctcaacacgaacgtgtgggccaacggcgactgcaagaaggagcaccagttctacctgcggttcgacccgggcgccgacttgcacaagaacatgatcgcctggaacgac

SEQ ID NO: 266480 - DNA, 1157 bp, Zea mays
  unsure (1)..(1157): unsure at all n locations
ttcgcattttcctctcgtcttccccttccccttactccaaattaccccctgctatctacatatcctgtccacactctccctccctgcgctgggccttgcagtttttggttgtgtatcggggaaatggcaatcgacgacgaatcgccgatcagagtcaacagcagaggcggcggcgccatgggaggaggggagtgcgacggggcggagaaccagcggtggccgccgtggctcaagccgctgctggggacgagcttcttcggccaatgcaagctgcacgcggacgcgcacaagagcgagtgcaacatgtactgcctcgcctgcatgaacggcgcgctctgctcccagtgcctcgcctaccaccgcgaccaccacgccatccagatacggaggtcctcctaccacgacgtgatccgggtgtcggagatacacaaggtgctggacatcgccggcgtgcagacgtacatcatcaacagcgcgcgcgtggtgttcctcaacgagcgcccgcagcctcgcccgggcaagggcgtcaccaacacctgcgaggtctgcgagcgcagcctcctcgactgcttccgcttctgctccctcgggtgcaagatagtgggcacggcgcgtggttaccgtcccaagaagaagcacggcggcggaggcggcggcggtaacaagaggaagagagcggcgcttaaggacgtgcgctctgactcggaggagtcgtgcaccagcaccagcggcgccagcagcgacaagagcagcgtcgtgcagagcttctcgccgtcgaccccgccggcggccttcgctagctaccgtctgccagggaacaagcgccggaagggcgtcccgcaccggtcgcccttcggtagcctcatcgtcgagttctaggactccttcgtcagcgcctaggcaatgcgctctctactgtacaggacatgacaaagcccggaagggaagggaataacaggacgcgcttctggacgtggaggccggccggcggcgcaaatgccagcgacgggcgagagcggtaagcacacaccagcggtgcagcccgtgctgctatagttttgcttctttttcgcgctttgttacttcagttggtactaagttgtccagccttgtccattgtaacacactagtactactctccaaaaaaaaaatntatt

SEQ ID NO: 266481 - DNA, 804 bp, Zea mays
agccgaggcccggcatgggcgtcaccaacacctgcgaggtctgcgagcgcagcctcctcgacaccttccgcttctgctccctcggctgcaagatcgtcaggacctccggcgacttccgcatccggaagaagcacgccatcgtcgcaaagaagaagagggagaagaagcatgcgccgcagcagaagcagcacaggggcgcggcggactcggcggacgacgacgacgacgactcgtccaccagcaccagcggcggcagcgacaagagcagcgtggtgcagagcttcaccccgtcgaccccgccggcgacgaccgccaacagcttccgcgccgggaagcggcgcaagggcgtgccgcaccggtcgccgttcggcagcctcgtggtggagttctaggcaaaaaaaaaggcgcgccgcccggtcccgatggacgctcaccaaaaaaacacacacacacagcggtacaccactgtagcatacgcacttcttctacataccattaccatctataggtgctgccggatcgaccgggctacatacacataagtacatactcagcccaaatatatgagcaagcattaaccagtgccccacttgcacgcctgccgtgcttctggacggacgaggactaggaggccggtgcaatgcggctcgtgcggtgcacggttacttccacttgcattatgcagtttactgtgctggtaacaacgttttgggtttggtgccttactgacttttttgtcgtcgtcagccttaggcactactaagatttgcgagttttacctatagtgtatgctagtttttttta

SEQ ID NO: 266482 - DNA, 228 bp, Zea mays
cagggaacggggtagcttgaccttgttggactgtctgtcagctgatgcgcccttctcgctgacggcgatgcatgctctgcctgaggctgtgttttggttggtggttctgcagatacggaggtcctcctaccacgacgtgatccgggtgtcggagatccagaaggtgctggacatcagcggcgtgcagacctacatcatcaacagcgcgcgcgtggtgttcctgaacga

SEQ ID NO: 266483 - DNA, 978 bp, Zea mays
  unsure (1)..(978): unsure at all n locations
ttcacgcttccgcccacgcgtccgcccacgggtccgctggaatctgccatgagttggcacccataggccacagtcccacacgggggcggacgcgggcgtgctagggttgagcggctacacgagcgtgctagggttgagcggggctccgcgggcgtgctaaggtttcgcgagcatggcggtggccggcgagcaggtgagggctcccgcctctaattccctcccgagctcctcgagcggccaagcgtctgtgtgtggccgtgtgggcgaaccacatgcgccagccaccgtgcgccctgggtgagcacgtgaggccagaggagaagcgcatgtacaagcagctgcgccagtttagcgcgagactgcagggtagtaggcaagccgcgagcgtgtgactgcagctgctagccaagtgagcgtgccactacaggacagcaaacaacgacgacagcaagcaaatgatccgttcagcatgtgctccctattcgaagtcccctgggaccctgtccagactcacactgggctcgttgctcggccttgttgagctagagatcctncaacacagcggcaccgacaccaaggctcaggctaaagtgtttgaaaaggaaagagaacaaacaaaaatgggtatagtcaggaataagggaaagcattgtggatgggattcattcttttctatggttcacctcgttctggtgatatatgaaatggtacatcagataagtgggaagaggaagtataatgcaatggataatcataaaaagtgatcactctggagtatcctgtatctaccatttttatttactagggtagaatgcactttcagttttgtcttacctagtaatctttacagcgtgaaaggatctctagctagttgattagctggtctaagtagcactccttaggtttttagtttgactccccgtataaaaaaatttaggctgggttaaaaaatctcctgatttgttccatgacaaacca

SEQ ID NO: 266484 - DNA, 2140 bp, Zea mays
cccacgcgttcggtaattttgatggctgctagagcttctcgcacagaaaatcaggatgccatagatgccacaatagttggtatgctggctgatccaaaggaggctcgtgctggtgttcaagagatccattttcttccatttaacccaactgataaaagaactgctttaacctaccttgatggagaggggagaatgcatcgtgttagcaagggagcaccagagcagatccttcatcttgcccacaacaagtcggatattgaaagaagggtcagagctgtgatcgacaaatttgctgagcgtggtctgcgagcacttggtgtggcttaccaggaagtgccagatggtaggaaagagagtcctggaggaccatggcagttcattgggctcttgcctctttttgaccccccgcgccatgatagtgcagaaactatcagaagggcactcaatcttggtgtcaatgtcaagatgattacaggtgatcaacttgctattgggaaggaaactgcacgtcgtttgggaatgggtactaatatgtacccttcttctgctttactcggacagaataaggatgagtcaattgcttccttgccaattgatgatttgattgagaaggctgatggctttgctggtgtctttccagaacacaagtatgagatcgtgaaacgcttgcaagcaagaaaacatatatgtggcatgactggggatggtgtaaatgatgcaccagctttgaagaaggctgatattggtattgcagtagcagattctactgatgcagctcgtagtgcttctgacattgtcctaactgaacctggccttagtgtgattattagtgctgtgctgacgagtcgggcaattttccaaaggatgaagaattacacgatctatgctgtatcgattaccatccgtattgtgcttggttttatgcttcttgcgctgatatggaagtttgacttcccaccatttatggtcctgatcattgccatcctcaatgacggtaccattatgactatctcgaaggacagagtaaaaccatctccacaaccagacagttggaagttagctgagatttttgcaactggagtagttcttggtggttatttggccatgatgactgtcattttcttctgggctgcatacaagactgacttcttcccgcgactgttccacgtcgaaagcctcgagaagaccgcccaggatgactttcagaagctcgcctctgccgtgtaccttcaagtcagcacgatcagtcaggcccttatcttcgtgacgcggtcgcgcagctggtcgtttgtggagcgtcctgggttcttgctggtctttgctttcttggtggctcagctgattgccactctgatcgctgtatatgccaactgggcgttcgctgcgatcaagggcattggatggggctgggccggtgtcatctggctctacaacatcgtcttctacttcccgctggacatcatcaagttcctcatccgctatgcgctgagtgggagggcatggaacctcgtccttgagcagaggattgcgttcacgagcaagaagaatttcggcacggaagaaagggagcgcaagtgggcgcatgcgcagaggactctccatgggctccagccgccagaggcatccatcttcgagaacaagacgacattcaatgagctgaaccagctcgcggaagaggcccgcaggagagccgagatggcgaggttgcgagaagtgagcaccctgaaggggaggatggagtcagtggtgaagcagaagggtctggacatcgagaccatccagcagtcctacaccgtgtgactggctgaccgacgacgacggggtttatagaggtttcttcttcttatactatacaatctgtactaggtagcaataaggatcaaggaaggaacccctatatattggctgtggttcgcgggaaatgaatgatggtcatatttatgatgtcggtgtggtgcttctgtcgccaactctcgaccatactaccctcaactcaccccttgtatgctgtggcattaaccacccccggcaccaccggcaggcattgatattgagagatgaggtatagtagtctgtagcctctagtagatgatgatgaattgatgatatagtacatttttgcttgcttgctttctttttt

SEQ ID NO: 266485 - DNA, 554 bp, Zea mays
ccttgttgtgaggggagaatgcatcgtgttagcaagggagcaccagagcagatccttcatcttgcccacaacaagtcagatattgaaagaagggtcagagctgtgattgacaaatttgctgagcgtggtctgtgagcacttggtgtggcttaccaggtgatcaacttgctattgggaaagaaactgcacgtcgtttgggaatgggtactaatatgtacccttcctctgctttactcagacagaataaggatgagtcaattgcttccttgccaattgatgaattgatcgagaagggtgatggctttgctggtgtctttccagaacacaggtatgagatcgtgaaacgcttgcaagcaagaaaacatatatgtggcatgacttggatggtgtaaatgatgccccaactttgaagaaggctgatattgagttgtgttgacgagtcgagcaattttccaaaagatgaagaatacacacttggttttatgcttcttgctctgatatggaagtttgacttcccaccatttatggtccagatcattgccatcctcaatgac

SEQ ID NO: 266486 - DNA, 965 bp, Zea mays
ggaacctgtactgatgttgagcaacagttcataaacaatacagtgcactttcagaaggtgtggagcattactccagtgagtcatagccgatgcaaactagctgccaagcagattgcggatgacggaagggtgttcagcatatggaggcctctctgccctaatgggtatgcctcaattggtgatattgcgcatgttggcatccatccaccgcattgtgctgctgtatacaagaatatcaatgggaactttgcactgcctcttggctatgacctggtttggagaaattgtgctgaggattacaagagccctgtatcaatatggcttccaaggccaccggggggatacgtagctcttgggtgtgttgctgtcccttcattcaaggagcccactcttgactgtgctttctgtgtggatgagagactcgcggaggatgccgcgtatgaggagcaaatcatatgggcctcatcggatgcttacccatggggatgctatatctaccaagttcagagcgcctcaatgcagttcatggcacttcgtgtcccaaaagaacaatctgagctaaggcccaagaagatattggagtcatttctgcagcaagcatcagagactcaaacgtcccgtgcatgaagaagctgcacatgatgcttgtgcgtgcaagagaactcggctgggacaaagggcaagtctcgtgcaagaaagctcgaagaatgccacttctttcggatcactccatttctccgttgtcaaagcatacacagaggacagagccttgcatgccaacactcgggttgacggaagtgttgtatactagaatagtaggttaaaggttgtaaatgtaaagttttgtaacgtttgatatagtttctgtccagctacatttgttagaggcccatgtggacgtgggccatattagttgtggctacatattctactaagaagttctcaggactaatcatactttctct

SEQ ID NO: 266487 - DNA, 624 bp, Zea mays
  unsure (1)..(624): unsure at all n locations
gttgaccctgataaagtacacggactatcgtggaattccccttccgatggttaaggagatatgccgccatgtgctcattggccttgattacctccaccgtacactttctattattcacactgaccttaaaccagagaacatattgcttgtgtctaccattgatcccacaaaggaccctcggaaatcaggcgtacccctagttccgccttcaacgaggacagacgagccacctcctaaggtgcctgcacaatcaggaaatggtggcctcaccaagaaccagaagaagaagatccggaagaaagctaaacgtgcagttgctgcaacttcagaaggaagtagtgctgtggcatctgcggacacagatgggtcagatgaccgaggagatctgggtacaacaaatgaaggtagtcctagacaggatgtagctaagaagcgggtgacacgagataggcgcggtaccaaaggggccaagaagatgatggcaatgaaggctgatctaaaatgcaagctggttgactttggaaacgcatgttggacatacaagcagttcacaaacgacattcaaacaaggcagtacagatgtcctgaggttatacttggntccaagtattctacatctgctgg

SEQ ID NO: 266488 - DNA, 899 bp, Zea mays
gttctctcgtgaccgccttccctcctctcctgcgtcccaactgggcaattccccaaacctaactaacctttgccaccgcgggagccaccatgggtggccagatgccggacgccgacgggaaggcccgctcggcggactcctcgtcctcttacgggtacccgccgtcggcgccgccgcagcaccagtacggcacctttggtcccccatccggagcctccggggagtttccgcagccggcggtcgggttcccccagccggcggcgccgcctgggatgcagcactacccgcagcctcctccggcgtcgtatgccgtctacccacccccgcagcaaccctactcggccgccgcgccgtactacgcccaaggctaccagatcgctcaaggttatattcctgttgttgaaggaaggcctgttagaatccgtcctcttccatgttgtggccttggcatggggtggtttctgtttataattgggttcttctttgctgccattccatggtatcttggagcttttgtgctgatttgtgtccgagtacgtgattacagggagaaaccaggatatgttgcttgcactattgctgcctcgcttgctgcaattgctgtgctgcttggcgccacaaaaggagcggaggtgtggtgagcattatgccttcaattaccagcagtccggttaatgtaaatgtccgttgctcggctactttgttacctgtgttgtacatgtgttgtgcgtacaaaggatagggtgtaacgaaaatgatgtatgctcctatttgtagttgcccatatacatttgtcaaacggagtagcatgaatgcacaccctcattaatcataaaatgtaaaattgcctggaatgcctccaaaaaaaaaaaaaaaagggcggccgcccgggaatccgg

SEQ ID NO: 266489 - DNA, 287 bp, Zea mays
ggtgtggtgaccattatgccttcaattaccaacagtccggttaatgtaaatgtccgttgctcggctgctttgttacccgtgttgtacatgtgttgtgcgtacaaaggatagggtgtaacgaaaatgatgtaggctcctatttgtagttggacatatacatttgtcaaacggagtagcatgaatgcgcacccccattaatcatttgatgtaaaattgcctggaatgcccccatgttatggtaagtctggtcggcaatatatccaaaaaaaaaaaaaaagggcggccgc

SEQ ID NO: 266490 - DNA, 420 bp, Zea mays
cgtccactgtccacccacacgcaaggtcgcaggtcgcaacccgcgggcggaggggcaggcacaggaccgttgcgttgctgccgccgccagcacgagatcgaggagggatcccccgctctcacgccgctccaggtcgagggccgagcgagatggtgaacaccttcttcctcttctgcgggtgcgtggaccaggccagcgtggcggtggtggagaagtggggccgcttcctccgcctcgccgacccgggcctccacttcttcaaccccctcgccggggagtgcgtcgcgggctccctcaccacacgcgtccagtccctcgacgtccgcgtcgagaccaagaccaaggataatgtcttcgtccaactgatctgcacaatccagtaccgtgttgtcaaggaaaatgcatatgatgctttctatg

SEQ ID NO: 266491 - DNA, 1599 bp, Zea mays
ccgcccacgcgtccggtcccccgtcccgagtcctagcgcgactccgtgcgacggcgaggcctctgtcccgtcctcgtctcctcgaggcccggaggctgcgagtctgtgacacttgaccgtgaggcggacggcgactcggaggacttcaccagcgagtccctcaagcaccgaggccgagccgcccaccgcccgccgccgcctcgcctggcgctagtcgccgttgccgagcctgttcggcacatccgttggggtgccggggcaccgatcaggctgcgcacagccgaagtcggcctccgggtgccccaagctgcagagcagcgcgccagcgcccgtggaccggtgaatcagactacccttgtttcaaatcctgggtccgccattgggggcggtgaggccaccctagtagaggctagaggatgatatacacggcgatcgacacgttctacctgacagatgagcagctccgtgactcgccatcacggaaggatgggatcgacgaggccaccgagactgcgctccgggtctatagctgagacctcattcaggagagcggcatcctgctgaggctaccacaagcagtgatggccacggcacaagtattgtttcatcgcttttactgcaagaaagcatttgttcgatttagtgcaaagagagttgctgctagctgtgtttggctggcagggaagttggaggagagtcccaggaaatcaaggcatattatatttgtcttccacagaatggaatgtaggagagagaacttgccaattgaattcttagatgtcttttcaaagaaatattcagaactgaggcgtgacctgatacggacagaacgacatctgttgaaggagatggggtttatttgccatgtcgagcacccccataagttcatatcaaactaccttgcaacacttgaagcccctcccgagcttactcaagaggcatggaaccttgccaatgatagcttaaggacaactctgtgtgtgcgatttaagagtgaagtagtagcatgcggagttgtgtatgctgcagctaggagacaccgggttccccttcctgaagatcctccgtggtggactgtctttgatgctgatgaagcaggaattcaggaagtttgcagggttcttgctcacctctacagcctgcccaaggcccaatacattccagtgtataaagacaacgattcctttactgttaagagaatctctgatctacaggcttcaaaggaaagtccagcaagggctgttgctagcgataagggtacccctgtaccctcaagttctagccaggagaaggatccagtggctaagactatactgaacaaggtgaaggaaaaaagtgatgacgaaggtaaaccattgcccgctgaatttgatggaaaagaaaacccggtggcaaactcaaaaaatgacaagtctgattctggtgtcgaccggagtcgagaaagagagagatcaagagggcgggaacgtgatgccaggggtagggattctgatcgtgatagcaggggtcgcgagtctgatcgtgagagggaccggagacgctgctctagggaaagaagttcaggacactcagacaaggagaaatcaaggcgccattcat

SEQ ID NO: 266492 - DNA, 926 bp, Zea mays
tttgcttttttaaacatctcaatcttgtgacgcggcacgtctcttcagcagtgattaacctgcaagttaacactggttatgtcaaaagggctgggtccaactttaatctttcccaattcattggttctcttttggatattgaaaatatttcattgctcgggcacgcttttgagtgtgcagcacatggaatcgtgcctggtaaactaccgagatcgttaaatcggctgaccgagataaccctggagcttgaccttggtaacctgaaggaagcaaacgcggctcactgtttgtttcaaattgctcccaacttgcgacgcatggagctacagcttatgcacaggggctattctgcacccacctcgagtttctgggactcggttgatcgtcaggattgtctcttcaagaacctttacacagttgtcatgaacaacttcactggttcctgtgcagagtcaggcttcttgaaacttctgctcgatgacgcgcctgtacttagaagtgcgcggatagaagacaacaacaaactggacaaagaatccctcaaacgcctcctgaagatgagaagagcatccaaggacgcagaaataatcctcctttgaggcgtggtcccctggctccagtagatgcccactgttctttcctggtgaagcgatttggtctgctgtgttataggttttattcaactaggcgtttgggcacaacttcgtctgaacaaaagttgtgtcttcgcgtatacctgtgtttcagtgtgtcaccttcagcaaagctaaatgttgcacccgagtcagagtcgtgtttcttttagcattttgtgttggtacttcgaaattctctcgctgcgctggccaacatgggtttgcttatatggctttggaatgatggacaaaatagtgcttgttagttgtggaattgtccatttaggcaac

SEQ ID NO: 266493 - DNA, 939 bp, Zea mays
cgaagcccgggaaaggattgttgaactaacttcaaaggttgaagagcagcaaaagctgattttgaaacttgaggatgacatactaaagggctacagttcaactgataggaggggctcactcttgaatgactgggatattcaagaaatcggctcaagtgaagcatccgagggctctgatccaaggcatgcatcggcagatcaagatcaaagttcgatgctcaaggtcatttgcaaccagagggatcgtttccgtgcacgtctgcgtgaaactgaggaggaactgaggagactaaaagagaagcatgagatgctgactgttgaactggaaaaaactaaagctgataatgtgcaactgtatggaaagattcgatatgtccaagactatagccacgacaagattgtttccaggggaccaaaaaagtacgcagaagatattgaaagtggttcttctgatgttgaagcaaagtacaagaaaatgtatgaggatgacataaacccgtttgctgctttttcaaagaaggaaaaggatcagcgttataaggaacttggtttaagagacaaaatcacacttagtagtggccgttttgtccttggtaacaaatacgcacggacgtttatattcttctacagcatcggattgcatctccttgtatttacattactgtacagaatgtccgctttgagctatctcaacacaacaactcagcaagatgaaatcattctggatgctggtaatcagaggctaacgcacatgctttaggccaagttccatttaccagtagaaaaagaggctctctgggttttgatctatagaatctttggacaggatcgttgctgagattgctattgacttgtttgctttgtccccttgatatgtttctgtagataaaaagaaaaaaaaccctgttttgggggcaggcgtgggtacggcatgggctt

SEQ ID NO: 266494 - DNA, 443 bp, Zea mays
aggtggaaactggaccgcccttgcgctgatgtggaagacaactccgattacgatatttttcttgttgacattgatgcctttgctggacccccctggcctcttgttgttcaattggaacttcagaaacagctgcgctgttatcatctctgcattgttcggtttccttcttcagtggtctggtgctttggcactcggcgcgacgtcagctttgtctcatgttgtgctgggccaattcaaaacgatcgtcatcatgctctccggctacctgatcttcggctccgaccctgggatcaccagcgtctgcggtgccgtgctcgcactcggcggcatgtccttctacacctacctgggtctgaagaaagaccccgcgaccagcggcaaaaaagcaccatcgagacagaactccttcatggcgagacctaaggtcgctgctgacgacagtg

SEQ ID NO: 266495 - DNA, 1863 bp, Zea mays
  unsure (1)..(1863): unsure at all n locations
tctttgcgtccgaggacgcgtgggcggacgcgtgggcggtgctgcgcctggccccggcacctacctcccccctccccacctcgccgccggcgggtggagtcgggctggagcagccgctctcctctgttaccccctaaccccctataaagaaaaagaaaaaaacagagagagagcgagcgaccggcggctcggcagccatggggcacggcgtcagctgcgcccgcaccggtgacgagcacgactacttccgcgcggcgcaggtcggggacctcgaggccctggaagcgctcctcgacgctgacccctcccttgcccgccgcgccacgctctacgaccgcctctccgcgctccacatcgccgccgcgaatggccgcctcgaggtgctgccaatggtcttggatcacggggtgccgccggacgtggtgaatcggcacaagcagacgccgctgatgctcgcggcgatgcacggcaagatcgactgcgcgcggaagctcctggaggccggcgccaatatcctgatgttcgactccctgcacgggcggacctgcctgcaccacgcgtcctacttcggccacgtcgactgcctgcgggccatcctcgcggcggcgcggaccacgccggtggccgactcatggggtttcgcccggttcgtcaacgtcagggacgaccgcggcgccacgccgctgcacctcgccgccaggcagggccgccccgcctgcgtgcaggcgctgctggagaacggcgccattgtctccgccctcaccggctcatacgggtttcccggtagcacgtcgctgcacctcgccgctcgaagcgggagcctggattgcacccggaagctgctcgcctggggagcggatcgtctccggagggactcagcagggaggatcccttacgccgtggcgctgaagcgcaaccacgaggcgtgcgcggcgctgctgaacccgtcggcggcggagcccatggtgtggccttccccgctcaagttcatcagcgagctggacccggaggcgaaggctctcctggaagcggcactgatggacgccaatagggagagggaggagaagatcctcaagggcatcaccaagtattcgcagccatcgcctacttcgccttgcgagcacgatgccattgacgaagcgtccttggaggccagcgacggggagctgtgctgcatctgcttcgagcaggcgtgcagcatcgaggtgcaggactgcgggcaccagatgtgcgcggcgtgcacgctcgcgctgtgctgccacagcaagcccgacccggtgacgctagcgctgccgtcgccagcctgcccgttctgccgcggcagcatctcgcggctgctgctggtggcccgggcaagcagcgacgacgcagacaccgagaagtcggcggcagcggctgcggcagcggctgcctcctccccgcagctcgtccggcggcggtcccggcggtcgcacaacctcagcgacggcggcagcagcagcttcaaggggctgtcgtccgccgtggccggttccttctccaagatcgggcgcgggtcgagccggacgatggccgacagcgacggctgcggcgtggacaagcccgagcacgacccgtgatcggcattggatcctgcgcatgtggagccgagcgcggggccatttgcggacatccaatcgaatccaagccaagcgtgactgcttgctgcgaaaataaccgcatccttttcttcttcttctccccatgtccctgtctgtcaatcctattcttgggcgtgccaggatttgttcacctggccattgccgtattccattgtcaccgaccggctatagtatatagtactagattccatttccattccttaaaaaaaaaaaaaaaaannaa

SEQ ID NO: 266496 - DNA, 823 bp, Zea mays
accggccggaattcggtcaccacgcgttcgttagacccggaagctgctcgcctggggagcggatcgtctccggagggattcagcagggaggatcccttacgccgtggcgctgaagcgcaaccacgaggcgtgcgcggcgctgctgaacccgtcggcggcggagcccatggtgtggccgtccccgttcaagttcatcagcgagctggagccggaggccaaggcgctccttgaagcggcgctgacggaagccaacagggagagggaggagaagatcctcaggggcaccaagcactctccgcatcctcccacctgggaccacgcgagcgacgccgccgacgccgacgccatcgacgacgcgtcctcagatgccagcgccagcgacgcggagctgtgctgcatctgcttcgaccaggcgtgcacgatggaggtgcaggactgcgggcaccagatgtgcgcgccgtgcacgctcgcgctgtgctgccactccgccgtggccggttccttctccaagatcgggcgcgggtcgagccggacgatggccgacaacgacggctgcggcgtggacaagcccgagcacgacccgtgatcggcattggatcctgcgcatgtggagccgagcgcggggccatttgcggacatccaatcgaatccaagccaagcgtgactgcttgctgcgaaaataaccgcatccttttcttcttcttctccccatgtccctgtctgtcaatcctattcttgggcgtgccaggatttgttcacctggccattgccgtattccattgtcaccgaccggctatagtatatagtactagattccatttcc

SEQ ID NO: 266497 - DNA, 478 bp, Zea mays
accacgcgtccgcccacgcgtccgagctggagccggaggccaaggcgctccttgaagcggcgctgacggaagccaacatggagagggaggagaagatcctcaggggcaccaagcactctccgcctcctcccacctgggaccacgcgagcgacgccgccgacgccgacgccatcgacgacgcgtcctcagatgccagcgccagcgacgcggagctgtgctgcatctgcttcgaccaggcgtgcacgatggaggtgcaggactgccggcaccagatgtgcgcgccgtgcacgctcgcgctgtgctgccacagcaagcccgacccggtgacgctagcgctgccgtcgccagccttgcccgttcggccgcggcagcatctcgcggctgctcctggtggcccgggcaagcagctacgacgcggacaccgtgaagtcggcaggtgcagcagctgctgccttctacccgcagcttgttcggcggc

SEQ ID NO: 266498 - DNA, 450 bp, Zea mays
ctcgtgggtcgacccaagcctctacaatatctcgcatcatcacagatcatccacagagaccatcttccgtgtaagagacaagagagtgggagagaggggggatatatggcagacatcgcgttgctggtgacggagcagttcgacaagaagctgaagcgaggcgcccccggcgaggacatcggcggcggcgccggcgaatataggaggaacttcggggccgtggccaaggtgtggagctcgtgggtggagtccgccgccgccgcgtccggggtgaggttcagcgtcgcggtgcacctggagcccaagaccgcgctcgccctggccgccgacgacggcctcttctccgcctagctagctagctagctactagtgtcgcctagctgcttccaggcccttcttctgagtgagcatcagtagtcgagttcttctggaccatataatacaatgcgc

SEQ ID NO: 266499 - DNA, 1565 bp, Zea mays
cacaagaacagtcggcgtggtgttcacttccggcgtgctgggcctcgtcagagggtttattttggcaccgatgaagtgcacagcctgcattgtaacttgatggaggcctgtgccctgggcttaacactgttatcagggaactggtgtgtggcttgtcacacatgtacaatgtcagcagcatttttggaatacagaatgggtacaagggtttctattctagcacctaccttcccctgacaccaaagagcgtcaatgacatccacaaaaggggtggtacagttcttggaacatcacgcggtggccatgataccaaaaagattgttgataacattcaagatcgtggaatcaaccaggtgtatatcattggaggagatggaactcagaagggagcatatgagatcttcaaggaaatccggaagcgtggcctcaaagtttctgttgctggagttccaaagacaatagataatgacattgcgatcatcgacaagtcttttggttttgatacggctgtggaagaggcccagcgtgccattgattcagctcatgtggaagcttgcagtgctgagaatggaataggtttagtaaaactgatgggccgttatagtgggttcattgcgatgtatgctactcttgctagtcgagatgtggactgctgtttgattccagagtctccattttatctggatggagagggtggattgcttcaatatgtagagaagaggctgaaagagaacaagcacatggttattgttgttgctgagggagcagggcaggatcttatcgcgaaaagtttagccacatcagatcaacaagatgcgtctggaaataagctgcttcttgatattggtctttggctgactcacaagataaaggactacttcaaaagcaaaaagatggagatgacgattaaatacatagatcctacatacatggtccgtgctattccaagcaatgcatcagacaatgtctactgtacacttctagcccacagtgctatccatggtgcaatggcggggtacagcttcactgttgggatggtcaacggaagacatacctatatacctttctacagggtgacatccacaaggaacaaggttaaagtcactgacaggatgtgggcaaggcttctgtcgtccaccaaccagccaagtttcctgagtcagaaggatatcgacgaagcgagtgaggcggataggctggcaaacaggccaccactgccaacgggtgccagctctcgcgtggcgaggtctttcgatcaatcttcgtcgtgttcttccaatggagagatctaagtgattgctggtgcaccgcaattgtgtacagaacctacttactatcgttctgagctctggtgcttgggcagcttcgccacgcaacgagttttgctcttgttgttagtcgttatgcatatgctttgagttgtgtaggaggacacgcggatgttggccctgttagcacgcgttatatagatacaccattgatgatgctaattttttttttttttggggggctgccgtttatttatctcttttcccggttttttttttcgggacgggtacctgttg

SEQ ID NO: 266500 - DNA, 846 bp, Zea mays
agcccgtccattccccaatccccgtgtcgcctgtgcccctctgccacctcgccgtcggcatgacaacagggtcgaccccgggttcggccccctctcagagaaaacgaaattctaccaaggattccgttgccttgtacgcggtgcaatgctataagtgctacaaatggagtacggttccaaaagaagaatttgagacgcttcgtgagaacttcactaaggatccatggttctgcagcagacgaccagacagctcttgtgaagacgatgctgacattgagtacgacagcagccgcatctgggttttggacaagcccaacataccaaagcctccaccagagacggagaggctagtggttatgaggggcgactacagcaaaatggacacatattatgtcatgcccaatgggaagcgtgcaaggtgtgctggtgatgtggataagtttctggaggcaaatccggagtacaaagaccgcatatctgcttcggatttcagctttgcgccacccaaggttgttgaggagactgtttctcacaaccctgcctggcaagctgccaaggccaagaagcaggagaaggcagaggcacaaaagtgaatgatactcccaacggtgcttgtgttatgtttaggtgatagtccgctcaagatcatgccccatcctatctagtgtgtacttgtctatctcgactgaagtcgatgtttaggtctttttagctgatttggctctgcatgcttcgttgcaacggagcccctgcgtgtcaattcctggggaataaatgagatgttgaataagtgctgtagagtgtagacctgctcttttataattaggcctcaagtcatgcttcctt

SEQ ID NO: 266501 - DNA, 1179 bp, Zea mays
atcaatcccatcttgtaaactgcttgaagaagtatgcaagaggaattttgctacgcattttgattattgcacaactgcttgcacggactttgtgtcattagatgaggcaacatttaaggatattcttgagcatggtgatatgacagtaacgtcggaagagagggttctggatgtcattttaacatggtgcatgggagcttgtgaaacttttcactggacttcagtagatgagctgttgagaacttcaacaccagagcagctctttggggagaggctttccgccatcaatactttgctaccattagtgaggttccctttgatgcacctgtctatactaaagaggatggagagaagtaatctagcaaaccacatacaagcattcagacagttggttgcagaggccattgaattctctcatgctggacaattgatgcctacagcatgcgaatgtgagagatttcagcatagacggtcaagctataaagagctgctgtatatctctgatggtgatagcaatggtgttatctactatgctggaacatcatttggaaaacatcagtggatgaatcctgtgttaaccaagaatatcactgtggtggcaagcagtccaaattcaaggcacacagatccaaaggctttggtttcaaagaattaccaggggacatgttttgctgggccttgtgttgaaaatggcaagagggtttcttggtggatggtagacatcggacaggagcaccagttgatgtgcaactactacacggtgaggcaggatggctccacagcattcatgaggtcttgggctttccagggatccatggacggccggaactggacaagcctccgtgtccacgacagcgaccctaccgtctgctatccaggccagttcgcctcttggcccatcgttggcccggcggcccttctgcccttccgattcttcagggtcgccctgacaggccctgccgtcggctgtacgtggaacctctgcatttgcttcctcgagctctacggctacttccattagatcttcttcttcctcttcttcttaataaaaaatatagatgccggagtttttgtgcaaacacaagtagtattacctgcgatgccacaattgctggtcattgcacatcatgaaacatgtattcacagttgaaaaagaaagttgttagaacgataggccta

SEQ ID NO: 266502 - DNA, 361 bp, Zea mays
ttgaacaacattacatatgatatgatttgacgattgtaggggacatgttttgctgggccttgtgttgaaaatggcaagagggtttcttggtggatggtagacatcggacaggagcaccaggttggttcatatattcctggcatctgatctgatggttgccaatgcagtagataatgggatggcgaattgccttacagttgatgtgcaactactacacggtgagtgcaggatggctccacagcattcatgaaatcttgggctttccagggaatccatggacggccggaactggacaagcctccgggtccacgacagcgaccctaccgtctgctatccaggccagttcgcctcgtggcccatc

SEQ ID NO: 266503 - DNA, 550 bp, Zea mays
ccacgcgtccgctgggggttcaaaaaaacaaattagatagagctcgccgagcaagcaagcaagccaactcggccgtccgaacgaaagcgaagcgcggccaaactcactcgctaaacgctcccgttctcctccgcctgcccccaccggctccccttgtacacgagcgccggagacgccatggcggcggcgcagccgaagccggccaagaggctgggcggcatggcggaggcgctcgccatcgccgccgacctcggattccccgcctctaccacgcaggaagatcagactagctccgacaaaagcgatgatttggtgaaggttttgagggaactgactgtcgtgcagaggaacattgccaacttgcaagtggagctacagggaagaaaggatgataaaaacattgctcatttgactcatgtgagtgagatggaaaagaagtgcgagtctttggccagaatgactgcaattttgaaagatgtaattcagaacaaggatcgtattattgctcggctgcaacagccttattcccttgactgcataccagttgaag

SEQ ID NO: 266504 - DNA, 831 bp, Zea mays
ccctcgcgtccgggggatctggcccaaataccgcccagggcagcaggcatgggaggcggcgccatggctgcgcaagcagcggtgaaccagcttgattctggcgggaaggggtacagcgacctgtcgtcgccgacggagccgctcccgttttcgtttgaggggatgattcgagggaggaggcatgggggcggagtagagaaagtggtggagaggcggcagaggaggatgatcaagaacagggagtccgccgccaggtcccgagcgcgcaaacaggcttatacaatggagttagaagccgaagttcagaaactcagagagcagaatcaggaactggagaggaaacaggcagaaattatggaaatgcagaacaacgaggtatcagaaatgttgaaggatccattcggacggaagaaacggctgtgcttgcgaagaacgttgacggccccctggtgacgattgcctagaacagcacatgacttgcacttgctacgtacctgcaggggcgtttgggatctgtagataatttctctcctatagtgtagcgatgaacccatgaacatgaacataatctaaatgattgtactgttagctcccttctgccgcttacgtagtactggagtaccgtattggtggagtcgaaaactgacatgtaaattatgtacgtagtagagaacaaaatggagtgaagccggtcgcaagagttgtggcttcagtcatcctccagagcttgtgcagagttgcccaggttttgcatcttgctggcccatccagagcttgtgcagagttgtctaggttttgccatcttccagtgcttgtgcagagattgaatga

SEQ ID NO: 266505 - DNA, 769 bp, Zea mays
aattccggtcgaccacgctccggtcgcccaggtcccaacgccaataggctatcctatggattggaacctaggtgagaactaaggagcagaatcaggaactggagaggaaacaggcagagattatggaaatgcagaagaacgagctaccagaaatgttgaaggatccatccggacggaagaagcgtctgtgcttgcgaagaacattgactgggccttggtgatgactatctgaaacagcagacgagtcgctgcatacctgcagtggtgcctgggatctgtacacaatttgtctcctatagactagcgatggacgtaacgtagtggggatgattgtactgttaccgcttatagtggagtcgggaaactgacacatgtagattatgttagtagagaaccaaatggagtgaagccggccgcgcaagactcgccggcttcggccatcctccagagcttgtgtagagttgcctagctttgcatcttgccggaagcagcacatcgtgtagagattggacggttttaaaggatcggtggctgggtgtaagtaggttggtgggattacaagcatgggcatggcgacgttcaggatgcaaccggcttgacgactgtacatctgatggctgtagagctgttgtagtatgcaaactgtcccgctgctgctgcttgtgtgtaatggtgaaaccagatgaatcggttatttgtgtattactacttagcaaatatgctcccgaggatttctaaataccagcatttgaagtgttggatggttttt

SEQ ID NO: 266506 - DNA, 861 bp, Zea mays
gtagcctgatccgcttgctcttcaccctcgccgcggccatcggcgcggcctcgctcctcgtcgcctcactccgccgccgcgcgccgcctcccgggcttcccgccaagctcgtcccctcctcccacatggcaggacgcaaccggagtttcgtgctgtggctgcacggcctcggcgactcaggcccggccaacgagcccatccgcaacctcttctccgccccgcagttccggctcgccaagtggtcgttcccctccgctccccgcgcccccgtatcatgcaacaatggttttgtcatgccgtcgtggttcgatatccacgagcttcccatgagcgctggctctccgcaagatgagactggggttctcaaggctgtggaaaaggtgcacgccatgatagacagggaagtagccgatggcatccaccctgagaacatatttgtttgtggattcagtcaaggaggtgctctgacattagctagcgttttgctttatccgaagaagttaggtggaggagcagtgttcagtgggtgggtgcctttcagttcatcagtcactgagaggatttcacctgaagcgaggaagaccccgtttctttggtcacatggaatggctgacaaagtagtattgtttgaagctggccaggctggtccaccgtttttgcaaagcgctggtgttaactgtgagttcaaggcatatccagatctgggtcattcgctttcccaagaagagctactttatcttgagtcgtggatcaagagtcgtctaaatgcctctcaagagaaggacggttaactgattccatcatgcttaagtggcatttatttagtatttttattatacgatacacagatcaactacttgt

SEQ ID NO: 266507 - DNA, 1130 bp, Zea mays
ccttttcagatgatgacatcactcagatcgtctcaacaaacctagttggttctctactgggcaccagagaagccatgaatgtcatgcaataccaagagaagggaggccatatattcaacatggatggagcaggttctggaggatcaagcacaccactaacagctgtctatggttcaactaaatgtggactaaagcagttccaaggatcacttctgaacgaaagcagaagatcaaaagttggagtgcatactgcttcacctggtatggtcctcacagaccttctgttaagtggttcatcgctcagaaataaacagatgttcaatttaatatgtgaacttccagaaacagtagccagaactttggttccaaggatgagagttgtaaaaggaagtggaaaggcaatcaactacttaacaccaccaaggatcttgcttgctctggttactgcatgggttcgacggggtcgatggtttgacgacgagggaagagcggtgtatgcagctgaagctgatagaattcgcaactgggctgaaagtcgagcacgcttctcgttcaccgacgccatggagatgtacacggaaaacacatgggtttccgtattctcgctctcggtggtctgtgcgttcataatcctctctagctccggtggacctcttccaggcacatgatttccagagctgtcaaactactagtagacggccatgcatatgctcattttttaccccaccaaaggcattctactaccagaagccatttgatacagcacttaatgaatggggaagaagagaaccccccacagatgtagatatataggtgcaacggagattagcagctgcctcctcgcaccatttaaagtttggctagctaacctatgtgctcatagaagggtaaatagaatttattgcgtgggcattccactgccgtacgtaagctggactatgatccgtgacttttttaaggacatgtatgcaaagttaggtgagcaggatcagagtcgacattgcctcgtgtacatgcatgtagttgtcattataatcactgtaacttctggtatcgcttgtacccttcaaaattcgaagacattatattgtgaagcgaagtggcacacaccatgtgcatatggtttatct

SEQ ID NO: 266508 - DNA, 691 bp, Zea mays
ggagaagatggcggagcgggagcgcgagatggagctcgacgcgatcaaggagcagtacctcggctccaagaagcctaagaagcgtgttatcaagccctctgagaagttccgcttctcgtttgactgggaaaacaccgaggacaccagccgcgacatgaacgcgctctaccagtcgccgcacgaggcccgactgctctttggccggggcttccttgctggcatcgaccgacgtgagcagaagaaggcggcagctgcgcatgagaaggagacccgtgcagagctgcggcgcaaggctggtgtggaggaccgtccagaggatgacgctgtagataagaagaaggccgccgctgctgaaatgtatgacgcttttgatatgcgtgtggacaggcactggtctgagaaggcgcttgaggagatgactgagcgagattggcgtattttccgtgaggatttcaatatctcctataagggttctcgcataccccgaccaatgcggaagtggagtgaaagcaagcttggcaccgagttgcttcgtgctattgacaaggctggatatgaaaaaccatcaccaatccagatggctgccattccgtaggtctacaacaacctgaaggtaatgggattggttaaaccaggttttgaaaaaactgcagccttggaactcccaaggtggcctaacattacccaattg

SEQ ID NO: 266509 - DNA, 1747 bp, Zea mays
tgaagtattctatactaacttggcattgcaaacattcaatgaaatttattgcaagtatgctaatagcacctacctcttttcagttaagtaaatttgtttaactgcgtttgtctagcggtacctaagtactgtcgcgaaaatttgtttctatgtttcctggaattgtcccaataatattctttggtcttatcattcatttgtaattattaatgctctcaatcacagcaatgtcccctctaattattctttggagatagttatgaaaatgcttgcagacttgttcagctcagtttatgaaccatgaactatgcatatctcataacatagtgattaagttaccacgaaccattcatagctcaacttatgaattcggatgatgaaattagcatatcatagcattgcaggatgtcttctagattgacatgttcccgtgatacatcttactacgtgttgcagcaagaaactggactgtgcatgaatctccttcaggagtatgctcagaagatgaattacgccattccatcttatatttgcactaaacaagcttcgggtgtagctcctttcgtatgcagtgttgagattggtggcatcctatacattggtgctgcagctaggacaaagaaggaggcagagataaaagctgcccgaactgctcttcttgcaatccaaaggcaatcagaaggtggtgcaaatggtgccaaaaagtacattgttgttcctgggcaaaggccagataaggaggcgaataaaaatccaactgaaacccccataccacttagagtcaagaagcgtggttccaggaagaaatggaacaagaggaaattcaggaggatggctgaccgaattgttgatgctggaaaggatgcagaggggcttggaacgcttctacatgatgactatgaggaagctagaagaataggatatgagttacctacagatactgctatggttcaatttaacaaggaagttgtaatgacacaacctggtgaaggagataggatagtacaattggagccacccagagatcctgcagaggtccaatataacacggaagctagaagtgttgaacaggacccacccagagatcctgcagaggtccaacataacaaggaagctagaagtgttgaacaggacccacccagagatcctgcagaggtccaacataacaaggaagctagaactgtcgaacaggacccacccagcaacacagaagtgtggaagcctgacaataaggctacaactacagagcaggagtcggtgagcgctttcatagcattgagatctaatggggattctacagatgtggaggcggcaccaggcgataccttgatgatgcagggccaggagtcggaagccacaatgcaacaagcatctcacgctggtgaacaggcccagcctaactaggaacctgaaagcaaaaaaaacttcctgaacaggaagaccgaaatgtaggtcgaatgcatgcattgctgtaggagaataagtccgctggaggtacatgagcctaaaataatttgtggagtggtggttgactccagttgtaagtgccttccagagtgtaccggcatgcccaaaactgaaatttccggtttagatagaattgggggcgcggaagagggtgccatgtgtgtgtgtgtgtgttgcctgtggatggaggaattgatgggagtatgtgaactgatgtagctagtctatgtttgttaccattgatgatatgattgtgtttggtcatgttttccctgtccac

SEQ ID NO: 266510 - DNA, 528 bp, Zea mays
aaccccaacgccaaccccaaccccccaagaagcaccgcacagaaccctctgctcctctcaccctcacgctccaaggcggcggcgccatgcacggcggaggcgcggcctcgcccgatgccgccatatgcatctccccagaagctgggcccatcgtcggggtcgcccccgccgggatcagggtcgaaaactgctacgtgttcaagagccggctgcaggagtatgctcagagggttggcattccaaccccggagtaccacacgctgaaagaaggcccatctcatgaacctgtcttcaagtccacagtgttcgttaataataccaagtatgagtcgctgcctgggttcttcagccggaaggctgcagaacagtctgccgcggaagttgcgctcatggagatagccatgtccgctccggtgaccgaaattaggaacatgccagcagttcaagatactggcctgtgcaagaatctccttcaggagtatgctcagaagatgaattacgccattccatcttatatttgcactaaac

SEQ ID NO: 266511 - DNA, 842 bp, Zea mays
gtgagagtgaggcacctgtagcagatgaggacgcagagcttgatgaaactcagtctagagctgctctccccacaccgcaacatgctgaagctgatcatacggaagcagctgtggatgagaataaacatacaggagcagggaaggttactgctactgcaacggacgacgatgcagtagaaaagagtcatggagacccaagaacctcagagacctgcaatcctgctggacctacagacaaagcggagaaacctggaaggtactccgaacaaggcgctggtgatgtgactgaagatcgtccagaaaaagaagcccaagctgttgggaccggcgacactggtttcgtgtttgaacctggttctgtgcttgtggagtttttgcgggaggaggctgcttgcatggccgcacattccttacatgggcgtcgcttcgggaacagaactgtgcatgctggatatgctccgtatgatctctacttgcagaaataccccaggtgattctgcgtttgcgactgcatgagttgcgatacgagctttgcctatgtgccagtatttcacagaaacttcagacttgtagttttggcttttgagcctttggatggttcttccggtccagatagtggtaccattagttgaacgaaatatttggaaatgttgttccacagtagatatcggatggacaataggatataagtactggatagagacccaagttgtcgttaacatcgttctttacttcgctattaatgtttttgatgacgtcagacattagtgtggatggatggatggatggaatggatttattgcaagattttggatgccataatctcatttttttaccccacc

SEQ ID NO: 266512 - DNA, 1003 bp, Zea mays
ccatcccagccgccagttcccggtccccggattgctccccaagacaagcccaaatctgggaccataaacaaaccgcacccgagcggcccaaatcgggatctgacggcaattccccaattcgattccatcccatgggttggcgttggcacgacgacgacggtgacagcggccggggcctcggcggtgtccctgacctcgctggtggcgggggcgatggggcgcagtgcgccacgcgacgggtggtgcagtcccgctgccacacggaggaagtcgagcccggccgatttgtccgcaagtgcgagaagacggagcagctcctccgcgactgcgtcggcaggccctctgaactggtggaatccaaaactgaaaacactgaagaagatgtcacagaagaaatgaagagcggttcactttctcttgggtttccaagaaacgagcccttcgcattccctggactccgcagtgacatggaagcccttgagaaagacttctttgggagcctagggaacgtcctggatgaagctgagcggatggccaacagcttcgtcagatcttttggttttccacctgctcatgacagcggatcaagtccatttcgaagacagcctgcagagaggcatattgaggaagataccgcaaagaataagactgagagcgactactcagaattcaggagcaagatttcagatgtgtaagcagctgtagagctgcagttatctggcctgtgtccacagagctgaaacctgagaagtgagagctttgcaatctcacggtccttatatgtttctctttggaacaaaataggtacttgcggcctgcaggtgctgtttagcctcgcttagtatggtaatcgtaatggtagatgaagtgatttgcctgtcagaggtgaggagtattatctgttatgttcggttttgcagggccattttgtacagtactttttgcagacccagcatttgatatatttgcccccttgcgcgcaaaaaaaaaaagaaaaataaaa

SEQ ID NO: 266513 - DNA, 767 bp, Zea mays
ccacagaatacgcagtcaaactattctacagatgagcgaagttccgaatctggtaatatgcctgagcagcgtgcgttactcgctgaatcaatgagacaagaggtgctgcaattggacaatgaaattgtttacaatgaagccataattgaggaaagggagcaagccattcaagatatccaacagcagattggtgaagtacatgaagtgttcaaagatcttgctacccttgtgcattcccaaggaatcataatcgaggaaatcgacatgaacattgaaaattctgcagcagtgaccaaagaggcaaagacagaggttgccaaagcagccaagactcagaaatcgaattcgtccctgatttgcttgcttatggtcatatttggggtcgtgctgcttgttgtgattatagttttggcagcttgagacatgcaacctttccacttacagagctattccgcggagttcagaattgaagattgttcgtggttcttgtctaaccatcatatcgtgtgccaaaaaaaaatgtcaccaacggattttagaagccccccgcttttacatttcatggcttgtgagtgagcggctctctttggcatgtcatgtcatgtgtgagtcctttttttcatggcttgccttgagtgaacactgatgttcttttgcttctttggatttcggaagttcgcttggtgtgatttttgtaaccctgtaagtatcccccccgtcaaataaagcaaagagatggttacgcgtatattgaatttgtttgttgg

SEQ ID NO: 266514 - DNA, 1059 bp, Zea mays
gctgtggcaacaacaaatcttatttcaataaaaggtacaaaagataccgcagatagcttgaagaagctcgatcggcttattggaacaactacagctccaaaccagttgcatcttgttgaaaaccttgactacaagttatccccatggcagaaagaagctctgtattctgcacgtgttcttttactgctccatgcaaataaaactgaacaggcacatgagttggtcagggggctgcttggtatgtttccagatagtgtattccctgttttacttcaagccgctgttcatgttaaagaaaagaagattcacaaagctgaagatgttcttagccagtacgctgagaagcgtcctgagaattctaaagggctcctccttgcacttgcccagattgctgctaatgccaaccattttcagcttgctgctgactcactatccagaatacctgacattcagcacatgcctgcaacagttgctacattagtggcccttaaagagcgcctaggtgactccaatgctgcagcttctgtacttgattctgctatcaactggtggaagaattccatgaccgaggataacaaattagatatattaacacgggaggctgctgcatttaagctcagccatggacgtgatgaagaggcttgtttgttgtatgaggaacttgtgaagagccatggaagcatagaagctttggctggagctagtaatgacttcagcgcgcactaacttggagaaggcagaacaatacgagaagaaactgaagccattgccaggcctcaaaggagttaatgttgagagcttggagaagacatctggtgcaaggcatgtggaagggccccaagacatgaaggtagatgttcccgaggaagtgaagaagcaaaaggcaaagaagaggaagcggaagcctagatacccgaaaggcttcgatccagcaaacccggggccgcctccagatcccgagagatggctgccaaggagagagcggtccagttaccgtccaaagaggaaggataagagggctcaggtcagaggtgctcaaggagctgtgtctagggaaac

SEQ ID NO: 266515 - DNA, 922 bp, Zea mays
caacctacccctgcaagccattgccctcgcctatcgcctcgtgcaagtccaagctcccacgactccaccgcgaccgggagagagtcagagagagacgcccgcctccagatcgtccggcggggatggcggcgtcggtctttccagcgctgctgctggccgtagcggcggtgcttctcctaccggtggcagaggccgtgtggctcgagctcccgccgtcggggaccaagtgcgtctccgaggagatccagcccaacgtcgtagtgctcgccgactacgctatcatgtacgagtcccaccccagctcgcatcccaccgtcgccgtcaaggttacatcaccctatggcaatactgtgcatcataatgaaaatgctacaacgggccagtttgcattcaccacttcagaagctggaaactaccttgcatgtttctggatagacagcgtggagaaaggatcaggaacatctctaaatcttgattggaagatagggattgctgcaaaggactgggatactattgctaagaaagagaaaattgagggcgtagaactagagcttaggaaacttgaagctgcagtcgagtccatccatcataacttgctgtatctcaaagcaagggaagctgacatgcgaacagtgagcgagagaacgaattctagagttgcctggttcagcatcctgtcattgggagtctgcgttgccgtctctgtgctgcagctgtggcaccttcaagggttcttccggaagaagaagctcatttaaattcacgttttatcagtgtgtacttcccgtgttaaataccttaggaggacaattgtcaaatttatttcaaaaggaaactcgtatgatggacaaaacatgtctttgatacatgacttgaaactagcaacctatattccgtggaattgaggtcgaccttccatttt

SEQ ID NO: 266516 - DNA, 1590 bp, Zea mays
gttccaaatggaataacccaatgcagcagtagccgtctgcctcctcgctttccctttcgtccgtacgccgccgcctcgcaccgccgacagtcctcagtccagaactccagatcgagcctccctctccccagatcgggtcctaggctacagcagccgccgcatccgtcaccttcacaccgcgtgcgtgctctctctcccccctccccctctccgtgcgacgactgggtgggctaccgccgccctacgcaaggtgccgagaacttcgccgatatctgcgccggagaagagcgcccaccagatcaggcgcttagaaggcgcgctggccggtggatgacgatggcgggtggcgggggactgaaccggtcttcatcgagggggcagctgccgccgcaagagctgcttgacgatctctgcagccggttccttctgaatgtgcccaaggaggagctggagtcgttcgagcggatcctgttcctgctggagcaggcgcactggttctatgaggacaactccgttgagcacaaccccaacctcaagtccctctccttcaaggacttcacttccctcatgttcaagagctgcactgctctccggccctacatcgcgcacctggatgatatctacaaggacttcaacaactacaagtttcgtgtgcctgtgtccggcgccatcatcctagacgacacttatgagaggtgcttgcttgttaaaggatggaaggctggggccagctggagctttcctcgtggaaagaggaataaagatgaggaagaccacacatgtgctgttagagaagttctagaggaaactgggtgtgatgtttctagactattaaatctggatgattacattgaagtttcaattggacaacaaagggttcggctctacatcataacaggggttaaaagagacactgtgtttgcacctcaaaccaagaaggaaattagtgaaatttcatggcacagaattgatgacctcttaccagctagtgatgatgcagtatctcgtgcagtgaatggaatgaagctgtacatggttgcgccatttttgacgggtcttaaggcttggattgccacacatcctccaccactgcatcagaaaccagagacatctgctagaggtactgtgtggagggcgaagggttcgtcgagcggcacaaccccagtggagaatcctgttgctaaagcaggatctgacgtgcagcacgctgccgaccgccctggttgcagcttcagaaacttcaggtttgacaccgcaagcatcctgcaggccatggaggcttccttcctacgcacctagaatcctgacgaagcatcaacacctgcacccttgatgtgtatagaccgcggaccagcgctatctgtgttgtcaatctgtctttgtttcgtctttctcgccttgtatctgtactcttcacagcaatcctgtcagacgcttgaacctgattttgctgctgccccgtttggtggtggttgtccataaagttctaacgatggtgctgcaaagtctggaaagggccgacttgcgatcttcgtgctgatggctcggatggggccaatccatgggccgctggagccactgcccgcgttg

SEQ ID NO: 266517 - DNA, 948 bp, Zea mays
gtcgaaacagaatcctgacttcgagtcttgtcttgtgggctgtgcctgtgacggactgacggcacagaggtaatggaggccgcgcctaccaccatcaccgtccaggtcaagttcgccgggcggacgatccccgtggaggtcccggcagcggcttccggcgcggagctgaagcgcctcctccagccgctgaccaatgtcctcccgcgcggccagaggctcatctgcaaaggcaaagtgctccaggatgccgcaagcctgagctcgatgcaagtagtggacggatccaaggtgatgctcatcgcgtcgcaggggctccatcagggggatggtcctatcacaaataatagcagtagctcagcaacaactgtgagaaggccttcaaatgttaaggagaatcaaacacaaaagccagaggtagttgtcaccaaaagccgatctgagcgctggaagttaacaggtgttgttgcgctgcaagactgtgacttgaaggtaatacctgaagaagtctgggattgtggcacctcgatacgaatactagacattagctacaactgtatcaaggaaattccacacaaaatctctgctcttaaatctctaaataaattgctcctaactgaaaatgatatagttgatgatagcatctgctgggaaggtctatcatgtcttcaaaagctattgaatttatctttaagcgaaaaccgactggttagcttgccaccaactttgggttcactgacttctcttcgtgaactgtgtgttgcaaagaacaggcttgataacttgcctctagcaataggactgctgaagcacctccaggtcctcatagcaaataacaacaggataacttcattgccttcatcaataggagattgtgaatctctcactgtggttcacctgtcatcaaatctcttaactgaactgccagagacctttgcgaaccttcgtaat

SEQ ID NO: 266518 - DNA, 409 bp, Zea mays
ccggaattcccggtcgaccgcacgcgtccgcccacgcagatcaccaacctatcctacacatacgacatggagacgaaccacattcgcgtttgcggatgatctccaagcggtgtgcccatggaaggagaagcaccaggtgaccaatttatatgttgagctactagtggagatcatgagggcacagagcaacaaccaacatgttgtgccaagtagcgtccttgtgaatgataaccctgggatgctgtcaaaacccatggacaacatgaaagtgattgaagggtatctaatggatgagatggaggccatgacgattctagaggagcaaccaaatatgctgaatgtcattcataagaaaaagaggcatggagtgaagttttggaccacagacgagcacaggaattttcttcgt

SEQ ID NO: 266519 - DNA, 540 bp, Zea mays
gatttaggcacatcgtacatgttcttgtcatattaagtgtcacctatgctcaagagttggtagtgtagataattttctctatgcaaatgcaattgttagagaccgcatttattctatgatggtattttttagtaccaacaatggacaaggaccccatcgaaatggtagagagcacagtgtgagtgatccagggaagccttgatatcattcgcagcctggtcactaatggtgttgtgaatgtaacccacctcagtctatctattcccttaagaccacattgtttcaaataatagatgtgtgtgacatgcttgacaagtgtgtcgtctccatgatttttttgctaaagctaagagggaagaagttattcaagcttaggatacatccaccacaacagatgaagccacagatgaaggtgcgagcagtgaaggtgcgagccgaagttggtaacttcgacaatggagaaaagcttcgagcgcaagccagcgaaggagaagaagtcaaaacttgcgcagaataatagaaagggaaaagacgacaatg

SEQ ID NO: 266520 - DNA, 370 bp, Zea mays
ctgcatggcggctggagggtaggtgggaggagagaggaaattggaaaagagagcctagctctatagtatgtgggaaaccctaacttagggttgggagttgcattaatagaccaagtgatgttggacctggcccattacacatgggtatgaatgtaattacaaggggctaaccccaaaaccctaaatgggattctaacaaagttgttttttccgttggtgttaatcatataagtattagcatttcagttgaattttctactctcaattatattgaatgaactggtttacaattctagtatgttaattattcctgggttgatgctttgagcagattgccttgcacatatatagagtcttctctatgtttttt

SEQ ID NO: 266521 - DNA, 1277 bp, Zea mays
cgacgtggcgtgacgcggtttcggagtgccccagtctcccacccccagctccaccaagtcaccgcaccgccgcatctaggtcaccgcctcgccggcgtttcgccatggccggggactggcaggacctgggccaagcggcggccataggcctcctcttcgccttcctgctcgccaagctcatctccaccgtgatcgccttcaaggaggacaacctccgcatcacgcgctcccctccgtcctcccccacagccgccgccccagctcccgcgacgtctcccctcccctcccaacacgacgccgcaatcggaagcggcagtgacagcgattgggagggcgtggagagcaccgagctggacgaggagttcagcgccgcctccgccttcgtcgcggcctccgccgcctccggcaccagcgtccccgaggaggcgcagctgcgcctctacggcctctacaagatcgccaccgaggggccctgcaccgcgccccagccgtccgcgctcaagctcaaggcccgtgccaaatggaatgcttggcataagctgggtgctatgcctacggaagaagctatgcaagaatacatcacaattgttcaggagctattccctaactgggatgcaggtgcaagtgcgaaaaggaaagatgaagatagcattgcttccgcatcagcttcaaaggggcccatgggacctgtgtttagcagtttaatgtatgaggaagacgaaggaaatgaatcagaacttggtgacatccatgtttcagcaagggaaggggcgactgatgacatagtgaagcttctggcagctggtgttgaggtcaacgtgagagataccgaaggtagaagtccgttgcactgggctgttgatcgtggccatcttagtgctgtcgaggttcttgcaaatgcaaatgcagatctgaatgctaaggacaatgaagggcaaacggcactccactatgctgctgtttgtgaaagagaagacattgcagagttgcttgtcaagcatcatgctgatcttcggatcaaggacgaggacgggaacacggcacatgacttgtgcccttcgagctggtcttttatgaaccaggcaaactgatgacacgaatatacggatatgcttgaaggtgtcatctgccaagaaacatgctagctgtatcctaaagcccatacggcacatatggtgtatcttagtgtcatgtgtaacgtgtgggaaatcaggcaggttgtttgcgtacgtggtgccctctctgaaatcagatgagttgttttatcgtcctagaag

SEQ ID NO: 266522 - DNA, 1232 bp, Zea mays
tttaaatggatggaatcgtgatgggtggaactttatcattaccaaggtcaaggaaacggtccctctagctcatttctctaaacaacaactgcaagagaaggagagagagcttaaaggatactacaaggcaataagggattcaagaaaagaaagcggggttgggtggaatgacaccctatgcatggtactggctgaaccagaagtttggccaaggctgattcgcgctcacccaaaggtatcaaagtttcgcaacaggccattccctcttttttacagtttagaagggctatatgaaggtagtgtggctaccggagagttaaatttcacatcaacctttgttgatcttcctccaccttcagctccatccaggagtgtgtctggacaaagtctcagtcccttgagtactaattcacttgatttggatggacaagaaaccacaagtgtcttcaatctatcttgtgatgctcaatctgtccgagtcaatactaatgaacccactgaagctcaatttgtcccatctaatcaagaatcaagccagagagaaggtggcagtgggagaaagcgtaagcaaagccatgttggattagctcttgaaagttatgtggagtttaaaaagatccaaaatacagaaacacttgaaactcttaaagaacataagaggcaagaggatcaattttctattagcaagtgtcaggctgaattgaaaggaatggatggattaacagcagtagacaaatcatatgctttggagcttttcgtatctgtgacaaaccgagaaattttcttaacaacaacagagcatgatgttagagaaatttggctcaagcgcaaaattaggttgcttcgtggtagtgatgcatggcctgaacaaatgatatgagcaaatttgacaactgcagttctgttatggtgaatggtgattgtagttcagtttcagctctaacctatggaaaattgaatggcagttgcactaatctgttggtggaatgattttcccagtaatttcctggacaagcagatcactgagaaccatctaccttatgagaaatgatgccttgtatggttcagtatagttcttgtattgctggtttaaattaattcttgtatggcagttgcactaaactgaatggcagttgcactttgagatatgcttctattgttggtttaaaaccatggtgacgtccgcgcttgcatgctgtatgcattcttgtttaaaacctggttgcttatgt

SEQ ID NO: 266523 - DNA, 775 bp, Zea mays
gcgcgcaccgccgtcggcccaccgcttcagttggcagttgcgacttgcgagtggctccaacagggcaacacaatccaccggcaccaacccagcgcggcgccaccggcgacccgtaccccctcccccggagagcgatggcgacggagctgacggcggcgcagctgcgcgcgtacgacggcaccgacccgtccaagcccatctacgtctccgtccggggcaaggtctacgacgtcacctccggccgcggcttctacggccccggcggcgcctacgccgtcttcgcgggccgcgaggccagccgcgccctcggcaagatgtccaaggacgaggccgacgtctccggggacctctccgggctcaccgacaaggagctcggcgtcctcgccgactgggagatcaagttccaggccaagtaccccgtcgtcgcccgactcgccgccgacgcctgaactcgtcagtctcggtctaaatttactctgtcctgcctcttgcggtgttcagtgctgtgcttgcttgcttgttgctagttgctttgctacccaataatctgaatggaaggacgtatgtgatgtgcctgctgaatagttcctagtccttgcatacactgctgtgctaccacatgacatgatgtactcgtgtgtgtgctttggttgttgtgtaattccatgaccatgatcagtaatctgaataaaaaatattggagatgtgcttgcttctaaaaaatgggaataaactctaccatattcttaatgatatgtatgatatgcttagtgat

SEQ ID NO: 266524 - DNA, 1193 bp, Zea mays
ttcgagttctggacaccccttttgcggtgatactcgtttactggcatgggagttggagcgggaatgaaagggctgaggcccgtcgttgaaggcatgaacatgggattcctgctccttgcttacaaccagatctcaaataactgcggcatgcttcattacacctcaggcggccagttcaagatcccggtcgtgatccgaggccccggcggtgtcggtcgccagctcggtgccgagcactcgcagcggctagagtcgtacttccagtcgattcctggccttcagatggttgcctgctccactccttacaacgcaaagggcctgatgaaggcggccataaggagcgagaaccccgtggtgctgtttgagcacgtcctcttgtacaacctgaaggagaaaatccccgacgaggagtacatctgctgcctggaggaggcggagatggtgcggccaggtgagcacgtgaccatcctcacgtactcccgcatgaggtaccacgtgatgcaggctgccaagacgctggtgaacaaggggtacgaccccgaggtcatcgacatcaggtcgctgaagccgttcgacctgcacacgatcgggaactcgatcaagaagacccaccgcgtgctgatcgtggaggagtgcatgcggacgggcggcatcggcgccagcctgcggtcggccatcatcgacaacttctgggactacctggacgcccccatcatgtgcctgtcgtcgcaggacgtgccgaccccgtacgccgcgacgctggaggacgccaccgtggtgcagcccgcgcagatcgtggccgccgtcgagcagatctgccaatgatcagtgatatcatggctttgttgagtacctgatctgtggagtcagattaccgtggttttgtttctctgtcgcatcgcgactgtcaccgtgccttagacaagacgtgtttttgtattttgcaacgcagaagccatactcgtactggatgccgtttgtgggtggcctatttgttcattgtgcaaagttggatgccatactcgtacactattattatcaggtttcagcattcttttgtactttgtagcagcgccgtgttgctgtcggcatgacgttgaattcactcctgcacctgaattttgttggttatattttagatgtttttaattaaaaaaaaaaaaaaaaaaaaagggcggccgcccacgcgtccg

SEQ ID NO: 266525 - DNA, 405 bp, Zea mays
ctgcacactattggcaactccatcaagaagacccaccgcgtgctgatcgtggaggagtcatgcgcacgggtgggatcggcgccagccttaggtcggccatcgtcgacaatttctgggactaccttgacgcccccatcatgtgcctgtcatctcaggatgtgcctacgccatatgctgcgactctggaggatgcaaccgttgtgcagcctgcccagatcgtggctgcggtggaccaactatgtgcatagattgtggcctgggacgtttgggagactgttgttcccatgaaaaagccttccgtttgttagttttgtgctgtaacaagcattctttggagacttaaggtgtaggcttatagtcgttctgttcttgttttacgcagtacaccccagcttggtagctgcc

SEQ ID NO: 266526 - DNA, 341 bp, Zea mays
ccgagagcgagagggcggcactggtgacgtcattcacctctcggtcgcgtgcgcttcacgcagcggctcagtcagtcctcacaccacgcatctgattctgatcgcaccgccgtcggcccaccgcttcagttggcagttgcgagtggctccaacaatccaccggcaccaacccagcgcggcgccaccggcgacccgtaccccctcccccggagagcgatggcgacggagctgacggcggcgcactgcgcgcgtacgacggcaccgacccgtccaagcccatctacgtctccgtccggggcaaggtctacgacgtcacctccggccgcggcttctacggcccc

SEQ ID NO: 266527 - DNA, 1791 bp, Zea mays
gacccacgcgttcgggagagcctcactcaagataatgatgcctttatatcgccagcaacgttacagcctaaaagaaggaattcctagtttccttacgaatgttgccgcaacgattctaacaacagggaagtatcttaatgttatgagagaatgtgggcacaatgttcaggtttccttgtcagacaattctaagcttatgagctttggctcaaaccaccaatatcttgaatgtataaaatctgcatatgattttgcaagtggtgaattgttgactctgatgaaagataagtatgatctcatcgggaaactccgatccctgaagcgctatctactccttgaccaaggtgactttttggtccattttatggatattgctcgagaggagcttacaaagaaaccagaagaaatatccgctgaaaaacttcagtctctgcttgacattgctttacggagtactgcagctgcttcagatccaagccatgaggaattaatctgctgtgtggaaaggagttccctccttaagaaactggccactctgaaggacttggatcctgcagataagcttgctgcagcagatgttgatcgatcaatgcaattaagcatcacgggtttggaaacattctgccttagcaataaggtccagtggccgttatctcttgtaatttcaaggaaggctttgacaaaataccaattgatctttcgcctattgttccactgcaagcatgttagtcgccagctgtgtgcagcatggcaaatacaacaagcattccggtctgtcaagattctagggacaccaattctgcggtcatcaattctttgtcgtagcatgctcaagtttgtaaatagccttttgcattatctaacatttgaggttcttgaaccaaattggcatctgatgcatgaccgccttcaaacagcaaggagcatagatgaggttatccagatccatgatttcttcctccagaagtgtctaaaagaatgcttgctgttgtcgcctgaactccttgtgaaagtcgagaagctgaaaggtttatgccttcagtatgccacttccatccagatcttgatgccatctatcgatgtcgctaactctgagaacacatcgaagtctaggaagtcaagatcaagaatcgataaatcacaggacagagaccagcagctgaaactagcatcagagaatgttgtcatgtcagagtcgatcctgaaatttgaagcagcgttcaattcagagctgcagagtcttgctcctacgctgagtaacagttcacaagcggagccgtacgtgactcatctcgcacagtgcattcttggcgtgcgaatcggccaatgagttatttgatgggccgtacccatacctgcctgccttcatttggacttttggcacaatgccatactctgtgcgccgctgcagtcaaggtaggtgcatatccgtttcttgtgaatgctaatgtggagctacgacgcgtttagtgaccctagggtggtgtcgggagccttgttatcttgagctcgaaccttgctgtgtgtttatcagctgcgactcagcatttcgtgctgttgatatctgacaatagcaatgtgtggttgtgttgtgttgtgttgtgagactcagatgtaagctttgtggagttcatttccacgtgtgtggcaaaagtgtttggtttgaatcgaaccggaatagtgcatataataatataacttgcagaatatgaaaagggaaatacccattgacctccaagatgagcgttagcgtctttattcgtatgtgacagcaatgaacatatttgtact

SEQ ID NO: 266528 - DNA, 1658 bp, Zea mays
caaactcatttcccgtctccacttgttcctcctctgtgctctcgcctttccattcctccaccggcctcatcccccaactccgtcgagcattaccgtcagagggcggcggcgcggcgcggcgcggcgccgccggcgacggggaccgcgtgaggcaggctcccctcaaggctcgtcctcctcgtcgggaggcgtcgccgttgccccgccctctgggctggcgcggcgtggaggggacagctggagatccgcccgtctctgcttggattgcttccttctcccgcagagggtatgagcaatgtactcaccaaaaccagagtctagttttggcccaaatcccaactcaggtacacaccagcagcaaatggaattaactggggccaacatgggtcctggtaatggagcaaataacaataccaacatggctgggaggcaacgcttacgctggacaaatgaactgcatgaaagatttgttgaggctgttactcaacttgggggtcctgatagggcaactccaaaaggagttctgagaattatgggtgtacaaggattaacaatataccatgtaaaaagtcacttgcagaaatacagactagcaaagtatattcctgatgcttcaactgatgggaacaagaccgataacaaagacccaggagatttgcttgccggacttgagggatcctctggattgcagatatctgaagccctcaaactgcagatggaggtccaaaagcggctgcacgaacagttagaagtacaaaggcagctgcagttacgaattgaggctcagggaaagtacctccagaagatcatcgaagagcagcagcgcttaacaggtgtgaaatctgaaactcctgctggaggtgcttctgtcactgtatcaagtgatcaattcccagactcggagcggactgagccctccacacctgcaccagcatccgagtctccaactcaagttggtgcttccaatagggacactggagaccgaactgaagcaaccaagagcacctgtcatggtgattctctttcccgcaacgagccactaacccctgattccaactgccagaacggttctcctgtcgctagtccaaaccatgaaagggcagccaagaggcagcgaggcagtggtactgaattcttagattctgaggctgagttttcccttccgcgccacatcttcgagtcgagttcaggctcagagttccaacaatactcaatgtcctactcaggacagtagcttctgatgttcacatcatctctgcaccgttgctagcttgttcagcacgatgcgcatggtccgtaggtctgggtaggttgatgtctcaaggagcgtgttgttggtaaacaaagctgtaggtgttcagtgattgtctacatggtatacgtgaccagctatttaagttcctaggtttgtaacatgtatgtccgcctgcagttcagttgagatgcttcaaggctaaggttctgttgtgtgacctgtagacacgaggctgtcagcttgtattctcttggtaatgtgtgtcagcagagcgttagcattaagtctaattgaacagtgctgttatctgtaacgtctgagtttgatcagaaactgaagttaattgaggaagacatcaacaatgttctgatacaaaaaaaaaaaaaaaaaagggcggccgccg

SEQ ID NO: 266529 - DNA, 640 bp, Zea mays
cggacgcgtgggggcggcatctaacaagattgcagcggcacatgtcgtcttcgtcctcgccttgctccttgtggcctatcgtgcggaggcaactgtctgcatgaggcataacaatttctatcacggcccatgcatgagcaacaaggactgtgccaactcgtgcgttcaacataacctcggtgtcggcgggtattgcaggggcaagatcccatttaacaaagaatgcatgtgtacatttgaatgcccatgagtcaaaagccactatatctgacgggcgcaacttgttatatatctagggatgggatgtcgtttggcatgtactccattttgaaagtgtccaagtgagactttatacatatatgcagttgagagatggaattaataataagagcaaacgcaaaaaaaaagaaaaaaaaaaaaaaaaaaaaaaaaaaaaataacaaaatacaaaaagataaaaaaaaaagaggacatctctgataaagaaacaaaaagaacatgaaaatgcaaaaaaaaaaggggggggcccccaatttttccttatcttttcctttgggaaacggggccccccccccttggggcaccaaaatttttgatttgggcccccccaaaattttttggaaagcccccttttgggggc

SEQ ID NO: 266530 - DNA, 1871 bp, Zea mays
cggacgcgtgggcggacgcgtgggatctggttggaaaattgttgcaagttttgaaggcaagtttccagacagaattaaacagataccgttggaccgacatttcgatctcaacaatgtcaaaaggtgtgttgaagaggttcatcgtgtattgttagacatagtcaatgcttccgcaaatgccacaccaggacttgggagatatcctccattcaagcgtgaggttgttgcaatagcatcaaatgcattggagaccttcaaaaacgacgccaaaaagatggtcgttgcgcttgttgatatggaacgtgcttttgttcctccccaacatttcatccgcttagtacaaagaagaatggaaagacagcgtcgggaggatgagttgagaaatcgatcttctaagaaaacacaagaagctgaacagccaacatctaagagggcctcaagtccccaaacagatgctgagcaaggtggtggcagcttaaaatcaatgaaagacaaatctggccagcaagataaagacacaaaagagggatcaaatttgcaagttgctggtcctgctggtgaaattactgcaggttaccttttaaagaaaagcgcaaaaactaatgggtggagcaaaagatggtttgttcttaatgagaagagtggaaagcttgggtacacaaagaaacaagaggagagacattttcgtggtgtcatcactcttgaggagtgcaaccttgaggaggtagaggaggaagagccttctaaaagttcaaaggactcaaaaaaggcaaatggatcagaaaaaatctcaagtcttgtatttaagattactaatagggttgcatacaaaacggtcctcaaagctcacagtgctgttgtgttaaaggctgagagcatggccgacaaggttgagtgggtaaataagatcaaagctgttattcagagcaaagggggttctttcaagggtccaagtactgagggtagttcaatgaggcaaagcaattcggatggcgctttagatactatggcacgtagacctgctgatcctgaagaagaacttagatggatgtctcaagaagttcgtggttatgtcgaggctgttttgaatagtctggcagcaaatgttccaaaggctattgtgctttgtcaagtggagaaagcaaaggaagacatgcttaaccagctatacagctcgataagcgggcaaagcaatgctaagattgaagagctgcttcaagaggaccataatgctaagcgcagaagggagaagtaccaaaaacaatcatctctcctgtcaaaacttactcgtcaactcagtatccatgataacagggcatctgtttcctcttattctaatgacaccactgaagccgagagccctcgaacaccaacccgctcaggtgaggactggaggtcagcttttgattccgcttcaaatggtcctgttgctggaagcacaaacagtcaatcaaggtcgagaagtgctgatggtcgcagccggcgctatgagaacggggatgtgagctcaggtgccaactctggcagccggcgcacaccgaaccggttgccaccagcaccgccaaaatactaatcgtgctgattggtattcatgaacattatgtattcttgcctggcacacgccccgtgcttgtcatatgggttattggagcgtattccagatcggccgctagagattgtgttgtagtggagtctggtgattgcgtgaacattgtgttcgcaggtcgctgcgactcaggtgagttgtttatagaaatatataggtaaccatggtctctatctttactgtatattatcttcgcacattttctgtacttggtgccgttcctgccaaaaaaaaaattaaaaatttttctattactttttattta

SEQ ID NO: 266531 - DNA, 852 bp, Zea mays
atcgattcatatgggacaagaactgttggtgttataagcaaagttgatcaagcagatggagatgcaaaagttatagcctgtgttcaggccctactatcaaacaagggcccaaaaaaccttcctgacattgagtgggttgctctaattggacaatctgttgcgattgcgtcagcacaatcagctgggtctgaaaactctctagagacagcctggcgagccgaagctgaaagcctgaaaaacatcttaactggagctccgcagaataagcttggtagaattgctttggttgacacaattgctaagcaaatccgtaaaagaatgaaagtgcgggttcctaacctattgagtggccttcagggtaagtctcaaatggtgcaggatgaactggcaaggctgggagaatctatggtacagagtcctgagggaacccgggcagttgctttggagctgtgccgagaatttgaggacaagtttcttgctcacataacatctggtgagggatctggttggaaaattgttgcaagttttgaaggcaagtttccagacagaatcaaacagctaccgttggaccgacatttcgatctcaacaatgtcaaaaggattgtcttggaagcagatggttatcaaccatatttgatatctccagagaaagggttgagatccttaataaaaatagtactggaaatggcaaaggagccatcacgactatgtgttgaagaggttcatcgtgtattgttagacatagtcaatgcttccgcaaatgccacaccaggacttgggagatatcctccattcaagcgtgaggttgttgcaatagcatcaaatgcattggagaccttcaaaaacgacgcc

SEQ ID NO: 266532 - DNA, 416 bp, Zea mays
ctcaggtgaggactggaggtcagcttttgattccgcttcaaatggtcctgttgctggaagcacaaacagtcaatcaaggtccaaaagtgctgacggtcgcagtcggcgctatgagaacggggacgtgagctcaggtgccaactctggcagccggcgcacaccaaaccggttgccaccagcaccgccaaaatactaatcgtgctgattggtattcatgaacatttatgtattcttgcctggcacatgcgcccagatcggctgctagagattgtggtgtagtggatggagtatcgggtgattgcgtgaacattgtgttcgcaggtcgctgcgtctcagatgagctgtttatagaaaaatatacaggtaaccgtggtttctactgtttattatccctgtatatttataacgtccccgcc

SEQ ID NO: 266533 - DNA, 711 bp, Zea mays
ctcgttcataattgggggaatgccaaggcctgtaaaagctatccatgccaaggctgagatgtttcgtgatcgccctccttgccctggccttcgaaaagatttctgctgggtaaaacaaggagataaggactatgaagcgatgcagaaattgaaaaaccttgcaaagaggcaggaatctgagaacatggccctcatacagaaaatcttgaaagatgagaaggaactggcgactcggcagcaggaggtgcttgatggaaactgcaagaagtacgacatgctggaagctctagtgcagaagggagacatcactaaccttgctcaacaatacggagtgaacttgaacgactgatgagtcattcgtgtctttttcccccttccccttggagcgatggcgcaactggtgtgatgatgatggaataggatagcatgccatagttttggtccggtatctggaccctccctctggtgtaaagactatcccaacttaggcttgggcttttcagccttctttggctctccaaaaaatctaaattagctggctctgagcctctgactttctgatcgatccaagctagctggctagctacaggttgtgtatatgaatcttgcaggggtgctgacgacgttgcaggaagggtgtagtggcccaacgaagaagagcagcggcagaggaggaggccgaccacgacgacaaggagcatgagtcggtgg

SEQ ID NO: 266534 - DNA, 1164 bp, Zea mays
tcttcgctcaccgtctccatttaattaatcggcctcctcccttcatatatgcggtgccaccaactccctctgccagtacactccacttgctagccatgacgaccctcgccgcgctgctccttctggttgccgcttccaatgtcgccgcgctcgtcaaggccgtggagtaccacagctttgtagccaccccgctgtctccccacgcgtacaccgctccgtccttggacgcggacgaggatgtcttcggcggcagcctcgccgtcgcggaggaggaggccgcggcgtcagactcggccgtgcacttccgcgtggtccaccgggacaccttcgcggtgaacgccaccgcgggcgagctgctgaagcaccgtctgcagcgggacaagcgtagggcggcgcggatctcggaggcggccggcgccggcggtggcaacgggagaaagggcgtcgcggcgccggtggtctcggggctggcgcaggggagcggggagtacttcaccaagatcggggtgggcacgccggccacgcaggcgctgatggtgctggacaccggcagcgacgtggtgtgggtgcagtgcgcgccgtgccggcggtgctacgagcagtcgggcccggtgttcgacccgtggcgctcgagctcgtacggcgccgtgggctgtggagcggtgctgtgccgcaggctggactcggggggctgcgacctgcggcgcggggcgtgcatgtaccaggtggcctacggcgactgttcggtgaccgcgggcgacttcgtgaccgagacgctcaccttcgcgggaggcgcccgcgtggcgcgcgtggcgctcgggtgcggccacgacaacgagggcctgttcgtggccgcggcggggctgctggggctcgggcgcggcgggctgtcgttcccgacccagatctcccgccgctacggccggagcttctcctactgcctcgtcgaccgcacctcctccggcgcgggcgccgcgccgggctcccaccggtcctccaccgtcagcttcggggcgggctccgtcggcgcgtcgtcggcgtccttcaccccgatggtccgcaacccgcgcatggagacgttctactacgtgcagctggtgggcatcagcgtgggcggcgcgcgcgtcccgggcgtggccgagtccgacctccggctggacccgt

SEQ ID NO: 266535 - DNA, 286 bp, Zea mays
gaaaactcagagcagggtgcccgaggggtaccagcttctgatcgagtcctttgctagccggggataatatcgcatctgaaagcatggcatggcgatgcataatttgtttacttgatcacatcatgcatgtgtaacttatggatgtctcttggtgtataagtattgtgtgaattccttctttgccatcaaaatatatgtttattccttctcatgtcatgaaattaaagaataataatttatattaattaaaaacccaattaaaaaaaattttaaaaactatattatt

SEQ ID NO: 266536 - DNA, 519 bp, Zea mays
acgaagctcgatcgctcagcctgccattgaatctcgaaagaactccgtcgcgccgcactctaatcgcctccgattctgcggagacttcggaatggcggcggcggctcgtgccgggttccggcggctcttctccgtctcggccttcgctgcaccgcctcctcctgccgcgcgccccgcggcggaccccttgcaacaacctcttcgtctcagggttaaataaacgcacaacgtccgagggacttaaggaagcattttctaaatttggtcaggttattgaagcaagagtgatcactgataggatatctggatactccagaggatttggctttgtcaaatatgcgactgtacaagaagctggtgaggccataaaaggcatggatggaaaggtcagcgcatgtgtttgactgcagttaatttccagcttcactgttcatggaagacgttaaccacattgaatgttctttataatcctaaggccctattccaaacctctagagctaataattagtcagctaatat

SEQ ID NO: 266537 - DNA, 1312 bp, Zea mays
cttcgggacgcacgtttaccccaagaacaagtacctcacgctgcagatgaccaggtcggccaagggcgtcgtctgtgaggacgtctttgagagcctgattgtgttttctgaagcctggtgggtgggaacaaaagaagataatccggaagagctcagacttgagtttccaaaagaattccaaaatgatggcacgacagcagactgtgatttcagaggtggtgcaggtggtgccatcgatgaagcaactggaagcaaagctggaatggaaattgcagaacctcgttccccaaagtttgcatctgatgacgatgctcctgaggattcaaatcataaggatgagaataacacacagactatgagtggaacaccagttagacagtctgctaagaatgcatggaaaaccttgaaaaggtacacagacttatcttctggaggtgaatcgtctgacaataataatgaaactgatatatctgaagacttggatgataaggaggtggagagtccagaaattaaggacgagattgaaagcgaagatgtcaaacccgcagattcttcagcaatttccctctctagcaagaaggagcctcttgttcaggctactttgtctagcatgtttataagggcagaagaaaaaaagagatctacaaggagtcctaaagggtcccctgcaaccaaaggtgctgctgctaagaagcagcgagcaagtccaatggcaaaacagccagcagggatcaagaaggttagcggaactcggggaaagaaaaaaccaaaggtgggagaagatgaaatcgaagagctctcaagttcctcccaggataacgacgcagatgatgatagtgacgaggactgggccgaataatgcgttggtacatacggcagataggttggggaagcatatgcataattgatgtgcggctgaagagaaggatggattgggggatggcacagaagctgcctgtttttatggactggtttggctggtcatgtctgacgacggatctagaatatggaatatcctgatctgttgtcaagctgagtccatgaaacgttggttgatgaaacattagttagtcagaagcgggtttgtttgtagttaggaactaggaacacacacacccgaggttgtgatggggttgcatacttggactagccattcccattcatctgtctgtactctgttcgactgttcctttgtgtggctcacacctgttgtgtttctgatggtggtcatttctccagccaggggcaaagaacacactgcgtttcgctgatcctttaattcagacccctagtccttttaaatttcccgccc

SEQ ID NO: 266538 - DNA, 529 bp, Zea mays
gtctcgcctcgccaaggcaaggcttcctttcctctcccttcccgtccaagggggaagcagagtacccccaccagcaggcggccccctcttactccacgaccgccaccgtcttctggccgtacgcgactcgccgcagaaagagagccgaggacggcagcgacctctcgctggcgtcggatatggatctcgacgccgacgcgcagcgcgccgcagataagctgaaagcagtgtcagaggaacttggacatgagatccgggttttttcaagtgagaactttgctctacaaccgagcaagctgcctagtgcagatcatgaggaaggtgacgacttttatgagcttcagcctgctgattactacaacttgatttcaaacaggatgggagagctatctaaaatgctaaagactcgcaagatgcgggaagcagaacttgctgctcagcgagcaaagcgaacaaaggcagtaatgagggtgcgattccctgatggctacatacttgaggctgactctcttccatcagagaggattca

SEQ ID NO: 266539 - DNA, 538 bp, Zea mays
  unsure (1)..(538): unsure at all n locations
gttgttcagggtatgaatgcttctgaggcaaactctgatgtcaggcttgcagctacacgggcattgtataatgctttgggctttgctcaggttaatttctcgaatgacatggagcgtgactatatcatgagagtagtttgtgaagcgacacagtctccagatgtgaagataaggcaggctgcttttgagtgtttggtggctatctcgtctacttattatgataagctggcaacatacatgcgggatatatttaatataactgcaaaagctgtgaggggagatgaggagtcagttgcgctccaggctattgaattctggagttccatatgtgatgaggaaatcgacattctggatgagtacagcagtgaatttacagctgattccgatgttccttgctactactttatcaagcaggctcttcctgccttggtgcctatgttgttggaaactctcctcaagcaagaggaagaccaagacttggatgaaggtgcttggaatcttgcaatggctggnggaacttgtttgggcctggtggcaa

SEQ ID NO: 266540 - DNA, 1337 bp, Zea mays
tcggcacggcggcgtatggcacggacgacaaggactacaaggagcccgcgccggcgccgctcttggagcccggggagctcaagtcctgggccttctaccgcgccggcatggccgagttggtcgccaccttcctcttcctctacatctccatcctcatattgatgagaagctgtgctatcagattctgcacgagtacaaaattcacaatgctgaggtgttattccgtgaagatgctactgtggatgatctcattgacgttatcgaagggaaccggaagtacataaagtgcgtctacgtatataacaagatcgatgttgttggtatcgatgacgttgataatcttgctcggcaaccaaattcactagtgatcagctgcaatttgaagctgaacttggacagactacttgcgagaatgtgggaggagatgggcctagtgagggtgtatacaaagccacagggccagcagcctgatttcacagaccccgttgttctttccaccgacagaggtggctgcacggtggaggacttctgcaatcatatccatagaagtttgctcaaggacgtgaagtatgtgctcgtatggggaaccagcgcaaggcactatccacagcattgcggcctcggccatggccttaacgacgaggatgtcgtccagatagtaaagaagaaggaaaaggaggagggtgggcgaggccggttcaagtcgcacacgaacgcacctgaccggatatctgatagggtgaagaaagccccactgaagacataataataactggttccctgagcgcgtcgtgatcagcttctccaaaccagatggacaacacaagctcggtgggagatcataaaatctggaactagctgagccgcggcgtgctacttgttttgtagtaccagaacagaaggggccaccgccatgtttggagtactccaccttccacaatacctacaccaatgcggcaccaccatgaacactgctgcgtcttgctcgtatgatgtgggcttatcactgtgtgttacctgctatatatgatatgataaatacttgccaactcacggattctgcgtctgcttattagcagcagcctagcctttgttgtgggaaacatttgtgggtaccaacgcgagggcagtttgagaaaggtccgagcacacatcttgaatgtgatagattgaacatttgggaagagggcaccgctagttctagtgtctcctttatgggagggcaagggataagagatgatctaaataatattgttcattggatttgagtgagtgtagtgatgtaaaccgctagttttgatgatgtgtccagttcggctatatgtgtgtttgtggat

SEQ ID NO: 266541 - DNA, 1070 bp, Zea mays
  unsure (1)..(1070): unsure at all n locations
gtccagcatcggccgaactggtctatcggcgccgcccttcacgccgagagttccctctttctcgcttgcgcactcgcgtcgacgactgggctaccggcgcctccaccctccgcctggtgtccttcgccgtcgacgagcgcacaccagggtacagtacgtattgctcgtgatttgtgtaactacggagcaagctgcatacagcacaagatagaagatgggtatccttgagaggatcaaggagattgaggccgagatggctcggactcagaaaaataaagcaacagaatatcatcttggacaactgaaggcaaaactagcaaagttgaggacacaactattagagcctccaaagggttccagcggaggtggagatggttttgaagtcacaaagtttgggcatggtcgtgttgcacttattggatttcccagtgttggaaagtcaactcttttaacgatgttgactgggacacattctgaagctgcatcatatgagttcacaacgcttacttgcattcctggaattgttcattacaatgataccaaaatccagcttcttgatcttcctggtatcattgaaggagcttctgaaggcaaggggcgtggtaggcaggttattgctgttgcaaagtcatcagatcttgtgctgatggttctggatgcctcaaagagtgaaggacatcgtcaaatattaactagagaactggaagctgttggactccgtcttaacaaaaggcctccccagatatacttcaagaggaagaagacgggtgggatttctttcaataccactgttcctttgactcatattgatgagaagctgtgctatcagattctgcacgagtacaaaattcacaatgctgaggtgttattccgtgaagatgctactgtggatgatctcattgacgttatcgaagggaaccggaagtacataaagtgcgtctacgtatataacaagaccgatgttgttggtatcgatgacgttgataatcttgctggcaaccanattcactagtgatcagctgcaatttgaagctgaacttggacagactacttgcgagaatgtgggagga

SEQ ID NO: 266542 - DNA, 579 bp, Zea mays
ggaattcgacgcctcgactccaggcgtccggtcaggcgacgcgaccatacatctcacttcgccaaaaaaattccgtcaacagttgaagttatacccatggcaaaactactcttgggtttgctccttgcccttgctattctagggacaacatcggctgctggttgtgtacaagacgcggaagacatgaaacgagagtgcaagcagtttgagctattcccagcgaacccaaagttgccaccgtcggcagcatgttgtgctgtgtggaagagggcagatgttccatgcctatgcaaatatgttaacaaggaagtagagaaggtatggtgcatggagaaggttgtgtacgtcgccaactattgtaagaggccgtttcaacctggctacaagtgcgggagttatacagttcctcttagtatgtaaaaggagtggttgggacatgtggtactctctcctagaactttaatttgagatttgtaacatgtgagagactattgagaataatatgtatggagtaatatgcttccttcttttaaaatgatctaattacttccttaaaaaaaaaaaaaaaagggcggccgc

SEQ ID NO: 266543 - DNA, 946 bp, Zea mays
ctcattcgtccgcccacgcgtccgacggatcctatcggtctctcctctgtcctcttcagtctccacgccgttccagaagtcgccaaccttccctcgccgccgcgccgcaacagccgcctcccctccaaggtagtccaatcgaaaccactcgcccgaccaccatggcctttgccagctcgctgcttcccgtgccgccctcccgcgtctgcgcgacccccgcgtcggaggtcgccgccttctctccggccaagaagagcgtctcgctcgccgctgcgcgccagcgccgaggatcccgtcacggagtgagggcagaagtaaatgaatctggaagtgttttggctgttgatgcactctcgcaagttaaacatgttctgcttccagtccttgatcgcaacccttacctttctgaaggcacaagacaggctgcagcaacaaccgcttccctcgcaaagaagtatggagcagatattactgtagttgttattgacgataaaccaaaggagtctgtcccagagcatgatactcaaatgtcaagcattagatggcatctctcagaaggcggattttcggagtttagattgatggagcgtcttggggaagggcagaaaccaacagttatcatcggggaagttgctgatgagtgggacttagacctggttgtgctaagcatggaggcaatccactccaagcatgtcgatgggaatttgctcgctgaattcatcccttgccctgttctactgctcccgctctgacatagagctgatttgcatctgtcatgtttttttgagacaaatgatctgtttgtccttgaagatgtaactcccgcatgttccctggatacgaggggtttgcgtcagctgatgattctattatgttgatgcagtttttttcgaatttgtgtgcctgtgaatattgctaagaaaattatgttactcttttctttaac

SEQ ID NO: 266544 - DNA, 1212 bp, Zea mays
cccacgcgtccgccgtcgcgtgggcgcacgcaccatcgtcctgccgatcgatcgcagccagccagtcttgctgagagacgaactgaagcctgaagtgaaccgatcgatcgatcgatcgagcgagcgagctcccatgaaggcgttgattctggcggcggtgctgctgctgcagcacgggggagccgcgagcgccggcggcaacttctaccaggacgtggacatcacctggggcgacggccgcggcaagatcctcgacaacggccagctcctgacgctgtccatggacaggtcctccggctcgggcttccagtccaaggcccagtacctctacggccgcttcgacatgcagctcaagctcgtcccgggggactccgccggcaccgtcgccaccttctatctttcgtcgcagggttcgcagcacgacgagatcgacttcgagttcctggggaacgcgagcggggagccgtacacggtgcacacgaacgtgtacagccaggggaagggcgggcgggagcagcagttccggatgtggttcgaccccacggcggccttccacgcctactccgtgctgtggaaccccgcccacgtcgtcttctacgtggacggcgtccccatccgggagttccggcgccgcggcgacgggaccgtgccgttcccgacgtcgcagccgatgcgggtgtacgccagcgtgtgggacgcggaggagtgggccacgcaggggggccgcgtccggaccgactggtccagggcgcccttcgtcgcgtcgtaccgcgggtacgccgccgccgggtgcaccgcgccggacgccgccgcctgcgcgcgctccaacggcgcatggatgtcgcaggagctcgacagcgccgcccaggagcagctccgccgggcgcaggccagctacatgatctacaactactgcaccgataagtaccggttcccgcagggcccgccgcccgagtgctcgtcgccggccaagtagtagatgagtagaattgatcggatacagagagcaatcaattaattaaatcgacccgtcgcttggtttttggtttacacattgtactacggcataagttcggcggatatatgtatacgtagacggctagacgccatgcatgtgtcttggcatgtatcgtattcgtatatatcgtaattcgtatgtaccccagtatacctgcatcgtacatttacatgcatatatatccccctatatat

SEQ ID NO: 266545 - DNA, 451 bp, Zea mays
cggacgcttgggcgcgcacgcaccatcgtcctgccgatcgatcgcagtcagccagtcttgctgagagacgaactgaagccggaagtgaaccgatcgatcgatcgagcgagcgagcgagctcccatgaagacgttggttctggtggcggtgctgctgctgctgctgcaccaccagcacgggggagcacgcgagcgcccgcggcaacttctaccaggacgtggacatcacctggggcgacggccgcggccagatcctcgacaacggccagctcctgacgctgtgcatgaacaggtccttcgggtcgggcttacacgccaagggccagtacctctatggccgattagacatgcagctcaagctcgtccgggcggacttcggcggctgcgtggacaccttttatatctcgccggagggcatcgagcacgacaagatcgacttccagttcctgggg

SEQ ID NO: 266546 - DNA, 384 bp, Zea mays
gcacgcggcggtggagagcgcgtcgtccacgtcgtcgtgcgtcaccgacgcctccgggaccatcggccaggacgatgacggcgacgaagggatcagtggcagctgcagcgtcgcctgctctaattgagaccgactagaacaaacaagagttggctagcccgcccgtcgaccaaatcacgggcgccgtgtcctaattgccgtagcaccctctcagtctcagtccctagtagcaatcaatagagagtagaagcttgagctccaacaaaccgacaacaacatcataaaaaggctaagcgctttgctgccatgttatgttgttgctggagctcgtcgcgaatccagagtgttaattagcgagagaatcaatcagatcccttccagcgc

SEQ ID NO: 266547 - DNA, 460 bp, Zea mays
gccgttccaggttctgatggtgataggcatgctttacctgcttcgacatcgccggtggggcagcaggatgccctccgtgcctttcaacttctacagaagactgcctgccaggtccgatatgctcctttgagaccaccagtattcggcgtgagagaatcgggtgcaagtctttacttatttatgtctgttctgctcggttccttctgattagtatcagatcagatgtgaatataccggatgagttcgtatattagacgtcatttagtgtcccaggattccaggaataaggcgttggcttaatggttcatttccttctgagtctctgggatagtgaggggaggctcttgggtgcagaaatgtaatgttaactccgggctattagcatagaactaatggcaggaacaatattatcccccgtgtattatgtttgtactatttgtgtccattttgtttgtgtttc

SEQ ID NO: 266548 - DNA, 893 bp, Zea mays
aggtccccgtcgcctccgctcaactgccgccgcagggcccgctgcaggcttccatgtggggtagggcccggtgtaccctcagcccggccgaggttgccagggccttcggcttccccaccacctccgccaacgcgggcggcggtggagacggccccgctgtgccgacgctccatcttaaccggttccggccgtcgtacaatgtgttgcctggggcgtacctgcctgtgggcgccatgcgggcactaccaggttgcgcccacggaggaggaggttcggatggggaggggccggtgatccagtgcatgaagtgggggctggtgcccagcttcaccggcaaggccgagaaacccgactatttcaggatgttcaatgccagatcagagtccgtaaaagaaaaggtttcattccgtcgactaattcaaaaaaataggtgccttgttgcagtagaagggttttatgagtggaaaaagaatggatcagagagacagccatactacatacatttccaagatcataggcctcttgtctttgcagccttgtatgatgcatggacaaattcagaaggagagatcacccatacattcactattttgactacacatgcctcaacttctctaaattggcttcatgatagaatgcctgttatcttaggcagtaaggactatgttgatgcttggttaaatgatgtttctgtaaaacttgaagaaattactgcaccttacgaaggagctgatctggtttggtatccagtgacatccgcattgggtaaagcatcatttgatggacctgagtgcatcaaagaggtacatatcggagctactgataagcctatttcaaaattcttcaccaagaaatcgactgcctacgatctatcagggaagtatgagaatatg

SEQ ID NO: 266549 - DNA, 761 bp, Zea mays
gtggatgatggtagtccagatggaactcaggacattgtaaatcagctgcagcaagtatatggtgaagatttggttttagtgcgagctaggccaaggaagctagggcttggtaccgcatatttacatggactaaagcatgcctcaggggaatttgtcattatcatggacgcggacctatctcaccatccaaaatacttgccaagctttattaggaagcataaggaaactggagctgacattgtaactggcacacgttatgttaagaatggtggtgtccatggttggaatctcatgcgcaagctgactagcagaggtgcaaatgttcttgcacaaacgttactgcagcctggagcttcagatttaaccggatcatttaggctatataagcgagatgtcctggaagacttaatctcctcatgtgtcagcaagggctacgtgttccagatggagatgattgttagggctacaaggaaaggttatcacattgaagaggttccaataacgtttgtggacagagtattttggaatttcaaaaccttggcgggtccgagatagttgaatatttcaaaggccttgtttatcttctgctcccaacatgattgaagatatatagtaggcttctggtttgtgggtacaaccgtgttacattacaaagaattttactgatgtgttattaatccagcttgaattgtaacagtaccaccattacgcatgtttccagtggatggattattgtactcaattcttggttttctctgtcc

SEQ ID NO: 266550 - DNA, 486 bp, Zea mays
cccacgcgtccgcccacgcgtccgcccacgcgtccgcacaaacccatcgcagggcattctcgagcatagcttctctgcctctctctcccctcctctcctctcgtccactcctttgtccaaagcttcgagatggctcagcagcagaaggtggtggtcagggttccaaccatgacagatgacaagatcaagcagaaggccatcgaagctgttgcggacatttacggtattgactccatagcagcggatctgaaggagaacaagatgaccatcataggcgagatggatgcagtagcgattgccaagaagttaaagaagattggaaagattgacattgtgtctgttggacctgcaaaagaagaaaagaaggaagaaaagaaagaggagaaaaaggaggaaaagaaagaagagaagaaagaggagaagaaagaagagaagaacgaagacaagaaagaagaaaagaagtgataaacctattaaacatatata

SEQ ID NO: 266551 - DNA, 1444 bp, Zea mays
gtccccatggaccagcggcacatgggctcgctgactcgtgagtttgtgacagtggttttctctgtgccgccttttgcaggggaagggggtctgggttgcgtacaggcgaaaggcacgcgccgccgctgccgcgcgagcctctccgtccccatcgccgcgcagatggatccgtcgtcggagcccctgtacgcgcaggtcgagccgtacgactccgggttcctcaaggtctccgatgtccacaccatctactacgagcagtccgggaacccgcagggccatgcggccgtgtttctccacggcggtcccggagccggcacgtcgcccggcaacaggaggttctttgacccgcagttctacaggatcgttctgtttgaccagaggggtgcaggcagaagcactccccatgcttgtttagagcagaacactacttgggacttggtagctgacattgagaagctcagggagcatcttggcatccctgaatggcaggtgtttggtggttcatggggaagcaccttggcacttgcctacagccaggagcaccctgataaggtcactggccttgttctgagaggaattttcttgcttaggaaaaaggagtttgattggttctatgagggtggtgcagcagccattttcccagatgcatgggaaccatttagagattttattcctgaggatgaaaggaattgtttcgtagatgcttataacaaaaggttaacttcctctgatcctattgttcaggttgaagctgctaagcgctggacgatgtgggagatgatgactgcgcaacttatccaaaacaatgataacattaaacgaggagaagatgatgaattttcactggcatttgcaaggattgaaaaccactactttgtgaataagggatttttaccctcggactcattcctattggacaatgttgataagatccgacatattaaaggttttattgtacagggacgttatgatgtttgttgccctatgatgtctgcttgggatcttcataaggcttggcctgaagcagaattcaaggtggtagcagatgcagggcactcggccaatgaagttggcatcgctgccgaactgaggtcagccaccgataaactgagagacttgctgcgcaaatgagccggcgaaaggcaacctgcacctctatctgatcatggaactcagaggcccataataattacatagctgtgtaacggttagcactgtgccgttaaacaatgtcattgtcaccatcgatatgttgtttgtttgctcgctggagtgtatgaggaattgaagtttcaagacgggaccagaatgggtggggcgtgtttggtttgcgtttttagacctggtctgtctagccagctatgccagggcaacacaccctggctctcacctagatcctgtttggttgcttgtttgctcgaatacagtcctaactcattgaggc

SEQ ID NO: 266552 - DNA, 584 bp, Zea mays
cccacgcgtccgcggacgcgtgggttgcaataactgtgctgctaggcacccactccccagtcaaggcatatccattccatggatctcgcgcccctgctccttctctcccagctgctgctgcttccggtggtggcggttgtctccggcgagaccgccgcgcacccgggctacacgcacgctgaggaggcatgcagcggtgtgctagaggcagaggcggagaaagcaacggtgctggtgcctgcgccagagcggcgcgaagagttcgacggcgggcggatcgtggacatcagccactactaccgcgaggacatgccggagtgggagtcatcagagggctccggcgagttcctgcagctggcgcggtccatgcgcaacggctccgacatcgctaacttctcggagctccggctcactgcgcactccggcacccacgtcgacgcgccgggacacgtcttcgagcactactacgacaccggcttcgacgtcgacaccctcgacctcgctgtcctcaacgagttgaaacggtgtgcaggaccagcgctgttggttgacgttcctagagataagaacatcacagctgatgt

SEQ ID NO: 266553 - DNA, 388 bp, Zea mays
tgatacgaaaaaattgtatttattaattttgaaagtaataaattcgaaatatcaataataattacattgcttgttttgttgttgtgtaattgttgtcggtaacgcgccacatagtataatatcgttgccaaaatatgttttgaaatggacaagcttgcaccgtaagccagtactcttcttcgagaagccatagcctagcttcccttgcacgacaagcgcatggcttctatctgaagcgtacttcctctataaataccaagtgagccttccatacttcactcaaccttgcctttacaaactccacaaccatgaatccctacttagaaaacaattttcttgtgcgcttgatggaagaaatggaagaggtagaagaagagttgcagttggc

SEQ ID NO: 266554 - DNA, 369 bp, Zea mays
cgatcggccgcactgaaatgatcagagtgagtcccctcctcctcgcccgcccgctccgtgttcattgccccactccctcacgcctctcgcgcccgccgctccaccacccccatccacgctcagggaaagggggtctgggttgcgtacaggcgaaaggcacgcgccgccgctgccgcgcgagcctctccgtccccatcgccgcgcagatggatccgtcgtcggagcccctgtacgcgcaggtcgagccgtacgactccgggttcctcaaggtctccgatgtccacaccatctactacgagcagtccgggaacccgcagggccatgcggcggtgtttctcacggcgtccggagccggcacgtcgccggcaa

SEQ ID NO: 266555 - DNA, 817 bp, Zea mays
  unsure (1)..(817): unsure at all n locations
ccggnccggaaaacccggggggaccgacgcgtccgggcatatccattccatggatctcgcgtccctgctcctctcccagctgctgctgcttccgggggtaacggatgtctgcggcgagaccgccacgcacccgggctacgcgcacgctgaggaggcatgcatcggtatgctagaggcagaggcggagaaagcaacggtgctgatgcctgcgccggagcggcgcgaagagttcgacggcgggcggatcgtggacatcagccactactaccgtgaggacatgccggagtgggagtcatcacagggctccggcgagttcctgcagctggcgcggtccatgcgcaacggctccgacatcgctaacttctcggagctccggctcactgcgcactccggcacccacgtcgacgcgccgggacacgtcttcgagcactactacgacaccggcttcgacgtcgacaccctcgacctcgctgtcctcaacggaccagcgctgttggttgacgttcccagagataagaacatcacagctgatgttatggcatccctaaacattcctaaaggtgttcgacgtgtactctttcggaccctaaatacagacagtataatatcgttggcaaaatatgttttcaaatggacaagcttgcaccgtaagcccgtactctttttcgagaagccatagcctagcttctcttgcacgagaagcgcatggcttctaccgaagcgtactttctctataaataccaaaaatggaagaggaagaagaagagttgcagttggcgaggcacatggtcaataggaggcgacgtgtacgcaatga

SEQ ID NO: 266556 - DNA, 1178 bp, Zea mays
gaaagcttatgtggaagaaagaatttgatacaagttatgttggcttcatgaaggatggtgcacaatggttggttgataatacagacatcaaactagttggagttgactacttgtcagtgggcgcatttgatgaatgcattccagctcatctagtatttcttgaaaaaagggaggtcatacttgtcgaagccttgaatctggagcatgttagccctggaatatacatcttgcattgcttgccactaagattgcggggtgctgaaggttctcctgcaagatgcatcctcatcaagtgacatgggatggtgtgaggacccaataatatggagctgggctagtactgatccaatcgacactaatatgagctgaagatactacataaaacatgaacaatatggagttttatatactggaccccagtccaggttttaaatccacccctgcaaggggtgagtttatgtttgtgtttgggagtgtatatttctatattgcagtttgaaaaaaatactatgtatgtaataaaataagaatacatcaattcattcacatgacccttgaactaattaatattggacaatgttgaataagatccgacatattaaaggttttattgtacagggacgctatgatgtttgttgccctatgatgtctgcttgggatcttcataaggcttggcctgaagcagaattcaagagtttggagctgcaggtgatgaatttcagttggatgaagatcttctttaggtggtagcagatgcagggcactcggccaatgaagttggcatcgctgccgaactgaggtcagccaccgataaactgagagacttgctgcgcaaatgagccggcgaaaggcaacctgcacctctatctgatcatggaactcagaggcccataataattacatagctgtgtaacggttagcactgtgccgttaaacaatgtcattgtcaccatcgatatgttgtttgtttgctcgctggagtgtatgaggaattgaagtttcaagacgggaccagaatgggtggggcgggtttggtttgcgtttttagacctggtctgtctagccagctatgccaggctgttgcttgcaaaaaaaaataaaaaaaaaaaaaaaaggaacataaaaacaaaagcaacatcaaataaaaggaaaaagcaaatacaaagaacatatcaagc

SEQ ID NO: 266557 - DNA, 431 bp, Zea mays
catcttgcattgcttgccactaagattgcggggtgctgaaggttctcctgcaagatgcatcctcatcaagtgacatggttataaccatcccaaaaagcattgtgcaatcaatcttgaaacctacctattcagtcttttcgaagtgcttatagaagtatggttttcatgtgtgtgtttatagggatggtgtgaggacccaataatatggagctgggctagtactgatccaatcgacactaatatgagctgaagatactacataaaacatgaacaatatggagttttatatactggaccccagtccaggttttaaatccacccctgcaaggggtgagtttatgtttgtgtttgggagtgtatatttctatattgcagtttgaaaaaaaaactatgtatgtaatccaataagaatacatcaattcattcacatg

SEQ ID NO: 266558 - DNA, 1711 bp, Zea mays
ggcgatggaattcagccatactctggtaaattaggttctgatgatattggcaaagttgatatggcttacagagtagtagctgaccacataagaaccctttctttcgctattgctgatggttctcaacctggtaatgagggaagagagtatgttctgaggcgcatacttaggcgagctgttcactttggtcatcagaaattgaaggcaaagcaaagtttttttagctcgcttgtaaatgtttttgtccaactgatgggtgatgtatttcccgagtttaaagacacaccgaaaggagatccaatgtgttatttgagatgaagaagaaagctttgagaacactctagcaaagggttatgaaaaatttaagaaagctgcagacgctgttaaggataatggtggaactatacttagtggacaggatgcatttattctttgggacacttatggttatccaattgatttgactgaggtcatggcaatcgactatgggctaactgttgataagaaggggtttaatgcttctatggaagaagcgaggcaaaaagctagaaatgctcgtaacaagtctggagggaactctattgctatggatgcgaatgctacagcgcagttgcgcaaactggggcttgccagcacggacgatagcccaaagtttctgtggcccaaggaacatgaaagcgtggtgaaggctatctatactggctcagaatacattactacagctactggtgatggggactttggtcttgtgctggaaagtacaagtttctatgctgaacaaggaggccagatatttgacactgggagcattgaggggtcatttggaactttcaatgtgaacaacgtccaagtgtttgctggctatgttctacatattggctcatttacaaaaggttcgaaggttttgtctcttggagatagtgtgatatgcaaggttgattacaaccggcgcacactgattgctccaaatcatacgtgtacccacatgttgaactttgctctaagggaagtacttggtgatcatgttgaccagaagggttcaattgttctaccagagaagctaagatttgatttctctcatggaaaacctgtccagcctgaagatctgaggaaaatcgagttcatagtgaaccagcaaataaaggacgagctgggtgtgtatgcacttgaaataaaactagaggatgcgaagcgcataaatggtcttcgtgctgtgtttggtgaaatctaccctgatccagtaagagttgtatcagttggtcgcaaagttgaagatctgcttgcagatcctgatagcaaagagtggctatccatatcgactgaactatgtggaggtacacatatcacaaacacaagagatgctaaagcatttgcactcttatctgaggagggtattgcaaaaggagttaggaggataacagccgtgactgctggatgtgccacccaggctatggagttggcgtcatctatcgattctgatatcaataaagcatctcagttggagggagctttgttggaaaagaaaattgcttccatcaagagtgggctggatgcagctgctatccctgctgcgagaaaagctgatttgagaggcaaggtttcaaagttagaggacgaacttaggaaggcaaagaagaaaatgggggagcaaaatatacaaaaggctgtgaagtccgcaatggatgctgcagaagctgctctttcaggaaat

SEQ ID NO: 266559 - DNA, 925 bp, Zea mays
gacgagctcggcttcggcgtgagccagcgtcgtacggctcatccgccccgtcctcggtcgctatttctctccatttcccttgcccctaccgtcgcggaggaagacaagacgcgcgcgcagaagcacacctgctcgggctggattaggaggacagcttcttcggccggcgacatggcggaggagaagggcgcgttgcagtcggcgagggagtgggtggtcgaccacaagctccgggccgtcgggacgctgtggctcagcggcatcgtcggctccatcgcctacaactggtccaggccgggcatgaagaccagcgtcaagatcatccacgccaggctgcatgctcaggctctcacgctggctgccttggctgggtccgcgctggtggagtactacgaccaccagcaagggtcaggatcgaaagttcaccaatatgcaaagcagttcctttcatctgatagcaatagcggccaacaaaaggagtagctagctagtgtccttgcgaagtgcaagcagcggagtgggcgttatttcctgatcaaataattttgcctatggcacattctgtggaaactttgacggatctttgcctgcttttctatgcgatgtaagctgctgaaacctgcactcatcaaatgttgtgtatgcagatggtaccatgcatttgtttccctgaatggcttcaaatgaaatgaatgttttttttaaaaatataaactgaactatgtggaagtacacatatcacaaacacaagagatgctaaagcatttgcactcttatctgacgagggtattgcaaaaggagttaggaggataacagtcgtgactgctggatgtgccacccaggctatggagttggcataatctatcgattctgatatcaataaagcatcttagttggagggagctttgtttgaaaagaaaattgc

SEQ ID NO: 266560 - DNA, 532 bp, Zea mays
tggcttggaacctttgggctgatttatgtgcttgaccacaccgcattcaagcaccatccggtgctttacgaacttgccgcaaacactaagccacaaccctcatcactcctgcctctaaaaaaaaaaaaaaagggtggttgtctcagaggacttaagtccatgcatgtgcgtacgtgatgctacagtctcctcacagcgctattcaaacctaacctatcggttgctgccccataatgctgcgatcgggaaaatttcggtgccatttaatccaactgttccgtagtatactttttccctgttagtcggtgcaacagtgaagaggtttgtattgactgtttcctttaatagccgtgtagttcgaacggtgaacgggatgtgtttcgcagtggtgtaccaagtgtggtgggcgcggcggccatgtgtagtgcgattgtcatatccgttagtgtttcagtgtttgtcttccctgtccctcctttccatccctctgttatgcctgttggtcccttttgctaagtctcaaaactggggt

SEQ ID NO: 266561 - DNA, 676 bp, Zea mays
tggcttggaacctttgggctgatttatgtgcttggtggcggtggagacgcattcgtcgggtacgattgataagactgctattagtggtcggctgatgcctggtcatgctgggtatggttctggtgggtctatgttgcggactacgcctaggttcgagaattatattatgttccatttgttgcgttgttgggttaagcttacggagttgcgtacgtatgggttgttgcctcatgatcgtagggttaagtatggtgttgatatggggaagtcggcgttgtatgcttagtatcgtgaagatacgagtcgggggtctaaatccgcttactttgagcgaaatagtaccaacaacgaaaagaacactcccacacccacaacggcctgaaaaaaaaaaaaaaaaagggggtggttgtctcagaggacttaagtccatgcatgtgcgtacgtgatgctacagtctcctcacagcgctattcaaacctaacctaacggttgctgccccaaaatgctgcgatcgggaaaatttcggtgccatttaatccaactgttccgtaataaaacttttccctgttagtcggtgcaacagttaaaaggtttggattgaatgtttcccttaatagccgtgtaattcgaacggttaacgggatgtgtttcgcaatggtgtaccaagtgtggtggg

SEQ ID NO: 266562 - DNA, 494 bp, Zea mays
tttgggctgatttatgtgcttgcgagaaagttatctgcctcctccaaaaaaaaaccccaaaaaaaaaaaaaaaacaaaaaaaaagaggagaaaccaaaaaagggggtggttggctcagaggacttaagtccatgcatgtgcgtacgtgatcctacagtctcctcacagcgctattcaaacctaacctatcggttgctgccccataatgctccgatcgggaaaatttcggtgccatttaatccaactgttccctagtatacttttcccctgtatagtcggtgcaacagtgaagaggttatgtattgactgtttcctttaatagccgtgtagttccaacggtgaacgggatgtgtttcgcagtggtgtaccaagtgtggtgggccgcggcggccatgtgtagtgcgattgccatatccgttagtgtttccagtgtttggcttccctgtccctcctttccttccctcggttatgcctgttgggcccttttgctaagt

SEQ ID NO: 266563 - DNA, 447 bp, Zea mays
aacctttgggctgatttatgtgcttgtttatcgtgcatgagtcgatgcgggtggagctgtccggccatcgacgttctgagcaaaccgggttaggatttacagagtaaccgttattttaacgccccgaacaaaaaaagaaatcttaatctgacctacagacctctatctagaatcgtcgtatgctgtagcgtaggtgcgccgtcggtcctgtttagtcctcccccccgttcgcgacccgtatgatacccacacccaccgaaactccgtagaactgtccgatgacgaacaaaaaaaaaaaaaaaaaaacaaaaaaaaaaaaagggtggttgtctcagaggacttaagtccatgcatgtgcgtacgtcatgctacagtctcctcacagcgctattcaaacctaacctatcggttgctgccccataatgcctgcgatcgggaaaatttttt

SEQ ID NO: 266564 - DNA, 438 bp, Zea mays
tggcctggaacctttgggctgatttatgtgcttgtttatgtgcttgtttatgtgcttgcttatctgcttgtttatgtgctcgtgtttgtgcgcgcggcctcagactgtgagtgcctgtctcagaggacttaagtccatgcatgtgcgtacgtgatgctacagtctcctcacagcgctattcaaacctaacctatcggttgctgccccataatgctgcgatcgggaaaatttcggtgccatttaatccaactgttccgtagtatactttttccctgttagtcggtgcaacagtgaagaggtttgtattgactgtttcctttaatagccgtgtagttcgaacggtgaacgggatgtgtttcgcagtggtgtaccaagtgtggtgggcgcggcggccatgtgtagtgcgattgtcatatccgttagtgtttcagtgtttgt

SEQ ID NO: 266565 - DNA, 480 bp, Zea mays
ggtccgaacctttgggctgatttatgtgcttggtacgttatttctgcggtttaccttgctgactgctgtcgccgacgtccgcgctccttcacgcggcacagcagtcacgtcaccaccggcttggcgcctcgtagccaacgcggtcctccccaatcagagagacaaagggtggtgtgtctcagaggacttaagtccatgcatgtgcgtacgtgatgctacagtctcctcacagcgctattcaaaccgaacctatcggttgctgccccataatgctgcgatcgggaaaatttcggtgccatttaatccaactgttccgtagtatactttttccctgttagtcggtgcaacagtgaagaggtttgtattgactgtttcccttaatagccgtctagttcgaacggtgaacgggatgtgtttcgcagtggtgtaccaagtgtggtcggcgcggcggccatgtgtagtgcgattgccatatccgtt

SEQ ID NO: 266566 - DNA, 381 bp, Zea mays
acctttgggctgatttatgtgcttgggtaaaaaaaaaaaaaaaaaaaaaaaacccaaacaaaaaaaaaaaaaaaaaaaaaaaaagggaagagagaaaaaaaaaaaaaaaaaaaaaaaaaaaaaaaaaaaaggggtggttgccccaaaggacttaagcccatccatgtgcgtccgtaatgctacagtcccctcacagggctattcaaacctaacctatcggttgctgccccataatgctgcgatcgggaaaatttcggtgccatttaatccaactgttccgtagaatacttttcccctgttagccggtgcaacagtaaaaaggtttgaattgactgttccctttaatagccgtttagttcgaacggtaaacgggattttttt

SEQ ID NO: 266567 - DNA, 612 bp, Zea mays
  unsure (1)..(612): unsure at all n locations
ggtttggcggccccggtggcagcggtcgtcgtcgacttcttcgggaccccgctcctcgacgtcgcccacgacctcgccgtgccagcctacgtgtacttcgcgtccaccggcgccatgctcgcgctcatgctgcgtttaccgggcattcaggaggagctggcttccaggttgcgggaggagggaggggtcgttgacgtgccagggatgcctccggtgccggtggcctctatgccgtcaccggacgtgaacggctacacgtggttcgcgtactacggccgccgcttcctggaaaccagaggcatcatcgctaacacggcagccgagctggagccaggcgttcttgcgtccatcgccggcggcaggtgcacgcctggcgggcgtgctccaacggtgtacccaatcggcccggtgctctcgccgaagccgcgcgtcgtcgtcgatgctcggtcgtcgtcgtctgcgcaagagtgcatccggtggctcgacgcgcagccgccggcgtccgtcgtgttcctctgcttcgggagcatggggtggatgaacgcggagcaggcgcgcgaggtggccgncggcctcgagcgcagcgggcacaggttcctgtgggtgctgcgc

SEQ ID NO: 266568 - DNA, 1393 bp, Zea mays
aatccagctctcccagcgcgctgctcgactcgactcgacttcctctgcaacgcgtgtccggtgtaggctgagagagtgagtgagaggcgagatgaggagcgggcggctggcggtggcggtggcggtggctctggcgtgggcgttcgcggcgtcggcggcggcggccgcgcagaagtacaatgccatcttcaacttcggcgactccatcaccgacaccgggaacctctgcaccaacgggaggccgtcgcagatcaccttcacgcagccgccctacggcgagacctacttcggcacgccgacgtgccgctgcagcgacggccgcgtcatcccggacttcctctgctccacgttcggcctgccgttcctgccgccgtccaagtccacgacggccgacttcaaggagggcgccaacatggccatcaccggcgccacggccatggacgcgcccttcttccgctcgctcgggctctccgacaagatctggaacaacgggcccatcagcttccagctgcagtggttccagcaggtcacctccgccgtgtgcgggcaggactgcaagagctacctggccaactcgctgttcgtgttcggcgagttcgggggcaacgactacaacgccatgctgttcggcaactacaacgcggaccaggccagcacgtacacgccgcagatcgtgagcgccatcgcggccggcgtggagaagctgctggccatgggcgccacggacgtggtggtgccgggggtgctccccatcggctgcttccccatctacctcaccgtctacggcacctccaacagcgccgactacgacgcgctcggctgcctcaagaagttcaacgacctctccaccaaccacaacgcccagctgcaggcccagatctccgccctccaggccaagtacaagtcggcgcgcatcatgtacgccgacttctactccgccgtctacgacatggtcaagaaccccggcagctacgggttcagctcggtgttccaggcgtgctgcggctcggggggcggcaagtacaactaccagaacagcgcgcggtgcggcatgtcgggcgcgtccgcgtgctccagcccggcgtcgcacctcagctgggacggcatccacctcaccgaggccgcctacaagcagatcaccgacggctggctcaacgggccctactgccgccccgccatcctccacagctaagctaagcgaggggagggcgattaattgttattaattttttattgttgccatgttatttatacctgtgtttacgttgccgggaaaaaagtgtcccggcagccgcatgaatgtgttccctcttgtaatttgttatactggtggtcttcatttacaaatcaaatggtatagatttttcatggaaaaaaatattaagtcattttt

SEQ ID NO: 266569 - DNA, 390 bp, Zea mays
  unsure (1)..(390): unsure at all n locations
cccggggggggccacgccncccggcaaaacctcttattttaactgctctgagtgatgctgaaaccgaaacagcacactccgtgattaaaatccggtgctgggccaaccctttattaatttaagctgtccagctagcgccgcaagcaacatgatggatggtccagatctccggcctccaggccaagtacaagtcggcgcgcatcatgtaccccgacttctactccgccgtctacgacatggtcaagaatccaggcagctacggggtcagcacggcgttccagacgtgctgccggtccggaggcggcaagtacaactaccagaacagcgcgcggtgcggcatgccgggcgccttcgcgtgctccaacccggcggcgcacctcagctgggacg

SEQ ID NO: 266570 - DNA, 707 bp, Zea mays
cggacgcgtgggacttcttgagcacccagttcgggctgccgttcctgccgccgtccaagtcgagcagcgcggacttcaggcagggcgccaacaactgcgatcacgggcgccacggccatggacgcccccttcttccgctcgctcgggctctccgacaagatctggaacaacgggcccatcagctttcagctgcagtggttccagcagatcgccacctccgtctgcggacagagctgcaagagctacctgggcaactccctgttcgtgttcggcgagttcggcggcaacgactacaacgccatgatcttcggcggctactccatcgagcaggccaggaaatacgtccccaagatcgtcaacaccatctcgaggggcatcgataaactgatcggcatgggcgcgaccgacatcgtcgtccccggggtgcttcccatcgggtgcttccccatctatctgaccatctaccagagctccaacggcagcgactacgacagtctcggctgcctcaacagcttcaacgacctgtccacgtaccacaacgccctgctccagaagagggtggacgtcatccagagccggcacaggaagacggcgcgcatcatgtacgccgacttctactccgccgtctacgacatggtccgcaacccacatagctacggcttcagctcggcatggcgggctgcactgcgtgcttagcactgagtcgc

SEQ ID NO: 266571 - DNA, 354 bp, Zea mays
ggccatcaccggcgcgactgccatggacgcgcccttcttccgctcgctggggctctccgacaagatctggaacaacgggcccatcagcttccagctggagtggttccagcaggtcgcgtccgccgtgtgcggcgtggggcaggcgcactggccgactgcaagagctacctggccaactccctgttcgtgttcggcgagttcggcggcaacgactacaacgccatgctgttcggcaactacagcgcggaccaggccagcacgtacacgccgcaggtcgtggccgccgtcgccagcggcgtcgagaagctggtggccatgggcgccaccgacatcgtggtgcccggcgtgctcccc

SEQ ID NO: 266572 - DNA, 310 bp, Zea mays
cccacgcgtccggcgcactgctggactccaactcgactgctctgcgtagcggagtaggctgatcagaggcgagatatgaggaccggccggcggatggcggcagctctggtggcgctggcgtgggcgctcgcggctgtggctgtggcggcggcgcagaagtacaatgccatcttcaacctcggcgactccatcaccgacacggggaacctctgcaccagcgtgaggccgtcgcagatcaccttcacgcagccgccctacggcgagacctacttcggcacgccgacgtgccgatgctgcgcggccgcgtgat

SEQ ID NO: 266573 - DNA, 487 bp, Zea mays
gccggtccggaattgccgggtcgactcaagcgtcgcggtacgaccacgcgtccgctcttgtcgaggtacgatgtacctggcactcgagtatcatgcatcagactgttggtcgtctattcaaaagtggactaggtagattcgggcttggacagtctaaaccagccttcggtgatcaatctgttcttatcatttttgttcttggaggtattaatactcttgaggtccgggaagtcatgacagcgatatcggagagcagcagaccagatgtggagcttattctgggtgggacaacccttcttaccccagacgacatgtttgagttgatgttgggatcgtcaagctttgcttaggctcaaccttcactcttgagtcatgtgcgggacttggaaagaaatcggagcatatttttttcttattcttcagaatagttacttgtctgatgtagcagaagcattcagacttggaagaggatactaccagaagaaag

SEQ ID NO: 266574 - DNA, 504 bp, Zea mays
gtgaaggtctagcagcattaagtagattcgagactgacggttactcgaggaaatgcttgctttataagttactattagctctcttgtcgaggtacgatgtacctggcctcgagtatcattcatcaactgttggtcgtctattcaaaagtggactaggtagattcgggcttggacagtctaaaccagccttcggtgatcaatctgttcttatcatttttgttcttggaggtattaatactcttgaggtccgggaagtcatgacagcgatctcggagagcagcagaccggatgtggagcttattctgggtgggacaacccttcttaccccagacgacatgtttgagttgatgttgggatcgtcaagctttgtttaggctcaaccttcactcttgagtcatgtgcgggacttggaaagaaatcggagcatattttcttcttattctccagaatagttacttgtctgatgtagcagaagcattcagactcggaagaggatactaccag

SEQ ID NO: 266575 - DNA, 1432 bp, Zea mays
acgataggctcggtcagcccaccccagacctttccctttccgtccccggccggcgccaacgccactccagtgagccgagggcggagacggtcacggtgggcagagtgacacgccgcacgcctctccgccccgctccgctccagattgcgcgcacccacccatggcgctcgccgcttcccaccacggcctcctgcccttcgcccccgctgccacgcctaccccgtcacgggggcacctgcgcttccgcgccgcgcgccctctgccccgccccgcccggagaatttgttgccaatctatcaactcagctaatgtgttgggagcttcttcaacgacatctgatgaggcagtcccagtcccagttgtccagatagatcaggactcagaccgtgatgcgaccattgtgcagctaagttttggagatcgtttgggggcgctacttgacacgatgaaagcactcaaggaccttggccttgatgtcacaaaaggaagtgtgacaactgactcagctgtcacacaaacaaagttccacatcatgcgatttgggcgcaaggttgaggaccctgacatgttagaaaggattcggctaaccatcatcaacaacctgctccagtatcatcctgaatcaagtgagaagttggcaatgggtgaattttttgggataaaacctcctgtgaagaaggttgatatcgatattgcaacacatatagttgttgaagacgacgggccaaaaagaagcatgctttacatagagacagccgatcggcctggcctacttcttgagataatcaagatcatcgcggacacaaatattgatgtggaatcagctgagattgatactgaaggtttggttgcgaaggacaagtttcatgtaagttacagaggtggaaaactaaacagctccttatctcaggcgctgaccaattgcctgcgttattacctccgaaggcctgagacagatgaagacagctattgattgttgtgtttgtcgaaccttcctatagtgcattagaatcagaaactttggcttcagttccttcgctatgggccccttgtactgctgcaaatggagttttccattgtagctgataaagtgccgacaaggtgcatccatatgtgcataggtggcattgaatcggggctcactgaaccagtttgatattgtagtcatatacagctgggagcaacagaagttaggtgtcgatcatcattatcccatttggttcctgttacaagggatcacattggaaggtcatcacatgattgacattgtctgtaagttggtacaatccgtttgcatgtaaaactcagctgtggagtgtggtgttctctttggatgaaataaaaaaaagagcattacgaaatcacaaaaaaaaaaaaggcgagcagcttgctcctgctttccaatcagatgtgcttattgtttacagtcaaa

SEQ ID NO: 266576 - DNA, 1264 bp, Zea mays
cccacgcgtccgtagagatgccgtctgcgtccgcggcggcatcggcgccggcgtcagcgcccccgctataaatccgtcgcacccgcccgccaactggacgagcccgtccgctcatctgcgtacacggtctccctcttcctgtcagtagtagagtgagagtgaggcagcgagtgggagacaaggggaaatggggaagggagcgcaagggagcgatgcggcggcggcgggcggcgaggtggaggagaacatggcggcgtggctggttgccaagaacaccctcaagatcatgcccttcaagctcccgcccgtcggcccttatgatgtccgcgtgcgcatgaaggcagtggggatttgcggcagcgatgtgcactacctaagggagatgcgcatcgcgcacttcgtggtgaaggagccgatggtgatcgggcacgagtgcgcgggcgtggtcgaggaggtgggcgccggcgtgacgcacctgtccgtgggcgaccgcgtggcgctggagccgggcgtcagctgctggcgctgccgccactgcaagggcgggcggtacaacctgtgcgaggacatgaagttcttcgccaccccgccggtgcacggctcgctggcgaaccaggtggtgcacccggccgacctgtgcttcaagctccccgacggggtgagcctggaggagggcgccatgtgcgagccgctgagcgtgggcgtgcacgcgtgccgccgcgcgggggtggggcccgagacgggcgtgctcgtggtgggcgccggccccatcggcctggtgtcgctgctggcggcgcgggccttcggcgcgccgcgcgtggtggtcgtggacgtggacgaccaccgcctggccgtggccaggtcgctgggcgcggacgcggcggtgcgggtgtcgccccgcgcggaggacctggcggacgaggtggagcgcatccgcgcggccatgggctcggacatcgacgtcagcctggactgcgccgggttcagcaagaccatgtcgacggcgctggaggcgacgcggcccggcgggaaggtgtgcctggtcgggatgggccacaacgagatgacgctgccgctgacggcggcggcggcgcgggaggtggacgtggtgggcgtgttccggtacaaggacacctggccgctgtgcatcgacttcctgcgcagcggcaaggtggacgtcaagccgctcatcacccaccgcttcggcttctcgcagcgggacgtggaggaggccttcgaggtcagcgcccgcggccgcccggga

SEQ ID NO: 266577 - DNA, 505 bp, Zea mays
gaaaaattgaaacaaaaatggattgcctgtaacatattctggaccctgcgggcaatacaccaggcacctatgccttattatgagggggcgcatattataagctggtatatttttagcacaactagcatacatgttgctgacatgcaaatcccaatatgtacaagtaataatcaaatcctgatctctcatcattgccctagcatactgaagactgacgcaatcaatcatactgacacgagaatgtataacttaatagtgcatgcttttttcaccatctgttaacactgtcgccactgcaagggcggacggtacaacctgtgcgaggacatagaagttcttcgccaccccgccggtgcacggctcgctggggaacgaggtggtgcacccggtctacctgtgcttcaagcttcttgactgtttgagttcttgattttgactgcctagtgtcttttactttttattttatttttttattaattttatttgtatttatattattttttta

SEQ ID NO: 266578 - DNA, 526 bp, Zea mays
ttttcttccgaagcgaggaggtggagacgggggcggtgggcatagtggcacgactctcgattccgcctcgctccagattgctgtgctcgcccactcactcactcacccatggcgctcgccgcctcccaccaccgcctcctgcccgtcgcccccgcccccgccgccacccgtaccccgtcgcgggggcacctgcgcttccgcgccgcgcgacctctgccccgaccccgctcccggagaatttgttgtcaatctatcaactcaactaatgttttgggagcttcttcgaagacatctgatgaggcaatcccagtcccagttgtccagatagatcaagactcagaccgtgatgcaaccattgtgcagctaagttttggagatcgtttgggggcattacttgacacgatgaaagctctcaaggaccttggccctgatgtcccaaaaggaagtgtggcaactgactcaactgtcacacaaacaaagttccacatcatgcgattcgggcgcaaggttgaggatcccgacatgt

SEQ ID NO: 266579 - DNA, 608 bp, Zea mays
ttgacggatgcatgcacgcgtccgttcatctgtatacaccgactttctgtttctgtcagtagtatagtgagaatggggcagggagtattagacaaggggaaatggggaagggagcgcaaggtactgatgctgctcctgtgttccaccaggtcgcagagaacattccgcgcggcctggctggttgccaagaacaccctctggatcatgccctgcaagctcccgcccgtcggcccttatgatgtccgcgtgcgcatgactgcactggcgatttgcggcaccgatgtgcactacctccaggagatgcgcatcgcgcacttcgtggtgaatgagccgacggtgaacggtcactagtgctcagacactgtcgatgaagttgcttcgctatggacgcatcgtactgctgcaaatggagtttcgcattgtagctgataaagtgcctacaaggtgcatccatatgtgcataggtggcactgaatcggggctcactggaccagtttgatatttgtagtaatatatatacatgtgggagcaacataatttatgtttcgatcatcattatccaatttgattccctgttataatggatcacattggaaaaacccttacat

SEQ ID NO: 266580 - DNA, 1135 bp, Zea mays
cggtcttgtgggcggacgtttggcttgcttgcttattgcaagtctctgcaagaacctgctagagaggaacaagctggtatcgtcgccagcatgggtagaggaaggattgagatcaagaggatcgagaacaacacgagccggcaggtcaccttctgcaagcgccgcaatgggctcctcaagaaggcgtacgagctctccgtcctctgcgacgctgaggtggccctcatcgtcttctctagccgtggtcgcctctacgagtatgccaacaacagtgtcaaggctactgttgagaggtacaagaaggcacacaccgttggctcttcctctgggcccccgctcctagagcacaatgcccagcaattctaccagcaagaatcagcaaaactgcgcaaccagatccagatgctgcaaaacactaacaggcacttggttggtgactccgtgggaaacctgtcactcaaggagctgaagcagctggagagccgccttgagaaaggcatctctaagatcagggccaggaagagtgagctgctggctgcggagatcagttacatggccaaaagggagactgagcttcagaatgaccacatgaccctcaggaccaagattgaggagggagagcaacagctgcagcaggtgaccgtggcacggtcagttgcagcagcagcagcagctgccaccaacttggagctgaacccattcttagagatggataccaaatgcttcttcactggcggccccttcgcaacgctggacatgaagtgcttcctccccggcagcttgcagatgctggaggcacagcagcgccagatgcttgccaccgagctgaacctcggctaccaactggcgccgcctgacactgacgttgccaacaataaccctcagcagttctaaactggatccatgagaaagccaactgtgaccgatggaagctggctgttgcctctagatgatattggcttccataacctagcttattatggtgtgtattgttgccttttgtgtgtgattctccttactactgatggagaataaacctaatcgattgggcataatgatcaaatgctacagcacccgtgaggctgtgatcaggacatcatgtttgttttgaatagcacttttatctattacgagg

SEQ ID NO: 266581 - DNA, 486 bp, Zea mays
ctctttttctctcctgctcagccttgcttcccgtcccatcctttctttcccttgggcgcattcagcagcttcagcctggccggccggcctgctattaaaccactttgcttgcaagtccgggaaactgctagagaggaacaagctgagatctccagcatggggaggggaaggattgagatcaagaggatcgagaacaacacgagccggcaggtcaccttctgcaagcgccgcaatgggctcctcaagaaggcgtacgagctctccgtcctctgcgacgccgaggtggcgctcgtcgtcttctccagccgcggacgcctgtacgagtacgccaacaacagtgtgaaggctacgatcgagaggtacaagaaggcacacgccgttggctctttctctggccccccactcttagagcacaatgcccagcatttctaccagcacgaaatcgcaaaactgcgcaaccagatccaaatgctgcaaaacactaac

SEQ ID NO: 266582 - DNA, 1110 bp, Zea mays
caaaccacctcggccggtcggcccacgggccacgactcaaaaaaggatcaaggtgggggaaacaaaacgaaaggcggtgtcagctgctcctccacttcccgtgtttctaactccggtggctccaccactagcaacccgtgcagcgagcccaccccgaccactgccatgtcgaggcgcggcgactgggtctacgagaacaacggcgggacctgcgtggccatcgccggcgccgattactgtgtcgtcgcggcggacacccgcctctctgtcggatacagcatcctcacgcgcgaccactctaagatctgcgacctggctgacaaatgtgtactagcatcttctggctttcagggtgatattaaagctctgcacaagaacctagctgccagagaattgctataccaacaccagcataacaaaaggatgagctgccctgccatggcacagctcctctccaataccctgtactacaagcgcttcttcccatattacgccttcaatgtgctcggtgggcttgacagcgaggggaaagggtgtgttttcacctatgatgcagtaggttcctatgagagaactggttatagtgctcagggaacgggatctactttgattatgccagtcctggacaatcaactaaaatcaccaagtcctctattgctccctgccagggatgctgtcacaccattgtcggagtcagaggccatcgatctagttaaggatgtgtttgcatctgcaactgagagagacatctacactggagacaagttggaaattgtagtcatcaacaaagtcgggactaagcgcgagtacatcgacctgaggaaggactaagccaacgcttcagttgtgctgcagctgtcatttgcttcggacatgtttcctagtctggggatttatgtctaaagccgttgctttcatagaaacatatgttattacttgcatatgtcctgtaccagggttcagtcagcttgttttttttttgttgaaacaaattgcttggatattgaagcggtactcactggcggaaagtctatatttggttgggagcttaaaaaaaaaaaaaaaaaaaaaaaaaaaaaaaaaaagggcggccgcccgggaatccggacg

SEQ ID NO: 266583 - DNA, 565 bp, Zea mays
ccagatttttctcaaggtggaagaaacaaaacgaaaggcggcgtcagctgctcctccacttcccgtgtttctaactccggtggctccaccactagcaacccgtgcagcgagcccaccccgaccactgccatgtcgaggcgcggcgactgggtctacgagaacaacggcgggacctgcgtggccatcgccggcgccgattactgtgtcgtcgcggcggacacccgcctctctgtcggatacagcatcctcacgcgcgaccactctaagatctgcgacctgtgagtccctgaacccgatctcgtgcttcgatctgtccatctgggctttagggtttgtggattgggaggcacgagtgaattttggtgtggcgtgggctaaaatatgggtgacaaggctggattcgtagcaggatttggtgctgccactggttcttttagctagggtttggtgcgtggaggattgtgtcgaaaattatgggggaaatacctttacattctatatgttttatacgtttttcggtaatggctagttagttcagcgtcctctttgtgaacgggaatgctta

SEQ ID NO: 266584 - DNA, 603 bp, Zea mays
ttctatccctccccctcttaccaagtcctcttcgggttagggttacttagggtcttggggaagggcgatggcggcacctaatgtggagtacctttcctttagagaactgcttatctgggccaccaaacacgagccactttggatatgccagtcctggctcaatcaacttaacatcaccaaaaggtctatagctccctgccagagatgctgacacaccattgtcggagtcagaggccatcgatctagataaggatgtgtttgcactttccactgatagagacgtctaccctggagacaagttggaaatatggagtcatcaacacggcccggactatgcgcgagtatatcgacctgagaaaggattaagccaacccttcagttgtgctgcaactgtcatttgctttgaactttttttcccagtctggtgatttatgtctaaagctgttgcttcataggaacacttgtgtttacttgcatatgtaatgtccggtatgtaccaggattcagtgagttttttttctgtttaaacaaattgcttgggttctggaaaaaaaaaaaaaaaaaaaaaaaaaaaaaaaaaaaaaaaaaaaaaagggcggccgc

SEQ ID NO: 266585 - DNA, 1285 bp, Zea mays
  unsure (1)..(1285): unsure at all n locations
ttcgaaacgaaaaggcagagagggagggatctccgtctccacgccgcgtcctcccgcacgaatccgcgctccggccaacgggccaagccctagccacccccgcccattcatggtgggcgggccgtgagatctctagggaggcttgtcggcttcgtcgggcgggaggggaggagatgggcgcccggaacagcgctgccgccacgccggtgctgctcaacgtgtacgaccttacggccgcgaacgattacctctactggctcggcttcggcgtcttccactccggaatcgaagtccatggcacggaatatgggtttggagcccacgactacccatccagtggtgtgtttgaggtggaatcaaagagttgccctggctttatctacagaagaacagtgtggctaggcacaacagacatgtctcaggaagaattccgctcgtttattgaaaaacttgcaggtgattatcatggcgacacatatcatttaattaacaagaactgcaatcacttcacagatgatgtctgccagaacttaactgggaaacccatcccttcctgggtgaataggcttgcaagagtagggtcagttttcgattgccttcttccagaaagcgtacaagtttctcctgtaggtcgtgtcccaacgagtcagcgaatatctgatgatgatttgtattcaatacattcaccaatggccgacaaagatgacaatgatgaggacgaggccaaacacctgctgccagctccatccaacgaccagctttctgtagatgtaccgccaaagctagcgaaagatcttcttctgaaccactccatgttcataggcgcctaccatacttcaactcatatagccattggtgctaaagtgatcctcaagatggcttgacacagatagggattgggcatatttgattaaagatgaagctctaatttcttgtggcttaccagtttgcagtttcaccttgctgtctcatctcagcaaacagttgtcatctatggtagtagtggcatgattgttaccctgtcatttagcacatctggaaattgcaaatttggaatgtggggttccggtacctgttaggaatcaggactgtcgatgcttgttgagccccagtgttgaaggcacatactgtatcatgttactatcaaaaacagtgtacatgtacatggctaccgagtatttgccccgaatccaaatgagcgagtctctgttgggctgcttaagcgcctgtagtgacatggatcttctttttgttccgggctgttgaacataaaacccccgnaccc

SEQ ID NO: 266586 - DNA, 708 bp, Zea mays
  unsure (1)..(708): unsure at all n locations
cacaggagtttactctccaaaggctgtggacaacaagcagttaccttcacacccatcgctgctgcatgcatcgcttgggatgccctcccctggccggatgtctccacgatgtgtcgaatcaggctccccgatgaactcccacctagctgctgctcttgcccagcgtgagaagcaacagcagacgatgagaagcctcagttctcgtgaccttgggcccagtgcggcacgagcttcagctctcggctcccctctaagcacatcatggtctaagtggggatctccttcaggggtaccagattggggcgtagatggtgaagaattgggtaagctccgccgctcattcgcgttcgagctcaggtctggcggcgatgaccctgatctctcctgggtgcatacactggtcaaggaatctccgccagagaagcaagttactacgtccgaatcaattaattccgttggaccctcaccactaatgcctcccagcatgaacaacggcggcgaaggttctggcctgaacacccagctggatgggcgtgaccaagccgcggttttaggggccctgcttgaacagatgcagcttgatcagcagattggtagtctagcaacataggcgtgcaacgagcctggaaggtgtgagggtattatactcccctctnctgaaaaaaaacaccctttccccctgtccnnnnaaaaaaanttattaannaa

SEQ ID NO: 266587 - DNA, 312 bp, Zea mays
tgattaatgatgttatggcgttaccagaagatttgaagacaaagctcagcatcgacgatgagctggtctcaagtccaaaggaagccttttcccgtgtttcggctgatcggagaaacaaacttatgaagagtggcctatctcaatcatattcaacacacggagacaaaaatattgtgaaattgagtaaactaacagaaaccaataggaggtttggtggagggcgggcccttgaaccgcctgctatcaaccagggtgcaatcacccagctttcagaacagatatcaacattgaatgaaaggatggatgagttta

SEQ ID NO: 266588 - DNA, 772 bp, Zea mays
gcagagaataccacggttccgtcgccagggcgtccatccgatccgcgacgatccacaggccacagccatggcgatggcttacaagatggcgacggaggggatggacgtgaaggaggagtgccagcgctggttcatggagatgaagtggaagaaggtgcaccgcttcgtggtgtacaggatcgacgagcggtcgcgcgccgtgctggtggacagggtgggcggccccggggaggggtacgaggagctcgtggccgcgctgcccggcgacgactgccgctacgccgtcttcgacttcgacttcgtcaccgtcgacaactgccagaagagcaagatcttcttcatcgcctggtcaccggcggcgtcgaggatcagggccaagatcctgtacgcgacatcgaagcaaggcctgcggcggctgctggacggggtccactacgaggtgcaggccaccgacccctacgagatgggcttcgacgtcatcagaggccgcgcgcaatgagcgcctgatcggcgtttgtgtgatgagctgagcctcccgatgatgcctgtcggtctgacgaggcttctcgtgtgttcgctttaccccccagttttaccaccggttattcctagagatggtgcagtgcaacgtcttcgtgtgctgatgcttatggttggagttaccgggttagaatgcttattgagtggcagccgattaattgaacgtacagcttcgcgacgtacaattccactgattcttgaattatatttaattgatgaaatagatgccatt

SEQ ID NO: 266589 - DNA, 520 bp, Zea mays
ttgacttcgtgggccgagatgggcttcgacgtcatcagaggccgcgcgcaatgaggcccgcgctgcgctctgctcctatttacgtacttacctgtgcgtgggcgtgttctcctactactcactgctcagtagtcatctgcgttcgtgtgtgtgtgtgtgtgtgatcccccggatgctaattggcgtcggtgtgctcccgtagcgatcgatgcggccaatctgacgaggcttcgcgtgtgtttgctttgctattttcggttctcgggagagatggtgcaggcgtggtgtgttgatgttgatgggtggagtagaagctcaggggagtggcagcggactaatgaaacgtccacctctgcgacgtagaattccactgaaaaaaaaatgctccagtgtaccataagctgcttcagatttgatcgtgttttctctcccatggtggcgtttctacctacatttttcttagaaaacacatttctagttactcgttcagttctgaattataaaatgttttgatttttct

SEQ ID NO: 266590 - DNA, 842 bp, Zea mays
tctaccgtccacgcgtccgcccacgcgtccgcccacgcgtgcggtttactgggagatagagagaggagagggagggtttcctcaaagagaacccgaacccaaacccaagcagagaacactagcgttccctcaccagggcgtccatcccagcagccatggcgatggcgtacaagatggcgacggaggggatgaacgtgaaggaggagtgccagcgctggttcatggagatgaagtggaagaaggtgcaccgcttcgtggtgtacaagatcgacgagcggtcgcgcgccgtgctggtggacaaggtgggcggccccggggaagggtacgaggagctcgtggccgcgctgcccggcgacgactgccgctacgccgtcttcgacttcgacttcgtcaccgtcgacaactgccagaagagcaagatcttcttcatcgcctggtcaccggcggcgtcgaggatcagggccaagatcctgtacgcgacatcgaagcaaggcctgcggcggctgctggacggggtccactacgaggtgcaggccaccgacccctccgagatgggcttcgacgtcatcagaggccgcgcgcaatgaggcccccgctgcgctctgctcctatttacgtacttacctgtgcgtgggcgtgttctcctactactcactgctcagtagtcagtagtcatctgcgttcgtgtgtgtgtgtgtgtgatcggccggatgctaattggcgttggtgtgctcccgtagcgatcgatgctgccaatctgacgaggcttcgcgtgtgtttgctttgctattttcggctctcgggagagatggtgcaagcgtggtgtgttgatgttgatgggt

SEQ ID NO: 266591 - DNA, 769 bp, Zea mays
ggattaggagcctgaaagatcgagaagccaaacccacaggcagagaatagcacggtttcgtccatccgatccgcgacgatccacagccatggcgatggcttacaagatggcgacggaggggatggacgtgaaggaggagtgccagcgctggttcatggagatgaagtggaagaaggtgcaccgcttcgtggtgtacaggatcgacgactgccgctacgccgtcttcgacttcgacttcgtcagcgtcgacaactgccagaagagcaagatcttcctctccccctggtcaccggcggcgtcgaggatacgggccaagatcctggacgcgacgtcgaagcagggcctgcggcggctgctggacggggtgcactacgaggtgcaggccaccgacccctccgagatgggcttcgacgtcatcagaggccgcgcgcaatgagagcgtgattggcgttggtgtgatgagctgagcctcccgatgatgccggtctgacgaggcttcgcgtgtgtttgctttccccccggttcttccgagagatggtgcagtgcaggggcgtggtgtgctgatgctgatgggtggagttactggagtagaagctgagggagtggcagcggattaatgaaacgtccatctccgcgacgtagtattccactgaacaatgctccagtgcaccataagctgctgcttcagatttgtttagaaagcaacgcctttctacgtacaattccgaccagagttgttctgggcttgtgaatgatccgtttttttgtt

SEQ ID NO: 266592 - DNA, 448 bp, Zea mays
cggacgccttggccgaccccttggggcaacttgttagactgggagatagagagaggagagggagggtttcctcaaagagaacctgaacccaaacccaagcagagaacactagcgttccctcaccaaggcgggcgtccatcccagcagccatggcgatggcgtacaagatggtaaaaccttccccgcgctccgcccacgcgtccgcacgcatgcaagcagccatggctgatgacgctgtgcgcgtgcgtctgcgctcgtggttttgatttgcaggcgacggaggggatggacgtgaaggaggagtgccagcgctggttcatggagatgaagtggaagaaggtgcaccgcttcgtggtgtacaggatcgacgagcggtcgcgcgccgtgctggtggacagggtgggcggccccggggaggggtacgaggagctcgtggccgcgctgcccg

SEQ ID NO: 266593 - DNA, 279 bp, Zea mays
cagagaggagagggagggtttcctcaaagagacccaaacccaagcagagaacactagcgttccctcaccagggcgtccatcccagcagccatggcgatggcgtacaagatggcgacggaggggatgaacgtgaaggaggagtgccagcgctggttcatggagatgaagtggaagaaggtgcaccgcttcgtggtgtacaagatcgacgagcggtcgcgcgccgtgctggtggacaaggtgggcggccccggggaagggtacgaggagctcgtggccgcg

SEQ ID NO: 266594 - DNA, 307 bp, Zea mays
cggacgcgtgggggattaggagcctgaaagatcgagaagccaaacccacaggcagagaataccacggttccgtcgccagggcgtccatccgatccgcgacgatccacaggccacagccatggcgatggcttacaagatggcgacggaggggatggacgtgaaggaggagtgccagcgctggttcatggagatgaagtggaagaaggtgcaccgcttcgtggtgtacaggatcgacgagcggtcgcgcgccgtgctggtggacagggtgggcggccccggggacgggtacgaggagctcgtggccgcg

SEQ ID NO: 266595 - DNA, 351 bp, Zea mays
gtcagcctgctcattggcacacacgcggacacaccacaggcgcgcaagcccaaccgatcgagcagctctagcatggcgagcggcggctactactacgaccagagcgcgggctacggcggctacagctactcggcggcgccgaggacgacgccgtcccacctcctggtgttcctggccaccgtggcgctgctgggcgccacgtcgctctactcgcgctacgagtccgcggtggagagcctggtggaccaggtgcggttcgccgtggtgctgtccccgctgctgctcctgctcgcggtccagtactgggcggccacggccgggtcccggcggccccggggcggcgccctcccg

SEQ ID NO: 266596 - DNA, 521 bp, Zea mays
ggacctgggcgacgagggctcttctcgcctccccctctgctgcctcgccgtccgcgaccccgggatccgcggcggcggggcagaccgcccagctgccccctcccctctcagttaccgcgggcggcggggttgccgtgtcggggaaggtcaacaagaagaaggccggcacgcgcctatggatgcggttcgaccgctggagtgcctccgagatcgtcgagctcgacaaggcctccataatccgccgcgccggactgcccccgcgcgacctacgcatcctcggccccgttttctctcgctcctccagcatcctcgctagggagaaggcgatggtgatcaacctcgaattcatctgcgcgatagttactgccgaggaggtgctcctgttggaccctctcatgcacgaagcgctccctttcggttgaccaattgaggcagcacctgcctctgaggagccgggtgggtgagaatggtgagtgtgcccctgatggcaatggggaaaaacagaatggctcgcttaatga

SEQ ID NO: 266597 - DNA, 539 bp, Zea mays
cccacgcgtccgacctcaagcctgctcctgcttttccattgctctgcgtctgcgtctgcgtctgcgtctgcactgcttcgcgtctccctccccccgcctccgcccccgccccggcaaaaaagcaaaacacggccatggaaggctacgaccgcgagttctaccagttcagcgaccagctgcgcctgcagacggccgccttctcgggcctctccctcggcgactccatctggtcccccgccggccggcgcaacaacagcaacgacgtcctcttcgccgcctccgcgtcgcccgccgacgccgccgccaagagcaacgccgtcgtcgggctcaagctcaacgacggagggcccggcctcatcggctccgggaagctggccttcggcggcggcgccggaggcggcggcaccaacaaggccgaccgctacaacaacaacaaccttccccacaccgacaacaagaccgtgtacaacaccagcagcagcttcatgggcaacggcagcagctacgccaaggacaacaacaacaacgccgacatgctg

SEQ ID NO: 266598 - DNA, 608 bp, Zea mays
cttacgcgtgggcggacgcgtgggcgaagacgctgccaccctacctgcagacggctccgcaacaagaaaacacccgagttccttccattcccacccaaaaatctagccaaaaaagcccaaccaaaatgctgcctgcccgccccctcctcgtggccgccgccgtcttcctcctcctcctccccgttcacgtcgccatcgtcgccgcacaagggtttcgcggcttctcttacctcctaaactgtggcgcggcgtcccccaccaccgacagccgcggcctccgctgggatcccgatggcgactatgtctctgccggtacccccggcgtggtctcgctctcgggcctcatcaaccccacgcttgccacccgtcgcaccttcccgctccgctacggggccaagttctgctacgagctccccgtcgatcggaaccgccgctacctcatcggccgcacagtgttctagggcgcaacaacagcaacgacgtcgtcttcgccgcctgcgcgtcgcccgccgacgccgccgccaagagcaacgccgtcgtcgggctcaagctcaacgacggagggcccggcgtcatcggctccgggaagctagccttcggcggcggcg

SEQ ID NO: 266599 - DNA, 1466 bp, Zea mays
cccgcatgtgccattagtggagacgaacttctccagatatctggggacacggtagttgtcagaaaggctcttcgtcaagtgtcatctcgcctccataacaacccatccaagtcacagcatcttcttgcatccagcttgacccaaccgtatccagggggcacccaccttggtggttcctctgctgcacctgttgtagggatcactccagtaattcctccttatggaggctacaaaggtgacgtggcaggagattggccctctttataccaaccccgacgggatgagagctctgcaaaggagtttagcttgcgtttactttgtgctgctgcaaatgtggggggtgtaattgggaagggtggtggaattatcaaacagattaggcaggagtctggggctttaattaaagtggctagctccaattcggaccctgacgatgactgcataattacagtttctgcgaaagagttctttgaagatcctgtatctccaacgattgatgctgcagttcgtttgcagcttagatgcagcgagaaaagtgattcagaattggctgagcagtcatatactacacgcttgctggtgtcaacatcacgtattgggtgcctaattggcaaaggtggctcaatcattactgagatacgaagaacatccagagccaatatacgcattctttcaaaagaaaatgtcccaaaggtagcagcagaagatgaagagatggttcagataactggaggccttgatgttgcaaggcatgctcttgtgcaaatagctacaaggctgaaagccaatttttttgaaagagagggctcgttatctgcatttccatctgtgatcccttaccatcctttgcctgctggtgtttcggatgaaccaaaatatctaagcagagacaccaagcctgttgggcactatctatattcaagtggttttcgtacatcggatgacacgattccttctgacagctatgcaagttatggcggctcccaggcacctggaagaggatatggggcttacagcgggtacagtgctcgctcctctaatagtgggttatctggtcatagttctcttcactatggaaagcgtcatggttattaggatttagattgcttgataaagcagctatctgatggacctgttattttcacctttgccacccctgctcccctcacgtactataaaaacagccaagacattgaagtttggagcctgcttattggagccccttcccaaaccagatgaccaagagagcccaacctggaagctttgcttaagaggacccgtgtggatgccatagaccaccttatattcctcactacattactttgtcttcctctgggcctatgtttttagccctgccgcaaatgttctgaacctatgtattgaaaggtcgcatttgagactgcatgtatttgcttgtttgaaacctgattcagtttagtgattttgttgaaacacttgtttcctat

SEQ ID NO: 266600 - DNA, 503 bp, Zea mays
tcagagacaccaagcctgttgggcactatctatattcaagtggttttcgtacatcggatgacacgattccttctgacagctatgcaagttatggtggctcccaggcacctggaggaggatatgcggcttacagcggatacagtgcccgctcctctagtagtgggttatctggtcatagttctcttcactatggaaagcatcatggttattaggatttagattgcttgataaagcagccaagacattgaagtttggagcctgcttattggagccccttcccaaaccagatgaccaagagagcccaacctggaagcttaggaggactgtgtggatgccatagaccacctgatattcctcacactacattacttatgtcttcttctgggcctatgtttttagccctgccgcaaatgttctgaacctatgtatcgaaaggtcgcatttgagactgcatgtatttgcttgtttggaacctgcttcagtttagtcgtttttttgaaaaa

SEQ ID NO: 266601 - DNA, 668 bp, Zea mays
cgacaggaaccgagacatcgctgatgcactgaaaattcttccagcgaactctttatgctgtaagaaagttgagaggcgatcatgcatttccttggaggagttcatatgtaattactttttgcgcgacacccccgtcataattagtggcaccatcgaccattggcctgcaaggacaaaatggaaggacattgagtacctcaagaaggttgctggagatcgtactgttcctgttgaagttggaaagaattacgtgtgtagtgagtggaagcaggagcttatcacattttctcagttcctggatagaatgtcgtcaactgtctgtccatcaaacttgacatatctggctcagcatccattgtttgagcagataaaagagctcagtgaagacataattgttcccgaatactgttacgctggtggaggtgaactccaatcacttaatgcttggtttggtccagagggtacagtgacaccattgcaccatgatccgcatcacaacatcttagctcaggtattgggcaggaagtatattagactctatcctgctttcatagctgaggacttgtatccacacacagagactatgttaagcaataccagtcaagtagattgtgacaatattgatttgaaggaatttcccagggttgaaaacctggaattcattgact

SEQ ID NO: 266602 - DNA, 1162 bp, Zea mays
  unsure (1)..(1162): unsure at all n locations
gtggtggtgatggaggtgtacttcgagagatttccagacacagttcagtggagtctattgacatatgtgaaattgatcagctggttattgatatctgcaaggaattcttcccacatttgtctgttggatttgaagatcctcgtgttcaacttcatgttggtgacgctgtggagttcttgagaaatgctcctgaagggacatatgatgctatcattgttgattcatctgacccaatagggcctgctcaggaacttgtggagaagcctttttttgagaccatcgctagagctttgaggcctggaggtgttctttgtaatcaagctgagagtatgtggttgcatacacatttgattcaggacatgctttcaatttgccgtgagactttcaagggttctgtccgctatgcatgggctagtgtcccaacatacccgagtggggtgattgggtttctgttatgcgccaaggatggcccaccggtcaactttctgactcctgtaaatccaattgaagaagtggaaggagctactaaagcgggaagggagatcaggttttataattcagagatgcatatggcagcgtttgttcttccgacatttgccaagagggagctagaagcatactgtgcttccacggaaacggagcaggcggaggaagtagcggccacggcaccacaaaagctaactgcggcgcccaagcgtggaattaccaccgcatcctagctgttggatacacacatagccatgtactattattatcacgcacgtaatctaagcatcgaagtcgagtgcgtgcgtgttgggtgggggtacgcgcatcgcggtttgacgcgcgatgtatttgataataattcgtgctccgaggtaccaacaagcaacgatgagagaagcattccacctttacactccccttttaggtctggatactcattattgatctcaatccacatgagttgaggtggattgggggtgtttaacagggctttttggtttgaaagagattagagaggattaaatttctttctatacaaatttgtatatgagatttaatttttctcaatacacccttaatcgaacaaacccttagtagatcagccagatgatctatgctatgatataaatataacatgctcaagtgttttgtgataaaaaaaaaaaannaaaaa

SEQ ID NO: 266603 - DNA, 2467 bp, Zea mays
ctgaaagtaaagagaagggagtttctggtaacgatgctactatgggtccaaagcacacgcttgcacctggtagtgttacctcttcagctgaattggcttctagcgttctgaaagggagcgaggattgggatgctgatgtaatggataagtattctattggaaaagaaggcaaatctaaaaatattgatccagttaggaaggatgattcagtagcaatcttagaacagttctttggcaatgttttatcgaaaagcggcagcaacctaccaacttatgttgagaaccagccattgaaaactgatgatgacatgatcacttctgtgccagaatcatccaaatttgctcattggtttcttgatgaagacttgaaacctgcagaagacttatcttcaaagagcctgctctccatgattgtcaaaaatgaaaatccaggtctagaaaatttaaaccatactcctttatctgatgctgctgcccagaatttatccccaagagcacctattgataaacttgattctgcatcagagcttatctcatttacatcctctacgcctgccaatggagttcttgaacaatgcatccattctgatgttccagaggcagttcctattatgacatgtgaggatcttgagcagacgatgttagcacaggttagcaatagcagctcaactcagataaatgctacaaaggagcaactgactgttatggatgaaccagttgccatgcagaaagtaactgtagataatcatgcatcacaacatcttctttcattgttgcaaaaaggaacagataataagggagcaccttccctgggtttccagagagaatcaactgatgaacctctgagtgttgacacaaatttaatggcaaatggtggaatatctggaagtgatccggttaacagtgttgaaaatgttcctacttctgggaaggacttgacattggaagcgttattcggggctgcatttatgaatgagctccactcgaaagatgcaccagtttctattcgaggagccacaactggtggtcctactgagtttgcagagatgggtaaaactctgttgtcatctagccatgaaggatactaccctgttgaacagaccgtacacttcaacaatactaaagatgctgctgtccgtagagaaccaggtattgagcattcagcagtacctggtctaagtcaggggagtgctagttttgacaagaaaggaatggaaattcatctgcctgaagaagataatttgtttaccatgagtgattctctgcttggtcaaaattctgatattttggcatcagtaggatccagcagggttgaagggctattgcctgaaaaggcacttgataacctcagctataggtttcaaagtcttgtgcctggtgatgcagaacacattcaagtatatggtcctgatgcacttggatctcatcctcgtgattctcagaatatgtatcatcttctacagggtaggcctcctatgatagcacctcaccctatgatggatcacattgttaataggaaacagccagctccatttgatatggcacagtcgatacaccatgattctcaccgttctttcccatctaatgtgaatcatatgcaacataatcttcatgggccaggggtccctcacttggaccctgctggacatattatgcgacaacacatgtccatgcctggaagatttcctccagaaggcttgccaagaggtgtccctccatctcagcctgtgcatcacatggctggttatagacctgaaatgggtaatgtaaataatttccatatgcaccctcgccagcccaactatggagaatttggattgatgatgccaggcccatcaggtccagaggtgaggggcaatcatccagaggcgttcgaaaggttgatccagatggagatgtcagccagatcgaagcaacagcaggtgcaccaccctgcaatggccgctggccgtgtgcctagtgggatgtacgggcacgagcttgatgcgaaattgagatacagatgatggatgcctggatgcttcactccgtacagaggacctggaggtgtggtttgttgtatgtgcgtggtcactctttgcccagactgctgtgtattatttctgctaacatggtttagcatcagccgtcggtcgcgactgattggaggcctgcctcacttgtagggttgtagcatgtacatctgaacgggtgatggaacggagtgggtctaagatctgtaggagcggaagtctaccgggaaaaggggttatggtgtgctgaatggaagacgtggcgtcgacgtcttagcagccacatgtgtaatgacgttttctgtctactgtttctgacgactatgcagtttccattttgtataagctctgttatgcaaaaggaaaaaaaaagaagaaaaaaaactgagtcagattaacagattggcgacaaaaaaaaaaaaaaaaaaaaaaaaaaaaaaaaaaaagggcggccg

SEQ ID NO: 266604 - DNA, 175 bp, Zea mays
cacatgtccatgcctggttgttttcctccagaaggcttgccaagaggtgtccctccatctcagcctgtgcatcacatggctggttatagacctgaaatgcgtactgtatgtatactccatatgcacggagctcggccggggccagttcggggtgacatacctctgcacagagatt

SEQ ID NO: 266605 - DNA, 436 bp, Zea mays
  unsure (1)..(436): unsure at all n locations
cccacgcgtccgcccacgcgtccgcccacgcgcccgcacagctcaccgcagctcaaaagccagcacaggcaaacccccgtcatggcctcctccaagatgctgcgcgccgccgtcgtcgtcgcggccgtcgccgtgtcctccttcgccggcgccgccctcgccgccgaggcccccgcgccgagcccggcctccggcgccgcggccctcccctcgtcgctcttggccgccgccctctgcccggccgtcgcgctcctcctcggcaacctgcgccactgatgacgcctgcctgtctcctagaccgacgagagccgccgtgtgctgtcgcgtgatgttattgtcctctgtatgtgtgtgtgtgtgttcctgacctgtgcgtgccttgtaccgccaccccgcgcgtggattggaactttatcgatcgttcggaggttccana

SEQ ID NO: 266606 - DNA, 672 bp, Zea mays
cacagacacacgatgcatggaaccatggagcgagatgcaaaccgcaggatcaagtatggacattcataccaggagagggcacatagaacttgcccaggttgtaagctgtgtggtcaaaattacaattaccccaatggtgaggaattttctgcaatcagcggttgtcaggaggcatactaccagacagaccatgatctgattccttcaacttctcaagtagcatctcattgcgagggttcttgctgcaagggccagcagttgaaaccgaaaagttattctgtgatgcgtgattatgactatatcaatcaagagtcaacaccctagttcaagtgaccatgccagaacaagatctaatcttccagcgccgcctcatcattggcatgttaaacattctaatgagcatcggaggtcagggaaagccgaagccggtatctatcttccaaagatgctccaagtactcactccaggaagcaccataggccagcaagataagctgtaactgtcacaagatagagaaaatctagtagcagctcgcttctgatactgatggatagcatttgttaccggggccctgcttacgtggctgacaccctgttgcggggaggaatctgttccaaggacagcagtataccgtcccaatttataaccaaatactttgccttttctcggttc

SEQ ID NO: 266607 - DNA, 587 bp, Zea mays
ttaaggttctccagagatttaacttgacaagcttgcccctgtacaagtcattgattcgagcatatatcaatgctgacgttgtgccaccaaatgtccttgaaatgattgcaaaagatcagattgatatggattaaaaaatggtccggttgatcataatcgctggcaagatagacatcacatgcaatggatagtcttcaactggaacaggtaatcaccagtcaaatgatgaatagactcatttgactgtgtcaattagagatgcaaagtgaagcaacaagttgaacctgcaaattactagatgcaaaaaaggcactcctggataccttgtttggtgttcatgcagtcctgctaatatgaacaactccatcttcttgtgaatcttaagtatatttggaaaatgtggaaaacacgaaaacctgaaccagcacaagaatgcttacaacttctcaaggatcacctgaacctttggactatcagaacttcatcgaacctgaatcaacattccccggtcatcaccttgaattagtggcgtaaccattcttatgatgcaagcacatagcttgcttatttgttccttaaatcatcac

SEQ ID NO: 266608 - DNA, 498 bp, Zea mays
ttccatcgcgtccggacgtagagtcgccagtcctcccacaatctccagccgccactacgcctccctctagctccagccgccactacgccggtcgcagagtcgccagctgcctagacgcccggaggcccgcgggcgctccctcctgggctgctggcctccttcacattattggagccagaggagcgggcggcggcttgcactccatcccatcgcttgggtgcgtcgccccgaatccaatcgcctggtcaagtctgttgctgccggaggtagacggacgccttatcgtgctcgtggccgcagctagcgcgccggagccacagctggagcgctcgccggcgacgagtcgccgccccgcaaggagcctacgcaggcacgcaccgccacgtctaggcgccaggcggagacgttattaccacaacattaaaggagatgccttcactccagaaagcattgcctccagaactggctgataatgtgctcaggttatatcgggaatgc

SEQ ID NO: 266609 - DNA, 721 bp, Zea mays
atttacgcatacttatatatatatgatttgtgtgctttatataaacccgcgtttctgatgatatggcctggccggagggtacaatagtagtagatgcaacagctaaattcacacgtacaaatgcacgcacacagtggtggcactcacaaatatatataccctaacagttgcactaatcacaattattaataattaagcaaacgtacgtagagttacttgagatctcgatttggcacatgatataactgcatgcgtgatctatctcgattgggggccgggcgccgccaggtatagcgctggtttcatcatccgagctggagggttgtaggttgcagctgatgggagtagtgctgaggcatgctcacttgcagaaagtttctcgagtcgaaaggggccatgtggtcgtactcgctagtcggcggcgctcccatcgtcatgtgcatcgcggagtgccccgtttcattactctcagcgatcttgctcctcaggtacatgttgtcagtctgcagatccatctcccttttttgcatatagtcaacttcagcgtatagcagctcattctttctagctctaatcttgattatggctttctccagcttgccctccatttgtttaagatccctgaggcccatggtgtggatggaatctcccactatggtcctagtgtttgcgttttgcaagctgtcgatcatctgtcgcagcttggaggactcctgctggt

SEQ ID NO: 266610 - DNA, 335 bp, Zea mays
tgaattgttggcaaaagattctaaattacatcatccgagttggagggtcgttggttgcagctgatgggagtagtgctgaggctgctgctgctgcatgttcacctgaagaaagtttctcgagtcaacaaaaggggccatgtgatcgtactcgctcgtcgacggcactccaatcatgttcatcgctggctgccccgtttcattattattctcggcgatcttgctcctcaggtacatgttgtcagtctgcagatccatctcccttctttgcatatattcaacttcagcatacaagagctcattctttctagctctaatcttgtttatggccttctcag

SEQ ID NO: 266611 - DNA, 965 bp, Zea mays
ccgacgtcgtcgtgctcgcgctcggcccgtggtccggccgcctcgaggtggtcagcgaggtgttcgacgtgtccgggctcaaggcgcacagcatcgtgctccggccgcgcgagcccgagaaggtcacgccgccctcgcgcttcctcagctaccagccggagcccggcgccaagatgctcgaccccgaggtgtacccgcggcccaccggggaggtgtacatatgtgggatgagcaaggacgagaacccgccagatgacccagcaacgatagtaggcgagccagactcgattgcaatgctgcataagatcgcaggcaaagtgtccagccagctgaagaaggaggagggcgctgaggtggtcgcggagcaggcgtgctacctgccgtgcaccgccgacgggctgccggtcatcggggagataccaggcgtgaaggggtgctatgtggccacgggccacagctgctggggtatcctcaatggtccggccaccggcgcagccctcgccgagctcatccttgacggcaaggccaagatcgttgatctcgaacctttcagcccggcaaggtttctcaagagaaggagcaggcgtggagtctgaccgtgtgaatgttcagattcaagctcgctactgaataaaacactcttggttctcccttttgcatgactgatgagtgttgcaaaacatgtatgtgcgaataaatcatggatatatagtacttgatgttctgtatttgttgttaatcacagacggacaacttgccagcacccatgatcagattcagatgttcatttagctgaggttgagctcgacaagctgttgcatctgagctattctacgtacaccatgtctacgcaatgtttccttgtggtcaagtgacacaagtaaccttataaaaaagagtgagacctgtgctcgatatggttcatttcagtgctctttctctccgtatggttcaccacatgcctg

SEQ ID NO: 266612 - DNA, 1180 bp, Zea mays
caggtttgcacacaaaggtagcccaagttgctgcctcgtcattcaatatccctcttagctctgtattgagtatcagagacaagtactgagtgaggttcctaatgcatcaccaacagcagcctctgctagttcagatctgtatggagctgcagttttggatgcttgtcaacaaatcaaggttcgaatggaacccattgctagcaaaggaacccacaactcgtttgcagagttggctcaagcatgctacatggaacgtgtggatctctctgctcatgggttttatgctacacctaatattgggtttgactggacgattggcaagggaactccattcaattatttcacatatggagctgcatttgcagaagttgagatcgacaccctaactggggatttttacacaaggacagctgatattgttatggatctcggattttcaattaatccagcaattgacattggccagattgaaggagcttttatccaaggattgggctgggcagccatagaagagctaaaatggggggatgataaccataagtggattcgacctggacacctcttcacctgcggtcctggttcttacaaaataccctctgtaaatgatatacctctgaatttcaaggtttctctattaaagggtgttccaaatccaaaggctattcattcttccaaagccgtgggagagccaccatttttcctaggttccgccgtcttatttgcgataaaggatgcgatctctgcggcaagggctgaggaggggcacttggactggtttccactcgacaacccggcgacaccggaaagaataagaatggcatgtgtggattccattacaaagaaatttgccggtatagattatcggtccaagcttagtgtatagcggctgctgggctggtcacgggagaataaattggaaacagaagcccgcatttgtaaagtttcatgccctttgtgctaaaaagaatgggagggacggtttagtgttacttgtgggaaactttaaccctaacaaaggattgggtgatgtattaatagattgagttagttgggtctgacatacacatggatgagaagataattacacggtaaactctaaggccctgttcggtttttatggattggagccctggattgattcctagccggattacttctctaatttatatagattttgatg

SEQ ID NO: 266613 - DNA, 569 bp, Zea mays
cccacgcgtccgctcgttcgttccaaacggagaagaggatcaggttcgttccaagggaaaggagaagagggtcaggagagagagagagagagagagagagagagagagagagcccttgctcgttcgttcaccaccacagctccgatcgatccgcaaggcaggcaagatgtacaacgcgccgtcggcccaggagatgtcctacttggagcacgtgcagaggcgccacgaggagaagggctgcctctacgcctgcatcttcactgcgctgtgctgcttctgctgctacgagacctgcgagtgctgcctcgactgcctctgctgctgctgcaactagccgggctagctccggaggacggtcgagacgcagcagatggaggtcgcctgatccgtctcttctacctacctatctacgatgattcagttcccgtttagtctggtggtgtgcaagtgcaaacataataacgcacgcatgtcgtagcgtatagtacaggagagagatgttttactctgtcagttgcagtttgagcattcgtaaaccaaccagccaaccatccatggtctgaactctg

SEQ ID NO: 266614 - DNA, 459 bp, Zea mays
cccatggtccgctcgttcgttccaaacggagaagaggatcaggttcgttccaagggacgggagatccgggtcaggagagagagagagagagagagagagcccttgctcgttcgttcaccaccacagctccgatcgatccgcatggcaggcaagttgtacaacggcgccgtcggcccaggagatgtcctacttggagcacgtgcagaggcgccacgaggagaagggctgcctctacgcctggtgaactagtgagctagctaggcctccgactccgtctgctctgcctgagttgatcaaagaagaaaaagggatccgaggaggggtttcggtccgccgccagctcagtttcagatcagttgccatggcgtcgaccttcctacttgtcgatcagtttctttgtcacagcagaaggccgtgcgccgcttcctggcggagtgtggaaccaactgcttgctgttc

SEQ ID NO: 266615 - DNA, 330 bp, Zea mays
tcgtgtcgttccaaacggagaagaggatcagggttgggtccattttaatggagatgagggtcatgacagagagagagagagagagagagcccccgctcgttcgttcaccaccacagctccgatcgatccgcaaggcaggcaagatgtacaacgcgccgtccgcccaggagacgtcctacttggagcacgtgcacaggcgccacgaggagaacggctgcctctacgcctgcatcttcacggcgctgtgctgcttctgctgctacgagacctgcgagtgctgcctcgactgcctctgctgctgctgcaactagccgggctagctccggagga

SEQ ID NO: 266616 - DNA, 2508 bp, Zea mays
tcgttgtgtggaacccttggttggtttactggttagtgaagctaaccctgcccagctttctgttgttcgtgcattggataggcttctagatgatgagcaactggcagaattagtggcagcacatggtgctgtcattcctcttgttgggtttttgtatggcaaaaactacatgcttcatgaggcagttgctggagctttggtgaaacttggaaaggacagaccagcttgcaaattggaaatggtcaaggctggtgtaattgagagcattcttgatattctccatgacgctccagattttctttgcatcgcattggcagaaatgcttcggattttgacaaacaatgctaccatagcgaaaggtccatctgtagccaaagtagtacaacctcttttctctttgctttctaaggcggacatgggtcctgaagggcagtatagcacattgcaggttcttgtgaatattttggagcatcccgaatgccgtgctgattataacttgacacctcgccaaactattgagccagtgataaccttattgaattcatctccaccagctgtgcagcaattagctgcagaactcctgtcacatcttcttctagaagaccacctccaaaaggacacagtaacagagcaggcgattactcctcttattcaagttctttcttcaggtttgccaaatttacagcagagagctataaaagctctagctaaccttgcaatagcttggccgaatacgattgccaaggagggtggtgtttttgagttgtccaaagtgttgttgcaatctgacccgcctttgccgcatgttgtgtgggaatctgcagcatctgtattgtctagcattctacagtacagtactgagtttttccttgaggtacctgttgcagtactagtgcaattgctcaggtcaggaactgaaagcactgttgtcggtgctttgaatgcccttcttgtattggagagtgatgactcaacaagtgcagaagcaatggctgaaagtggtgctgtggaagcattgcttgatctcctgaggagtcatcagtgtgaggaaactgctgccagactaattgaggcattgctgaacaatgtaagaataagggaggcaaaggctgctaaaaatgctattgcaccattgtccatgtaccttctggatccacagacacaatctcaacagggaagattgcttgctgctcttgctcttggagatcttttccaaaacgaaggtcttgctcgttctactgatgctgttgcagcatgccgcgctctagtcaatcttcttgaagatcaaccaactgaagagatgaaagtggtagcaatatgtgccttacagaatctagtcatgtacagccgagcaaataagagagcaattgcagaatccggtggtgttcaggtcctgctggatcttatcagttcaagcaatcctgacacttctgttcaggctgcaatgtttgtcaaacttctattcaataaccatactatccaagagtatgcaaccagtgaaacagtcagagttataactgcttctattgaaaaggatatatgggcttctggaagtgctaacgaagagtatctcaaagcactcaatgctttgctgagtaacttccctcgtctgagggtcactgaacctgccacattgtgcattcctcatcttgtaacatcccttaaaactggttctgaggcaactcaagaagcagcgctagattcactatatcttctcaggcaagcttggtcagcttgcccagctgaagtatttaaagcacaatcagtggctgcatcggaggctattcctctacttcagtacttgatacagtctggcccaccgcggtttcaagaaaaggcagaattgcttcttcagtgcttgcctgggactcttactgttacgataaaacgtggcaacaatctaaggcaatcagttggaaaccctagtgccttctgcaagcttactcttggaaacaatccgccaaggctgacaaagattgtctcgactggtgcgacacctgaatgggatgaagcctttgcatgggcatttgacagtcctcccaagggccagaagctgcatatctcctgcaaaaacaacagcaaatttggaaagaaatcgttcggtaaagtgacaatccagatcgacagggttgtcatgttggggtcggtcgccggtgagtacaccctgctacccgagagcaaaagcggccccaatagaaacctggaaatcgagttccagtggtcaaacaaataactgtattacctacataatttaggtgttctctgtaagttaaagataagaggttgagtggttttgtactctgctgaaggttaccctgtttgtgcatcattgtaaatagcaggcagagaaagttgtcgtttgctgtacgttctgtgagatataaacagatgagttctcaggcgttttgtactggttgtgtcaggcttcattcgtttatttttttaccctgggattttgtctttgtaaaggggtgtaaacagaagtatatgatatggttaggttctcat

SEQ ID NO: 266617 - DNA, 555 bp, Zea mays
caactcgagactgaactatgatttctgacgagagatctgcgacgaggcgacgacccaaatggggaaaaccatagctaatccaagatctgaactccctcaaatcccgcaaccgggcccctaatcccttccaaacccaatctcccatctccgatccaatgccccctaccggcgacgacccgtcggccgccgccggcatctcattccccgatgcgggtggcggtggcgattctgaagacggcgacttcgccggctcccacctcctcgaccccaccgatccgggccttcccaaccccaccacctcctccgctaccggcctgccccacgcgatccctgcggccggtagcggcggcggcccggtcacctccggcaacggcggggagcggcggcccctgttccagcgcctctggaccgaggaggacgagatcgtgatcctccgcggcttcgcggagttcaccgccgcgcgcggcacggcgttcgcgtcgcaccagtacgacaccgaccccttctacgaggacatgcgccgccgcctccagctcgacttctccaagagccagc

SEQ ID NO: 266618 - DNA, 774 bp, Zea mays
gccgctcgtgccaattcctcggctgtttccttcgcagcctgcatctgctgtagcagagccaccggccaagaaggctaggaagaccaagaaggttgcaagtgttagtctcctggggttgatttgcgttgcaatgctttgtgggtgtttgattcctgcagtaaatcggatgtatgactctgttgatgctggagaaggtgctgcatacggtccatctcatcgtgggagggtgctggctgttgaggggcctcatgataatgtttcagatggtgtcgatccaaagccgccacagcgtgccagtgagacgcttccagcactggtgtatctaccaaagaatgggaagcatgtcaagattaatgggaatcttgttattaagtcgattgttgctagtgagaaagcttcattgcagatgtctggcaatgatgggaagcgtcctcaaaaccaagaggaggagactagactggcaattcctggctatgtgactccattgaaagctggagaggttatggaatcaaccgaaggaatgatgaacaatgaactgttggcgttagctcctgcagatggaagcatgtatagggaggaggatggattgctgccacagtggtttagtgaagcaatgtctggccccctgctgagctcaggaatgtgcactgaagttttccagttcgatgtgtccccatcatcagctcatccaaatggcatcattcctgtctattccaatgccatgtcaaactcgtcacagaacttcactcaagatcttcatcctgctcgtgttcg

SEQ ID NO: 266619 - DNA, 1506 bp, Zea mays
actgaaggcagaactgaggacaatttatggccagttatgtcaagacgacatgcctatggtacgaagagctgctgcatctaatcttgggaagtttgctgcaacagtggaacaaagtcatttgaagacagaaatcatgtcaatgtttgatgatctaactcaagatgaccaagattcagtgcgactattggcagttgagggttgtgctgctcttgggaagttgttggagccccaagattgtgcagcacatattctcccagttattgtaaatttctctcaggataaatcttggcgtgtgcgctatatggtggcaaatcaactgtatgaactatgtgaagctgttggtactgagcccacaaggggtgatctggtgtcagcgtatgttcgccttctctgtgacaatgaggctgaagtgcggattgcagctgctggaaaagttacaaaattctgcaaaatattaaacccacaaattgcaattgaacatattcttccgtgtatcaaggaattatcatcagattcatctcagcatgttcgttcagctttggcatcggttattatgggaatggctcctgtattgggaaaggacgccactcttgaacaactgcttcccatttttctttctttgctgaaggatgagttccctgatgttcgactcaacattataagcaaacttgatcaagttaaccaggttattggaattgacttgctgtcgcaatcacttctgccagccattgtagagctctctgaagataggcactggagagttcggcttgccataattgagtacatacctttgttggccagccagttaggtgttggtttttttgatgacaagttaggggcactttgcatgcagtggttggaagataaggttttctcgatcagagatgctggtgccaataatttgaagcgtttgacagaggaatttggccctgagtgggcgatgcaacatataattccccaggttttggagaagataaacaacccacattatctgtatcggatgaccactttgcaagctatttctttgctagctcctgtcatgggtcctgatatcacatgccaacagttgctccctgtcgtcattgcttcttcaaaggacagggttccgaacatgaaattcaatgtcgctaaagtcctgcaatcacttgtaccaatccttgatcaatctgttgtggagaagacagtgaaaccatgcttagttgagctcagtgaggacccagatgtagatgtaagatactacgcacaccaagcccttcgggcgtgtgaccaaatggtgatatctagttgactagcctgtccaggaattagcaaatgagatacatattggtctattctttttgaacattttaaagtgttatgtagtcttaaaaatattgtaccaccaatgacgttgatgcatctttttattaattatgtgttttttgatttaggtttagtttagtttttggattcaatcaaccatgggaagtaggtgccccttaaaaaaaaaaaaaaaaaaaaaaggaa

SEQ ID NO: 266620 - DNA, 734 bp, Zea mays
ctttttcgtccgcccacgcgtccgcccacgcgtccgaaaagatgaagcacaactgcacaacaccctagaacagtagtgtgatatgtagctcaataggttggttggttgtgtatcacaagagcaggggtagagacacagagagctaaaagaacattggacgcgagagagcagagtagaactgtagaagggagtggtgtacgtgcgctagactgccagtggcagctgctgcaagctagctaaggtgaaggatggatatcgagtcgaggcaagtttccaaaggggacgccatagctgctgctgtctctgttgactggaagggaaggccctgcgaccccctcaagcacggcggcatgaaagccgcggtcttcgtcctagggatccaggcgttcgaaatgatggcggttgcggcggtggggaacaacctgatcacgtacgtgttcggggagatgcatttcccgctgtcgcaggcggcgaacatcgtgaccaacttcatcggcaccgtcttcctcatctccctccttggtggcttcctctccgactcctacctgggcagcttctggaccatgctcatctttggattcgtcgagctctcgggtttcatcctgctggcggttcaggcgcacctgccgcagcttcgaccgccgccatgcgacatgatggcgccggggcaggcgtgcgaggaggcgagaggcttgaaggccggcatcttcttcgctgcgctctaccgtgtggcg

SEQ ID NO: 266621 - DNA, 918 bp, Zea mays
gagtcgacctcatccaagttccattattattttctccgaggaagccctttccccaggcacagatccggctcctcgccgccgccatggccgcccgcctccccctcctggtcctcgccgttgtcgctgcgtccctcctcgctgccgacgcgcggccgtgccacaccttcttcgtcgccttccgcgccgaccccaaccccagcagaggcgacgacgctgtaccccaccacctcggcgccccgcatgtcgctacagtcatcaccgtcttccgtgtccgccgtctcggtccgcacgtcccccacggtcaccgtaaccaccaccacctccactccatccccgccaacgtccggatccaccgccccgatctcccgcaccccgccgcggggccccaggagcgcgccagggacatcttcgtggtcgtcatcgggctcctctttggcgtcgcctgcggagcgctcaccgctgcttccgtgtacctcgtctggtccatggtcgccggagctgctgcggtctccgcgtacgacgagctctacgacgacgaggacgaggcgtccgacatcgagagccccaagaaggtcggctacgtcatcatccaggagctcgaggtcgatgaaggcggtaagaactagggccggatttggtggcgctcgtcctcccgggaggtagggcaagttcctgaagtgggttggcctatggccatatgttgagtgaatcgtaatgtctgtatgacaatgtgatgcccagttgggacttgggacccttaggggtttgccccccatgtgaatatgatcgtgaagcatgcttaagctaccaaatgtgcttgtttttggcgaacctatcaatcaatgttatgcccccctgtgaaactgttcatttgatctgctatttaatgaataagggccgggctttgagatcagagtt

SEQ ID NO: 266622 - DNA, 642 bp, Zea mays
cccacgcgtccgccaagttccatttattattttctccgaggaagccctttccccaggcacagatccggctcctcgccgccgccatggccgcccgcctccccctcctggtcctcgccgttgtcgctgcgtccctcctcgctgccgacgcgcggccgtgccacaccttcttcgtcgccttccgcgccgaccccaaccccagcagaggcgacgacgctgtaccccaccacctcgccgccgcccaggacgccgtgctgcccgctgatccaggggctggcggacctggaggcggcggtgtgcctctgcaccgtcctcagggccaacgtcctgggcatcaacctcaacctgcccatcaacctcagcctcctcgtcaactactgcggcaggcgcgtcccctcgggcttccagtgcttctgactatcacacgcccatcgatcgatcgatctggaggctaaataatttctccaagctgctagtatacgtacgtacgttgatatatatgatgtagtattatatatatgtccatgcatctcgtcgtctatcgcatgttgttgttgttgttgttgtttttcgatgatcctgtctctgttataaatatcattattattacagtacgtgtgtgacctgaatgtttgtatttggcct

SEQ ID NO: 266623 - DNA, 569 bp, Zea mays
ccgattaaaaagtgtcatcattgagataatcataaaacatcaccaacctacacacacagcagcggcaatgggttgctggcctgctctacaaattggtcagcgaaaaaagaatcttagtagcccgacgaacagatacataaacaacgtcgcagagatcttgaggcgaggacggtggtcatctgattaaagcatgcctcctcgcccctcgctcatccacctgaagctgtggcgacttcggccttgtcacctgcttcgtcgatttctgtggtcggaatggtttgtcaaacttggggacctgccgggcatgtggcaccatggttctcctcagctgcttcagcgccttctcctcctcaatcttttgcgcgaattcgttctcctctctcaaccttttgtaagtcttttctttctcttttatcaatgctatcaaattctgatctatgcacagccctctcatcaacatgcaacacaaattgttgaacttcagtgagaggtttccgctctttctccggacgtgcgatagggtcctctttcagtacaggttgagctttgacgattctcctctgagcttc

SEQ ID NO: 266624 - DNA, 632 bp, Zea mays
gtggtggtggtggaagcggtgggggtgggagtggagggggtggatcgggtggtgggagtggaggcggaggatctggtggaggcggcagcagcggtggaggcggcggatctggtggtggtggaagcggtggcggcggcggatctggcggcgggccgacgagcggtcgttgccccgtggacgcgctgaagctgggcgtgtgcgccaacttgctgaacgggctgatcaacgcgaccctggggacgccgcccaggacgccgtgctgcacgctgatccaggggctggcggacctggaggcggcggtgtgcctctgcaccgtcctcagggccaacgtcctgggcatcaacctcaacctgcccatcaacctcagcctcctcgtcaactactgcggcaggcgcgtcccctcgggcttccagtgcttctgactatcacacgcccatcgatcgatcgatctggaggctaaataatttctccaagctgctagtatacgtacgtacgttgatatatatgatgtagtattatatatatgtccatgcatctcgtcgtctatcgcatgttgttgttgttgttgttgtttttcgatgatcctgtctctgttataaatatcattattattacagtacgtgtgtgacctg

SEQ ID NO: 266625 - DNA, 612 bp, Zea mays
tggaattcccgggtcgacgcacgcgtccggggtggcagtcgaggccgaggatctggtgggggcggcagcagtggtggaggcggcggcggcggtggtggaggcggaggaggatctggtggtggcggcggcggcggcggtgggacgagcggtcgttgccccgtggacgcgctgaagctgggcgtgtgcgccaacttgctgaacgggctgatcaacgcgaccctggggacgccgcccaggacgccgtgctgcacgctgatccaggggctggcggacctggaggcggcggtgtgcctctgcaccgtcctcagggccaacgtcctgggcatcaacctcaacctgcccatcaacctcagcctcctcgtcaactactgcggcaggcgcgtcccatcgggcttccagtgcttctgatatatatggtgtagtattatatatgtccatgcatgcaatgcatctcgtcgtccatcacatgttgttgttgttgtgtgtgttttcgatgatcctgtctctgttataaatatcattattattacagtacgtgtgtgacctgaatgtttgtatttggcctgatgcatgcacattcatggttcagatttttagcgacatcctctgaat

SEQ ID NO: 266626 - DNA, 430 bp, Zea mays
atcgggtggtgggagcggtgggggtgggagtggaggcggaggatctggtggaggcggcagcagcggtggaggcggcggatctggtggtggtggaagcggtggcggcggcggatctggcggcgggccgacgagcggtcgttgccccgtggacgcgctgaagctgggcgtgtgcgccaacttgctgaacgggctgatcaacgcgaccctggggacgccgcccaggacgccgtgctgcacgctgatccaggggctggcggacctggaggcggcggtgtgcctctgcaccgtcctcagggccaacgtcctgggcatcaacctcaacctgcccatcaacctcagcctcctcgtcaactactgcggcaggcgctgtctctcgggcttccagtgcttgtgatcacgcccatcgatccatctgcaggcttaataattt

SEQ ID NO: 266627 - DNA, 1795 bp, Zea mays
gcagcagctagctgctatagcgccaacacttgagcagttgactaaacagaaaaatgaaagagaaagagagtttgttaatgtacaatcacaaattgatcaaatatgtggtgaaatcgctggcaccatagaggtgggtgagcaggtgacaacaccccaagtcaatgaggatgatttgacacttgagaggcttgaagattttcggtctcagctccaggagcttgagaaagagaagagtaataggttggagaaggttcttgagtatgtaattatggtacatgatctttgtactgtcttggggatggattttctcagcacagtgactggagttcaccccactttagatgactctgttggcgacaactgtaagagcattagtgatgatacattatcaaaacttgacaagacggtagctacacttaatgaagataagaagttgcgtctaagcaagcttcaagaactcgctggtcagctctatgatctttgggatctcatggatgcccccaaggaagaaaggcgcatgtttgatcatgtgacctgcaacagatcagcatctgtggatgaagtcacagcacctggatctcttgctctagatttaattgaacaagctgaggttgaggttcaaaggttagaccagctgaagtacagcaagatgaaagaaatagctttcaagaagcaaaatgagctggaagatatctacgctggtgctcatattgtaatagacacagctgctgctcatgagaaaatattggcactgattgaggcaggtaacatagaaccatcagaactaattgcagatatggatgcccagatagcaaaagcaaaggaagaagcattgagtagaaaagatatccttgataaagtagaaagatggatgtctgcgtgtgaagaagaaagctggcttgaagattataaccgggatgacaacaggtataactctagccgaggtgcccacctgaatctgaagcgtgcagaaaaagctcgtatccttgttaacaagattccagcacttgttgaaactctagtggcaaagaccagggcatgggaggagaaccgtggtctgtcttttatgtatgatggtgtacctcttctagctatgttggatgagtatgttatgctcaggcaggaaagggaagaagagaagaaaagaatgcgggaacaaaagcgctacgttgagcagcaattgaacactgatcatgaagggccattcggatcgcgagtgagtccaaaccggcctgccagttcgaagaaggccattggcccaaagttgaatggcagcgtctcaaacggcactcctccaaacagaaggctctcaatcagtggccaacagaacggtggtggccatggcgtcaggtctggagggaaggatagcaagaaagacacggcgaagacagcatctcctgggaacagtgcagctgcaactgcacctgtgggtttgacagcaacagccaaagaagacgccgcctcccaaatttctgtcaccgatccggttccgagcacaccatgatctttaacctagcatcatatattagatataagtggccctttttctgttgttctattgttttctggtaatatattgtaatggcttcgtagagtaattatgatccccttcagctgctttggcacatcctggtgtaattcttgtttagttcccctaggcggtgctgtttcgacttgtcagacggtgtagtatagtcttactgagatgtattgtcattaatcagtgtgctggacgtataagctgttaaaaccttttctgttcccgtcaaaaaaaaaaaaaaaaaaaataaaagga

SEQ ID NO: 266628 - DNA, 725 bp, Zea mays
ccgatcatgaagggccattcggatcgcgggtgagtccaaaccggcctgccagttcggagagggctgttggcgtaaaggtgaaccgcagcgtctcaaacggcactcctccaaacagaacgctctcaatcagtggccaacacaacggtggtggccatggcgtcaggtctggagggaaggattgcatgacagacgcggcgaagacagcatctccagggaacaatgcagttgcagctgctcctgtggacgcggtctcccaaatttctgtcaccgatccggttccgagctcaccatgatctttaacctagcatcgtatattagatataagcgactctttttctgatgttctgttgttttgtggtaatatcttataatgccttcgtagagtaattatgatgcctgcccatccttcagctgctttggcttcatggtgtaattcttgttttagttccgctcggccgtgctgtttcgacctgtcagacggtgtagtgtagtcttactgagatgtattgcattaatcagtgtgctggacatatagctgttgaaacgttttttgtgtgcacccctgtgagacagtgagagtagcgtacttttagcattatctggaaactggactccgcatttcattctgtaggtacgcttaagtgattgcttccaaaatgctgatatgtttgaagtcttggtacctttgagcttgactatgaagaaccaaggaatgaatctgctat

SEQ ID NO: 266629 - DNA, 1112 bp, Zea mays
  unsure (1)..(1112): unsure at all n locations
cgactacgtgggcggacgcgtgggccctctctagccttccacccttcatccaccagccgctcctcgagcacccccgtcccgcgccgcctccggctccggcgagatgtcacgcttcggtcgatccggcccgccgccgccgatccgcgacacgtactcactcctcgtcctcaacatcaccttccgcacaactgctgatgacctcttccctctcttcgacaagtacggcgagattgtcgacatctacatcccaagggaccgccggactggtgactcgcgcggattcgcgttcgtgaggtacaagtacgaggacgaggcacagaaggcagttgaaaggctcgatgggagattggtagacgggagggagatcatggtgcagtttgccaagtacggcccaaatgctgaacggattaataaagggagaatagtggagccagttccaagaccaggggggcgttccaggagtcacagtccaagacggaggtaccgtgatgattatcgagatgaccatgatagagattatagaaggcgaagccgtagccagagtagagatagatacacccgtgacaggtacagagatagggattaccgccatcgtagcctgagtcgcagttttgtctcctgcacgaagaagccctagtcatagccgcagccgcagttacactcctgatgattacaagaggcgtggcaaagacagcagcgcatcacctgcaagtaggagccctagtcgctcccctcctcgcaagacgccaccttctcctaagagatctcctgtcaggcacaatgatgaccggtctccacgctcacggagcccttcaacataagcacaattcacttgcaaagcatcttgaacagctcaggatgaatggacttgctctgatcctatgtgtgtgtggctatgcttgtgctcaatggtgggcacttttcagttaaagttttgtagtgctgtctgtcagttgctgcctcaaacttggaatactacttctgtttggcacctgaactgcttatcaaaaactttatgtataccagttacattccacttttaaccttcatattagtattaccatattataaaaaaaaaaaatggaatgtagggcggccgctcgcgatcacgn

SEQ ID NO: 266630 - DNA, 960 bp, Zea mays
ttcgtgtcgcagctacagtcctgatgattacgggaggcgtgggagagacagtttgtcacctgagcgacgaagccctcgtcgtagccgcagtcctgatgattacaagaggcgtggcagagacagtgcatcaccagcaagtaagagccctagtcgctccccacctcgcaagatgtcaccttctcctgagagatctcccgtcaggcgcaacaatgaccgatctccacgctctcggagcccatcgacataagcgcaattcacttgcaaagcatcttgagtagctcaggatgaatggacttgctctgatcctatgtgtacgcatttgctcgatggtggcctcttctcagctaaagttgtgtagtgccgtctttcagttgctgcttcaaccttggaatactacttctgtttggcacctgaactgcttatcaaaaactttatgtacaccagttccattccacttttaaccttcgttttagcattatcctattatcagttatcaccatcttatcagtatttagtacttactattcatggtgacttgcacctttctagttacatgatgcagtgaagatgtgctggctgatatgcggtcaacatgcacgtagcttactgttgaagttgatattatctgtgctgtttgcgttgttgatgatggctgatgagatgattgatgatgatggcactgcagctgcctgcaccatttgctgtctgcacctattatgctgacaagtaagattccaatgatttatgcatcgccccatgcatctacatgctataggtgttaacccccattatagtatttggatttagatgtgtctgcactgatctatcatagtcctgttttgggtttttggatcataaggtctgcatgtgcacaattaatcgttgcatgcactggatgtgctgtcaattcatttctgcggtttgccaaacatgtcttatcgagaatgcataagcgcatgt

SEQ ID NO: 266631 - DNA, 715 bp, Zea mays
cggaccgtgggcacatcccttcttgcttctcgcctccccacccttcatccacccgccgctcctcaagccccaagctccggcgatatgtcacgcttcggtcgatccggtccgccgccgccgatccgcgacacatattcactcctcgtcctcaacatcaccttccgcacgactgctgatgacctcttcccgctcttcgacaagtacggcgagattgtcgacatctacatcccaagggaccgcaggactggcgactcgcgcggattcgcgttcgtgaggtacaagtacgaggacgaggcacagaaggcagttgataggctcgatgggagattggtagacgggagggagatcatggtgcagtttgccaagtacggtccaaatgctgaacggattaataaagggagaataatggagccagttccaaggcccaggggtcgttccagaagccgcagtccaagacggaggtaccgtgatgattatcgagatgactaccaggatagagattatagaaagcgaagccgtagccagagtagagatggatacgcccgtgacaggtacagagatagggattaccgccatcgtagcctgagtcgcagtttgtctcctgcacgaagaagccctagtcatagccgcagccgcagttacactcctgatgattacaaagaggcgtggcaaagacagggcaatacctgcaagtaggagccctagtcgctcccct

SEQ ID NO: 266632 - DNA, 826 bp, Zea mays
gctaggcacaaggaggagctgcaagaagcagcagaacacagggacctgcttgagaaggaccttgaaagggaaaaggctgccagggcagaaattgagaaaacatcttcccgtgaagcgcctaaagctccacttcccgatcaaacaagaaatgcccctctcggaaagctgtctagttctggcagtataaatagtctagaagaaagccattttcttcaagcatcgttggatttatctgacaatgcttcattagagaggcgaatgtcttcagaaagtaatatgtcatattatctgaggaccatgactccaagtgcttttgagtcagcacttcgtcaaaaggatggagagcttgcttcttacatgtctcgcttggcctcattggaatctattcggaattcactggcagaggagttggtgaaactgacagaacaatgtgaaaagttacggactgaagccgctgctgtgcctggcttaagggctgaattggaagctctgaaacaaaggcacttccaagctctagaactcatgggggaacgtgatgaagagttggaggagctaagaaatgatattgttgacctaaaagagatgtacagggagcaagtggatcttcttgttagccagctccaggcattgggtgctcgtgtatagtgccggtatggatttgtcgtgccatcgggcaaggcaagacaggtctgagacttgagcatgttttccttttttattttgtaaccgtacaacggcactgaaaattattcgtttgtccacatcaaaaacacctttcggcgttgggtttaggaggatacgttgttgtatactagatcaagtagtt

SEQ ID NO: 266633 - DNA, 425 bp, Zea mays
tcttcacgcgtccgggagttggtaaaactgacagaacaatgtgaaaagttacggactgaagccactgctgtgcctggcttaagggctgaattggaagctctgaaacaaaggcactttcaagctctagaactcatgggggaacgtgatgaagagttggaggagctaagaaatgatattgttgacttaaaagagatgtacagagagcaggtggatcttcttgttagccagctccaggcattgggtgctcgtgtatagcgctgcctgcgctggtatgaatttgtcataccatctaattctcgtccagtgcatcgcggccaggccaagataccagggtccgtgacttgagcatgttttggttcaaattttgtaacaccatacaacggcactgaatgttttcgtttgtatacatcgaaacacagttgttg

SEQ ID NO: 266634 - DNA, 1650 bp, Zea mays
ttaaaatcgttgggctgttcgattcactcacctcactccacctgttgggtgaagaagccgcccgcctgccgccgactcccgcgtctctctccaagtgatctccttccacctttgccgatcgcccgttgccaccggccgggcgatcctcgtgcttccacttccaccatggtctcctcctcctcctcgtcctccagcttcctcctcccgctgctactgctctgctcgcacctctccctcgcctcggcagagacggcgtcggcggcggcggacctcctcagcgaggcgcgcgcgccggggttcgccgcgtggctgcgcggcgtgcggcgccgcatccaccagcgccccgagctggccttccaggagttccgcaccagcgagctcgtgcgggccgagctcgacgcgatcggcgtcccgtaccggtggcccgtcgcccagaccggcgtcgtggccaccatcgcgggcgccgccgccggccccgtcgtcgcgctccgggccgacatggacgcgctccccgtgcaggagctggtggactgggaacacaagagccaggagagtgggaaaatgcacgcttgcggacacgacgtgcacacgacaatgcttctgggggctgccagaatactccaggatcgcaagagcgacctaatgggcaccgtgaagcttgtattccagccggcagaggagggccagggcggcgcgtactacgtgctgcaagaaggcgtccttgacgacgcgtcagccatattcggcttgcacgttgacccggccctccccgtcggcgtcgtttcgtccaggccagggcccttcgcggcgacgtccggtcggttcctggcgacggtcaccggtaaaggcgggcacgccgcgatgccccacgaatccatcgaccctgttgtagctgcagccactactgtcgtcagcctccagaagatcatcttccgagaaatcgatcccctgcagggcgcggttgtgtccgtcacttttctgaagggaggagaagcgtacaatgtcatcccagataatgtggcctttggcggcaccatgaggagcatgacgaatgaaggtctatcgtatctcaagaagaggatcaaagagatcgtcgaaggacaggcagcggtgcaccactgcagtgccagcgtggacttcatggaggacacgatgaagccgtacccggccgtggtcaacgacgaagggatgtacgctcacgccaaggaggtggccgagggcctccttggggagaagaacgtcagggtgggtccccaggtgatgggcgcggaggacttcgggttctacgcgcagaggatggcgggcgccttcttcaccatcggggtcggcaacgcgagcaccatggcgaccatccattccacccactcgcctcacttcgtcgtcgacgaggacgtgcttcccgtcggagctgcgttccatgctgctgtggcgattgaatatgtcaggaagaaccgtgcgtcgacctaaacctaaactcaaataaatcagacggaacaaaacggcagtagtttgtcttaggtgtcactatatataatgcgagtatttacatctagtcgctctcgttcctgtgtcgttagaaacaaagcagagtgattgggattaattcttagatcagttgcgagttgccactacatgacacactttgccgct

SEQ ID NO: 266635 - DNA, 1146 bp, Zea mays
ccctcgtcaaaaccgctgctcactgaatatttccatttctacactttcgtggcctccgttcccctgcctccgccgtcgccgcagccatggcgtcgcggcgctgcctcctccgcctactctcgagccgcctcgtccctcagagatctcaaccttttgcaccgggctcgatcgcgaccagaaccctgaccacttcgtccgaggccctcggccccccagctcccggggccctcccctcccctcggctgtactacctctcgcgctgccacttcgcgacccgctcctccggcgacgaggacgacgaatatgaagacgaagaagagcactacgacgaggaggatagcgagggggaatggggggacgatgaggaggtggtggcggcgaagaaaccgagcgggaagacggaagaggagaaggtagcggaggcggcggagatcggctacaaggtgctcgcaccgctcggggctgacgagaaacccttcaagccctacgagcccgtcttcgccatcgtacagatcggctcgcatcaattcaaggtgagcaatggcgactcaatcttcacggagaggttgaagttctgtgatgtgaacgacaagttgttcttgaaccgagttctcatgcttggttcacaaactcaaacagttattgggaggccaatactacctgatgctgctgttcatgctgttgtggaagagcatgccttagatgcaaaagtgatcatattcaagaagaaacggagaaaaaattaccgccggacaaagggccatcgtcaggagttgacaaaactgagaataatcaacattgaaggaatagataagccagagactgctgctgttgctgcctaaattcatgggaaagagaaaattagcagcataccagttaaatgtcggtcagtcagatttcgatagttgataccagtgaaatgtcgcttcttttcttgttaattcaaacgttagaggctgtcagcattatgactcgggtaaagtacctgacatgaagcctatgtaccgagcagtttgggtggtgtggatcagctgatgtagtttacctagtgacacatatttttcatttttggttagcttttctgtgcacatcctttatatccgtgtactcagcctgttcgcccgactttaatttgtactgacttct

SEQ ID NO: 266636 - DNA, 420 bp, Zea mays
tcaagatacttcgagcgggcggccaaggggtccccgaagaacagccaggtgctagcagcgaaaaccgcgttcctgtgggacacggacgacgagaagggcggcgccaacgcgttaagctacgcggccttcgctcagccggcgcactcgtctctggcttcggcgacggcaacaacctgaactctctcgccatctcacgagtctcgagagcggttcctccgcagtcgaaatggagcgtgacagtggcctctgctcgtctctgtctgtagtagcataccaataatactactcgcgaactctctttctgagcaaacagattccaaagcgccgtgtagccaaaaaaaaaaaaaaaaaaaaaaaaaccaacccaaaaaaaaaaaaaaaaaaaagggaggccgctcgcgatctagacggacgagtggg

SEQ ID NO: 266637 - DNA, 758 bp, Zea mays
attagggatatcctttcaatgcccatgcctatgccaaaaaatccaaagattgcccttatgttcttgacaccaggttcattgccctttgagaaattgtgggagaagtttttacagggacatgagggaagatactccatctatgtgcacgcatcacgtgaaaagcctgttcatactagttctttgtttgctggccgggatattcacagtgatgcggtagtatggggattgatttcaatggttgatgctgagaaaagattgttagcgaatgcactggaagatgttgataatcaagtttttatcttgctttctgacagttgtgttccactgcattcatttgattatgtgtataattacctcatgggaacgaatgttagcttcattgattgtttcaaggatccaggtccacatggcagtggaaggtactctattgagatgtatcctgaaatagacgagagggattttagaaagggtgcccagtggtttgcagttacgaggagacatgctttaatgattctggctgacagcctgtactacaagaagttcaagctatactgcaagccagcagaagggcgcaactgtattgcagatgagcattatttgccaacgctgttcaatatggtagatcctggtggcatctccaattggtctgttacacatgtggattggtccgagggaaaatggcatccaaggtcatatagtgctgacgatgtcacttatgatctcttgaagaatattacaacaactgatgagaacttcca

SEQ ID NO: 266638 - DNA, 558 bp, Zea mays
gggtatctgagaaagaagtggtcgaggcaatgcaggcctttgcgtccaacgtcctgaacctgtgggagaggcacaggtcggagcaaaggcagggtctgatggcgaacaaaggcatggacagagatcttagggtgatggaaagagacgagcaatcgatgcgcaaggctctggaggcacagaacaagaagcttgtgctcatttcgaaccagggcagcgtgtccttgtctgcacaagcgttacatgagcgaggccctggcgctgaagccggtggtagtctgcagacaggtctgaggaatattttcgaagcgatggagaacttcacctctgcatctgcaaatacgtacagggagctccatcttcgcgccgaagaagagaaagcccgggttgcgcaggagagcggcagcgtttcctagttccacatgaggacatgcccctttttcggtggaaagaagggggactaacgccagtggcagcgtttctacggcacagtggcacaaccaacccctagtggcagctgatgcaccttgctcgccaggtgcctcagttttttgggttcca

SEQ ID NO: 266639 - DNA, 443 bp, Zea mays
caaaatcatggatccagagactaagactacaacacctccagcaaccattacaagctttggtgttgctacccctgtttcaattaccacatcgaccaccccttctggtgctgcaaggagcacacctctgagacctgtgaggatgtctcctggctcccatcagaaatacagcacgccaccaaaaaagggtgagggtgaacttccaactccaatgtccttagagcaagcagtggaggcctttgagaacttgggtgtatatcctgagattgagcagtggcgagatagtctcaggcagtggttttcttcagttgtgatgaacccacttgtacaaaaaatcaaaacaagccatactcaggctaagcaaacaacagctactggtggggcttcagttactgttagccaagttggaagtgatctgccaagcacaacaccaccagttgccttgt

SEQ ID NO: 266640 - DNA, 732 bp, Zea mays
gacgattttggtgtccctgacgtcattcacttcctgaaggcgtcgctattgaagtttgtcttggccacgacgtcgccttcgattgatgctttcgcttctcgatgcctgatatgtgggtggaggaagggacttgcaacgtgaggccggagctgctacgttagggaatgtggcttgacaatatcacaataatgacatgaagcaaaaccctccctctttcgtggactggtttgctttggaggttgggcatatgtcgggagcggggcggcaaatcaagattggaagtcggagctgctccttgtttgagctcaacaatgatggcctgttgcgacctttcgcttcgggccgcctgcctgttttcgtttggatcatctaaggcttcccatggtaagtcagagtcgctggctactttgcaaccatgcttggcaatgataactcatggcagctttaggtgctcttctgcattgcgttggtgggtttgcccttcgtggtcttgttagttttggttgtaggagttggtttgtggtctggtgcatgaagtcggagctgctaagcctcggtgctaagctcgacaacgatgacttgagccaggctttagaactgctgacgaggtgagtggagtagagcaaaagtgttgtgtggtcatctgttgatgtcccaatccaaccagcccacttttgttgtttctagttggttcgagtgttgtgtggcacatgttgatgttccaatccaacc

SEQ ID NO: 266641 - DNA, 606 bp, Zea mays
atggttggctgaaaaggctggaaacgtttatcatcatccttataacctgggaatctatgagaaccgagtttcggtgctaggtgctaacatgttgtgctggctgtgcccaatatcaaggaacatcggaaatggtgttcgtttccgcacatcatatgacactccactatcaacttcagcaatgtgatgcacaccatataagggtacactcatgttggatatctgctaactcgcaaaagaaactcaggtgcccacacacagtgctaggtttgctattcttcacagttctaatttttagcatttaaccaaagcgcgtttgtctatccttaaaaggagtgtgttttccaatgcttgaacttttgtagtaagggtgtgctacatcaaatccagcgtgtttaggatactgctacatacatgaaggtgagctttaggattgtttcctaaagcctcctagaatctgtcattaggaatttttagagatgctgacatacttagatttttctctctttttggggaacattcttgatcaaataagtaattgttgcctgtgtagtagactagagtgggctgttttaacacactcaaaaaaaaagggggaaagaaaagaaa

SEQ ID NO: 266642 - DNA, 494 bp, Zea mays
attgagcgctggaagaacaagcgacaactaaaaagaaacggagggagtatctgctaaatcgcaaaagaaactcaggtgcccacacaaagtgctaggtttgctattcttcacaggtctgatttttagcatttaaccaaagcgtttgtgtatccttaaaaggagagtgttttccaatgcttgaacttttgtagtaagggtgtgctacatcaaatccagcgtgtttaggatactgctacatacatcaaatcctaaagcctcctagaatctgtcattaggaatttttagagatgctgacatacttagatttttctctctttttggggacattcttgatcaaataagtaattattgcttgtgtagtagactagagtgggctggattaacccacacttaacaaaaacggaaagaaaaggaaagatgtactcgtggttgttctgttgtaaaattatgtccaaactggtttttttttgtcgtgaaagctcgtcagctcgtgt

SEQ ID NO: 266643 - DNA, 1123 bp, Zea mays
  unsure (1)..(1123): unsure at all n locations
ttctgcatctgacaagcaatctgaacctcagtctagacagcataaaccttcaaacttccctccgactacccagcttaacttgaaaaacagtgcaacagagaatcctaatgttgtaaatcaggttgatacaatgaaatcagttacaggtggttttggttcacagttacctcgtgtacctaaggaacctgctctcctagatgagagatctctattggcttgtattgtacgtgcagttcctgctggacctgagggtggaatcaggattagctcaactctgccaaataggcttgggaaaatgttggctcctcttcactggcatgattataagaagcaatatgggaagcttgatgattttgtggctagtcgtccagagctgtttgtgattgagggagacttcattcaccttcgtgaaggagcacagcagatcatttctgctactacagctgctgcaaaaatagctgctgctacagcatcttctgccccttactcatccttactgccttctgttgccgttactcctgtggcacaaaatactcggcaaaagaggaggcccgcagttgattccagatcatcaaatgcaattccctctggaaacggcttcacagatcaatttaacatcattcagggtgttagtgacgtacctgtttcaggcaaagtaagaaacaccctagataatggcttcttaggtgaagttcgcactgggcagccatccgtgctcacagctgctactgccaatggagcaagacatgacaaaggtacaaataatgtcatacagggttatggtggaaagcaacaagggaggtcaactgggatggcttacctttccagaagatgaagtagttttcactcgacgcaattggttttgagggtggtgaagctgttggaaaccatacaagtggcattgttttggcctccaaacggccgatgctgaagatgacctggattaaagttattctagattttttttgttgcaccattgctattcacagcgcctgtatgagggccttgttgtggcgcagcctcctgaaattttgngactatgcccctggtctgtgcttgtattgtggtgcacatggaatgatgtgaatgttatagcaaaaaaaaaaaaaaaaggcgcgcccgc

SEQ ID NO: 266644 - DNA, 491 bp, Zea mays
caatttaacatcattcagggtgtcagcgacgtaacaatttcaggcaaagtaagaaatatccaagataatggcttcatagatgaagttcgcactgggcagccatccgtgctcacagctgctactgccaacggagcaagacatgacaaatgtgcaaataataccagacatggttatggtggaaaacaacaggggaggaccactgggacgacatacctttccagaagatgaaccaactttcactgggcgatgatgctgttggaattggaaaccatgcgagtggcgatgatgcggttggggaaaccatacgagtgacgatgctttggcttcgaaatgatggtgaagatgacctggattaaagttattctagattcattttttattttgcactattggtcttcacagagcctgtatggttggggcccttgttttggcaaagctgtactgatatatccctaccccaagaatcagaagcctgccaaagttttgcgtct

SEQ ID NO: 266645 - DNA, 1253 bp, Zea mays
caaagacttagaacagttgatgaacagcaggaacacttatctagccaagcaagaagagtgcacgaagaagatccgagatttgggcttgttgcctgctgatgcttttgaagcgtacaagaggaaaaacaagaaacagctacataagatactctatgactgtaatgagcagttgaagcagtttagtcatgtgaaccaaaaggctcttgaccaatatgtgaacttcacagaacaacgcgaacaactgcagagaaggcgagctgaacttgatgccggtgatgtgaaaatcatggaactcatatcggttttagaccaaacgaaggatgaatccattgagcgcacatttaaaggggttgcaaggcacttccgtgaaagtgttttctgagctggtgcaaggtggtcatggatatttggttatgatgaagaaaaaggatggggatgcagttgatgatgatgaggaggaggatggacctcgtgatccaggccctgatgggagaatagaaaagtatatcggtgtgaaagtcaaggtatcatttactggcaagggagaaactcagtctatgaaacaattgtcaggcggacagaagacggtggtcgcactaacactgattttcgctatccaacgatgtgacccagctccattttatctgttcgacgagatcgatgctgctctggatccacaataccgaacagcagttggaaatatgatccgccgtctagctgacatggctgacactcagttcattgcgaccacattccggccagagattgctaaagtggctgataagatatatgccgtgagacacaagaatagggtgagcaacatcgacgtggtgtccaaggaggaggccctggacttcatcgagcgtgatcagacgtacaatgctagctgaggctgctgctgctgtgtattgattgatctgcaggcagatgctaacgcagacaggatagttcttgttgtgttatggatattctggcctattgttgtagctgtgtatatgtgtgatgcagttaggtagctattggaccagcttgtttggcgcatcaacgttgtgaatgtagcagctaccaccttggtttggtaccagctttaattaagtttgggaagcgctgattagactagacgtacgttacatggtgccccatgattgttgtatggcacgcccagcccaaaatggcagtaatcagttcatttcgacaattaacgtaagtgtaagtgtacgagtagtggtattcgaatgttttttaactgcgaa

SEQ ID NO: 266646 - DNA, 661 bp, Zea mays
atttactggcaagggagaaactcagtctatgaaacaattgtcaggcggacagaagacggtggtcgcactaacactgattttcgctatccaacgatgtgacccagctccattttatctgttcgacgagatcgatgctgctctggatccacaataccgaacagcagttggaagtatccttattgtttgttctagtgtctagctatgcacatgatcaatgcctcttctttgtgtgtcaatagtcctgctgctttcccgtgggcgcacgcctgggatgatccgccgtctagctgacatggctgacactcagttcattgcgaccacattccggccagagattgctaaagtggctgataagatatatgccgtgagacacaagaatagggtgagcaacatcgacgtggtgtccaaggaggaggccctggacttcatcgagcgtgatcagacgtacaatgctagctgaggctgctgctgctgctgctgctgctgtgtattgattgatcgcagatgctaacgcagacaggatagttcttgttgtgttatggatattctggcctattgttgtagctgtgtatatgtgtgatgcagttaggtagctattggaccagcttgtttggcgcatcaacgatgtgaatgtagcagctaccaccttggtttggtacca

SEQ ID NO: 266647 - DNA, 453 bp, Zea mays
ggcccattttgctgtctgtggctccggctgtggtggtggctgcggcagcggcatggtcatcgaaggctccaaggttaacaacgttaacgccatgtccggcggctgtggctctggttgtggcggtggctgcggcagtggcatggtcatcgaaggctccaaggccaacaacgccatgtccggtggctgtggctctggttgcggtggtggatgcggcagcggcatgctcatcgaaggctccaaggccaacaaagccatgtccggcggctgtggctctggttgtggtggcggttgcggcagcggcatggtcatcgaatgctccaaggccaacaacaccatgtccggcggctgtggctctggttgcggtggtggttgcggcagtggcatggtcatcgaaggctccaaggccaacaacgccatgttcggcgggtgtggctttggttgtggtggtggttg

SEQ ID NO: 266648 - DNA, 1554 bp, Zea mays
ttagtgtcacggccatgggagccatcacgcttgacctccgccccgggctcggcgtcggccccttcaccctcgggatgccgatatcggatgcgtttacacagatagagcggcagccgaatatctacgacgttgtccacgtgaaatacttcgacgaggagcctctcaagctggactttgtcattagctttccggaccatggatttcacctacgcgttgatccttggtcccagaggctccgtctcgtagagatttatgatgttaagagattgcaattgcgatatgcgacatctttaattggtggcccgtcaacattagccacttttgcggctgtgtatgcactctttggaccaactttccctggcatatatgacaaagagaggggaatttatacgctgttctacccaggtttatccttcgcattccctattcccagccagtatacaaatctattcactaatggagaagtggcagatttgccactggaattcccagatggtacaacccctgttacttgtcgggtttgtatatatgatagctcgacagatagcaaggttggggttggatctttgatggacaaagcaatggtacctgcactgcctgcaggcagcctgtatatggaggaggtgcacgcgaagcttggtgaagaactttggttcacaataggggggcaacatattccttttggtgcatcaccacaggatgtctggactgacttgggtcgtccttgtggtatccatcagaagcaggtggaccaaatggtcatacactccgcatcagaagccaggcctcggacgaccctttgtggagattacttttacaactacttctcgcgtggaattgatatcttatttaatggacagacacataggataaagaagtttgttttgcatacaaacttccctggccactcagatttcaattcatataagaaatgcaactttgttatatacgacgctgaagctgaaggtacatgtcagcctaataatgcctcaaaaaattgcataacacctagtacaaaatgggaacaagtcaaggagatcctcggtgactgtggccgagctgcaatccagacacaaggctccatgaacaatccatttggatcaacttttgtatatggttatcagaatatcgctttcgaggtgatgaaaaacggatatattgcaactgtcaccctcttccaatcatgagtgtgccactacatgtgctgctgctctgagctctggctgcaacaatggtggttaacctgcagaaaggaagtatgccgtacttttgtgcttcagcagcagcaatttcgagtcgaagccaactctatggggcctggtgacggtgcttggtttatggaatgggatgcagctgcgcagtcgatatggatcagcaccgtgacttgtatttgtgctgtacatcccggccgttgtacatgaactaactgtaccctgtgacctcaccttgtgtacataaatggtctttatttattggaaaagaaaatgtacatactgccatgtggtcgcctaatggaactgtgctagctaaaaaaaaaaaaaaaaggccggccgc

SEQ ID NO: 266649 - DNA, 1091 bp, Zea mays
ctttcttctaccccaagacgaactcggtgtcctctttccggttcgttcccctacgcccgtttctctctcgtcgcgcaacatcagagcacaagcgaggaacccagtccagtcccgggaatggagtgcgtattgggcgtggttggccgcgacttcgtgctggtggcggccgacacctccgccgtgcagagtattctcgtccacaagaccgacgaggacaaggtgatggtgctcgactcgcaaaagctgatgggcgcttcaggggagcctggtgatcgggtgcaatttacggagttcatacagaagaacctccacctgtaccagttccggaacaccatcccgctctcaaccgccgccgccgccaacttcacacgcggcgaactcgccacagcccttcgcaagaatccatatatggtcaatgttattctcggtggttacgataaggatgttggcgcctcactgtactacatcgactacattgcgaccttgcacaagatcgacaagggcgcttttgggtacggatcatacttctgtttgtctctgatggacaagttgtaccacccggacatgactgttgaggaagcagtagatcttgttgacaagtgcatcaaggagattcggctgcgattggttgtcgcgcctcagaactttgttatcaagattgtcgacaaggacggggcgagggagtacgccaggcgtgaactcgtcggtgacaatgcacctgctgaagctgcaaccgcagttgttgctgcctgaggcatgaactcgtttgaggttgaaatgtgttagttgtttctcagcgatgctacttatgcgatcacaggatactggtggggggcccacaactgttttatcaattttagcacagtcgtgtaattctgtttctgcactattcatgtctgctgagtacaagtagtgtttcacgcttgaacaaatacaatactgttgctgtgccccttttctgatcactgaaatggccggcgagccaggccgttacaagcaggccatggcccgttactaggtagtcaattttctttgccaaactcgcttatctttatctgtctgctcaaataatcaacgtttttgcgcttttt

SEQ ID NO: 266650 - DNA, 843 bp, Zea mays
ggacatcaggccccagaaaaaagtccgaacgcatctcttctttctactttcttgtaacccaagacgaactcggtgaactctttctcctcgcgcagcaccggagcacaatcaaggattccagtccagtcctgccaatggagtgcgttttgggcttggttggccgcgacttcgcggtggtggcggccgacacctccgccgtgcagagtatcctcgtccacaagactgacgaggacaaagtaatggtcctcgactcgcacaagctgttgggcgcttcaggggagcctggtgaccgggtgcagtttacggagttcatacagaagaacctccacctgtaccagttccgcaacaccatcccgctgtcaaccgccgctgccgccaacttcacacgcggcgagctcgccacagcccttcgtaagaatccatacatggtcaatgttattctcggtggttacgataaggatgttggcgcctcactgtactacatcgactacattgcgaccttgcacaagatcgacaagggcgcttttgggtacggatcgtatgtctgcctgtctctgatggacaagctgtaccgcccggacatgaccgttgaggaagcggtagacctcgttgataagtgcattaaggagatccggctgcggctggttgtggcgccccagaacttcgtgatcaagatcgtcgacaaggacggggccagggagtacgcgaggcgtgaactcgtcggcgacagtgcacctgctgaagctgcagctacggttgccgcctgaggcatgaaacttgtttgtgttagctgtttgtttctcagcgaggctactatgtaatcaaatggatactggtgggggt

SEQ ID NO: 266651 - DNA, 677 bp, Zea mays
cgcacgcgtccgcccacgcgtccgcccacgcgtccgcccacgcgtccgcggacgcgtgggggctggatccatactagctacctgaaggatctgtggccagactcgcggtacacttacaggcttggccacaggctaatgaatgggacccgcgtctggagcaaatcatacagcttcagagcatcaccttaccctggacaagattctttgcagcgagttgtcatatttggagacatgggaaaggcagaggcagatggttcaaatgagttcaacaacttccagccaggttcactgaatactacgtaccagatcacgagtgacatagaaaacatcgacatggtggtccacatcggggacatctgctacgcgaacggctacttgtctcagtgggatcagttcactgcacagatcgaaccgattgcttcgacggtgccatacatggttggcagtggtaaccacgagagggattggcctggcaccggttcattctacggcaacctcgactccggcggagaatgcggcgtccctgcccaaaccgtgttctacactccggctgagaaccgcgcaaagttctggtacgcaacggactacggcatgttcaggttctgcgtcgctcacacggaggaggactggaggcccgggaccgagcagtacaggttcatcgagcggtgcctgtcgtc

SEQ ID NO: 266652 - DNA, 373 bp, Zea mays
tctactttgtccgcccacgcgtccgcccacgcgtgcgggaaggaggtaaacgacttgttgcttcagctggaacattaacatttgaccgaactagcatgtgtggctcaccggcacgaactgttggttggcgccatcctggttacatccatactacctccctgaaggatctgtggccagactcgccgtatacttacaggcttggccataggctgatgaatgcggaccctgcgtctggagcaagtcatacagcttcaaagcgtcgccttaccctgggcaagattctttgcagcgagttgtcgtatttggggacatgggaaaggcagaggctgatggttcgaacgagttcagcgacttccagcccggttcgttgaat

SEQ ID NO: 266653 - DNA, 376 bp, Zea mays
tgcagaaccttgtttttccttgttcatctatccactagtaggttatagtagtttaaaaaaggataataggtgtttggtttcgacctctgatggcagagatgatacgaaagcaactcctgtcgtttcaatcatgcaaaatgcatgccccgttactatagaatcatcctgaccttgggacagctggtgggttcatcatctggtctgatgagtagctcatgtgtcgtattcataggttaagtatatataggtcctagtatataattttgccgcggcggtcacatgtcctgcatggaacttacttatatgtgtctcgctttattttttctttttatatttctattttgatttttttttttatttgtaatttttttttttt

SEQ ID NO: 266654 - DNA, 598 bp, Zea mays
tgtttacttgcttggagattatttttgtcagataaagagttcaacctagaccaccctgctgccaaccctctggcgcctggcagaggaggccctccactgaagtgcatgccgccgaccttaacggttattgccgagcatgactggatgagggatcgagcaattgcttactctgaggaactccgcaaggttaatgttgactcgccggttcttgactacaaggatacagttcacgagtgtgcaaccctggacgtattcctaaaaacaccacaggcgcaggcctgtgccgaggacattgccatatggatgaagaaatatatatccctcagagggcatgagttctcatattagttgtagcaaaaaccatgcattgtgaaataggccctttgcagggaagcgtcaatgtgttcttttcaactggtggaaagaaggatgttggattgcagtcgggtaaaccagctagcttaatgctgagtactgagtcctttaggccctgttcggtttcaccggaatagaccaagatttattccagctcatcaaaatctatataaattagagaagtaatccggctaggaatcaatccgaggctcaaatccataac

SEQ ID NO: 266655 - DNA, 1562 bp, Zea mays
ccctttcaatttttttaatctccgcttacactgttccaccaaaccaagccgagaaattgctcctaaatttcagatcaaatcctcctcctcctcctcctccccctctccctctccgaggattctgcccagcagcgcggcgatccgcctcgatccggaatggagcgcgtcttctccatggaggagatccccaacccctactgggccccgccgcaccctcaaccggcggccggcggcgctgttgctgcaccaggtggagtaggaggagcgggggacgcggcgggcgcgatgaaccggtgcccatctgagtggtacttccagaagttcctcgaggaggccgtgctcgacagtccgggtcccgtcgccggcgtgggtagaagcagcggacaagctggagttgaggcggcggagagcaagccgctgggcgccgcggcgccggcgtccgtctcgagctcggtcgttgaccccgtcgagtacaacgcgatgctcaagcagaagctggagaaggacctcgctgccatcgctatgtggagggcttctggtgcagcacctccagatctttctgcggctgctgcttccttgccaagtgtcgatgttccacatgcagctcctcttaaacccgtcggaggtactgaaagtctagttcaaaacatgctagctggtgctccagtaggggggtcaggtccacatgtagtacaaattgctgatatccctgttaagcaaaccactagctcttcctcacgagagcagtcagatgatgatgacatggaaggcgatgctgagacaaatggaaatggaaaccctgttcaacaaagacaacagagaaggaagcaatccaaccgggaatcagccaggcgttcgagaagcagaaaggcggctcacttgaatgaactggaggcacaggtagcacagttaagagtcgaaaactcttcgctgctaaggcggcttgctgatgttaaccagaagttcaatgaagctgctgttgacaatagggtgctaaaggcagacgtcgaaaccttaagagcaaaggtgaagatggcagaggactcagtgaagcgggtaactggcatgaacacattgttccctgccgtgtctgatatgtcgtccctcagcatgccattcaatggctccccatctgactccgcctctgatgccgccgtacccatccaagatgacctgaacagttacttcgccaatccaagcgagatcggaggcagcaacggttacatgccagatatagcttcctcggctcaagaggacgacgatttcgtcaacggggctcaggtcgccggcaagatgggcagcactgactcgctgcagcgggtggcgagcctggagcacctccagaagaggatgtgcggaggcccggcttcatcggggtcgacctcctaggttcctactccatcggatatgataaaggccctgatgcagtgatgcccacggcaaagaatatgataaattaacagtttcacatactttgtagtggacattgctaatgctgcgatgcgcattcgttcgttgtggacttacgggtctactgctattgatttattgttcgttctcca

SEQ ID NO: 266656 - DNA, 683 bp, Zea mays
  unsure (1)..(683): unsure at all n locations
atatgtcttccctcagcatgccattcaatggctccccttctgactccgcctctgatagcaccgtcccggtacaagatgacctgaacagttacttcgccaacccaagcgaaatcggatgcaacaacggctacatgccagatatagcctcctcggttcaacaggacgacaattttgtcaacgggtatcaggctgctggcaagatgggcagaacagactcgctgcagcgggtggcaagcctggagcacctccagaaaagaatgtgcggaggcccggcttcatccggctcgacctcctaggtttcatatgaaaaagcccctggtgcctaacggccagaatgctaaattaacaatttcaacatgctttgtactggacattgataatcctgcgatgcgcattagtgcgttatggacttgtgggtcaattgctatttggcgtgtgctggctgctcactgtagtgagcagaacaagttccagtttctatcgaagagcaccctctccttttcgctagtgacttatgaatggtcgatggtttattagcaacattgtgtctttcgcaagttcagtaatgaatggtcgacagggatgaaaataaatacttataaagagatctataattgtcttttccactacgaataaataagatacaccctatattatgtaaaaaaaagaaaaaaaaanaaaaa

SEQ ID NO: 266657 - DNA, 241 bp, Zea mays
cggacgcgtgggcggacgcgtgggggattctgcccagcagcgcggcgatccgcctcgatccggaatgcagacgcgtcttctccatggaggagatccccaacccctactggaccccgtcgagtacaacgcgatgctcaagcagaagctggagaaggacctcgctgccatcgctatgtggagggcttctggtgcagcacctccagatctttctgcgactgctgcttccttgccaagtgtcggt

SEQ ID NO: 266658 - DNA, 849 bp, Zea mays
agtaggtcctcttcacccaacactagaccaacatttaatcgttccctgtcgacagaacaagtgaaagagagggggagctgtttctcagatcttgatatcagggatgttcagatggatgatcgagtgactctgactaggtggtcaaagcaaaatgtaacacggtcgcctaacaagaattcaacaaacataatagagtggagcgaaaaggcagtggaatcaaaatcttcgtcctggggctttgccgaagcgaagtgcatatccaagattggtagagaggacacaaaaattactgcatgggaaagtattcaaaaagcaaaagctgaggcagcaattcagaagttagtgattaagttggagaagaaaggatcatcttcgcttgataagattttgaacaccctcaaatctgctcagaggaaatcccaggtgatgcatgagcatgagcgtgatgcagtaacagcaaaccaagatggaaaaggctctaggaaggcaaaaaagagagcacaactcagcaagaatggccaaatcagttcactgagtggctgcttcacttgccatgctttctgatacatgtaattccaaaattgagaatcaggatccgacaaattccttcgcattccatgcaccaccttcatgttccccacatcaaaatctgggtgaagttcggagatccatcacatatcagtacataatatgatgatcccacagctggagattagacagagatctttcgaagatgctagctgcaggctccagctgctatgatagggacaatgccaaggggacaaataaaatgcagcacgaaggaaaggaggaacagtactgcgtacaccccatgtgctcgggtcgatg

SEQ ID NO: 266659 - DNA, 1606 bp, Zea mays
caagtacaacaacaattggcccaggcatgcccgtgggggtggcgtcatcgtgtctcctcgatcccctctcgttcctccctcgtcgcctcatcaattcaagatccaatctttgctgctgccactcggcgatccgatcgttctcgagcaaggtcggtggccatggcacgctgccgccatcacctcctcctcctttccgtcttacttgccttggctgctgctgctgcgcggcaggcgcagagtcatggaaaagcctccgccgtcttcatcgatgcctcgtcgcaccgctaccttcgggaccagcaagccgaccaccaggacgcttcaatgtcgttaaatgaagtttctgcggttgtttctgtcttgcttggtttcgcaccgtcaacatccctaccagctatttcttcttcgaagttgaacaaagttcttcttcctaatccatttgatagaccgcgtgctgttttcctcgtgcaaattgctgggttcgatgttcctagcttcgtatctgaaggcagcaacattttcaagaccaggattgaaggtgcaaacatcgctgatacagggcttacagataaggatgacttaattgtcattcattcagatgaatctctagatctctctcgatcagattatcttgataatgaactttccagcttggcaaactggttggagggatcttatcagaagtctaccggcaaactagtcattcccttggagaatggaaacagtcttactttgcaacttgataaggaagcagacaaggaattcatgtccagcttggcttcccttcttaagactattgaaagggcgatccaggttcatgaagatttctcaggtgtcgtgaaccctgcagagttattagaatgtcacttcacagggttgaaggctctggagaatgaatatggttctggtgaaattgttaagcagggaacagaaatagttcagagagctgtcaccaaatcattccagtccctacatgaagcatacaaagggaaaattgttgggctggtaatatccacaaatgaggctccatcatccttaggatccataattgacgcaccatcttcactgcacatttcaagacggctagaagaagcaagcaagactacagacatagcctctgtcgtacttgttcgaaagagcttggcatggattacagggatcatcctgcttgtttcaactctcataggggtttgcttgcttatgaacatgccacttaccagggacaccctcctgtactcgaatgtcaagatcgattagtttgaaggggtgttcgcggcagctactcttggggttcaactttggccttgtgtatttatgggatggatttcagatggtagagacgtatgcttgtgctgttcacaaaaccagtgtacaatgtgatactaggtgctacgtgcctttctttttttaatctgtgctgcactcttgcctgtatgggctgttttgttgttgggttccggtaaataatccagagcagtggcacaaacgattagttgttgcagaatgctactgccttttctgaataaatctgtcattgtaatcgaatttcaacttgaataaccatgaaaaaaaaaaaaaaaaaaaaaaaaaaaaaaagggcggccgc

SEQ ID NO: 266660 - DNA, 492 bp, Zea mays
ccaaaatccaaatcaccacatcccgccattaatttaaggggtttttatgtccaccgcggccgccagcgccaactaaacccgcgacgacggtcgaccatggcgtcctcgctgctctcctcccccgctaaacccaccatcaccaccaccaccaaaacgaccccggccccaagacccgcccgctccgcccatgtccatgtcctctccgccgcccgctgcctccgcctccgcctccgcgcgtcgtcgcagcatcctccgcctccgcccaccccgcggtcgcggcggccggattacgtcccgaaccgcatcgacgaccccaactacgtgcgcatcttcgacaccacgctgcgcgacggggagcagtcgccgggcgccaccatgacgagcgcccagaagctcgtcgtcgcgcgccagctggcccgcctcggcgtcgacatcatcgaggccgggttcccggcctcctcccccgacgacctcgacgccgtgcgctccatc

SEQ ID NO: 266661 - DNA, 594 bp, Zea mays
gatctctctcccccggctccggcgatggcttcgccttacgccggcggcgtgcagcctgcctctcccgctggggcggtgcagcagcagcagcagaaccactctctggcgttccgcgtgatgcggctgtctcgcccctcactccagccagacctggccgctctgctccgcttcgacccacgcgacgtcttcctccctgaggacgcgctcaccggctccgacccgtccgctgccgccaaattcctccacggcctcctccaccctgcggactccgccactgccgtccctggagacttcaccttccgcgaccgcttcctcctccgcgacccagccgacgcgctcgctctgccgggcctcctcgtcctcccccagtcgttcggtgcgatctatctgggcgagaccttctgcagttacatcagcatcaacaatagctccagctttgaggccagggacgtcgtcatcaaggcagaaatacaaacagagagacagagaatacttcttctggatacatcaaaatcccctgttgagtcaattagatctgggggtagatatgatttcattgtggaacatgatgtcaaagaactaggagcacatacg

SEQ ID NO: 266662 - DNA, 560 bp, Zea mays
tcgacgcattcgatgtttcgcaaaatcgtactaagtcacgtcacctgcaagaaaatatgggtaggcttgggagagaaccgagtagtctgtcgcctgaaccagctaaaggaaatgattccttggatttgtggattaccagcaacttcaaggaatctaaaagcaatgatgttgggagaactaatgcctcatctgatggatggcaggattttgccagttttgatcaagctcagagaattactaaagttcatgtggaaggacatgttgtaaaagatccttcaggggctgaaactttggacttatgggcctcaagtcatgttaatgaaaagaaccttgaacagataagtgaacataatgatctattcgatgactggcaggatttccaaaactccaatccacagcatacaaccttacaagtttcttcagatgcttcattatttgatataaccttggcatcaaggcctgatgcttttggagagcaagaatttgggagtgttttgcaggtagcttcatccgaaaactcaaaggattaaaaggagggttctaatgaatcaaaagcattt

SEQ ID NO: 266663 - DNA, 327 bp, Zea mays
gaagatttggaagatctcaatgaggtttagaaaaggaagaaacgagtgggtgtcaaggaagaggcaaagttggccttggccattgtaaagggagagaaggttaagaaagagaggaaagtgtatggtttgccagggcagaagcatgatcctcctgaagaaagggatccattgaggatattctatgaatcactgctacgagcaggtccccaccagtgacatggctgcaacctggttgatggaatggggtttgctcccggtggatgtggctagaaaatgttttgagaagaaacaaggtcagaaagttaagtcaccagtcaaagcaattgt

SEQ ID NO: 266664 - DNA, 675 bp, Zea mays
cgcagtcgtcctccccaccccacccaccccaccccacccggtccccactttccactcccaaccccaccagaccttcaaccgctacatttccgtcactaccggagccgccactcccacgaacgcgggcggcggaacggaagcgaaccagttatctagtggagttgcctccttcaagctactctaatgtcctttctattcaagtctagcaatggcggcaccactgaaaaaatcccatccccagaagaacagcgagaaaaaataaatgaattacgcaaggagcttggtgaacactcatcagaagccattaaagacttcctttcagatgcctcgttagtgcgatttcttcgagcaaggaactggaatgtgcagaaagctagtaaaatgatgaaagcagctgtgaagtggcggcttgcattcaaacctgaaaacatctgttgggatgatattgcagaggaagcagagactggaaagatatatagggcggattataaggacaaacatggcagaactgttcttgtattgaggcctggcttagagaacactacctcagcaataggacagatcaaatatctagtctactctctggagaaagcaattatgaacctgacggaagatcaagagaagatggtatggctgacagatttccagtgctggacaatgggaagcacaccactg

SEQ ID NO: 266665 - DNA, 968 bp, Zea mays
taactcggaatcggctcgaggtcaacattccgtgatggcttttctattggtgggttgtcacaggacttctttgtagacgattttaagagccaagggtcacatgtgccatacaatattgctgaattttctacccaggcttctcaaggtggttatggtgttgagtttactcaagcgccccaatctggatactctgggaattatatgaaccaaaattcacatcctggatactcccatattggtacaacaaatgacattgtatctcaggatcacatggcccatggatctcatgggatgtttacacaagcgggatataatgatccctcacaagatgagtcgtctcagattcattatggaatggctgccgctggccctctacagtcgcagggcatgatgaaccccttgtactctcaatcctatgctcactacaacacccaaccacagtctcttcaacctccgccccagtgataatgaaagcttgtgataggatgaagccaaattttggaagtttggtgggttgcatcttttggcccacatgtgcacttctccgctgtttcagactcgatggtgcatagacatcagatgcaagcaatgaaggcacactatgtattggctatttatcggggcaggcttgactgaggggcacaaggattgcaacgtatcattgatcgttgtagttcactgcccactttggccacaggagaggtcatatcatcgagaggttgacggcactaccctcatccctcacctgtatagaaaggcaatcggggccaatagtggtacgatgtgaatattccaggatttgctgccattcagaaagtcaagttgcagcaactgcatgcctccatggtaccatgaagacacgcccgtagagtggctttgtatagaggtgctataggcgaggtggacaaccctttcggatatcgcacatggcaagatatttacattgacattttgtatgcacccgatat

SEQ ID NO: 266666 - DNA, 514 bp, Zea mays
cccactcgtggcgtcgcccgtcgcccgctgctcgctagcctactacgacttggaacttggagcccttccccttcctcctcctcgtgtcctcttccgttgccgtgccaaccaccaccctcaattgtcaaatcaggcctcctcctcccggttccggttccaccaacgaccaagcacccatcgctactcgagtctctgcgaatccgttgccggtagcctctctgcggtgagagttccgctgccgcctgctggagatgatggacgacggaggaggaggcgtgcagtcgcagggcgtcaacccggactgccccaacgccgccaaccccttccaccgctgcgccgcgtactgccccgtccccgccccggcccccaccaaagccgccgccgccgccgtgcgcagcaagccgtctccgcctcgtccgagggcggctgcggtggctgcgcagaacgggacagccaagcacggagacggcgctgcgcgtgtcgctcccgtcttcgacgccgatgacgacgacga

SEQ ID NO: 266667 - DNA, 1238 bp, Zea mays
cccacgcgtccgcggacgcgtgggtgctcccgcggctggactagccccacgacctccagctcgaccattcccgatcccgtggactcccaattgcctgcctcctctacctgtccggctgtcccggctccagcatttccaccctcgcgcggcggtcgccggagcgagcagagctgccggaaggcccgtcggatccgccgccgccaagatgaatgacgccgatgtagccaagcagatccagcagatggtgcggttcatccgccaggaggccgacgagaaggccaacgagatctccgtctccgccgaggaggaattcaacattgagaagctgcagcttgttgaagctgagaaaaagaagattagacaagagtatgaacgcaaagagaagcaggttgaagtacggaagaaaattgagtactctatgcagttgaatgcttctcgcatcaaagttcttcaagctcaggatgatctagtaaacaaaatgaaagacgatgcgatgaaggaactcctccttgtcagccacaaccaccatgaatacaagaaccttttgaaagatctaattattcagggcttgctccgtttgaaagagccagctgtattgctccgttgccgcaaggaagatcaccatcatgtggaatcagtactgcattcagcaaagcacgagtatgcatcaaaagcagatgtccatgaaccagagatatttgttgatcatgatgtgtacctaccacctgccccaagccatcatgatgctcacggccagttttgctctggaggtattgtcttggcttctcgagatggaaagattgtgtttgagagtacacttgacgccagactggaagttgttttccgcaagaaattgccagagatccggaagcttctttttggccagactgcagcctaattgactcaatccgcagatgatggtatggctcgcttctacctagtggtttttgccaaattgatcgtttacggtattcatccccaatgtacaaactaccttatttgttcattactgtcgccgagcaccgactgtttgtacttcgttcgctccgaggaataagaataaagcactgctagacttcccattgcgaagctgaataaatattgtaaagccatttgtcgtgctcaccttcccgtgggtgtcagaaaaaattccgttcctgtcctgtcctgttgatgtgtatatctagttaatgtcggatacggttcttgtgggaaaaataaaaaataaaagttcttgt

SEQ ID NO: 266668 - DNA, 1168 bp, Zea mays
cccacgcgtccgcccacgcgtccgcccacgcgtccgcccacgggtccgatcccgtggactcccgattgcctcctcagcaacttccatacccccagcgcggcggtgccggagcgagcagagcagccggagggcctgtcggatccgccgccgtcaagatgaatgacgccgatgtatccaagcagatccagcagatggtgcggttcatccgccaggaggccgacgagaaggccaacgagatctccgtctccgccgaggaggaattcaacattgagaagttgcagcttgttgaagctgagaaaaagaagatcaggcaagagtatgaacgcaaagagaagcaggttgaagtacgcaagaaaattgagtactctatgcagttgaatgcttctcgcatcaaagttcttcaagctcaggatgatctagttaacaaaatgaaagacgatgccatgaaggaacttctccttgtcagccacaaccaccatgaatacaagaacctttttcactacctaatcattcaagctctgctcccgctgagatagccagcattattgctccgttgccccaaggatgatcaccatcatgtggaatcagtgctgcattcagcaaagcatgagtatgcatcaaaagcagatgtccatgaaccagagatatttgttgatcatgatgtatacctgccacctgccccaagccatcatgatgctcatggccagttttgctctggaggtattgtattggcttctcgagatggaaagattgtgtttgagagtacacttgacgcaagactagaagttgttttccgcaagaaattgccagagatccggaagcttctttttggccagactgcagcctaatcgactcatctgccgatggtacggctgcttctatgtaatggttgccggctgcacgcctgcactgcagccataaggaactccgcctgtttttgtcaaattgattgtttaaggtattcatcccctatgtacaaactacctattggttcattattgtcgccgagagcaccgactgtttgtactctgtttgctccgaggaataagaataaagcaccgccagactttccatcgcgaagctgaataaacgttgtaaatgcatttgttgcgctgcccatgccgtttttggtttctccatgtgtatatttagttaatgtcggatgtgg

SEQ ID NO: 266669 - DNA, 552 bp, Zea mays
aattgttaacaatctaatgaaagctccagaattggctaccaagatgccagaatttaaccaaggaatgacccaaggaaggtgtgaatggaagagatggtgaaccacggcagttgattcagctttggactctgaggacatggaggaggaaatcgaagaggaggttgacaaggttcttgcttcagtagcaggggagactgcctcccagctaccagatgctgccagaacacagaagatacatgaggcttcaacaagcagggttccagaagagcgacaagctgttgcagagggtgctgatgacgacgaggaagacctagaagagatcagggcacggcttgctaaagtgaggtcgtaaatcatatacatatctgagttttctaacctggggagcccatggctcacaaaatatggtgccaaaacccgtgtattgtgaactgagtcgatagcaatgcaattttttttttaattggccctcgagtcgaccatatatgaagtggcactctattgttgtacaacgctacgagagtggcatggaatatcggaatatggatagcg

SEQ ID NO: 266670 - DNA, 488 bp, Zea mays
agactggaagttgttttccgcaagaaattgccagagatccggaagcttctttttggccagactgcagcttaattgactcaatccccagatgatggtatggctcgcttctccctagtggtttttgccaaattgatcgtttacggtattcatccccaatgtacaaactaccttatttgttcattactgtcgccgagcaccgactgtttgtacttcgttcgctccgaggaataagaataaagcgctgctagacttcccattgcgaagctgaataaatattgtaaagccatttgtcgtgctgaacttcccgttccgttcctgtcctgtcctgttgatgtgtatatctagttaatgtcggatacggttcttgtgggaaaaataaaaaataaaagttcttgtaaagctcgtcagctcacctcctgtcatgtttctccgtttatttgaagagtgtcgcttctgagcacaacggtactggactttgtacgttgccc

SEQ ID NO: 266671 - DNA, 542 bp, Zea mays
cgcggctagacgcctagactagccccacgacctccacctcgaccagtctcgatcccgtggactcctcattgcctcctcagcaacttccatacccccagcgcggcggtgccggagcgagcagagcagccggagggcctgtcggatccgccgccgtcaagatgaatgacgccgtgggacccatgccgatccagcacatggtgcggttcatccgccgggaggccgacgagaaggccagcgacatctccgtctccgccgaggaggaattcaacattgagaacttgcagcttgttgaagctgagaaaaagaagatcaggcaagagtatgaacgcaaagagaagcacgttgaagtacgcaagaaaattgagtactctatgcacttgaatgcttctcgcatcgcctttcattttgttaactacatcatcctaaatcatatacatatctgacttttctaacctggggagcccatggctcacaaaatatggtgccaaaacccgtgtcttgtgaactgaatccatagcaatgcaattttttttaattggccc

SEQ ID NO: 266672 - DNA, 924 bp, Zea mays
cttttcggtgcctatacagaacttgatggttgttgcaagcaggctctatgagcagagtgagcggaaacttcagagtttgcaatttgagaagcaacattggtctgacatgctgcagcagaaggaagccattatccaatccctaaactcagctcggtttgagcaacagaacaagtatcaagcggagcttagacgcttcgagcatgatctgaatgttatggcccagttggtcactacctacaaaagagctttaaaacagacccgggcttcttttgatgagtacaggaagaagttcccttgcaatgttcctctttatggtgatgttgcttgtggcggtggtcttgttcttagtgtgagggagttggagaaaaggcggtgtgaggagcagcagcaaaatattgccatggtaaatggtatgattgacagattccagtacaaatggctctcaaagtttgaagagtggggactttctgtcaattcactgtggagcagaatggaaggactctataaggagattgagcttctcaaggaaaacagaagagcaagatttgcgtaccccagctacagaggaatctaccctagctacagaaggatctactccagctacagaggaatgagctccctgacaatcagaggttcagttgtgatgtgaagatgactccctattactgccctacctctgctggatgttttggtgtcaacgagcattcaagagcaattgtggctgcctggtggtggtacatactgtcgtaagataaatagtttcgcttgtacctctggttgtttcctcatgtagggacgttttgattattagtgcttcctttaggtgcatttagggttccgtaatctataacaaagtgtgggtttcatatccttttctcacccactaaatatgtgctcccgccctcggaaagccatttttaggat

SEQ ID NO: 266673 - DNA, 1589 bp, Zea mays
cccacgcgtccgcccacgcgtccagtcgctcaccattctgccgttcacacctctctcgctgcctttatttcctgttggcgacgctctcgccaggtcttcggcggcccgttcggcggcgactagcgcctccgtttgccaggtcttcgtcgtccgtttcgccgtcgactggtgcccagcagccaggtacatctggaagaatgggggtttaccttagcacaccgaaaactgacaaggtatccgaagatggggaaaacgataaacttaaattcggactttcatctatgcaagggtggcgtgcaactatggaagacgctcactcggctttgctagatcttgacaatgacactgcattctttggtgtttttgatggacatggaggaaaagtagttgccaaattctgtgcaaaatatctacacagagaagttctccataccgaagcctatgctgctggtgacctgggtgctgctgtccacagagcttacttcagaatggatgaaatgatgcgaggtcaaagaggatggcgggaacttcaagcacttggagataagataaatcagtttagtggcataatagaaggcttaatttggtctcctaaagcaagtgattcaaatgatagacatgatgattgggctttcgaggagggaccacactctgactttactgggccaaattgtgggagtacagcatgtgtagcattagtcagaaataggcaactcgttgtggcaaatgctggtgactcccgctgcgtcatctcaaggaatggccaggcatacaatttgtcaagagaccataaaccagagcttgaggcagagagagaaaggatacaaagtgccgggggttacattaaaatggggcgtgtaaatggaagtttaaatttgtcaagagctattggagacatggagcttaaacaaaacaagttcttgtcccccgataagcaaattttgaccgcaaaccctgacataaacattgtcgagctatgtgacgacgacgaattcattgttttggcatgcgatggcatctgggactgcatgtcaagccagcagttggtcgatttcatccgcgagcatatagacacagaggaaagcctctctgcagtatgtgaaagagtgcttgatagatgcctggctccatcgaccatgggtggcgagggatgcgataacatgacgatgatcttggtgcagttcaagaagccatttgctcaggtaaaggatgccagtgatgcggaacaactaactggagatgcgggatgctctgagacccatggggccgaggagaatggctctgacaagcagatatagcgaagacatggactcttttggagtcttggtacatggcctgacgctgaacctgggtaaaacaggagtacgatgttgcaatgtacataccaaccatgcgctgagttggcgtgaaggatatattcattgttccactgttgtctttaaccaaacgtgctgttttcttccggttgtgatttttggtgatctgacaatatctaattatacatttgggaggaaatgatgttacaatagttattgtgggtgtttgtttgggattataatctgttcaaattatataatctaacgtatttt

SEQ ID NO: 266674 - DNA, 460 bp, Zea mays
agtatgcgagagagtgctcgatagatgcctggctccgtcgaccatgggcggcgagggatgcgataacatgacgatgatcctggtgcagttcaagaagccgattgctcaggtcgaggacgccagcggtgcagaaccagctggagacgctgggtgctgtgagacccatggggcccacgagaacggctctggtaagcaggtgtagcgaagacgtggcatgcatggctctcggagtcttggactcttggtacatataggcctgacgctggacatgggtaaaacgggagtacgatagatgacaccctctgttcctcaatacaacccgctgttgtgattttttggttacctgaccacctatctgtacatttttgtggaaatgatgttacagtaattattgtccggtcaagcggaccccttttgagtttctcccaaaaaaaaaaaaaaaaaaaaaaaaaaaacaaaa

SEQ ID NO: 266675 - DNA, 302 bp, Zea mays
cacctctggctgccttcatttcctgttgacgactgagcgggcgagcgccggcgccctttgccaggtccgtcggcccgttagccggcgactagcgcctccctttgccaggtcttcgacgtccccttcgccgtcgactggcgcccagcagccagcagatccttttctatctgtcgtgttctgtctgcctggtacatttggaagaatgggggtttaccttagcactccgaaaactgagaaggtatccgaagatggggaaaatgataaacttaaattcggagtttcatctatgcaagggtggcgta

SEQ ID NO: 266676 - DNA, 798 bp, Zea mays
aaagaagggccccgggcgggtacctgtccggattcctggtctgcccaggtcattccacttccaccaatctgtctcccaatctttcttgctgctccaattcgctctctttactcggccagcggaaggggagaggagggcgagatgacggtggagaaggtggacgcggggctttccgacttcgacgcccacttcgatcgcctcttcgcttccccggacgccgcctccgacggcaaggtgaagctgctgctcttcctggccgaccgcaagcctggctcctccctctcctggtgccccgactgcaacgtggcggagccggtgatctacgagcggctggaggcactggagggcaaggacgcggtgctcctgcgcgcctacgtcggggacaagcccacttggcgcgacccggcgcacccgtggagggtggaccccaggttcgggctcaagggcgtgccaacgctgatccgctgggaggatggcgccgccgccgcccgcctcggggacgacgaggcgcacctcaaggacaaggttgacgccctcctctgcgctggcggcaactgagtactgactactgacagatccggtttcccgttcgggttccatctgcgtagagtggccataataaataacatgtactgtaattcagttcatctacatgccggaccagaagctggggaatcgtgtgaagcttaataattcagtttatctacatgccgaaccagaagctgggaaattgtgtggaactaataactcagttcatatatgaccagaacaaaaagaaactgcgagattgttaagctc

SEQ ID NO: 266677 - DNA, 796 bp, Zea mays
cgggcgcactgccctgtggtgtactggtgtgtcacgcccctcgtcactcaccccgtcacccgcaaccccatcttctattcttcccgacggcgctcctggcagcaggaacaagatgtccaatagggccacacattggtgttatgcctgtcggcggccaattcgtctccgtgggcaggatatcgcatgccccaactgcaatgatggttttatccaggaaattagtgagatgggtggcatattgaacacttatgggctaattgaaccagactttgaagagcgtcgagctagaagattcggaatgatggatgccatgtcttcccttatgcggcaacggatggaagaaatgggaagagatggtttgtttgatattcgtggtagacaaggaacaggtactgaatatggaaggaggccaactgctgttcctacattggtatttggcggcatcccttctcctggagttgatagcggtgatgttaatgttgtcctcaggggaggccgcagagttggcgctgcccaaccaaatttcagtagtttagttgttggtcccagtctggaagccctatttgagcagctactactccagaacaaccgtcaaggcccaccacctgctccacagtcagctattgactccatgcctgtggtaaagataaatcgcaggcatcttgacgaagatccacagtgtgcagtttgcaaagacaaattcgaggttggagcagaggcgcgggagatgccgtgcaagcacttataccatactgactgcatcatcccctgagctggttcagcacaattcctgccc

SEQ ID NO: 266678 - DNA, 669 bp, Zea mays
cacagtcagctattgactccatgcctgtggagcaggtgctgggccttgacggttgttctggagaagtagctgctcaaaaagggcttccagactgggaccaacaactaaactactgaaatttggttgggcagcgccaactctgcggcctcccctgaggacaacattaacatcaccgctatcaactccaggagaagggatgccgccaaataccaatgtaggaacagcagttggtctccttccatattcagtacctgtcccttgtctaccgtgaatatcaggcaaactatcccttcctatttctgacagccgttgccgcatgagggaagatatggcatccatcattccaaatcttctggcctggcgctcttcaaagtccggttcagttagcccataagtgttcagtacgccacccatctcactgatttcttggataaaaccatcactgcagttgggacatatgatatcctgcccgcgaagacgaattgggcgccgacaggcataacaccaatgggtggccctattggacatactgttccttgctgccagaagcgccgtcggggagaatgggatatggggtagcgtgtgagtgacgaggggcgtgcacaccaccagtgcagtgcacccaatcgggcgcgtggcgcggggagtgaaacggtcgctggtcactaa

SEQ ID NO: 266679 - DNA, 428 bp, Zea mays
  unsure (1)..(428): unsure at all n locations
cccacgcgtccgcccacgcgtccgcccacgcgtccgcccacccccccgagcggcgcggagctccaatccgcccggccgcctccgcctgttgccactagctaggtgatcgatcgaatggactgcggtggcgcgctgcagctcccgcctgggttccgcttccaccccaccgatgacgagctggtgatgtactatctcctccgcaagtgcggcggcctgccgctcgccgcgccggtcatcgccgaggtggatctctacaagttcgacccatggcagctcccagagaaggcgttcggtggggagaaggagtggtacttcttctcgccgcgcgaccgcaagtacccgaatggctccaggcctaaccgggcggccgggacagggtactgggaggccaccggcgccgacaagccggtagggtcgccgngccccgt

SEQ ID NO: 266680 - DNA, 532 bp, Zea mays
  unsure (1)..(532): unsure at all n locations
ttttgttctctggccgctgtcttttcccgaggacctaacccaaggcggtaggtaccagctaaaagtctaaaggcgaccaccggaccgggcggcaatgacgaccgccgcgagggagaggcgcctgccgccgacgctgcccctggccgcgctggtcggtcgcgagctccgtgcggggggctccgagcgcccggccctgcgctacggccacgccggcttcgccaagcgcggcgaggactacttcctcgtcaagcccgactgcgtccgcgtccccggggaccccgcatcggcgttctcagttttcgccgtgttcgacggccacaacggcgtgtcggcggcggtctatagcaaagagcatctgctcgagcacgtcatgagcgcgctgccgncggacatcgggcgcgacgactggctgcaggcgctgccgcgcgctctcgtcgccggctttgtcaaggccgacattgatttccagcgcaagggggatgtgtcatgaaccacggcgacactggtgggcatcgatgggttcacggtcaca

SEQ ID NO: 266681 - DNA, 2159 bp, Zea mays
gttaatgagggtttcactggggatacacaaggaagacatcgagtctgccatcaggacgtaccatctgatgtcccagcgctggtttactcatgcttcaccgacgcttttcaatgctggcacgccgaggccccaattaagcagctgttttcttatatgcatgaaagatgacagcattgagggatactatgaaaccctgaaagagtgtgctgtaataagcaaatctgctggaggaattggtgtctcagttcataatatccgtgctactgggagttatattcgaggaacaaatggatcatcaaatggaattgttcctatgttacgtgtctttaatgatactgctcgctatgttgatcagggtggtggcaaaagacagggagcatttgctgtatacttggagccttggcatgctgatatttttgagttccttgatctgagaaagaaccatgggaaggaggaaaatcgtgcaagggatcttttctatgcgctatgggttcctgatttattcatgcaaagagtccagaataatggagaatggtcattattttgccctaatgaagctccagggttggctgattcctggggtgaggagtttgataatctgtacaagaaatatgagagccatggcaaggcaaagaaagttgttccggcacagaccctttggtttgacattttgaaggcacagatagagactggtacaccatatatgctttacaaggatacttgcaataggaaaagtaaccagcagaatctgggcacaattaaatcgtcaaacctgtgcactgaaataattgagtttacaagccctactgagaccgctgtctgcaacctagcatctattgctttacctcgttttgttcgggaaaaggatgttccgttggagtcccatccatctaagcttgtgggtagcagtgattcaaaaaatagatattttgattttgagaagctagctgaggttacctcaactgttacttacaatcttaacaaaattatcgatattaattactatcctgttgagacagcaaagaggtcaaacatgcgtcacaggccaattggcataggtgttcaaggcctggcagatactttcatattactgggcatgccgtttgattcaccagaggctcaacagttgaataaggatatattcgaaactatctactatcatgctctgaaagcttctgctgaacttgctgctaaagaaggtccctatgaaacatatgaagggagccctgtcagcaagggcattctccaacctgacatgtgggatgtagtgccatctaacagatggaactggccatctctaagggagaccatttcaaaagttgggataagaaattctcttcttgttgctccaatgcccactgcttccactagtcagattcttggcaacaatgagtgctttgaaccctacacgtctaatatatacagtcgacgggttctaagtggggaatttgttgtggtcaacaagcatcttcttcatgatctgactgaaatgggcatttggactcctactttgaaaaaccagataatatacgatgacggttctgtccagaagatagcagaaatcccggacgatcttaaagcaatctacaaaactgtttgggagatcaagcagaaaactttagttgacatggcggtcgaccgcggatgctacatcgaccaaagccagagcctcaatgtccacatggagcaagcaaactttgggaagctgacgtctcttcacttccatgcttggtccaagggcctgaaaactggaatgtactatctacgcacacgagctgctgctgatgcgatcaagttcacagtggataccacacttctaaaggagaatgggaatgggatgaatgatggaaagcccacagaggacgacgtagaagctaaaatggcacaaatggtctgttcttttaacaaccgggaagagtgtctggcgtgtggaagctagattggagctccatctggacactgcacttatttgtgaccacaggccacagcattatatgccgccggctgatgactggagcccaataaccagaacgaaatctgatgtaggatgaggtagaaactccattcccttcccataatgggaacaataccttgcctctgaaatactgttaggactaagtttggtaactctatttttttcaagaagattcatatttttt

SEQ ID NO: 266682 - DNA, 666 bp, Zea mays
gccagggcatgaaaactggaatgtactatctacgcacacgagctgctgctgatgcgatcaagttcacagtggataccacgcttctgaaggagaatgggaacggggtattgcccctatttttctttcgttcagttctgcaatgttttttttcctcaggttactagggacacggctcaccatgaacaccacttgcacacgcaggttagcgatggaaagcccgcggaggaagacgtagacgctaaaatggcacagatggtctgttctttgaacaaccgggaagagtgcctggcgtgtggaagctagattggagattccatctggacactgcacttcgtgatctgtgaacacagcattacatacagccggctgatgattggagctcagtaaccagaacgaagtctgtgatgtaggtcgagttggaagttcccataatgggaatagcttgtacctgaatactgctacggcgctacctctggtctgtattgctctaaggtgtttgtgctgctgccaatgtactgtaaatatctaccagcgtcaatgttgtcgatgtgctctaagatacagtatgttttaaccgtgctacactctttgcattggatcgaacatgatgtaatgcatcgtcttccataatgatacgacgattaggtttgtatcctggatcgcgat

SEQ ID NO: 266683 - DNA, 502 bp, Zea mays
gcgggattaactcggaaattagttggtagcggatccagacctccccctttatatagatgaagggctacggccgattaaagcccccaacaatcgaacaaatcaagtctattactcattggtaccttatgcattaggagtccctctagtctccccctagcccagccctagtttagtattccaatccccaaattctccgcctctcctcgactctacgtcgattagaggagtctaggtcggcctgcccgagcctagacaactcctaggatctctcctccccgacggggtccctcccgggagcgagatccaggcgccgtcggcgatctaccgccgcccctgcgcacgcgcggaccgtccggccctagggcgcggaccgtccggccgtcaggcagggaacccgagctcctgcaccaggtcgcggaccgtccggccctgtgccgcggaccgtccgcgtctgaccagagagcgttgtcgcctcgcaccaggccgcggaccgttcggccct

SEQ ID NO: 266684 - DNA, 587 bp, Zea mays
tttaaatttttttttttttttttttttttttataatttttttttttggggggggaaagggtccagcccccctcctttataaatagagaggtctacggccgatttgtaatcatcaacaatcgaatcaatacaacttctatttcgcattttatccaaggagtagttctaggctagtttaggtttagctatccaatccccaaattcttcggctctacgtcgattagaggagtctaggtcggccggcccgagcctagacacctcctaggatctctcctccccgacggggtccctcccgggagcgagatccaggcgccgccggtggtcttccgccgcccctgcgcacgcgcggaccgtccggccgtcaggcagaggcaggggatcctagctcctgcaccaggtcgcggaccgtccggccctgtgccgcggaccgtccgcgtctgaccagggagcaccgccgcctcgcgccaggtcgcggaccgtccggctctgtgccgcggaccgtccgcgcctgaccagagagcaccgccgctggttcttttgaaatgcattggcccctccaaaaaggtgtcaacacccatctagctctct

SEQ ID NO: 266685 - DNA, 2008 bp, Zea mays
gccgaacactttcctctctttcagtttcgcttcgcagacttcgcttgcgcttcacccaaccttaaccgcaacggttcccatgcggagtttttatgaatgaattgaatgaatacgaattcagagcacgagcgccgttgattggccgctactagtactaccagctaggccactgctcctctgctacccgctaacctcgcgccggagtcgtcgcccacgatggcctaccgatccgcagtgctcttgcccgccctcctactggccgtcgccgtcgtcgtggcctccgccgccgccggggacgggaggtggcgggaggagcaggcgcgggaccgggtgccgcgggtgccggggcaggccttcaacaccagcttcgcgcagtacgccgggtacgtgaccgtcagcgagcagcgcggcgctgcgctcttctactggttctttgaggccgagaaggacccggggtccaagcccctcgtgctctggctcaacggagggcctggatgctcgtccattgcttttggacttggagaagaagtaggacctttccatgttaacgcagatgggaagggggtccatgtcaatccttattcttggaacaaagttgcaaatttactgttccttgattcacctgttggtgttggttactcatattcaaacacctctgatgatgctttaaaaaatggggatgcaagaactgccacggattcattggcattcttactgaagtggcttgaacgctttcctcaatacaaggaacgcgaattttatttgacaggggagagttatgctggtcactatgttcctcaactggctcaagccataaaaaggcaccatgaggctactggtgacaaatcaattaatctaaagggctatatggtagggaatgctctcactgatgatttccatgaccactatggaatatttcaattcatgtggactactggcctgatctctgatcaaacatacaagctgctgaatgttttctgtgactacgagtccttcgtgcattcgtctccacagtgtgataagattatggatattgctagcactgaagctggaaacattgattcatatagcatcttcacacctacatgtcatgcatcttttgcctcttcaaagaacaaagtgatgaaaaggctacattctgctggaaaaatgggagaacagtatgatccatgcactgagaagcattcaactgtatacttcaatctagctgaggttcagaaggcacttcatgttaatacagtcattggaaaatcaaaatgggagacttgcagtgaagctgttaatactcattggggggattgcgaaagatctgtgctgcatatctatcatgaacttatacagtatggcctccgtatatgggtgttcagtggagatacagatgcagtgattccagtgacttcaactagatacagcatcgatgctctcaagcttccaacaataactccatggcatgcttggtacgacgatgacggtgaggtcggtggatggacccaagggtacaggggactcaattttgtgaccgtgaggggagcaggtcacgaagtccctcttcatcgacccaaacaggccctcacgctaatcaaatcgttcttgactgggagcccaatgcctgtgcaatccagcacacacagcaacatgtaatccgtgttgttgcaactgattcacgagatgaatgaacatcccgaagcacccaagtcagccagttgtccaacccggcttgttctgcaacttgctgtagttgtttatgtatcagagctaccggtgccggttaccgcagcagccgtgcttttgtcggccctgttggtgcttgttgcagtaccagttatcccctaaggcaggggacagaaactgcggaatagtttttgtttgcattgacgtgacagcactgtaatcttaaacatcgtaccatagtcctttctatgacaaaggtgtggtttctgatgtctgcaataaatgatctggacttggggggtaaaaatgaaatactgctgtgttgcattgcattgcc

SEQ ID NO: 266686 - DNA, 1501 bp, Zea mays
aatcatcagaaggcacaggtgatggtttctagttggcctctaaactattggagaacagcacccgtcttcagaacacctctcataaaccagcatgcaagcatgcaagaggcaaaggtgaatgatgctggaccttcatcaaacttaaacatgcctgctatgtatggacacaccgaagatagtttgctttctgctgatcttgaaagggattggattatagaagagaatccaagaactgaaactacattgtttggagatagttcatcggaaatccttgatgagcctcagatggtgatgtctgctgaacctttccatgcacctgcttatttgaacttggaggctggaaattcaagcccaacggttcatgtcgagctaacaaattccgatgagaaactggccaatcttgcagaagacaagaatcggcgactttcagatgcaagccagttaagaacaggttcaaacccaatggttgatgttgagctaacaaatttcgatgagaaactggccaatcttgcagaaggcaagaatcagcgactttcagatgcaagccagttaagaacaggttcaaacccaatggttgatgttgagctaacaaatttcgatgagaaactggccaatcttgcagaagacaagaatcagcgactttcagatgcaaaccagttaagaacagggaggcttggtgaagaactggtcgagaaatatttggccaaacagctaggttccaacaatgttaggtgggtgaacaacagaattgaaaccggactgccttatgatattgttataacacacccagagggtttcacagagtatgtggaggttaaaacaactgtatcttcaagaaaagattggtttgacgtctcagcaagggaatggcagtttgccttggagaaaggggattcatttagcattgctcgtgtcatcttaggtacaaagaaagcaagtatagaaatgttgaaaaacccacacaagctttgtaagcagaaagcattgcggcttgctctcctgatatccagatcggcagcaacctagactaaaatgtcggttttgttgaggctagcaccgatcatccttctgcagattgttatgattactctgactaataatcaacatgaactggagtgagcatctgcatcttgataggtatttgctgatccaagttagcagattcttctttttggagagagatggggtacggcatgagtgcaagacaacatacagttgagccgctctatagtaggctcctctttctattattctaactcgggtaatcttctccaatggcggctctctaccatgtctcttgttacatacaacttacgctctgcctttgtaacccactctggcactttgttgcataatgcctgtgaccattgtcacttagatttgtttttcaatttctgccctagacatcgtcccataggttgattgtgtaactaaacatgaaactgtacataaatggatggaatttgattttaccatgtacatgaaatttgattttgcgtgc

SEQ ID NO: 266687 - DNA, 1126 bp, Zea mays
tttacgcttccgcccacgcgtccgcccacgcgtccgcggacgcgtgggcgctgaagctcgaccgctgctcaggcttctccacgccctccatcgcactcatcgcccgctcttgcaggaaactggaaacacttttcctggaagaaagcatgatggatgagaaagaaaatgatgaatggatccgtgagcttgctacgagcaattctgttcttgagacactgaatttctttcagacagatctcagggcatccccagagtatcttacccttcttgtgcgcaactgtcaaaggctgaaaaccctgaagattagtgagtgtttcatgcctgatctggttagtttgttccgaactgcacaaacactacaagaattcgctggtggttcctttgaagatcagggtcaacctgtggcaggtagaaattatgagaactactattttcctccttcactgcaccacttgagtttgctctacatgggaacaaatgatatgcaaatactgtttccatatgctactgcacttaagaagttagaccttcagtttacattcctttccacagaggatcattgtcagatagttcaacgctgctccaatctggaaaccttagaggtgagggatgtcataggggatcgtggactacaagttgttgcacagacctgcaagaaattgcataggctcagagtagagagaggagatgatgatcaaggaggtcttgaggatgaacaaggtaggatttcacaggtgggggtgatggctatagcccaaggctgccctgagttgacatactgggcaatatatgtatcggacattacaaatgcagctctagaggcggttggtacatgcagcagaaatcttaatgatttccgccttgtccttcttgatagagaagcacatataactgagttgccactggacaatggggttcgtgctttgcttagaggttgcaccaaactcaggaggtttgcattttatgtgagacctggggtcctatctgatgttggtcttggctatgttggagaatttagcaagagcattcgttatatgttgcttggcaatgttggtgaatctggtaatggaatcatacaattatcaaaaggctgcccaagcttgcaaaaactggagctgaggggttg

SEQ ID NO: 266688 - DNA, 443 bp, Zea mays
cccacgcgtccgcccacgcgtccgcggacgcgtgggctattttcctccttcactgcaccacttgagtttgctctacatgggaacaaatgatatgcaaatactgtttccatatgctactgcacttaagaagttagaccttcagtttacattcctttccacagaggatcattgtcagatagttcaacgctgctccaatctggaaaccttagaggtgagggatgtcataggggatcgtggactacaagttgttgcacagacctgcaagaaattgcataggctcagagtagagagaggagatgatgatcaaggaggtcttgaggatgaacaaggtaggatttcacaggtggggttgatggctatagcccaaggctgccctgagttgacatactgggcgatacatgtatcagacattacaaatgcagctttagaggcagttggtacat

SEQ ID NO: 266689 - DNA, 698 bp, Zea mays
cccacgcgtccggcatcaccacaccccgtctccaccccgtacaaatccaaaagagggcgaggagggaaacagatcggctggcggcaatcggtagccggcttggctggcacgatgggcggcgaggccgagggcggggagcggcggctggggcgggtgctgagctttgggatcccggacacggcgctggggctagtgatggggtacgtggaggacccctgggaccgcgacgccatctcgctggtgtgccgccactggtgccgcgtcgacgcgctcagccgcaagcacgtcacggtggccatggcctactccacaacacccgagcgcctgttcggccgcttcccgtgcctcgagtcactcaagctcaaagcaaagccccgcgcggccatgttcaacctcatctccgacgactggggcgggtctgcgtcgccgtggatccgacagctctcggccactttccactccctcaagaagctccacctgcgcaggatgatagtatccaacgacgatatcaacatccttgtgcgtgccaaggcgcacatgctcgtcacgctgaagctcgaccgctggtccggcttctccactccctcccatcgcactcgtcgcgcgttcccgcaggaaactggaaacacttttcctggaagaaagcaaatttgatgagaaagaaaatgatgagtggatccgttagcttgccacgaaca

SEQ ID NO: 266690 - DNA, 693 bp, Zea mays
tgccagcattcaatgggaggatgtatataaaagcatgcaaaatgtgaatgttggtgaacaaaagctcagtgttggactcctgaattttaacaggactgagttcagtgcttggacacatatgctcccagaaagtgatttttcagtcataaggctagagcatgccaatgaaagcatcacctggcaaactctgtatcctgaatggatagatgaggaggaagaaacagagataccatcttgtccttcgcttccagatcctagtttttcaagagcgacacactttgatgttgttgctgttaagcttccctgtagtcgtgtggcgggttggtcaagagatgttgcaaggctgcatctgcagttgtcagcagcaaaattagcagcagccacagcaagaggcaatagaggaatccatgtgctgtttgtgactgattgcttcccaattccaaacctcttctcttgcaaggacctagtgaaacgtgaaggcaatgcttggatgtacaaacctgacgtgaaggctctaaaggagaagctcaggctgcctgttggttcctgtgagcttgctgttccactcaacgcaaaaggtaagttcactattgtatcaagctttgaatagcttcccatcggaagatgctcattatttccctagtctatcctaatgcaaatgtcacgaaaacgtagtaaggccctaaatcgcga

SEQ ID NO: 266691 - DNA, 657 bp, Zea mays
gagataccatcttgtccttcgcttccagatcctagtttttcaagagcgacacacttggatgttgttgctgttaagcttccctgtactcgtgtggcgggttggtcaagagatgttgcaaggctgcatctgcagttgtcagcagcaaaattagcagcagccacagcaagaggcaatagaggaatccatgtgctgtttgtgactgattgcttcccaattccaaacctcttctcttgcaaggacctagtgaagcgtgaaggcaatgcttggatgtacaaacctgacgtgaaggcgctgaaggagaagctcaggctgcctgttggttcctgtgagcttgctgttccactcaacgcaaaagcacgactctacacagtagacagacgcagagaagcatatgctacaatactgcattcagcaagtgaatatgtttgcggcgcgatcacggcagctcaaagcattcgtcaggcaggatcaacaagagacctagttattctcgtcgacgacaccataagtgaccaccaccgcaaggggctggaatctgcggggtggaaggtcaggataatacagaggatccggaaccccaaagccgagcgcgacgcctacaacgagtgggactacagcaaattccggctgtggcagctcacggattacgacaaggtc

SEQ ID NO: 266692 - DNA, 433 bp, Zea mays
ggacctttgggctgatttatgtgcttgtcgggaactttggtaggtaaagtgaaagtacccgcgtgagaggtgctgtgcgccttccgtcctgcgtctatgcgttgcggtttccgtgtcccttttgcacttgtttgcgtcgcctttgttttgagtgaattggtggtggtggaggtgacgtagtatgagttgcggtggttcggtgtcgagtttgctgttggggtcggggtgggtttcgtctttattattgctgatgaggtacctacggagtggagtacgagtcctgctaaggtgtcctaggagtctaagaattcgtgtttgtagtctcatctggttcttgagcatcgtgagaagcttcattcctgtagtgaatagaagttagcggcgtcggataatacgaaagaccatgtcggctaggtttcggctaatgtcgctg

SEQ ID NO: 266693 - DNA, 721 bp, Zea mays
cggcgaaatccaagagcagcagcagcagcagaccaagatcgagggagggaggaagacagacagacagacagagacagagagatggagcggatgagctcgtcggtgcagtcctgggtggaggaacacaagctctcgtccatcggagccgtgtgggcgacggcggtgggcgcgtccgtggcgtacagccggcggagggcgccggcgcgggccacgagcctgcgcctcatccacgccaggatgcacgcccaggcgctcacgctcgccgtgctcgggggagccgcgctcgcgcaccgctattacggcagcagcgagaggaggcagaggcaggaggacctggactacggcttcaaatcccagctgccgccggccaccgacgccgagggcaacgagaacgagcgctggagctggtagtggcagggcagactagcagtgagtgaccagtgagccagtgacttccgccttcagatgcatacatcagatcagagagaaggaaggaagagggacaataaatagattaattagtactagtagcaataataataattgcatgcctgtttgccaatcaatgatacatgacgtggcgcctgatcctgttcgtcgcggcccataaacccaggaagcagctagcccatgtatgtgtggcctgttatgcgttaccgtacttcgttttcactcgttaatagtactctagatttcaaaaaaaaaaaaaaagggcggccgc

SEQ ID NO: 266694 - DNA, 1147 bp, Zea mays
  unsure (1)..(1147): unsure at all n locations
aaccgaccgaacccacatcctgcttactgcccacaagaaagaagctagggaaacccgggggatcggaggactgaggagaggccagaaggcccggctgcggctgcggctgcggctgcctttggtttcgtcgtcgtctccgcctgttttcccctctttccatggcaggctgatgctcttcaacacacacagtccactgtcgctcctcagttataagtagctagggcatctggctgctggaaaatcaagcacgcatccaccacacacacagctagctagcagatcgtttcgagtgaagatccaaagaggtagagagatggaaaggatgagttcgtcgctgcagtactgggtggaggagcacaagctctcaaccatcggagccgtgtgggcgacggcggtgggcgcgtcggtggcgtacagccggcggcgggcgccggcgcgggcgacgggcatgcgcctcatccacgccaggatgcacgcgcaggcgctcacgctcgccgtcctcgggggagccgcgctcgcgcaccactaccacggcaagagcaccaacgccgggaagaggcagcagcaggaggacctggactacggcttctactcgcagctgccgccggccaccgacgccgacggcaacgagaacgagcgctggagctggtagagcatgctgcatcgggacaagaacaagacagcagcgagaagaaagaaaaaacaataaattagtagcaataattggtgggtggtttggcatttggcaatgatgcgtgacgtggcgcctgcaggctttcttggtcctaatcctaatcctaatcctaatcccaatccatccagctaagacgtccacgcccgtggttttgtcctgttgatttgccaccggagacgacgatgcagcgcttgctctttgatttccatggcttattatcgatcagcctccgattcttctcctgcactactactacttgtaccatttcatctattgattgaatgaatggtcacgatgatgacgataattatgtttaaaaaaaaaaaaaaaaaaaaaaaaaaaaaaaaaaaaaaaaaaaaaaaaaaaaaaaaaaaaaaaaaaaaaaaaaaaaaaaaaaaaaaaaaaaaaaaaaaaaaaaanaaaaaaaaaaaaaaaaaaaaaaaaaggggggcc

SEQ ID NO: 266695 - DNA, 670 bp, Zea mays
aaactggcgaattgcgacgttggcggaattgtaatggcaataattccttcctccttcgttccccatttctcctcttgctaggtttctacccctctaaatcgatcctcgctccacggccatggtgaggatgaagcaggtaaagatctcggtaaagaaggacgtggattcgtacacaatccgcggcaccaacaaggtcgtccatgtgggcgactgcgtgctgatgcgggcgtcggactcggacaagcagccgtatgtggcgcgggtggagaagatggaggccgacggacgcggcagcgtgcgggtgcaggtgcgctggtactaccgccccgaggaatccaagggcggtcgccggcagttccacggcgccaaggagcttttcctttccgatcatttcgacctacagagcgcccacaccatcgaggggaaatgtgttgtccactctttcaagaactacaccaggcttgacaatgtcgggcctgaggacttcttctgccgattcgagtacaaggcggccaccggttcgttcacccctgaccgcgtggcagtgtattgcaaatgtgagatgccgtacaaccccgatgacctcatggtgcaaggcgatgcttgcaagcactggtacattttgtacaatgatttgcaatttacatttcactgatatttgcctttgttc

SEQ ID NO: 266696 - DNA, 984 bp, Zea mays
  unsure (1)..(984): unsure at all n locations
ccatgtgggcgactgcgttctgattcggtcgtcggactctgtcaagcagttctttttttcttcgagtggtttaaattgtatgtcgtctttactcgtttattttcggttgcaagttctcttcgtactaccgccccgaggaatccaagggcggtcgcctgcagttccacggcgccaaggagcttttcctctccgaccatttcgacctgcagagcgcccacaccatcgaggggttagtggtgttgtccactctttcaagaactataccaggcttgacaatgttgggcctgaggacttcttctgccgattcgagtacaaggcggccaccggttcgttcacccctgaccgcgtggcagtgtatgaagctcctcaacccttccattgctggctgtcccttttactgtgcatgcatttttagcttgcttgtgatgattgggttgtctattttctctcaaggtattgcaaatgtgagatgccgtacaaccccgatgacctcatggtgcagtgcgatgcttgcaagcactggttccatccatcttgtgtggctatgaccattgaacaggccaaaaagctagatcactttgtttgctcagactgtttcaaagaaaatggttcaaagagactttcaaatgcatatgccacttcaccaaattttgagcccaaggctgaaccaataaggcagacgaggtgacaaactgtgagtgccaacatccaggggagatgtgctgcttctgtggcgaatcagcccttgcactggcgagagcagaggtgtacagtgtttgctgtggtttgttcgatgtaactagccagtgtggcatgtcatgcagttgttggtagatcagtcattgtgttgatttggtcagcttaactcgacatcccccttcgttgattacattgttgttgtggcggtgcgcctgttctattaacatacggcttttatctgtaaatatcccaaattattttgatnctataaaaaaataaantaaa

SEQ ID NO: 266697 - DNA, 663 bp, Zea mays
gcttgataatgtcgggcctgaggactacttctcccgatttgagtacaaggcggccaccggttcgttcacccctgaccgcgtggcagtgtattgcaaatgtgagaagccatacaacccggatgacctcatggtgcagtgcgaacttgcaaggactggttccatccatcttgcatggctatgaccattgaacaggccaaaaaactagatcactttgtttgctcagactgtttgaaagaaaatggttcaaagagacttttcaaatgcatatgccactttcaccaatttttgagcctaagcaggctgaaccaaaaaggcagaggaggtaacaaactgtgagtggtaacatccatatgggtaaggggagatgtgctgcttctgtggtgaatcagcccttgccctttgctgtggtgagagcagaggtgtacagtgtactagaccagtgtttgctgttaggggaacgggttttgttcgatgtgtagaccgtgtggcatggcatgcagttgttggtagaggtcaaaagaacagtcgttgtgttcacttggtcagcttagcgccttagcccttgttaatgtgttaatgcactgtgttaactcagcgagccccccttgtggctgataatgcaagtcatgcagttgttgatacaaaaaaaaaaaaaaaggtcgg

SEQ ID NO: 266698 - DNA, 728 bp, Zea mays
cggacgcgtccgcccactcgttcgcccactcgtttcccactcgcggtcgcggtagccggcggcggcggaggaggaaagcaggcaggccatggcgtcgtcgtcgtcgaccccggcggccgtccgcgagatgcagaaggatctcgaggtccaggccaacgccctcagcaagatccagaaagacatcgccaagaaccaccaggtccgcaagcagtacaccatccaggtcggcgagaacgagctcgtcctcaaggagctggagctgctcagcgatggggccaacgtgtacaagctcatcggaccggtgctggtcaagcaggacctcgcggaggccaaggccaacgtcaagaagcgcatcgagtacatctccgcagagctgaagcggatggatcgggcgctcaaagacttggaggaaaagcaaaacagcaagaaggaatcgatattcaagttgcagcagaggatgcaggctgtacaagctaaggcttagacaactgtttgttggttgcaactagtccaaggccatgcttcatttcatcccaattccctccagggtttttttttggtggggaggaatcaggtgtctgatgttctcgtcttcacaacgaataagaaagaaaaacggctcctagtgaaatactaggctattctgcatgccctagaattaaagtgtgccttttagtaaactgtggaagatgtggttatcagcatctttttgtattattgaccatgtt

SEQ ID NO: 266699 - DNA, 607 bp, Zea mays
  unsure (1)..(607): unsure at all n locations
cggagcgtggnncggacgcgtgggcggacgcgtgggcttctgtttacaagagggacttaagcaaagtgagctacgtgtcttcttccccaataaccactttaacaccatgttcaagtacaacggaagtctatatctcctagcaactgatcaaggttttataagccaaactgatttggtatggcaaaggttggatgaggtgaatggagatggcgtttttcttactagcaacttcacaccatttaatgctgaaactccaagaaatgattcatggaatgaacagcaagctatgacgagtactgctgattatcttgctcaatttgacaactccacttctggaaactctgatcttgagctagctatagcactccaacagcaagagtttgagcggcaaccacaaaggtttcaagctccacaccgcagcagcagcaacagcaacaacagcaacaaccaccacctcagacgcagtaccagactcaatctggccgaccaggacttgttgttggtccaaggaggtccaacgccccacctccgtccagaagtgaatcgaagaaagagagatgcatcgtgatgtaaaaataccttcaacagaaatgtagaagaaaaagag

SEQ ID NO: 266700 - DNA, 411 bp, Zea mays
ctttggtctagattatgtgcctgtaccctctagacgtaccgacaccgaatacgcactaaacacgcgttacagtaagggtgtgccgtcccgcactgattgcatccccgctcgtttcactaactacaaggtatcgatcccaggtgtcgattcagccacctacctcgtaatatagcataccgtcggatatagtgacgccaccggaggacgtgctagcggtagagacgagccggcccttaaagcttgcacccactattacgcggccggcggcgcctcaaatttgaacgtcgtgcattccacttcctgaggtacgaaaatatcctactcttgcgcgtaacgctagaacaatatcgtctcccggacggtttagcccccagaggaatactcaaagaccgtttgcgctcatcacttcgg

SEQ ID NO: 266701 - DNA, 1123 bp, Zea mays
gcgaaaccgattcaacagatagtgatgaatcaagcactccctgcctgaaaagtgtcgactcgaatctgggtgccatgcctaatctggagcagatcaatgctctgatcaagcactacggcccaaccgttttcttccacccgcaagagacgtacttaccgtcatcagtttcttggttctttgagaacggagctacattgcacgagaaagacgcaaaaatgggagatgcaatactccctggtggcttgaatctgcctgttggtgggacaaacgatggcgagtactggattgatctccctgatgatgacaggaaggagctcgtcagagctggcaatctgaagagcgctgagctatacgctcatgtgaagccagctcatggagggaccttcactgacattgcaatgtgggtgttctgcccgttcaacgggcctgccaccatcaaggttgggtttgcgagtttcgctctgcagaaggtcggtaggcacattggagactgggagcacttcaccctccgagtgagcaacttctcaggtcagctgtcgtctatctacttctcgcagcacagcgggggcgagtgggttgaagcttgcgatctggagttcatctctgggaacaaggcgatcatctactcgtccaggaacgggcacgcgagctacccccacccaggctgctacctgatgggttccgagacgctcggtgtcggagttagaaacgatgtggcgcgaagtgatctgtcagtggattcgagcacgcggtatgagatcatctcggcagggcatctcggggaggacgctgttgcggaaccgtgctggctgcagtacatgagggagtggggaccgaccaatcacgtacagctcacgttcagagatagacacggcgctgagcttcctgccgttctttctccggttcacagcagaggcaatattcaacagccttccggcggaactgtacgaggaggaaggtcctacggggcccaaggagaagaacaactgggaaggcgacgagagatgctaggctttgtcgccatcattgtttacccctgtcaccttaatctgtaccctagagctgtattgtacttgatgaaaaagattgatactgtatgtgataagaatatacagtttcgtac

SEQ ID NO: 266702 - DNA, 1242 bp, Zea mays
cccacgcgtccgcggacgcgtggggcacgtacaacgctgctgctgacaccgagctacctacctcccccgtgccaccacctctaaaatcccccagcggcccaaccgaacccgcctagggattcctaccgagggaggccgcacgcagccatggatttcctgcaggagcaaagcgtcgagaccacagtggccgtcgccgtcgctgtcgccgccgtcgccgcaggcggcgccttcctcctccttcgatccaggaagcccaagggctgcttggatcctgagaacttcaggaagttcaaacttgttgaaaagaagcaaataagtcataatgttgccaggttcaagttcgctcttccaactccaacttctgtattgggccttccaatcggtcaacatatcagctgcagaggacaagacgctacaggtgaagaagtaatcaagccttatacccctactacattggattctgatcttggatattttgagcttgtcataaagatgtatccccaagggagaatgtcccatcatttccgcgagatgaaagttggtgattatttgtctgtgaagggacctaagggccgattcaagtaccacgttggccaagtgagggcatttggaatgctggctggtggatcaggcattactccaatgtttcaagttgccagagcaattcttgagaaccctaatgacaacaccaaggttcacttaatttatgctaatgtcacatatgaagacattcttctgaaggatgagctggacgacatggccaaaacctatcctggccgctttaagatctactatgtgttgaatcagcctcctgagaactggaacggtggtgttgggtttgtgtctaaggaaatgatccaatctcattgtccagcgcctgctgaggacattcagatcctgagatgtggtcctcctccgatgaacaaggccatggctgcacaccttgacgagctcaactacacaaaggagatgcagttccagttctaagcaatgttaagtttgcaaataataattagtgaccgacatggttcttcggtcacaggaatagtacctgactctgctcgttagctgatatcaggaggaattcaggatcacatgatgattagtagtgcgccagcattttttgcaatctctatttttgaggtcaaatgatatctacctccacataaatccacattggcagagacaacattttgttactatcattattgattttaaatgtggaccattggatgcgataaa

SEQ ID NO: 266703 - DNA, 546 bp, Zea mays
  unsure (1)..(546): unsure at all n locations
cgcacgcgtncgcacgaaagtacacttaatctatgcaaatgtcacgtatgaggatatgcttgtgaaagaagaacttgacggcatggccaaaaactatcccgatcgtttcaagatctactatgtcttgaatcagcctcctgaagtctgggacggtggcgtcgggttcgtgtcgaaggaaacgatccagactcattgcccagcgcctgccgccgacattcaggtattgcgatgtggacctcctcccatgaacaaagccatggccgcgcacctggacggccttggctacacgaaggagatgcagtttcagttctaagcgttgcattctctctaccagtaccagaataaacggcggtggaacaaagttctaagctccaaacagacgctcttttgtacccaccaaatttgtatcggtgtcgggacattgtaccatgccgttattttgtatcggtttgtcactcactcactccgcgagccagcagcccagaacacgatccatcctgacgttttgcaacgtcatacaaatacaaaaaactgcacgtgcagcag

SEQ ID NO: 266704 - DNA, 435 bp, Zea mays
  unsure (1)..(435): unsure at all n locations
cccacgcgtccggtcaaaccaaccgcgatccgcgaatccgcgggagaggaggggaggggcgcgggggcgatggagttcctgcagggccagaggctggagaccacgctggccgtcgcgggcgccgtcgttgccgtcgcagccggctccgcctacctcttcctccgcagtaggaagcccaggggatgcctagaccccgagaacttcaaggagtttaaacttgttgagaagaggcagctgagtcataatgttgccaagttcaagtttgcgctcccaacacctacttctgtattgggtcttccaatcggacagcatataagctgcagaggacaggatgcttctggccaggaagtgatcaagccttatactccaactactctggactctgatgttggatcttttgagcttgttataaagatgtatccncaaagaagaatg

SEQ ID NO: 266705 - DNA, 518 bp, Zea mays
acggcatggccaaaaactatcctgatcgtttcaagatctactatgtcttgaatcagcctccttaagtctgggacggtggcgtcgggttcgtgtccaaggaaatgatccagactcattgcccagcgcctgccgccgacattcaggtattgcgatgtggacctcctcccatgaacaaagccatggccgcgcacctggacggccttggctacacgaaggagatgcagttccagttctaagcgttacattctctctaccagtaccagaataaacggcggtggaacaaagtcacagtcacagagcgtcgtacttactctacctggatgaaagcagcagtacagtacccacctaatttgtatcggtgtcgggacattgtaccgtgccgttcttttgtatcggtttgtcactcactcactcactccgcgacccagcagcccagcacacgatccatcgtgtcgttttggcaccgtcatgcgaatacaccagtgaacaagggaagggcggcccgaatgcgaggacgc

SEQ ID NO: 266706 - DNA, 523 bp, Zea mays
ggctcctgatcgattgcccggtaggccgaagacgctgtctcctcaaatgatccaatctcattgaccagcgcctgctgaggacattcagatcctgagatgtggtcctcctccgatgaacaaggccatggctgcacaccttgacgagctcaactacacaaaggagatgcagttccagttctaagcaatgttaagtttgcaaataataattagtgaccgacatggttcttcggtcacaggaatagtacctgactctgctcgttagctgatatcaggaggaattcaggatcacatgatgattagtagtgcgccagcattttttgcaatctctatttttgaggtcaaatgatatctacctccacataaatccacattggcagagacaaaaatgaaaataatagatcctagtacctgtaagagatccatactaaatactatgaatacttagatgttaaccatgttactcgactgaactcgttgtaaggataacaaaaaagggggggcccttttaaaggacccactttta

SEQ ID NO: 266707 - DNA, 830 bp, Zea mays
cggacgcgtgggcggacgcgtgggcggacgcgtgggcgctgggcggtgcccgggcgttggataggagaggtcaagattcaagaacgacgacacgccgaagtagcagagggatccgttggcctcccgtacccagcccccttctaccccttcgtcgacggctgggattgcggcggcgcccttgtcttcgccggcgacgagcatcgccagggacttccgattggggggggcgattgcggagatgggctgatcagaactgcgacaaggtccggttttctcctccaaattgtggtctctggaggtggatttgctttttccgtagccgcagatggacgacgacgatggcagcctgggcattcggaattggggcttctacgacaccatgaaaggcaacctaggcctgcagctcatgtcgcccatgccacctgaccgggacacgaagccactgctcccgagagctggtttcttgcagcagcatgggcatcacaatgcatcgcaccagctccatgcacagcagtcgcaacattatcgtgattccacttgcggtggaggagcctctggtggcatgcccaccgagcagcactctatccacatggacttctcacgcaatgaagcttggctgcacccatcgcaccaccaccaacatccccatgaccagaaggtccttcattctcgccctaccgtaccagctgggcatgttgggcatccaggccatggtagccatcctgtgcatggtgggcatatcgtgcatcaccatcctactggctatgggtcaatatcagatgcacaacatactcttcagatgatgcaaccacagcttgagtcacagcttc

SEQ ID NO: 266708 - DNA, 482 bp, Zea mays
cccggctggccccacgcgtcagcacacgcgtccgcccacccggccgggcagcctcggcctgcagctcatgtcgcccatgccacctgatcgggacacgaagccactgctcccgagagctggtttcttgcagcagcatgggcatcacaatgccccacaccagctccacgcacagcagccgcagcattaccgtgactccgctggtggcggagtctctggtggcacacctgccgagcagcaccctatccacatggacttctcgcgcaatgaagcttggctgcacccatcacaccaccagcatccccatgaacagaaggtccttcattctcgccctatcggaccagctgggcatgttgggcatccaggccatgttgcccatcctgtgcatgccgtgcatgttgtgcatcaccatcctactggctatgggatgatatcagatgcacaacatactcttcagatgatgcaaccacagcttgagtcacagc

SEQ ID NO: 266709 - DNA, 417 bp, Zea mays
cgttccagtaggtacatcaggcgcataccaaaaccagtctcagccttctttcctgagccgtgatgcctctcagcctataacattgatgacagtgactagtgatactagtgatcatgctggcgaatgctagacgtcattaccatacagcaggccagcagccagtaaggagctccactttggcagcctgccactctgcttcttccactcctgaaaccgagcctgcaggtgcaggcaatgcggttgcttgctggagtccttatccaatcagtgaaggcactaaactcgcaaagccgttggaatctgcgagcaaggtcatgcacatcttgttggatgaagttaatacagcctgcactgcaactcccgcactctcgcgatcgtgtggaagacgtgggcgccgttgagggtcaaaatcttctt

SEQ ID NO: 266710 - DNA, 589 bp, Zea mays
gcctggtaataagccaagcccgctctaggtgactgttgttgggcgatccgattaggcggcgaggcaggcagatctccatcaccgtccgctccgacgagtcggcgcggacggtgatggagatctgcctgcgctgcctggccaaggaggcggagcagcggccgtcggtggaggacgtgctgtggaacctgcagttcgcggcgcaggtgcaggacgactggcgcggggactcgcggagcagcgccagcgaggagtcgccgctgtcgccgtcgcagatcccgccgcggagggacagggagaccagcgcctggtaataagccaagcccgctctaggtgactgttgttgggcgatccgatcaggcggcgaggcaggcatgcatcaagtgagatttcgttggtaaacaagtgtacagcagctgcaggctgcagctgaagctggaaacccaccacaggatgtgtacagctctttgcttcggcctactagtactagcactgctttattttatttttttcaatgcgtctttgccacctcattgattcacctactatatggatcgtttgactatgtgtaagcacaactgtatttggcgtc

SEQ ID NO: 266711 - DNA, 520 bp, Zea mays
  unsure (1)..(520): unsure at all n locations
cccacgcgtccggcacgcagccggcgccagtcatttcttctacattctcaatctcagcggggcggctctcgttctttctttctttcttcctttctgtttgctgcatcgatgtagggaggaggaggaggaggaggaagcaagtatccatctgacagcagggtgccccccaatggcgacaagatcgacatctacgatttcggcgtgatcctgctcgaggtcgtgaccgggaggcccatcacgtccatacacgaggtggaggtcatgaaggagcagctgcagtcggcgctgacgtcggagagcccggggcggcggatggcgctggtggaccaggcggtgagccgggcgtgctccgacgagtcggcgcggacggtgatggagatctgcctgcgctgcctggccaaggaggcggacagcggccgtcggtggaggacgtgctgtggaacctgcagttcgcggcgcaggtgcaggacgactggcgcggggactcgcggacagcgccacganggagtcgccgctgtcg

SEQ ID NO: 266712 - DNA, 622 bp, Zea mays
ttacgaattcaggacagacaacaatagcggtcttggcatcgaagaatatcgtatccccagtgcgtagaatccccgttggagggctttcttatggaaccgatgatcacagtctcagagatgagtttgccaaatatggagaagtcgttgaaggtatcaagctcattgctgcacttggtggtctgctcaagaatggtatgagttcaaatctgtctgtctaccaagcaatcagatgcatgtcatcatccaagctctttgttggagggctttcttatggaaccgatgatcacagtctcagagtcgagtttgccaaatatggacaagtcgttgaagctgagattatccttgatcgtgagtctgggaggtccagaggttttggctttgtaacttacacgtcttctgaggaggcttcggctgccatcactgccatggatggaaaggttcttggacatgtatgttatcacatcatagcagctggtttgaacggctacatggcaattgtgaccaaccttaacagtccggtaaacaaatggaaatgtgctgctgctcccattattgtatacatgaattaacttttcagaattcaggttaaattctaagaagagtaaatattttccttgttacc

SEQ ID NO: 266713 - DNA, 1091 bp, Zea mays
acggcgccgcctttcgtcccagcccctaaaccattctccattcctctcctcagtttagcacaatggcactggctaataagcttggtggtctgctcaagaaagccacaagttcaaatctgtctgtctaccaagcaatcagatgcatgtcatccaagctctttgttggagggatttcttatcaaactgatgatcacagtctcagggacgagtttgccaaatatgggcaagtcattgaagctaggattatcattgaccgtgagtctgggaggtctagaggttttggctttataacttacacgtcttctgaggaggcttcagctgccatcactgccatggatggaaagactctggatggacggaacatacgggttaatcatgctaacgagaggacaggtggcttccgcagcagcggtggttatggtggtggcggctatggtggtggtggtggtggctatggtggcggtggctatggtggcggctatggtggtggtagcggtggctatggcggcggcggcagtggtgactatggtggcggcagcggtggatatggtggcaactacggcgacagggctggtggtggctatggtggtggtggtgattatggagttgcaggtggggctgaaggcagttttgctgctggaggtagcgacagctttggcagcagtaactttgctgacagtggttttggtgaaaaccctgctggtagctttggcgcaatgggtggttccagtggcgctgatgggttctctgccggcacacctggtgacggtaacaagaatgatgaaatcatggatgatctcttcaaggacgatgagcctgacagctacgccaacaagaggagctaatttgtgtccaccaccaccatgcgaggccgtgtggattctaggccatatgtattcggtagtgttttctgttaacatgataggtgtctgatgtctaaataatggaacgagtccttttgttgagtttgagttgtggaactttcaaagcgtgcgttgcatgctggcgcttgtgccggcaaacatggcatactttcatgttatattgttatttgctagtaaaaaaaaaaaaaaaaaaaaactcgaactagt

SEQ ID NO: 266714 - DNA, 1254 bp, Zea mays
gactagttctagatcacccgcgtccgccaccgccgccgcctttcgtaccgcggcccctaaacccctttcctcgttcccctccgtctctcagttaggcacaatgatgctagctaataagcttggtggtctgctcaagaatgctacgagttcaaatatgtctgtctaccaagcaatcagatgcatgtcatcatccaagctttttgttggagggctttcttatggaaccgatgatcacagtctcagagacgagtttgccaaatatggacaagttattgaagctaagattatccttgatcgtgagtctgggaggtccagaggttttggctttataacttacacgtcttctgaggaggcttcagctgccatcactgccttggatggaaagactctcgatggacggagcatacgggttaatcatgctaacgagaagaccggtggctttcgtggcggcggtggctatggtggcggcggctatggtggtggtggaggctatggtggtgctggtggaggcggtggatacggtggcggccactatggtggtggtggtggcagcggtggatactgtggcggcgactatggtggcaactacagcaacaggggtggtggtggtgattatggagttgctggtggaggtggaggcaactttactgctggaggtagcgacagctttgccaacagtaactttggttctgacagtagttttggtggaaacggtgctggtggctttgatgcaaccggcggttccacaggcgatgatgggttctctggcacacctgatgataactttggtggtaacaagaatgaagaaaccatggatgatatcttcaaggacgatgagccggacagctacgccgacaagaggagctagtttgtgccttctccaaagagtgctcatcaatacgattccagaacgatatgtattggctagtgtttgctgttaacatcatagcggcctgtatgttcaaataatggagcgagtaattctgatgagtttgagttgtcgggggctgtggaactttcaaacatggcgtgcatccacgttataatgtcgttttgctagatgctatgctttcatcgtggcttggaaatcggggtcttgtcaagcttcagctcacagacggatctgtaaatggtactgaaccctacatcttatgttttctgttaaaaaaaaaaaaataaaaaaaaaaaaaaaaaaaaaaaaaaaaacatataaaaaatattaaaaaaaaaaaaggggcggccgttttaaaggat

SEQ ID NO: 266715 - DNA, 1522 bp, Zea mays
cggacggtgggcggacgcgtgggcgagtgacagtggactcccctggctccccgtcacagcggcgtcgttaactagcggccacccattgccgcgttcccttcgctatccttggttgccgcttcctccaaagccactcccaaacccccgcttccagaaccttctcgaagctccccgccgcctcctccactcgcaccgatggcgaaggaaccaatgcgcgtgctcgtcactggcgccgcaggacaaattggatatgccctggttcccatgattgctaggggtgttatgcttggtgcagaccagcctgttattctgcacatgcttgacattccgccagcagctgaagcccttaatggtgttaagatggagttggttgatgctgcgtttcctcttctgaagggagttgttgctacaactgatgttgtggaagcctgcactggggtcaatgtggccgtcatggttggtggattccccaggaaggagggaatggaaaggaaagatgttatgtcgaaaaatgtttcaatctacaaatcccaagcatctgcccttgaagcccatgcagctcccaactgcaaggttctggtggttgccaacccagcaaacaccaatgctcttatcttgaaagaatttgctccatctattccagagaagaacgttacttgcctgacccgtctggaccacaacagggctcttggccagatttctgagagacttaatgtccaagttagtgatgtgaagaatgttatcatctggggtaaccactcgtcctctcagtaccctgatgttaaccatgccacagtgaagacttccactggggagaagcctgttcgtgagcttgtctctgatgacgagtggcttaatggtgaattcatcacaactgtccaacagcgtggtgctgcaatcattaaagcgagaaagttctccagtgctctctcggctgctagctctgcttgtgaccacattcgtgattgggttcttggaacacctgagggtacatttgtttccatgggtgtgtactctgatggttcatacggtgttccttctggactcatttattcattcccagtaacatgcagtggtggtgaatggaaaatcgttcaaggcctcccgattgatgagttctcaaggaagaagatggatgccactgcccaagagctgacggaggagaagacgcttgcttactcatgcctcgagtaaattctaccacacccagagagcaattgccaccccaatgttttgaataaaaaaagaaactccaactccattcatagattctcactcagaactgctgcacgtcgcagtgcaggcgtgttgctggcttcgcccagcttctttttttgcctgtgatttgcacgacatttatatttattgaaatcttgcagaatcgcttgacgatgaaagtggtagcatacttttgttgctttcctggggcctaaccctcttttaaagtttcatttagatcttttaaggattccgtagaaaaaaaaaaaaaaaaaaaaaaaaaaaggcgcggctgcaccgggaa

SEQ ID NO: 266716 - DNA, 514 bp, Zea mays
ttctatgcgtccgcccacgcgtccgcccacgcgtccgcccacgcgtccgttcttcggtggctcttggtgtctgaaattctgcatgtgcagttataattggcctaaatgatttcaataagatcttgccaccctactcagtaggaagttattatgtcctttttctaatcaaatatagctaatataaaggtcctaaaaaaatctcgagctgatccggacaatcaagattatagtccacagtttgagacactcaggctccagctaatgaaaagctgatccagacaatcaagattatggcctttttctaataaaatatagctattagctggctccccctggttattgctgctaataaatttatccatacaggcactacacggacgtgttttgtcatagtctaatataagctatgtgtgtttttaccatagattacaaatgcacctggcttcatagaaactggtgttaaaccttttaaaagtatcatataagcctatctcaaattcatgggatgagagat

SEQ ID NO: 266717 - DNA, 355 bp, Zea mays
atcgttcaaggcctcccgatcgacgagctctcaaggaagaagatggatgccactgcccaagagctgtcggaagagaagtcgcttgcttactcatgcctcgagtaaattataccacacacccagagagcaattgctaccccctgtgttttgaataaaagaaactccagctccgtccatagattctcactcagaactgctgcacgtcgctgtgcaggcgtgttgctggcttcgcccagcgtgtacgagactacgagggcttgtagcccctttttggcctgatgacttgcgagacatttattgaaaaaaaacttgcaattgtaccggttgacgatgaaagtggtagtgtagttttgtt

SEQ ID NO: 266718 - DNA, 361 bp, Zea mays
cccacgcgtccgcacacgcgtccgcggacgcgtggtcgcatcccatctgctatccttggttgccgcttcctccaaagccacgccaaacccccccttccggggcgttctcgaaactctccgcctcctcctctactcgctccgatggcgaaggaaccgatgcgcgtgctcgtcactggcgccgcagggcaaatcggatatgctcttgttcccatgattgctaggggagttatgcttggtgcagaccaccctgttattctgcacatgcttgatattccagcagcagctgaagcccttaatggtgttaagatggagttggttgacgctgcatttactcttctaagggagtcgacccacaactgac

SEQ ID NO: 266719 - DNA, 995 bp, Zea mays
gatatatgcaggaacaaacccagaaacttttgtccgagctgatggtgcatttataccgtttgctgatgactttgacattactagtgtcagcacctccgttaaaggagttggagtcattggtgatgtaaaggcaattgacttgcaatccccaattggcagtctcattgggagacaagttgtcaaagttggaagaagttctggtctgacaactgggactgttgtcgcatacgcacttgagtacaatgatgagaagggaatatgtttcttcactgactttcttgtcgttggggagaaccaacaaacatttgatcttgaaggggacagtggaagcctcataatcttaacaggacaagacggtgagaagccgcaacctataggaattatatggggtggtacagctaaccggggaaggttgaaacttaaaagtggccagggtccggagaactggacaagtggagttgatcttggccgccttcttgatctcttggagctagatctgatcacaacaagtgaagggctacaagctgccttggaagaacaaaggattactctagctgccgctgcggctgcagccactaattcaactgccacagaatcgtcacctgttgctggccctcaagaggatgataaaatcgacaaaatctatgaccctctcggcattaacatcattcctcgagacggttctgccatatcaacggaccaacccaacgaggatgtggaagagctaaacctgatgtctccaatgcgcaacggtcaagaaggcaacggtgacttcaataacttgatggacttggaaccggaaaattcacctgatggtatttctattgccctgaacctgggagagcgggagcctaaaagactccgctcagattttgattcgaccctcgacatggacttgcagaaatgaggctgttatgctgcagacttgttgcaggaggctctgcactattcagcttttgtgttgatcattggaggtatggccataaaggaaataa

SEQ ID NO: 266720 - DNA, 1634 bp, Zea mays
cttggactcatgcctgatattttggcatgtcgcagtacacagccacttgaagaacacgtgaaagtgaagctcgcacaattttgtcatgtcccgataccaaatatcattaatctccatgatgtcaccaacatttggcacattcctttgttgctcagagatcagaaggcccatgaagctattttgaaggtgttagaccttcagtgcgcgagtaaagttgctcgagaaccccaattgtctgaatggactgaaagagtcagcagatgtgacagattgaaatctccggttaggattgcaatggttggaaagtatactggcctgtcagactcctacctatctgttataaaggctcttttgcatgcgtcggttgctttggacaggaaacttgtggtggactgggttccttcctgtgatcttgaagattctacagcaaaagagactcctgacgcctatgaaaaggcatgggagtcgttgaagggtgcagatggtgtgttggtgccagggggttttggagacagaggagtccaagggaaaattctggctgcaaaatacgcgcgagaaaacaacgttccatatcttggcatttgcttgggcatgcaaattgcagtgattgagtttgcacgttctatcatgaagttgcacggtgctaacagcacagagttcgatccaaccacaaaaaccccatgtgttattttcatgccagaggggtcaaaaacccatatgggggcaacaatgcgccttggatcaaggaggacctttttccaggtcactaactgcaaatctgctaaactgtatgggaatgctagctacgttgatgaaaggcaccgccacagatacgaggtgaatcctgatatggtcccagaatttgagaaggcagggctttctttcgttggcagggatgaaagtggtaaacgcatggagattatcgaactgccaactcataggtttttcgtcggtgcacaatttcaccctgaattcaagtcaaggcccggcaagccatctccgcttttcttaggattggtagcagcgtcatcaggtcagcttgatcacctgctccaacctggtcttatcagttcgactggcagacacacctgcagcaaaggaggagcgcaaaaattaaaggctgggcacgtcatgaagccactgaatggcctggtgaacgcacactattcagcaaccggcaatggcgccattcccatctagcagcgcagagctgcgacgcgtcgcgtgcttgtttgggatttctcttctaccgttactgcttgttctttttttttccctttccttcgagggtgttcttccgtacgttctgccaggccaactgagaagaagagaagggctgtttgctctagcgacacgggcagccgcgtttccgatgttttaacgtggaagcatttggcatggaagctgtcgcatgcatcaagaggcaaatctagcaggttagctagagtttgattagtagtggtaatccgatatatatgctggttgatttgttcgtttgtttgctaagattacaagggccggtgatgtgcagctagctggtagtgtagcctgccgtctcgcctcatttgtacattgtaaaacaactgctactctccattgactgactgaatggacgagtataaacgtattggacc

SEQ ID NO: 266721 - DNA, 682 bp, Zea mays
agattatcgaactaccaactcataggtttttcgtcggagcacagtttcaccctgaattcaagtcaaggcccggcaagccatctccgcttttcttaggattggtagcagcgtcatcaggccagcttgaccacttgctccaacgtggccttaccagttcagcaggcagagacatctgcggcaaagggggagcgcagaaaccaaaagcttgccagaacgggcatgtcatgaagccactgaatggcctggtgcacgggcactattcagcgactcgctgcaatggcgtcattcccatctagcaggctgttttcgcttgttctttttctttccgttctacctacctgcagggcaaccaggaagagaagggctgtttgctctagcgacacggcagccgtttccgatgttttaacgaggaagcaattggcatgcaaagctgtcgcgcgcattaagaggcaaatctagcagcttattagctagggttcgattagtagtagtagtaatccgatgttgctggtttatttgttagtttgtttgctaagaaagattacaagggttagtgatgtgcagctagctccagtgtagcctgccgtctcgccccatttgtacattgtaaaaccactgctactctccatgattgactgaatggatgagtataaacgtattggaccaacatgctcggtgttat

SEQ ID NO: 266722 - DNA, 509 bp, Zea mays
ggccaaaaagttgctcgcccagcagccagcgccttcaccagatcgagcaaaacggctcagctcagctcgacctaccactacctcccgcttggcgcctgggactggcaaccggcgtgcgcagaatgctgcccaccgggtgcaggtgcagcctcctctcctgcctccgccgcgacaagggcgaggcgggccgaaccgacccccgcgtcgcggacgagcccaccgcgtcgtcgctcggcaagggcagcgccgcggctcggcggttcgcgtgggccgagatcgagtccgtcacggcggggttctcgtccagggtcatcggccagggcggcttcagcaccgtgtacctggcctgcctctcctcctcccgcctcggcgccgtcaaggtgcagcgcagcagcgagcgccttcaccgcgccttccgccaggagcgcgacgtgctcctcgcgctccgacacccgcacatcgtccgcctgctcggatactgcgacgaacgagaggaaggcgtgttggtg

SEQ ID NO: 266723 - DNA, 1166 bp, Zea mays
acgccacaaccacaacacctcgcctcgtcagatcgaccgggaagaagggagcagaagccaaccggctcgtccgcccgttgcctgtcgtcgctatggccgccgtggaggtgtgcgtgaaggccgccgcggggaaccccgacacgctcggcgattgcccgttctcgcagagggtgctgctcacgctggaggagaagaaggtcccgtacgaggtgaagctcgtcgacctcggcaacaagcccgaatggtttctgaacatcagcccagagggtaaggtgcctgtgttcaacggtggagatggcaaatgcattgctgattctgatgtaatcacccaagtcattgaggagaagttcccgactccttctctggtcacccctccagaatatgcatcagtgggatcaaagattttcccagcctttgtcaagttcttgaagagcaaggatgctagtgatgggtcagagaaggcgcttctggatgagctgcaggcactggatgatcatctcaaagctcatggcccctacataaatggggagaacgtgtcagcgactgatcttagcctggggccaaagcttttccacctacagatcgcactggagcatttcaaaggctggaagatcccagaaaacctaaccaatgtccatgcctacaccaaggctcttttcagccgtgaatcttttgtcaagactaagccatccgaggagcacgtgattgcgggatgggcgcccaaggtgaatgcataagagccttgtgctttggtgctacctggtggactccatccatttatcttatcagtctttgtcagtggtgtggataggtgtcaagtctgtagcctagatgcatgattcagttggaattatgcagtgccgtgtctcgagtactcagttctggctgttgcggttgtgcatcttaccttctgttgctggttttgtttgaggccatgggcatctcttggtcctatgctgtgagagcgctgtaatgtgggtaccaaataatggagctgcttttatgcttgtggtgtggattctgttgtgccttgctttcatgattctgttttcctgtggtgaattggtgatagcctgagcagcaggttatcttctcctatatatcacatatttcggacctggtttttttcaagcacatgttaaatgaaaatgtttggtgcagtattc

SEQ ID NO: 266724 - DNA, 499 bp, Zea mays
accgggaagaaggaaccagaagctaaccggcacgtcgtgaagctaaccgggattccgggaagcagagacgtccgcccgtcgcccgtcgtccgtcgtcatggccgccgtggaggtgtgcgtgaaggccgccacggggaagcccgacacgctcggcgactgcccgttctcgcagagggtgctgctcacgctggaggagaagaaggtcccctacgaggtgaagctcgtcgacctcgacaacaagcccgaatggtttctgaagatcagcccagagggtaaggtgcctgtgttcaacggtggtgatggcgaatgcattgctgattctgacgtaatcacccaaaccatcgaggagaagttcccaacttcatctctggtcactcctgtagaataagcatcagtgggatcaaagattttgccagccttcatcacattcttgaagaagcaggatgctagtgatggttcccagaaagcgcctctggatgagctgcaggcactggatgag

SEQ ID NO: 266725 - DNA, 545 bp, Zea mays
acgcccactcgtccgcccacgcgtcactccacgcgttcgcaacgtccacgcctacaccgaggctgttttcattcgtgaatgtattgtgaagactaagccatccgaggagcgcgtgattgcgggatgggcgcccaaggtgaacgcgtaagcacatcgtgatttggtgctaactggtggactccatccatttatctgatcagtcgttgtcagtggtgtgtgtaggtgtcacatctgtagcctagacacatgattcagttggaataaatgcagtgtcgtgtgatcgtgtctcgagtactcagttctggctgttgcaattgtgcgtgtctgttgccggtttcgttcgagaccatgggcatctcttgatcctatgctatgagagcatgcatatagtgtaacgtgggctcccaataatggaactgctttcatgattttctgttctctggtaaattggtggtagcctgagcatcaggttatcttctcttatatatgggcatatttctgacctggatttttttcaagcacatgttaatcaaaatgtttggtgc

SEQ ID NO: 266726 - DNA, 288 bp, Zea mays
gaaaaaactcaccgggaagaaggaaccagaagctaaccggcacgtcgtgaagctaaccgggattccgggaagcagagacgtccgcccgtcgcccgtcgtccgtcgtcatggccgccgtggaggtgtgcgtgaaggccgccacggggaagcccgacacgctcggcgactgtgagtactccccaccccccacctacggcgcccaattccgcccggatccctagccgtctcactgacccttctttgccttggcttggtctggtctggatggaaccggaacctgctgccggc

SEQ ID NO: 266727 - DNA, 670 bp, Zea mays
cccacgcgtccgaaaatgttgtatgaggaattcgttcaacgcttggaattcaacaaggggaaggtggcaggagaggttaagtgccacaagtacagccggcgcaagccagacaatggatggagctacatggtcgaaaagcttggtcctcagggaaagcgtggtggaggagggggctggaagttcatcagcttgcctgatggatcaagccgtccactaaatgatatggagaagatgtatgttaagcgggagactccaaaacggcggcggaggataattgcaccatacaagtgacatggacaacttcagtttgctgaaatgcaaattttctcaactgtcttttgacattgtccagcgaggctgaagcaagaaactgtgaagtagtttggaaccgccagaacagctcctgtttttttcacagcacagtagatggtttgatgtgttttgtaacaaggattatttccccacattttggcagccgaataattatcttttaaacttttcggtgttcctcccgtctctatgcactgccgagcaacaattccaagccacgcgcgtcgttacccgtgctgcaaggaaaaacgcctgttgtactttttgcacatataaacattttgcacatataaacatttctcttaagcaaactcaaatttcaatttcccgcctgggggtt

SEQ ID NO: 266728 - DNA, 794 bp, Zea mays
  unsure (1)..(794): unsure at all n locations
aatgaattataacatcaagncccttacagnngggggaaagaatctaaagttgacaatatgggatactgctggccaggagaggtttaggacaattactagttcttactacagaggtgctcagggaattattctagtatatgatgtcacaaagagagaaagtttctcaaatttggctgatgtttggactaaggaaatagaagcaaactcaacaaacaaagactgcataaaaatgcttgttggaaacaaagttgacaaggatgatgaaagaatggtcacagaagaagaaggtcttgcttttgctgaagaatctggatgtctgtttcttgagagcagtgcaaaaacacgagaaaatgttgagaaatgttttgaggaacttgcattgaagattcttgaggtgcctagtctcctagaggaagggtcttcttcggttgtcaagaggaacatcctgaaacagaagcaggaaagtgatgcaaagaacggtagtggatgctgtcaatagatgtatgtgctgatccacaccacacggttggctttcttcgtgtgagctgccctgattgtctgctgtacatgttcttgtgagtaagaagggcgagcataattgatttgtacaaaggacatgtcagtttggtgtcatagttttcctcatctccagtttagtatagcaattttgttgtcgccctagcaatggtaatatggaatcctctctctacagtatcgctatctggccggctggcccttagaaaccgggaccgtggaacttgttctcatggccaaatttaccgcacaagaagttg

SEQ ID NO: 266729 - DNA, 991 bp, Zea mays
tattatggttccggcttccgccgccagcggcaggaatcccctcctcctcctccctgttcctggacgccggctccggcgccggctcctcatcgtccgcgggagactgaagtggtgaacacggaagaaggttgccattttgctaagttaaagttagatcattggagcaatgccgccccataagatcgagactgggcaccaagatgtggtgcatgatgtcgccatggattactatggcaagcgcctagctacatcctcctctgataatacaataaagatcattggcgtaagtggaacctcacaccagcagcttgcaactttgagtggacaccagggcccagtatggcaagtcgcatgggctcatcccaagtttggttccatgcttgcatcctgcagctacgacggccgagtgatcatctggaaggaaggaagcaagcctgatgaatgggcactggtacacacctttgctgagcacaagtcctccgtgaattccatcgcgtgggcgcctcatgagctgggtctatgcttggcttgtggttcatcagatgggaacatttcagtcttcactgctcgttctgatggaggttgggataccacgcgtattgatcaggcgcatccggttggtgtgacctcagtttcttgggctcctgcaatggcaccgggagctctaatcagcgcggggtcttctggtcagtttgagtatgttcagaaactcgcttccggtggctgtgacaacacggtgaaggtgtggaagctcaacaacggcagttggcggatggactgtttccccgccctacagatgcacaaggactgggtgagagacgtcgcgtgggcgccaaacctgggccttccaaagtccaccatcgccagcgcctctcaggatggaacagttgttatctggacagcagcaaaagaaggcgagcagtgggaaggccggttgctgtatgatttcaggacccctgtgtggaggctgtcgtggtcactgactgggaat

SEQ ID NO: 266730 - DNA, 350 bp, Zea mays
aaccccacctaggtccgggaccgtgggcgacgtggtgcagcagcggcaacgctcccctcctcgacggtcgacgccgcggcttctcctcatcctcgtcccctccgtccgctgactggaagtggtctacacagaaggttaccatattgttaagttaaagttggatcattggaacaatgccgccccataagattgagactgggcatcaagatgtggtccatgatattgccatggattactacgggaagcgcctagctacagcctcctctgataacacaataaagatcattggcgtaagtggaacctcacaccagcagcttgcaaccttgagtggacaccagggcccagtatgg

SEQ ID NO: 266731 - DNA, 604 bp, Zea mays
gctgagaaaagcaagttacaaaggaacgaatggtttggtgttctccttagaataaggagcaatgctatcattgtgctggctatcatctgtcttcagttgccatttgagttggcctatgctcatctatatgagattacagaaactgaggctatgaagtatttgttgactgcagtatatcttgttgcaattcaatattacaccagaattggtggcaaggtgtctgtcaatttgataaagtatgaaaacaaccaaggagaagaatcgagttccgctagtttagtttataaggtctttggtctttactttatgcagtcatatattgggttattttaccatgcttctttgcatcgtgatatactggccctccggcgagtcctcatccagcgtctcattgtgtaccaggtattagaaaatctaattgagaattccattccttacctcaagtacagttacaaaaagtacatagctgttcacaagaaaaagcgtgggaaagaatcgacagtgggtaggtcagtccggttatcaacaagagtggagaaagagtatttaaaaccctcttatactgcaagcattggagcagaactcgaagatggtttatttgatg

SEQ ID NO: 266732 - DNA, 972 bp, Zea mays
actggttccagtaagaaaaaggccgagaagagcagtttccgcccagttgccaaggagaccccatcacttgaggactcaaatgagaagaaaaaaactcagaaggcatcaaaccaacattctgtcaaaaacgatattgaagaagaatcaaatgaaagtgtgaaacctcaaagggttggcagcactccttcatatggatttagttttaagtgtgatgagagagctgaaaaacgaagagagttctactcaaagctcgaggagaagattcatgcacaggaactagagaaaagcaacttgcaggcaaaatcaaaggaaactgaagaagctgaactcaaaatgctgagaaagagtttaaatttcaaggcaacaccaatgcccagcttttataaggaaccacctccccccaaggttgagttgaagaagatacctacaacaagagctaggtcaccaaagcttggtcgctccaagaacacatcctcaggagggacagaagggaattcaaatcctccagctcgttcagctcgactgagtctcgatcaaagggtcccccaaaatggtgccaagaaagcacctgctgcaaatgcggcgaagaagccccaacggaaatctctccctaaattgccttcggagcaaacagccaaagttgttgacattgcagcgtctgttccatctggagaagagctggggaagaagccatcgttgacgggtcttgttcgagagccaatccgcgcgcaacttacgcctgatgaacctggactcagcgtgtaggaaaggaacctatcaagccgactcatgaaagaagagagttgtgcctcagcttcctttatcacactttgctatttctgcattaactgctggctggtattatgtactaaaattagtctcatcaccaggatggagttgggagtttggagaatggcaagtgacccccgtgtattgtttatggctagtttctgttgacatacgaatgtttgt

SEQ ID NO: 266733 - DNA, 444 bp, Zea mays
  unsure (1)..(444): unsure at all n locations
gatttccatggcaattggcaacttcgcaaacacattggatacattgatggccgagtctcggttcaaagcgaagatgaagaaatcaaagggcaaacgggatcttgacacgtgcccctcaccaacaggttcgtcgccgacagattcagcaaccagagcatgaaaaggtcaagagggccagttgcttaccctatgaccattgcccgtgtttaaccagggctggtcaccattgtaaatcattagtgttttctggccatcagcccctaatccttactgtctctgtcagagctcatactcatgtaagcatcaggcaactaggttgctgatggtcctaggctgaaaaaggatactgagaataaacttctggtgtttggttatacctatatcctgaacatggagtggagtagatgagctttaggacttgcagtcttagcanaatttcccagt

SEQ ID NO: 266734 - DNA, 1254 bp, Zea mays
cgaatcagacggcgccatggccggcacgtgcgcccacgtcgagttcctccgcgcgcagccggcgtgggcgctggcgctggccgccgtgggcctgctcgtggccgtccgcgccgccgcccgcttcgcgctctgggtctacgccgcgttcctccgcccagggaagcccctgcgccgccgctacggcgcctgggccgtcgtgacgggcgccaccgacggcatcggccgcgccgtcgcgttccgcctcgccgcggccgggctcgggctcgtcctcgtcggccgcaacccggagaagctggccgccgtggccgccgagatcaaggccaagcaccccaaggtccccgaggtgcgcaccttcgtgctcgacttcgccggcgaggggctcgcggccggcgtcgaggcgctcaaggactccatccggggcctcgacgtcggcgtgctcgtcaacaacgccgggctgtcctacccgtacgcgcgctacttccacgaggtggacgaggagctgatgcgcagcctcatccgggtcaacgtcgagggcgtcacgcgggtcacgcacgccgtgctgccaggcatggtcgagcggaagcgcggcgccattgtcaacatcggctccggcgccgcctccgtcgtgccttctgatccgctctactccgtctacgccgccaccaaagcgtatgttgaccaattctcaagatgcctctatgttgagtacaagagcaagggtattgatgtgcaatgccaggtgcccttatacgtggcgacaaagatggcatccatcaggaagtcttccttcatggtcccatctgctgacacctatgctcgtgctgccgttcgtcacattggatacgagcctaggtgcacaccatactggccacactctgtcgtgtggttcttgatctccattcttcccgagtcccttatcgacagcgtgcgcctgggcatgtgcattaagatccgcaagaaggggctggccaaggacgccaagaagaaggcgctgtgattgatgtttcagaatgcatgttcagattcgcacatttcctcatcacctgtagtagacacgtgccttgctgtagtcactttattagctaccattacctcctgagtctgttaagaatcgagaatgtcattgttccatccgcggttatgatgatgaaaaatacgattcttcaattcaaaatgtaacactaatacgagtaatgatgcatgaaattaacttgaagaagttgtgcaactcagttgtgtttcgaactagggggg

SEQ ID NO: 266735 - DNA, 387 bp, Zea mays
agggttatatacccagtcattccaagcctttcatgaaacaagtagatagccaataggaagtaggaaaagcgcgggatatacccttcaacccagttttgggcgaagataaggcgcatcgtactttagctgtgacagtgaggagttcaatgtggtcattgggccaggaatctagtggttgctgtcggtcgctcgttctagatggattatgggctatggaacctggagtgccgtggtgctgcaaacatctcatgtttcattctgaaatctttttagatgtataatacgtagtagttgaattttctgtaaaaaaacatgttgcttggtgtttgcctttccaattggctgataagcctggccaaaaaaaaaaaaaaaaaaaaaagggggggg

SEQ ID NO: 266736 - DNA, 554 bp, Zea mays
gtgctcagtaatcccaagcagcgtgaagactatgacttacatgggaaacctggtgtgtcaacggaagcgataattgatcctgcagcaatttttgcgatgctgttcggtagcgagctttttgaggactacattggtcagctggcgatggcatccatggcttcacttgatggttttactgaaaacgaacagatcgatccaagaaggttgcaagagcaaatgcgagttgtacaaaaagaaagagaggagaaacttgcagaggcactaaaagataggttgcatctttatgttcaaggaaacaaagaggaatttatccagtatgctgatgctgaggttactagactctctaatgccgcatacggtgttgatatgttgagtactattggttatgtgtattcgagacaagcttctaaggagcttggaaagcaagctaaatatcttggtgttccatttattgctgaatggttcagaaacaaagggcattctattaaatcccaaataactgctgcaacaggtgcattagctcttatgcagctgcaggaagactggagaaagca

SEQ ID NO: 266737 - DNA, 436 bp, Zea mays
atgcacatccatcgtacatccgtgctgccaagtgccaactaatgaattaaccagcaacacttaattaagaggtagtgtgcatggtgaaacaaagattattaacatggcttctagctgctactgctactgctactagcaatttttgcctctctggtctggtctgccaaggctaccgctgctgtatgaataacttggagatcgaccgaaaaattacatgcatgtaagtagaaggggttaataaaggtggtatgcagacgaagatgcttttcttgaactagggtttaagtagctagaaacggatgggaactgtactttaagtcattatgttctgtgctctttggggaacatggctcttgcgcttaaccttcaataaagactgtaaaagatgagtacgtggatcggaaaaataaagagcttggaaagcaaaagggcggtc

SEQ ID NO: 266738 - DNA, 404 bp, Zea mays
tgacctttagcattcttaattcaatgaacatgtcttgttagaattcaagtaaatggattagccaagattgttatcatagttttacctttacatgactaaccttacacatggttttgtatgactttctttttcagatgtgacctgtttgatgtcatgttggagatggatcgcatactgcgcccagaaggaactgccgttatacgggcctcgccagacgtagtagccaaggcagcacagatcgctcagtcgattcggtggaaggcacaggtgcatgacagtgaaccagaatcaggcagtaccgagaaaatacttgtggctaccaaaacattttggaagctgccactaacaaaacaataggctaatgcgagtttgaactttgaacccttttcacttgcgcttcctta

SEQ ID NO: 266739 - DNA, 520 bp, Zea mays
cagttatcaacaatggagcaaacttgtttgaagtagatagtcagaagtgggttaggagagtgtcatattataagaactcgcttggtgtgaagcttgggagcacaacatacgcaatgtcatggacatgaatgcgcgctcgcgtgggttcgcagccgctataatatctggtcctgtatgggttatgaatgttgttcctggtcagaagccattgacacttggagttatttatgataggggccttataggggtttatcatgactggtgtgaaccattctcaacgtatcctcgtacctatgatcttattcatgctgatgcaattgactccttgataagtggcccgatttcaggcactagcagatgtgacctgtttgatgtcatgttggagatggatcgcatactgcgcccagaaggaactgccgttatacgggcctcgccagacgtagtagccaaggcagcacagatcgctcagtcgattcggtggaaggcacaggtgcatgacagtgaaccagaatcaggcagt

SEQ ID NO: 266740 - DNA, 941 bp, Zea mays
caattcccacttagacaatacgagtgggctcatagtcatagatagcgctagcagcagtagaaaccgccgccactaggctaggagtggaagcctcgggcccgcggcagcagccatggcggcgttcctggcgcctccctgcacttccttctatcgctcgtccgcattccttaccccctgttcctcgaatcgccggagtacagcgctaagggcggcggccgttcgtgggtcggcggtgacgcgggcccagcggacggtctccgctaggtgggtcccatccaggttagcggtggcgaggccggcggccaggaaggcgtgcctagaggagcttgatacaaccaacatgctccttcgccagcgcatcgtcttcctgggttccccggtggatgatacaagtgctgatctcattatcagccaactcctactattggatgcagaggaccagactaaagatattaaattgtttatcaactcacctggaggctctataacagcagggatgggagtatatgatgctatgaaattttgcaaagctgatgtgtcaactgtttgctttggattggcggcttcaatgggtgcatttttacttgctgctgggacaaagggtaagaggtactgcatgccaaatgcgaggattatgatccatcagccatcaggtggcgctggcgggaaagtcacagagatgggactacagataagagagatgatgtacgaaaagattaagatcaataaaataatgtcgagaattactggaaaatctgaggagcagattgatgaagacacgaagtttgattatttcatgagtccttcggaagccaaggattatgggatagttgacaatatcatagatgaggggaaaccagggttggtagctcccttggcaggatctgttccgcctcccaaatcgcgtgtgtggtacttgtggaaggcttcggggccgacca

SEQ ID NO: 266741 - DNA, 1498 bp, Zea mays
cccatttgtccggctcaatgtgccacccgggcgctggctcacggcgcccttcaacctcaccagccacatgacgctgtttcttgccgatggcgcggaaatccttggcattacggatgagaagtactggccattgttgccagcattaccgtcatatgggtatgggcgggagcgcaaaggaccacgatttgggagtctcattcatggacagaatttgaaagatgtagtcattacaggacataatgggagcataaatggccagggtgaagtttggtggatgaagcatcgcagaagaattctgaataacacaaggcctcctcttgtgcagctgatgtggtccaaggacattattgttgcgaatataacattgaggaactcacctttctggcacttgcatccttatgattgcacaaatgtgactgtttcgaatgttactatcatgtctcctgtttctggtgctccaaacacagatggcatagatccagattcttgtcaggatgtgcttattgagaattgctacatatcggttggcgatgatgcaatagctataaagagtggttgggatcagtatggtattgcatacggtcgtccatcttctgacattttaattcgcaatgtaaccgcccgttctcttgtgagtgctggaatttcaataggcagtgagatgtctggcggagttgcaaatgttactgtggagaatgtgcgcatctgggaatcaaggagaggtgtgaggataaagactgccacaggaagaggcggctacatccgtaacatctcataccgcaacataactttcgacaatgtccgtgctgggattgtgataaaggttgactacaacgagcacgctgatgatggatacgaccggactgccttcccagacatcacaagcatatcattcaagggaatccatgggcagggtgttcgggtgcctgtccgagctcatggcagcgacgtcatccccatcaaggacatcagcttccaggacatgtcggtaggcatcagctacaagaagaagcacatcttccagtgctcctacctcgaggggcgtgtcgtcaggcccgtgttcccgaaaccatgtgagaacctggacgtctatgatgagcaagggcagcttgtgaagcgggcagtggccctaaacagcacagaacttgactacgatatatgaggtgcacatatcataccacagctttgatagttgtagtggaaattggtgctctctaccctcagaaatcaattttctccgattgtccatggctttttgggtctagaattgtagatagagaggagattttcctcttgataggtttgctgcttacagtggctgaatgtatctcaccggcgatttactgatttgtccatgaacatttgtaatcgccagaaccttcctggcgacaaatgtatgctgtcaatatattgtacacctgaagattgtattggagtatacacagtacatgatctctaaatatctgccagcaaatttttctaaaaccggattacataa

SEQ ID NO: 266742 - DNA, 432 bp, Zea mays
cggacgcgtgggctttgaactgaatatgcacgggcatatgggatcccgcaggggtggcacatgagccatgaatgtgcataaaagaagatcagagcatcctcatgttatatctgctgaaggtttatgcatgtccagtgtgccagtttatttacagaaaggcattgcaaggcccagtagcagcaaattgcagcctgccagtaaaataccagaaatcagctcacaaagcaatgccagaatcactccagcagaagagcagaatggaagcacaggcacccaaattattcaagggtccaacaatgggtcaacgatgaacaacccagatgcacatcatgttaattacctggggcaggaatcctttgatcatttctcccgaacaagtctcttttgtgaaggcactacttcgggggatctgggtaatgtcgggagccccac

SEQ ID NO: 266743 - DNA, 522 bp, Zea mays
gagctggagagttcttcaagaatggattcttcaagaatttttcctgtgaccggagtggagcacagccactactaacaatgaccatttctgaaactctgaagtatgagtacagcctaacttgtccaatttgcttggacactttgttcaacccttatgcgcttagctgtgggcatctgttctgcaaagcctgtgcatgtggtgctgcttctgtctacatcttccagggtgtcaagtcggcacctccggaggccaagtgccctgtctgccgagcggttggtgtgtttgatcgtgctgtgcgtatgactgaactagaattgctcctcaagagaagggacaaagattactttctgcagagactgcgcgaagagcgaagtgtgatggtgaagcaggccaaagaatactgggactcacaggcaatgctatcgatgggggtttgaaagctacaatgttcttaccaggtcaattgttgtggctaattacatctgaaggttctctggctaattacatattttagttcctggc

SEQ ID NO: 266744 - DNA, 1796 bp, Zea mays
cggctcgagatccgctattagctcagcacttatcacattttggtatcgatttttcttcactccaaaagactgagatgactactgctgagagggaacttgatgctaacacaaattatgactggaatagaatacaagaaagtggaaaagacgctgagcttctgtttggacccggctatactggtcttgcgaatcttgggaatagttgctatatggcttcaataatgcaagtcatgttttcaatccatcctttcatatcaaggtacttcgagaaacagagtttgaaagctgcatttgcaactgcacccgctgatccaacagtagacctaaacatgcaactgacaaaactagcgcatggtttgctctctggtaaatattctgctccagcaaaggaggggcaagaagggatacgttctcgcatgtttaagtcagttatcactgcgaaccatcctgaattttcaagcatgagacaacaggatgtccttgaattcttccttcaccttattgacagagttgagaaggcaaaccctggagaccgtgagctaaatcctttttccggtttcaagtttgttgttgaagagagggttcagtgcccttctgggaaggtttcttacaacaaacgatctgacaacgttctttctttgagcataccactgcatgaggcaactaataaagagcagctagaagcttttaatgagaagaaagctgcaatgaacttggatggaaaagaagtgtctaatgaggatattgtcaggcctagagtcccattggaggcatgcttggcaagtttttcagggccagaggagattccagatttttatagcactgcattaaattcaaagactaccgtcactaagacagctggtttcactacctttcctgattaccttgtgctgcacatgcgtaagtttgtaatggaaacaggatgggtgccaaagaaactcgatgtttatatagatgtgccagatacaattgatatcacacatatgcgcagcaaaggattacagcctggggaagagctgctacctgaaggaggttctggtgacgacagtgccgagcctgctaatcctgttgccagtgaggttattgtaacccagcttgcaagcatgggcttcaactaccttcattgtcagaaagctgctattaacacatcaaacacaggagttgaggaagcgatgaattggctcctctcgcacatggatgatccagatataaatgacccaatatcaaaagattcacgtgcttatgagccatctgttgacgaagcaagtgttcaaactctcatctcctttggattccaggaagacattgccataaaggccctgaaagcttctggtggtaatatcgagaaagctacagactggattttcagccaccccgaagcatctacctcagcatctgctgattcttccactagcaatgtaaatgctgatgacacatatattccagatggaagtggcagatacaagctgatggcgttcgtgagccatatgggcacctctacccactgcgggcactacgtagctcatgtcctcaaagacgggaggtggacaatctttaacgacagcaaggtcgcagtatctgttgacctgcccaaggaaatgggctacctctatttctttcagaggattagcaactaggcacgtcacacacaatggaaagaatggtgggctgttaggatactgtcttgctgattttaaagcgaacgtttactcacatcctgccatgctggttactgaatggtcaaccgggatatttgcttttttgttccttgagacctcgattggcatcttccggtt

SEQ ID NO: 266745 - DNA, 1158 bp, Zea mays
gtttcatttgttcactatatgatttacttgtaggtatacttactgatgtggttgcataggtgtcatttgtctctctctgcaggaatgtctcgttatcctgcaccgtatcctatgattcgtcctggttttgttccacgtccaatgccgccgcctggtgttgtgccaattcaacgaccaacaataatttctgggatccgggctattcctcctttggtagccccaactgcccggccacctgctccagctgttaagctggcagataaaccgccaaccgcagtttatgttgggaagatcgccccaacagtggacagtgatttccttctttcacttcttcggctttgtggatctgtcaagagttggaagcgtgcccaagatcctagtaatggaaaacctaaaggttttgggttttgtgaatttgaatctgctgaaggcatccttcgtgcgacacggcttctcaacaaattgagcattgatggtcaggaactggtgattaatataaatgatgccaccaaggaatacctgaagaaacatgttgagggaaagaagagagcacaagagaaggaaaaagaaacagaagatgcaagcggggatggaactacagctgtcgctgaaaatgaatcatcaaaacctgtccctgatgaattgggtgagacaggagatgctggagataagtacagggaagacaacactgataaatttgggattgttactgacgaagactctcaaactgacaaagatgtcgcagaaaaaataagcaatatgattgaggagtggttaaagactagaccgccacccccaccttcaccagttcaaccatctgctgatagctctggcgtagataaggcaaaaaatgattctgatgataagaatgctgctgatgctgataaaagggcagctaatgaaactgagagatctgaaactgcctctcctgataagaggaaggatagagagcatgataaggacaaacgggacaaagatcttgaaaggcatgaccgtgaacgtgaaagagtacggagggatagagagaaggatcataagcatagagaagctgataggctctacagggatcgccttaaggagtgggaatctagggaaagagagagagaatatcagaggtatagtgaaaaggagaaagaaagagatagagatcataaccgc

SEQ ID NO: 266746 - DNA, 435 bp, Zea mays
tctcatgcgtccgcccacgcgtccgaaacagagctgcgtccaggcttcttcgatcggtccatggctgccgtcacgagggacgcggcgtgcctccccctcgtcctcctgctcctagtcttctccgcggccccgtctccggctgacggctgcgaccgctgcgtgcgccggtccaaggccacctactaccaggcctcctcgctcgccctcaacgccgggtcgtgcgggtacggctccttggcggcgtccttcaacggcggcctgctcgccgcagccagccccgagctgtacaggggcggcgtcggctgcggcgcctgcttccaggtgcggtgcagggacagcgagctgtgcagcgccgccggcgccaaggtggtggtgacggaccaggcgcggacgtcgaaccgcacggcgctggtgctgagcgccgcggcgtacgcg

SEQ ID NO: 266747 - DNA, 489 bp, Zea mays
aaggatccagtaacaaatgagtttgtcctcgagggtggagcactggtactggcagatatgggcatttgtgctatagatgagtttgacaagatggaagagtcagaccggacagcaatccatgaggtaatggagcagcaaacagttagcattgccaaggctggcatcaccacctctctcaatgcgagaactgcaattctggctgctgcaaatccagcatggggaaggtacgacatgaggaggactccagcagaaaatataaatctacctccggcactcctgtcccgtttcgacctgctttggatgatcctggatcgcgcggacatggaaaccgatctcgaaatggcgaggcacattgttcatgttcatcaaaaccttgaatcgccggcgctggggttcacaccactcgagccatctgcgctcacggcatacatatctgcagctagaagagtgattccttccgctcctagagagctcgacgaatacattgtg

SEQ ID NO: 266748 - DNA, 1995 bp, Zea mays
  unsure (1)..(1995): unsure at all n locations
ccctcgcgtccgcggacgcgtgggcagatatctggagcaccatctcttgtaagaaaagctctatatgaaatatctactcgtctccatcagcatcctcgtaaggaaaatagacctcttgaacaaataatagatgcaagcacacaaaggaaacacgagtctccaacactgcaacatgaaaatccaatgttgccgcacctgcatagtcatcatccacctccaatacccctgcttgacccatacagaagtggacctcagtatcctgttagtgaaactgaagagttttctatcagaatcctgtgtgcttctgagctcattggttcagttattgggaaaagtggggccaatgttaggcgtgtagagcagcagactggtgctcgcattaaagttcaagagattgacaaagatgcttctggagaaaggctgatcattgtttcatctaacgagataccaactgaaccaatatccccaacaattgaggcactcattttgctccatgataaagtaagtgcaccctctgagaaacaccattcaagtacaaggcttgttgtaccatcaaacaaagttggctgtattcttggggaaggtgggcaggtgattactgaaatgagaagacgaactggggctgaaattcgagtttactcgaaggcagataaaccaaaatacttgtcttttggtgatgaacttgtgcaggttgctgggcctccagctattgcaagaggagccctcacagagattgcttcgaggcttagaactaggactttgagagatacaagtactgccaataatcctccaccttttgccccttccgatgatcctcctgtcgatatgcctagcagaaaattaacactatatggagggcctaccaatgatacaccgtatggaaggcctgccaatgatccactgtatggaaggcctgccattgatccaccatttggaagacctaccaacgatcgaccatacggaaggcctgccgtcgctcctccatttggaagacctgccaacgatccaccatatggaaggcctgccaatgatccaccatatggaaggcctaccaatgatccaccatatggacgaccttccagtactatagcatatggaagaccaaacagaagtgcacctcgtgatccttcagatgcatatcctgtagactacttctctaaaagagaacatcctagtggaggccctatgtttactagtaatggcccatcagctgcttatgagagatatgcagcacccacacactttcctactagagaacttccctcaactttcagtcatcgttcctatcgtgaccacatgcctactgatagctactctagtaggggtacacagaaattagacatcacgagagatggaaattcagatgcttatgattatacagaggctgctggacaaattcatggactggaggactatagaggactgccaagtgcttctggaaggttctcgagcactattgaactaaggattccaaatagttctttggggtctattgtcggtgctggtggggtcaatctagcagagatccgtcaggtttctggtgcaagactgaggctacatgaggctcatgctggttcttctgagtctgtggtggagatccagggcacactggaccaagcaaaagctgcccagagcctcctgcaaggctttattagtgcaaacagccggcagcaacagcagccctattcttctcgcatgccactttacccaagctggggatagcttctggtctcatggtcgtgtcagaggaaaacagagtcagcagggtttgtcatgtggctgtagatctcggactgcagattagctgtagcgatgatgttgttgaaggaggctgtttaacagtgcaagcaagataacttatacttatgccttaggacaagtaatattgttttcctctgatgaaatacttggtaacgatctgtctctgtatttttatatttgattctgaatgctttgaaccctagtgttccnaaaaaaaaaaaaaanaaaaanaaa

SEQ ID NO: 266749 - DNA, 570 bp, Zea mays
  unsure (1)..(570): unsure at all n locations
tggctancattgcttcatctaacgagataccaactgaaccaatattccccaacaattgaggcactcattctgctccacgataaagtgggcaggtgattactgaaatgagaagacgaactggggctgaaattcgagtttactcgaaggcagataaaccaaaatacttgtcttttggtgatgaacttgtgcaggtgacttaatatttgctaacagcatcaacatatttctatatgtttttattatctagaccatttatttgttaacttttgttgtacctgtatatttgttccaagctttcaggttgcagggcctccagctattgcaagaggagccctcacagagattgcttcgaggcttagaactaggactttgagagatacaagtactgccaataatcctccaccttttgccccttccgatgatcctactgtcgatatgcctagcagaaaattaacactatatggagggcctaccaatgatacaccgtatggaaggcctgccaatgatccactgtatggaaaggcctgccattgatccaccatttggatgacctaccaacgatcgaccata

SEQ ID NO: 266750 - DNA, 615 bp, Zea mays
gagagatggaaattcagatgcttatgattatacagaggctgctggacaaattcatggagtggaggactatagaggactgccaagtgcttctggatttctggtgcaagactgaggctacatgaggctcatgctggttcttctgagtctgtggtggagatccagggcacactggaccaagcaaaagctgcgcagagccttcctggagggctttatcagcgcgaacagcaggcagcagcaatcccattcttctcgcatgccactttacccaagatggggatagcttctggttgtggcaggggaaaaccgagtcagcagggttggctggagttatctcagactgcagattagatgcatcgatgatgttaatggtagctgtttaaattgaccgtgcaagcatgataacttatattatgccataggacaagtaatgctgattctctcatgaaatactaagtgacaagctgtctctgtagttgtatttgattctgaatgtttgaaccctactgttacaacggctgctattttaggtcagatttcatagcccggataattatgttggccccagagttggcccaaaaaaccaaaccaaaaaaaaaaaaaaaaaaaaaagagaaa

SEQ ID NO: 266751 - DNA, 300 bp, Zea mays
aacgagataccaactgtaccaatatccccaacaattgagcgcactcatgtttgctccacgatacagtaagtgcaatcctactgagagacaccattctagtacaaggcttgttgtaccatcagacaacgttggctgtattcttggggaaggtgggcaggtgattactgcaatgagaagacgtactggggctgaaattcgagtttactcgaaggcagatagaccaagatacttgtcttttggtgatgaacttgtgcacgtgacttaatatttgctaacagcatcaacatatttctatatgtt

SEQ ID NO: 266752 - DNA, 890 bp, Zea mays
atgccatctgccgccatgtcaaagcgaggtaagcagcctcttttaccaactggattcggccatttctcgtcgctcgatctggctataaatctcgcctgctcgtgcatgtgacatagttcggctgcttcaaggtgctcggaaaggggatgctgttgtccaaccccatcattgttagggccaagctcatctccaagatcatcgagaagaggatcaatgttactggaggcactgtcttgctgaccgccacatagatgctgtcgacggatatgcatagaagagaacatatatgcataaaagggagtaaaactaagatttggatattttcatccggacacagagtaaagaattctccactctcttgacttgacgaggctatataaccagaggccgtcaggggagaactgaagactgagagcattctctgcttataatctttattcctctatattctaaattatttttttcaatccccttccacctggattcgattcgaatcccacaccaccacgtggtgttcttcctatatcgaataaacgttgtttcgcttgtctaatgatcgatagggcactgaaagagtcattcctagagactctacggaaggacacaacggagatggagcagcctgcttgagaagaggcggcggaggagaaggaagcgctcaacctagactcgtggtcgtcgaccagcatgcgccttgacgtccctcttttttgattcatttatttgattttttgaacaaaattgcccttgtctttgtccttcctcccttttttcattttcttaatgccctcatgtaaaatataaggcatgtgttgttcaaatctttcttttaaaactacatgtatttcgtgtgttctatgatgatatatacagaaactggtcttcttgat

SEQ ID NO: 266753 - DNA, 447 bp, Zea mays
atgctgtcgacggatatgcatcgatagagatcagatatgcatagaagggagtaaaactaggatctgggtaaaaatcccctctcccgtattgtatttcaatttatacgtatatatttacggtgattgctttagcatattctagtatctgttttttcttatacttaaagaattgaattgtgtgatgattgatatcttcatctggacacagactaaagaattctcgactctcctgacttgaccaggctatataactagagaccattagaggagaactgacgactgagagcattctctgctcataatctggattcctctatattctaaattgcttttttcaatccccttgcacctggattcaattcgaatcccacaccatgtggtgttcttcctctatcgaataaacgttgtttcgcttgtctaatcatcagttcgatagggcattgaaag

SEQ ID NO: 266754 - DNA, 1351 bp, Zea mays
  unsure (1)..(1351): unsure at all n locations
cctcctcatactttaccgcaaagcgcgcaccacgaattgcacctacccatttcgctaatctccctccacgagccgaccaaatcgaatcgaatcgcgcgcagcgcgcccgcgcagcgattgccggcgatggcgagcctcaccctgccgccggcgccccccaacccacggcaggacgccatcgacctccaaaaggccttcaaagggtttggctgtgacagtacaacagtgataaacatacttactcatcgcgattcggtgcagcgtggactcattcaacaggaatacagggctatgtatcatgaggaactctcccaccgcatttcatctgaactcagtggaaaccacaagaaagctatgtcgctgtggattcttgatcctgctggacgtgatgcaactgttttgagagaagctctaaatggtgacactatggatctgagagcagccactgagattatatgttccaggacaccatcacagttgcaaataatgaaacagacttattatgctagattcggtacttatcttgagcatgacattgctcaccacacatccggcgatcaccagaagcttttacttgcctatgtggggattccacgctacgaaggtcctgaggttgatcctaccattgtgacacatgatgcaaaggatttgtacaaagctggtgagaaaaggctgggtacggatgagaagacctttatccgcgttttcactgaacgcagctgggcacacttggcatctgtttcgtctgcttaccatcatatgtatgaccggaaattagagaaggttatcaagagcgaaacatctggaaactttgaattcgcacttttagctatcctcagatgcgcggaaaacccagcaaagtattttgcaaagctcttacgaaaggccatgaaaggtctaggcactgatgacaagacacttataagggttgtggtgacgaggaccgagattgacatgcaatatatcaaggcagagtacttgaagaagtataagaagccattagctgaggctatcaactccgagacatcaggaaactatcggacgttccttctttcacttgttggtcatggccattaggctatgtttcgaccatgggacatgatattcctatccatccaccctaaatgcagcgacctacctggaaaacttatgatgttgccatttatctgtcgtgactcctggatctaactgccacatatcacatatgcggtccctagtatgcttgtctaaagtattcgtgtttaaatttgtatctgggtttcttgttggaaaatctgtgcggnggcacaacagctgttgttgtcacgctaggcttgacttgttctccatgacatcaatatatattgcatgt

SEQ ID NO: 266755 - DNA, 517 bp, Zea mays
  unsure (1)..(517): unsure at all n locations
atatatcaaggcagagtacttcaacaagtataagaagccattagctgaggctatccactccgaaacatcaggaaactatcggacattccttctttcacttgttggtcctggacattaggttatgtttcgaccatgggacatgatattccacccatccaccctaaatgcagcgacctacctggaaaacttatgatgttgccatttgtcagtggtgactcgtggattcgtctaacttccacatatgcggtatctagtatgcttgactaaagtattcgtgtttaagtttgtatctgggtttcttgttggaaaattctgtgcgggggcacaacagctgttgttggtcacagtaggcttgacttgtgtctccatgacatcaataatattatgtcatgttcgtgtgtgatcattccactattagagaaagcaccatatgtaccggttgagaattggctttaaagaggagattttagtaccggttcttggtatgagctgatactaaaagttacataaaanaaaa

SEQ ID NO: 266756 - DNA, 633 bp, Zea mays
cattagctgaggctatcaactccgagacatcaggaaactatcggacgttccttctttcacttgttggtcatggccattaggctatgtttcgaccatgggacatgatatttctatcgatccaccctaaatgcagcgacctacctggaaaacttatgatgttgccatttatctgtcgtgactcctggatctaactgccacatatcacatatgcggttcctagtatgcttgtttaaagtattcgtgtatatatttccatccgggtttcttgttggaagattctggatgggataccagatcagctgttgctggtcacagtgggcttgactggtgtctctatgacgccaatattattatgtcatgttcttgtggcatttccttcattcgttattctgtttttcgctgcttatcccatatccctgttttctccgtccttcacggagaccaacgtcttaggacataacccagagatataggggtacgtttcttggagtataaaagataggttctgtatcttattgtaagatatgactcatacgagggctgtatatatgaagctgcttgttgggcttagaaaccaagataacacggatgggtaatgtctgaaacaattgtgggcggcggtctagaggatcc

SEQ ID NO: 266757 - DNA, 744 bp, Zea mays
tccggaattcccgggtcgcccgacgcgtccggcatagatctcgtgctcgccactattattctgcacagcaacgcatcagccttctggaaccatctcgccgccgccacaccacaacccgtcgaagcgaagcaagcaatggccggagtcggatcgaaggccctcgccgttgccgccgttctggcggccgtctccctctcggtggccgccgcggccgaggcgccggcgcccagccccgtctccgccgccgtcgcggcgtcgtcgcccttcgccgcggccctcgtcgcctccgccgccgccttcctcttcgccgccgtccgccactgagccgatggggcctcgtgcctgcaggctacctagcagtacttcccccgctgccgccgccgccgcctagatctatttattggagtgctatccagtagtactagtagtagtgagatttgttcggtgctgtcgtgtcgtcgtcgcattttggtcggatctggtttccttggtgcagggagggtttctataccatgtcgcggtgtcggttgtgtgatctcatcccccccttgtagatagtactctgctatctcgtcgtgatcgtgagtggtgattctgtctggttgatatttgctactgatattggtcccatttgagatatgcgttgctgctaatctcgtctttctcaaaaaaaaaaaataagaaagaaaaaaaaaaatataagagcatactgaaaaaaaagatgaaaagatctaaaactgcttt

SEQ ID NO: 266758 - DNA, 444 bp, Zea mays
  unsure (1)..(444): unsure at all n locations
tcgtgctcgccactatgattctttttttgcaancgtatcttctcttctgtaaccatctcgccgccgccacaccacaatccacaacccgtcgaagcgaagcaagcaatggccggagtcggatcgaaggccctcgccggtgccgccgttctggcggccgtctccttctcggtggccgccgcggcctgaggcgcccgcgcccagccccgtctccgccgccgcctagatctatttattggagtgctatccatgtagttctagttgtagtgagatttgttcggtgctgtcgtgtcgtcgtcgcatttttggtcggatctggcttccttggtgcagggagggtttctataccatgtcgcggtgtcggttgtgtgatctcatcccccccttgtagatagtactctgctatctcgtcgtgatcgtgagtggtgattctgtctggttgatatt

SEQ ID NO: 266759 - DNA, 1253 bp, Zea mays
accagttaccactcaccagtcaccagtctccactctggagtctggaactcccctcatcctccacatctccaccgcatcggaactaggaaggcgaagccgaaggcgcggcgcggcgcggcacggatcgagcgatggcggtggcccctcctacggcggcggcgctggagcagctaagcagcagcaagatgttcgacggcttcaatctccgcttccgccaccagagcgccacccttggctgcgccatgactttctccatctacctgcccccgtccccggcgtccaaccttcccgtgctgtactggctctcgggtctcacctgcaccgacgagaatttcatcataaagtccggcgcccagcgcgccgccgctgcccacggcatcgccctcgtggcacctgacacctccccacgtgggttaaatattgaaggagagtcagacagctatgattttggtgtgggtgccgggttttatttgaatgccacaaatgaaaagtggaaaaactggcgcatgtatgactacattgtgaaggaacttccaaaagttttaagtgataactttgaacaactcaacacgtcacaggcatcaatttttgggcactcaatgggagggcatggcgcgctgacaatttacttgaaaaacactgataaatacaagtcggtgtcagcatttgctccaattgccaatccgataaactgcccttggggtcagaaagcattctcaaattacctgggctcaactaaatcagattgggaggaatatgacgcaacctgcctgattaaaaagaacagcaaagttcccactactatcctaattgaccagggggaggccgacaagttcctggctgagcagcagttgctacctcacaagttcgaggaggcgtgcaaggccgcaggggctgctctgaccttgcgcatgcagcctggatatgaccactcgtactatttcatcgctacgttcgtggacgatcacattgcgcaccatgctcagtttctcaagagcgcctgactgtaaatgtgtagcgtgaggaagacaaggaggcagcctagcatgggtgttttatctatgccgacagtgttgtctcgtgtggcagcttgaggaaaggtgaacagcacaccccacatgcgaaataagatggaagatttgctgttcctgtccattgacattgacgagctcgaatgggactgatgttgccccgaatgtagtttccctgtcattcgctatgcgcaattatgttataacggccctggtgcaagg

SEQ ID NO: 266760 - DNA, 701 bp, Zea mays
accttgcttataacagcttgaagggtcttatccttagcaaggctttgatggctcagaaagatgccgaagatgaaagcactcggatagccttcgaaaacctacgctcggaagttatatcacttcggaatgaggcccttgagaaggacaaaatcttgctttctttagttgagaggttaaagtctagcgacgctagattggctagtctttctgaagtggaacaaaaaatggagaaatttgaaaagaagatccgagcagatgcgaagcgtattgctgatttagaatatgctctatctattcaagcgagattgcaaagattcgaagtagaaggactggagaagaagcttgatgaaatcactgaaaacttcaatgtcgaacagacagaacgtgagatatctgattccaaacgattgagagttccaaggaatggttaaaagcttcgtcaggcgaaggaggaatgctacaaggttgccatgcaatgttgcaacaaactgaagagtacttttgctaaggttggcgcattctctactaaacgagactttactccgtggttattctgacgggagttatcagattgattgaaggcgaggccgaagcttttgatgaaatccttagtgatagggggattcttgtgtgcctgcatcgacgcccgaggagctatctctctggtcgcaaaagctggctatgagcatgtgaaggctgta

SEQ ID NO: 266761 - DNA, 785 bp, Zea mays
ggttttcagaatggcgcggaaaacatggtgactggaggatcaaaagtgagaaggatagctagatgctcttcagatgttggccagagccacttgtacaacacaaaaatagcagacttgatcagaagaaacaccacgctcgaagaccagcttgcgaccgcactggcaagcaaagatcagctagacaagagcttagcatcggtcattcacagcagaggacagctggagaagatgcttgccaacaaagataaggaggctgagatgctgaaagagaagatagcatgcttagagctggcgcaagaagagtcgaacagcctctcgaacacagtgcacgctgataatgtgcgcctggagcgtgaagtggcgttcctgaaggccgtcacaggcgaaacccagaaggagctgcattccactcgtagagttttagcaggggaacagtcgcgcgcgttccagctccaggttgaagtgttccatctcaagcagaggctgcagatactggagggaagatcaggaacacccaacaaacaaccgctataggctatagtggtcacatttctacatttctgcacatcgatcgttgcaagtttgcaaccccccccccccccaatgtaaatgattgtgtggcgagctttatggtaccatgttagtacatgcgctgatgttgatctgtaattttgcagggtatggtaaaactattaatagctgacggattgaaccatgctaatatgtggagatattgatctgtaatttgcagggacatggtaaaaaaataaaaatgtgccagctct

SEQ ID NO: 266762 - DNA, 593 bp, Zea mays
gccttgagaagaaaacatccaaggtcaccctgtttgcattgccgctctgcttcctgtggcttgtcattgcatttcacttgggccggctgcagactaatcttgccagggttcaggctgcttctgctccgtcctactcctgaacaggaagctgctgcgagtgtctttggagatgtgcttccagaatgtttgaacaggcatggcgagaagtggttgtcatcaatagttagttacttagtttacacgtcttgcaggaatttcaggttttattgatggagaaaccttcagaatacagtagcagccattactacactacagaagagtttagcatacacaaggggggagaaatagtacaccatagacatagactagcacactatatacaaattcaatatcccatttcgatgtgcactgcaggaaactgtagcatgcaatctgtgagtttattataaatgatgtagtagtagggccggatttgttgggcactgctctgcctttggaactactgctgtcctgacagacactgcatcattctgcatttcacctaccccagttcccagactaaatggctgtaaagacatttttatgaatctgaa

SEQ ID NO: 266763 - DNA, 898 bp, Zea mays
gttttagttatattttcctcttttttagagtattagatgcagcgctaaaaggaacagagtccatagtgagcattttgtagtcctatgaaacccaaaacagcaaagcttgttgagacaatgcaaacatgaatgagcaggggtaggcacatttgacattgctaggtagacctgctggcgttcttctgtgagttctattgtagataaattatgttgtgcatcttaatggcacttccatagtattttctatgttcactttcatatgtaaggtttcttctaactatagtatttccttctatcgggtatactgcaacattccagaggcttgagtctaggccatacaacccagctcaaggggttgctccactgggatccactaatccaagtgtcaacataaatgacaattcactcaatcttgtttctagaccacctccatatgataccgatcctagatatgcccgtgttcaaagagagggattagtctccaggcgtgagaaatccataaatcttgcacaagaagagtcactggcccttagacgaaatgccagcagctctggtattgaacatttagctgctcagaagaaacgcaacagcactgaaaatgagggtgaatataaggtccatcgttctgaatcaactaagagtttgtctgcaaaagcttatagtagcagctatgctgttgtcgcttcagaagatgaggatgtctgccctacttgcctggaagaatacacgccagacaatccaaaaataataaccaagtgctgtcaccattttcatcttggttgtatttatgaatggatggagagaagtgatacatgcccaatttgtggtaaggaaatggagttttgcgagagcccatgatagcctttcggtttacatgatctcacatgaagtctgagct

SEQ ID NO: 266764 - DNA, 249 bp, Zea mays
gaatatgtctatccaaacaaccctatctataggcaatgcgtatccttgaggcatctattccacagcatttttggcgggtatactgcaacattccagaggcttgagtctaggccaaacaacccagctcaaggggttgctccactgggatccactaatccaagtgtcaacataaatgacaattcactcaatcttgtttctagaccacctccatatgataccgatcctagatatgcccgtgttcaaagagag

SEQ ID NO: 266765 - DNA, 513 bp, Zea mays
cttgtccgcccggcctcttccgtctcggagcgagaaatcagcggcatcgccgcgcgcatccgaagcgcacacgacaatgcagggcggatccagcggcatcgtctatggtggcctcaagtaccaggcacggtgtatcgccgacgtgcgcgcggacgccagctcgaccaccttcctcgccgggaccctcagcctcaaggaggagaacgaggtgcacctgatccggctttcgccggcggagagtgagctggtgtgcgatggagtcttctaccaccccaacgagatctgggatctcaaatcatgtcccttcgatcacagggtcttctccacagtctacacatctggtgagggctttggtgcgtcagtttggaagatcccagagcttaatgggcaatcaaactcaccgcagcttgagcagctctttgagcttagtgggcatacgggcaagattagacgtgtgatctggtggccacttgggagagcatgataaactaattagcattgatgaccgaaata

SEQ ID NO: 266766 - DNA, 363 bp, Zea mays
gcggtctcttccgtctcggaggtgggagagagcgtatcagcggcgtcgccgggtggagccaaagcgcgcgactcgagaaaatgcagggcggatccagcggcatcgtgtatggtggcctcaagtaccaggcgcggtgtatcgccgacatacgcgcggacgccggctcgaccaccttcctcgccggcaccctcagcctcaaggacgagaacgaggtgcacctgatccggttgtcgccggcggagagcgagctggtctgccacggcctctgtctaccaccccaacgagattggggacctcaaatcatgccccttcgatcacagggtcttctccacagtctacacgtctggtgagggctatggtgca

SEQ ID NO: 266767 - DNA, 807 bp, Zea mays
cccacgcgtccgccgcagctaggtaactgcccccctacgttccagttgggctggggtccggcttattcgaagatggttggcatgctccaatctgtgtgcgtgtggtgcaatagcccattcccgctggccgcccccgccgctgagcagcaggcagattcacttggttacatttgcccgtcgtgcaagggaaagttttctggtcatcttggcatcaacggtccatctatttgaaatcagtttcttgtaacctgaactggtgctgctgccccaccatcaatttatagtctagttgatatgaatcgttttgtacttgtagtatgtatcctttaactcgtggctagtggtggaaacaggtttattcgaatcttacatttttggttattaaaactcaaccatcaagcagttgttgcgaacaaggaagctaagttgttggatacatacaagactgtgctctcaagagacactggtgggtactctgctgaagaaaagaccaattggcctgaagactaaattgtccatcttcaattgcaccaagagaaaggatctccatggcactggtggctggtgcatgtttgaggcttggatgatggcagaagtgtcatgtttttttatgttgaaccttgtttctaaatagtaagtctagacaattgttctgtttgaaatctgaatgaattgtggctggttgttggtggactggattacaggcaaaagtgtcatgttttttctatctttaaccttgtgtataatatagtaaaggacggatgattgctccatttgaaatatggagtcaccgttgctagttgcctg

SEQ ID NO: 266768 - DNA, 444 bp, Zea mays
taataaaagctcttctagctgaaaacgacacatttgctctacatgctgacaatatgacggggcaggagcattctggtggatggtgcaactgttgagttcgactattcccctcattggagaaatgaaactgatcaaccgaattggtcttcagtatcatgtttgaagactgctgctgatgctgcatgttcaatgtatactttgtctctaaatcgagaagctacaccaaatcttattgtgtcatctgagagatcagtcaagtcaatgactgaacagcagttagatgaaaacagtgaaaagcatgaagaaaatagtggaaggcttgaagaacatggtggaaatcctgttcaaacttcctatgatcaaattgttaatggctgcagtggaagagggaatagaaaattctgcagtggaagaaggaaaggaaaaggaaaatgataaggaaaa

SEQ ID NO: 266769 - DNA, 1054 bp, Zea mays
ccttcagacctgacctctcaaatcaaaccgggaccgggtggcctcttgccctcttccgttccgtctcattctcatccccgacccccgcaccgcagcgtaaaccctagtccccggcggcgaccttgcggcctccgctgcgctctgactggtgcgcgtttagacgaggagctgcggcggccaagaccaatcgaccatggctacccgtatccagtttgagaacaactgtgaaattggtgttttctccaagctgacaaatgcttactgtctggtagcgattggagggtcagagaacttctacagtgcctttgaggctgagcttgcagatgccatccctgtggtcaagacctctattggtggcactagaataataggccgactttgtgttggttaatatctgaaatttggttttgctatttggcttattctctacttgttttcaccttccttttcactttgtttgcccaggaaacaagaatggacttctattgccacatactacaaccgaccaagagcttcagcatctgaggaattgcttgcctgatcaagtggtggttcagcgcattgatgagaggttatctgcccttggcaattgcatagcctgcaatgaccatgttgcacttacgcaccctgaccttgacaaggagactgaggagttcattgcagatgtgcttggggtcgaggtgtttaggcagactattgctggaaatatccttgtggggagttactgcgccttctctaacaggggtggtttggttcatccccatacatccgttgaagaccttgacgagctctccacgctcctccaagttcctcttgtcgcaggaactgtgaacagaggaagcgaggtcattgctgcaggcatgacagtgaacgactggactgccttttgtggctcggacacgacagccaccgagctctcagtcatcgaaagcgtcttcaagctgagagaaaggcagcccactgcgattgtggaggacatgaggaagtctctgtagcagtacggactggggcacagatatggcaattgcttgcaagtgtaaaacaagcgatacag

SEQ ID NO: 266770 - DNA, 735 bp, Zea mays
cggtccagattacgggtcaccaccgtcgaggggagtcagccattgatgaaagtatctgccctggcaattgcatagcctgcaatgaccatgttgcacttacgcaccctgaccttgacaaggagactgaggagttcattgcagatgtgcttggggtcgaggtgtttacgcagactattgctggaaatatccttgtggggagttactgcgccttctctaacaggggtgggctggttcatccccatacatccgttgaagaccttgacgagctctccacgctcctccaagttcctcttgtcgcaggaactgtgaacagaggaagcgaggtcattgctgcaggcatgacagtgaacgactggactgccttttgtggctcggacacgacagccaccgagctctcagtcatcgaaagcgtcttcaagctgagagaagggcagcccactgcgattgtggaggacatgaggaagtctctgatagacagttacgtgtaactggggggccagcagatgtgggtcagagtttgcctttgctaaaagatgtattgcaagctatagtcgaattatcagtagcacaacataaccctctgatatgttcgtggtttatccgtggtttctgaattgtagacttctgcgttgaagctcgtgctactgtttgttttccattgtttgttcacaccaacagctatatgcagatacatggcttctcagtgttacgccggcagatgaataagcttgggga

SEQ ID NO: 266771 - DNA, 514 bp, Zea mays
ttgtatccgtctcattctcatccccgacccccgcaccgcagcgtaaaccctagtccccggcggcgaccttgcggcctccgctgcgctctgactggtgcgcgcttagacgaggagctgcggcggccaagaccaatcgaccatggctacccgtatccagtttgagaacaactgtgaaattggtgttttctccaagctgacaaatgcttactgtctggtagcgattggagggtcagagaacttctacagtgcctttgaggctgagcttgcagatgccatccctgtggtcaagacctctattggtggcactagaataataggccgactttgtgttggaaacaagaatggacttctattgccacatactacaaccgaccaagagcttcagcatctgaggaattgcttgcctgatcaagtggtggttcagcgcattgatgagaggttatctgcccttggcaattgcatagcctgcaatgaccatgttgcacttacgcaccctgaccttgacaaggagact

SEQ ID NO: 266772 - DNA, 1286 bp, Zea mays
gttgcctgcccaagtgcccagcctcgcttctccagtcaattctcagcctcgtcctccgcctccgctcccgctctctcctctccttggcctccgcttccgctcctgcctggaggctgcatcaaaccctaccgctccggacctcccggctggccgcgagatgcgacgcctgtccggcccctaatccttctcctcgatactgcccctcgcccgcccgcccgccggcatgggccgctacgggcccttccctgccgccgccggtgatggacgggggctgcctgcccctgccgattgtagcggctgaaggcgcgctggctgtcctggacggcgccattgcgaccgcggccttcgtgcagttagcaaggattcataggcacaaccagctacaaggatggactcggcaaaagatattccattttatgattggtctatcaaacatagtattcctagtatatttcgtgtctaccatcattgctacttgtcagagatggatttgctgggtacatggatgtggatttgttctcatggctagtccacagatattgcttcttgcttctttcctcttgctactgtcattctgggttgacctgtgtcatcagacaaatgatgaagacgaagaagatggaaggagtcagagtcaccatgaagctttactagacagaacaaaagcgaaacctggcattcatcctgttaatatccgtcagaggtgttgcccaggaatacagcttggaagccggcaaaaatttgtgattttggtgcttctactgtcatttgttgttatgcttgcctttgccatcctcatatgggttggtagaggagacaatcctatcgattcttctctactgaaaagggtttatttggatgtattttcagtagtagttattgtacttggtggtgctctggcatgttacggtgcagtgttattctcgaagatgagcaaagttcgttctgaaactgtatcaactgagaagtggaaggttgccagtttagctgctgtctcgctgatctgtttctcgtcttctgctatacttgcacttgtgactaatgttccagtgcttttgtattggtactcaacagatgtggacatcatcaacaatgctgttattttgtttatatattacttattagctcgtcagtgccatcaggatttgttctatggatcatgagagagatgcctcatccgcaggtagttgaaagatccgtagaatcgaggggtggtactatgttcagggaaagaccatcaactacgcaggatcacaagtggcagacagctgtcacatcctcaaaca

SEQ ID NO: 266773 - DNA, 473 bp, Zea mays
gaattcccgggtcgacccacgcgtttgcgcagtttcacagacagcttccacagtcaccagagcactagagcagagcaacaaccgacaagagcagagtgagatcgtcgtcagcgagcccagcagatacgagagagaggatggcggacatcgcgttgctggtggcggagcagttcgagaagacggcaaggcgaggcgcccccggcggggacagcggtagcgacagcgggaccggcggcgagacgaggaacttcggggccgtggccaaggtgtggagctcttgggtggagtccgcctccgccgccgcgtccggggtcagattcaccgtcgcggtgcagctggagcccaagaccgggctcgcgctggccgccgccgacggcctcttctccgcctagcgtcctgcttccatgtcttcctcctgagcagtgccagtgatcgagcgagtcctgctcctgcaccccgtactatgtttgtgc

SEQ ID NO: 266774 - DNA, 832 bp, Zea mays
cctgatgttagtgctgttcgagttctacggggaggagccgctgtgttcgccggacctgtcgcgcgtcgtcaactccaaccacttcaacaggctcatggcgctcatggacgactactcggtctccggcaatgtcgcgttcggcggccagatcgacgagcggcggctaaggatcgccccgacgctgctgctggacgtcccgctcgactccgcgatgatgaaggaggagatcttcgggccgctgcttcccataatcacgtaggtggacaagatcggcgagagcttcgctgtgatcaactccatgcccaagccgctggcagcttacctcttcagcaacgacgggcagctcaagcagcagttcgagaggaccgtctcggcgggagggatcatgttcaacgacaccggcatccacctgaccaacccgaacctgccgttcggaggagtcggggagagcggcatgggcgcctaccacggcgccttcagcttcgacgccttctcccacaggaaggccgtcctggaccgcagcttcctcggcgaggccagggccaggtacccgccgtacacgccggcgaagctcgccatcctcaggggcgtgctcaatggcagcccgcttgccacggttcaggcggctgcggggtgtacaggaggggcatcagctgactgactgactgaccccccttcataattattattaataataagcataaatattcaccgcatacacattgctgtgcttttattaaggttgttgtgagggcgaaaaatgtattgaccctttgcgtgtgcgcgtgcgtgtatagcaactattaataaaagaaaaaagtgatgttcattt

SEQ ID NO: 266775 - DNA, 879 bp, Zea mays
cccacgcgtccgcccacgcgtccgaaccttcctcctggtggcccaggttatgttgggaacccacactacatgcctccacggccacaagagaactattatcctcctcccgatgtgccccctgtagaaaagcagccacactatggaatttcttcatatggacgagatgcacctccaagtgctcccccagggaatcaaaaccaagcacatgggtcatctcaggtgacacacagcatgcaagttcctctttcctatgctgatgctgtgataggggcagctggtgccagtatcagctacatccgcaggcatagtggagcaactataagtattcaagaaggtgctcctggcgagatgacagtggagattacaggaagtgcttcacaagtacagactgctcaacagctaatcaagaatttcatggctgaagcttctccccagggaccaccagccccaggtccacacggtcaaccagtggacacgggttacggctcgtacccaccttacggtggagcatcctatgggtctcctccaggtgctccagctccagcgcctcacaacggtggaagttatggtgctgcaccatactcgtcgagctatggatactaatccggagcaagagcttgcctcagacttagggaaggagggttatcgttatggttttgtttgctagtctattcatctgttgagaactcaagattgttattgttaggacgtgtgaactttggtgttctaggctgctttcagacgccagtgtcgatatactctctttgctttattgttgcggaatttatcgtaatatgttattttaatgttcaagaaaatcccccccaaaaaactttaaaaaaacacaaaaaaaaaaaaaaaaaaaaaagaaaatattaa

SEQ ID NO: 266776 - DNA, 1893 bp, Zea mays
ttttattactcgtgtattgaaactatgggtttgaaatgttctaatgtccagacattccataaccataataatattgaactcatgcatttatactagtgacaaaatgaatcttgcaatgcattttagcggtggaatttgtctacatcggttaaatttttagaaataaccattgaaattgcttgctgttgcaccaaggtgctgtgaaccattccttttttttgttttatgcatacattttttggtttacaaaagaaacatccccctctcatcatctgcatacattattagtcactattggcaccagaaagtcgtgaagggtgtctttttttttatgactgcagcttatagttaactaaattgacattgctgggaaggatgtgattgagggagttggaggctctactgcagtaatttgcattgccttgtcatgcactagatattaatcagttctttaagtgacatgcagccccacccccaccaaatgatatgacagtgagacaagtcgctgacaaactggcaagctttgttgccaaaaacgggagacagtttgagaatatcacacggcagaggaatcctggagatacaccattcaagtttctatttgacaaacactgtccagactacaaatattatgagtttcagcttgctgaagaggaaagggctcttgctcagtcaaaggaggctgaagcatcgaaagctaactctggcactgcaagcttcaaggcaccaggtggtacttatagaagctcatttgaacagaagtctaactatcagacacctgcatcagctttgtacggggcatatgagggtagttcttcccaaggaagctcttctagttacggtgatcatacagctccaccatcagatcctgtagcattgatggaattctatgcaaagaaggctgcactggaagaacggaagaggccaccaaggcagtcgaaagatgaaatgccgccacctccttctcttcaaggtcctcctaagaagggacaccacatgggtgatttcattcctcaagaagaacttgaaaagtttatggcacggtgtaatgatgctgcagcacaaaaggctaccaaagaagccgctgagaaggctaagattcaggcggacaatattgggcacaaacttttatctaagatgggttggagggaaggcgagggtcttgggagcgagagaagaggccgtgcagatcccgttatggctggagatgtgaagaaggatcatcttggtgttggggctgtccagcctggtgaggtcacatctgaagatgacatctatgagcaatacaagaagcggatgatgcttggataccgctataggccaaaccctctgaacaatccaaggaaatcatactactgatgtgggggagttcgtctgaggggagataaatgtcaagaagttcgttattcagcatatttcttggaatgccacagatgcaaggcttccgggggttctacaaagctttgttcttttgtgtagtgtgtttatctttgtggatttaaatgtctgttcaaacgtgtatcatgtttcagacaggtgtattgctttcttggatcaccctttttctgatctcatttcagttacaagttggaaccataaggtacaaaatttgtgttgggaggggttatattttagaatggagtgtgaataactatagctagcataaggctatctccagcagattagccatcctcacatctaacagtacagtctatagtgcaaaatattgtaaaacagtgttttagttgaccatacggtgaattgttggacacggtctaagtggtgtttggtagaggttcgggtgactctagatcctgtgtgcatcttaacgatgagatgtttttctttatccaaatgaattagaaactggtgaaaattcccttttttgtttcc

SEQ ID NO: 266777 - DNA, 739 bp, Zea mays
ttccacgcgtccgcccacgcgtccgcacctgacaggctcacacgatactttccccctccactagggttccccgtccgttccccctcggccgcatcagctgtttgaggcggcaaccaagggccgcggaagcatctgcgtcgagccatggataaggggatcttcaccaacgatggctccttcatggagaggttcaagcagatgcagcaggaggcgcaggagaagaaggccgctgctgcctccgcctcatcggctcccaagcatgcgaaccccaagcaggggtttgctgttgcggcaaacaagaggccattcgagctgaagaacgctgctccggtagcctcagctggtaagctggcctttagtctcaagaaggccaaggtcgccgttgcacctgtgtttgcagccgacgaggaggatgaggatgccgtggatgttgagagggaggagcccgccaaacgccagaagtctgtgcaagctgatgctcctgcggcagctgccccgtccggtgctgttgccccacccccaccaaatgatatgacagtgagacaagtcgctgacaaactggcaagctttgttgccaaaaacgggagacagtttgagaatatcacacggcagaggaatcctggagatacaccattcaagtttctatttgacaaacactgtccagactacaaatattatgagtttcagcttgctgaagaggaaagggctcttgctcagtcaaaggaggctgaagcatcga

SEQ ID NO: 266778 - DNA, 458 bp, Zea mays
ttctttccccctccactagggttccccgtccgttccccctcggccgcatcaggtaaattactggtctatccgccccgcattcgatctgatcccgtgattcaagcccttgcgcatcgatccgggactcctccacctgcagatctccgcggcggagtttcgtaccgtctttgtctttgcaacattcgagttgattattttggaggagtcgctctctagggttgattgagcgctgttgtttttttgtgcgacgacggtggtgtgttgattggatgttgaaagaattgtagctgtttgacgcggcaaccaagggccgcggaagcatctgcgtcgagccatggataaggggatcttcaccaacgatggctccttcatggagaggttcaagcagatgcagcaggaggcgcaggagaagaaagccgctgctgcctctgcctcatcggcttccagcatgcgaaccc

SEQ ID NO: 266779 - DNA, 798 bp, Zea mays
tccagcctggtgaggtcacatctgaagatgacatctatgagcaatacaagaagcggatgatgcttggataccgctataggccaaaccctctgaacaatccaaggaaatcatactactgatgtgggggagttcgtctgaggggagatgtaaggcgctgctttgctgcaattttgctcacagaactaatggttaggggatatcactaacagcattgaaagtttttgttcatcaacagaaatgtcaagaagttcgttattcagcatatttcttggaatgccacagatgcaaggcttccgggggttctacaaagctttgttctttgtgtagtgtgtttatctttgtgggtttaaatgtctgttcaaacgtgtatcatgtttcagactgttgtattgctttcttggatcacccttttttctgatctcatttcagttacaagttggaaccataaggtacaaaatttgtgttgggaggggttatattttagaatggagtgtgaataactatagctagcataaggctatctccagcagattagccatcctcacatctaacagtacagtctatagtgcaaaatattgtaaaacagtgttttagttgaccatacggtgaattgttggaaaaaaaaaaaaaaaaaaaaaaaaaaaaaaaaaaaaaaaaaaaaaaaggtcaacaatcttgggggtcccggtttggcgactcctaccttccgacggctgcgatgccacaatgtgttctcttagattgaattagcggcctgaattataaggcgctggggctgggaaaacccggggggtaacc

SEQ ID NO: 266780 - DNA, 552 bp, Zea mays
aaaataatgagagcaacacttattctacctgttctgaagcaggaccaaatttggaaagacgcagtcggaattcgaagacatctttgatgttgatcattttataaattatttgaaggatgatgtacggattgtccgagatatccctgactggttcacagagaaggatgagctgtttactagtataaagcgtactgtgaagaacatcccaaagtatgcttcagcacagttttatattgataatgtacttccaaggatcaaagagaaaaggataatgtctatcaagccatttgtggacagattggggtatgataatgtaccaacagagattaaccggctgagatgcagagttaactatcatgcattaaagttcctacctgatattgaggaaatggctgttaagcttgctgcaagaatgaggaacaaaactggcagcataaatccatacatggctcttcacctgagatttgaaaaagggatggtggggctttctttctgtgattttgccggcacacgggaggagaaggcaatgatggcggcttataggcagaaaga

SEQ ID NO: 266781 - DNA, 746 bp, Zea mays
aggaagactagcatccgagcttttgtgttggaaatcatcctttcacttcgatttttgatctaccagtatggcattgtctaccatctgaacatagcagatcaccacaaaagcattatgtgctgaagatggtttcaatagggcggcagaaatttggaacagacctacagcttatgttccgcattctcaagggccttctcttccttggttttgtctcggtgatggcagtcctatttgtcgtcttacaccttactatttctgatgtcttcgctagtatccttggatacttgcctactggatggtgtcttcttctgattggacaagcatgctcaccattgattaggaggaccctgctgtgggactccatcatggagctcggaaggtcatacgagaatataatgggtctcgtcctcttcctgccaattggtttcctgtcgtggttccccttcgtctctgaattccagacacggctgctgtttaaccaggcatttagccggggcctccagatctcaaggatccttgctggtcaaaaggatgttagcgagttcgagttcaagtgaccaattttatccctcttgcaagcaaaccaaactcactttcatgtatttgttgacgatgatcgattttgggtgtctgtactctagtatattttcatcacgtttactactataatactgtctgtacttgagaatgttttgcctctgtaaactgacatgtagaatttctgtaatatatttatggaatttgat

SEQ ID NO: 266782 - DNA, 1107 bp, Zea mays
cggacgcgtgggcactgctcttgatgtggagctggcaagttcaggaatttttaatgcactatcagatgggtataagggataaacatgataaactcaggcgattctgtatggcaacactaggagagttattattctatatttctacccagtctgatcaagataccaaggaaataaatacccaagaataccctttgaaggataacaggtctgcaacatcttggcaggttcctagtgctgtaattgcactggtgtcatctatcttgcgaaagggtgaagatgatctagctcagctatatgccttacggacagtcgataatatatgtagccaaggaactgaatggacatcccgttttgcatctcaggatgcgattggacatctgtgctacatctataaagcaactggaaagcaggagagtacgaggctcattgcaggatcttgtttggcccgcctctctcgcttcagtccatcatgcattcatttaatcttggaaaagatatcattcaaggatatagcatgcacacttatcaagggaaatacacgtgaacagcagattagtcttaatattctcaattcggcattagttaatagtcacactgtgacaagcatgaaccggcatattctttcattatcagatgacaaacaattggtccccgggctcatttctctaatagaacagggaactgatgttctacgtgggaagacccttttgtttgttgctctgctttgcaagaatagtcgaaggtggcttcctcatttcttttgcaatgcaaaattaatctcagctgttgatagactgggaaaagagaaggagggttttattcatcaatgtacagaagcatttgtgcagttggttgcttccttggtccctggtattcttgacactgtctccagtgatatacagcaggttatgggtggcaaacgccatggacctgttactgctttagctgggcgagctcatccaaagagcacaattcatctgttccctgtcattcttcatcttctgggaagtgcatctttcaagcacagagttgtgacaggccatgtattgcttcagttggcaaatcttattaagattttggaggcaccgtttcaggctagggatgatt

SEQ ID NO: 266783 - DNA, 983 bp, Zea mays
gtgtgatgactcagggactgaggaggagcaggctgccttcatgaaggagctggagcgtttccacagggagaaaatgttggagttcaagccccctaagttttatggtgaaggattgaattgcctcaaattgtggagacaagttactggattgggtggctatgatcaggtgacatcatgcaagctgtggcgtcaagttggagagtcattcaaacctccagagacatgcacaactgtttcatggactttccgtaacttctatgagaaggcactccttgaatacgagaaacacaaaatcgaaacaggagagttccaagtagcttcatctgctctaccagaccgggttggttctgagagccaggtgggtggaagccatgtatctggttctggaagagccagaagagaatctgcaactcgtgcaatgcaaggctggcattctcagcgcctactagggaatggtgaaatcgctgaccctataattaaggataaagggcatattgtcttaaagaaggataaaactcctaaaagcagtggttctgccaagaggaaaaggacaccatccctggaagatgacagggtgataccttataaatccgataagctacaaaatgactcaatggttattgacatgggccctcctgctgattgggtgaaaataaatgttaggaaaaccgtgagtatatgtatatcacctttatctgttgttaaatcttatagctctatgctgtttcttatttgtttgttgtttcctcatagttctcagttccgttaattcctgaagcaaaatttggagtgttgaatgccagtgaatgtgtgaactgctgattctttatgaaatgtatatatctcaggtcctgtggttattatggaattttcataaagaatataggctaacggctaaccaggaattagtgaaactacaatgacttgagggcattttgtgaaagagggtatgttttagttaattattttatttcattctattt

SEQ ID NO: 266784 - DNA, 1176 bp, Zea mays
tcgtgtttctggtctgagcccttcaactgaatacttcttcaaggttttgccttttagcagcgtacaggggtttactgagtgggaggcaaaatgcagtacacgcagcctggaccatggcagcagccagtgctcaactcagaactctgagagcatgtgcctcaaagtcgatccaatgcagcatcacaaaaaggatttgaatgtgcagaatcaccagagaaccattcaatatgattcacctaaggggtctacaaattcaagtgagaacaatttattgtgtgaccggtattccaagcgggctaaggttgcaaggcttgatggtgcaagtgacaatgatgaaagccagttgccgccaacttctgaagttttaccatttgcaagctccaactcttctccttccgaagctccaagtaaacctgacttgcttattggcaccccagattcggcctccaagaactatgtggagcagcagtacgagtactgcgtgagggtggtcaggtggctggagcatgaagggcacatggacaatgacttccgtgtaaagttcctcacttggttcagcctgaaggcaacagcgcaggacaggcgaatcgtgggcgccttagtagatgttcttatcggtgatcctgcaagcttggttgcccaactggttgatgcattcaaggatatcgtctacaccaaggagaagccctttcaaacacaacagaaggatgcacgctgcaagatttggcactagaaaccttcataactgctctgtgtcgctgtgtgacatcatttttctggtaattttctggcgactgaatgatgaactactgaagttatatcacctagcagattgcgtgcggattctgttgagatggatattgtgcactctcttaaaggttataagatgctgtagatgcttcatttggcattcaggtccatcagatctctcatttgttcattcaaattcagtcggtaggcagactattaatccatgaagacaatcatggtggaaccatgtgctggtaatcatgaatcggttctgagtttaggtttcgactagtaagtagttgaagcttgttagcagacaagcaactgtattcatatgtggaatgctatggtggatctgcaagcgaactatcccgaattcatatcatgacaacacagatgtttattattattaaaaaaaaaattaaa

SEQ ID NO: 266785 - DNA, 642 bp, Zea mays
aacacacatacgaaaaactaaaaaacaactttaaaagttatcacctatacacaaactatactgctaattgcaagtgaagaatggtgccacagagccagagcagctccctgcagcgccttcaacacgtcgagaagcggatagtgcgggtgctggagcttgcgggagcggtgatggaggagctgcgatactcccagggccctcgcaccgatgcagtcggcgcgcactgccgcgagttcatgatcgctatgaaggaaattcaaacgacgttgcgtgaggaaatcaaaagtgcttgtgaatatcgtccatttgaaaagtgtgattacagtgcaaggattgctaatgagatatgctgcaagaagctggagtatgtaattgagaagttggataccatgcaacagagccttgaacatatcactgatgatgtttagcgagctagcaacatattaggtactatactctttttgtgcaataaagtgtaatctacttagtgaataagaggatactttatgatgatagtatccactcaatcaggtgattttgtcaatactttgctgcagtggtagagttggtgaattagatattttcagtttcttggtacttgcaaaatgcacccattattatatactacatgaccttccattg

SEQ ID NO: 266786 - DNA, 903 bp, Zea mays
tttcacgcgtccgggcagcgtcgctccgccccggccgtcgtcgtcgcgcgtcgccgtccactcgcttcctgctcgggccttcgcccctcggccacgtctctgccctcgccccttggtcgggaccgacgtcctcgctccatctagcaagctgatcagctcgactgcttgagctcgtcctcgccatcgccgctttgatttcttcctttcagcccgacccggctcaaagcagccagatcacggcactccgtccgaccctcgaagcgatcaccttcaccgccgctccctctcgtcacaggtgaagatgattccgcagagccagagcagctccctgcagcgccttcaacacgtcgagaagcggatagtgtcgggtgctggagctcgcgggagcggtgatggaggagctgggaaactcccatggccctcgcaccgatgcagtcagcgcgcactgccgtgagttcatgatcgctatgaaggaaattcaaacgacgttgcgtgaggaaatcaaaagtgcttgtgaatatcgtccatttggaaagtgtgattacagtgccaggattggctggccgagctgcagaagctggaggaggcgatggggtcgccgcgcaagggcggcgtcaaggccatctgaccatggcctgcgatgaaccgcgcgcgatgcatgcatcatgtcctgctagtgctagctggatcagttgcgtgcttatttgattattgttatgatggcttggtagatccgaattattaactgactgcaagtagacagacatatatatgcgtgtgtgccttattttctttactattatatatatgatcgttcgtttgtgtgttcttaaaaaaatatatttattatttaatttatttatttattttttatttaattttattttatttttattttttttt

SEQ ID NO: 266787 - DNA, 425 bp, Zea mays
atagagcagccggcagcgtcgccgtcgcgccgctcccgcactgctcccctgccccggccgccgccgccgtcgtcgtccgcccgctcaccgctgatcgatgaccgcccgctctggcgctcggccttcgccccgtttctgccctcgcccctcagccgcctcggcgcctgtccgagaccgacgtcctctctccatccagtcagttgaccagctcgactgctctagctcgtgctctccgtcgcggatttgatttcttcctttcagcccaacccagcccaaagccgccagatcgcggcactccgtccaaccctcggcgccaccgatccccttctccgccccctctcctccttcgtcgtcggtgaagatgattccccagagccagagcagctccctgcagcgccttcaacacgtcgagaagcggatagtgc

SEQ ID NO: 266788 - DNA, 1159 bp, Zea mays
cccacgcgtccgcggacgcgtggcaccaagagctgctggcaccaccaaaccaatcgctggatttgtccagagtatttccggtttcaccgccctagatctgacccgagacgccgcgtcttcgctgagatggcgattactgtgaggcggtcgacgatggtgcgcccggcgcgggagacgccgcggcagcggctgtggaactccaacctcgacctcgtggtgccgcgcttccacacgcccagtgtctacttctaccgccgcgacggccccgtgccggcggcggaggggttcttcgacggcgagcgtatgcggcgcgcgctggcagaggcgctcgtgccgttctatccaatggcgggccgcctcgcgcgggacgaggacggtagggtcgagatcgactgcaatggcgagggagtgctcttcgtcgaggccgacgcgcccgatgcctctgtcgatgactacggtgactgggcgcccaccatggagctcaagcgccccgtcccctccgtcgattacaccgacgacatctcggccttcccgctactcgtgctcctggtgacttatttcaaatgtggaggcgtctcccttggtgttggcatgcaacaccatgcagcggatggcgtgtctggcttgcacttcattaactcatggtctgacctctgccgtggagctcaaatttctgtcatgcccttcattgaccgcacccttcttcgtgctcgtgatccaccaactccatcttttcaacatatcgagtaccagtctgccccagctatgttgtcctccacaacccagttccttgcttccaagtcaaagccacctgccactgctgtggacattttcaagctcactcgctcagaccttggccggctgcgctcacagcttcctgcaggggaaggtgcaccccggttcagcacatatgcagtgctagcggcacatgtctggaaatgtgtctcccttgcacgcagcctacctcctgaacaacccaccaagttgtattgcgccactgatggccgacaacggctacagcctccactaccagatgggtactttggcaatgtcatcttcaccgcgacaccacttgctgaggcgggcaaggtgaccagtgagctggcagaaggagcagcagtcatccaaggagcactggataggatggacaacgactact

SEQ ID NO: 266789 - DNA, 435 bp, Zea mays
  unsure (1)..(435): unsure at all n locations
cccacgcgtccgtgcacggcgccgccgcgcgaggacagcgcgccggcctacttctgggggcgcgccgcgcgcgccgaccgcaggttctaccgcctcttcttcgccgagcgccaccgggacctcgtcctgggagactacctcacccacgtccgccgcgaggggcgcgccgtcatggtcaagaaccgccagcgcaagctcttcaccaacatctccggcgacggctcctgggactcggacggtgtttggagccacgtggtgttcgagcaccccaagacgttcgcgacgctggccatggacccggccaagaagaaggaggtgatggacgacctggacgcgttccgcaacggcaaggactactacgcgcgcgtcggcaaggcgtggaagcgcggctacctnctgtacgggccgacggggacccggcagtccaccatgatc

SEQ ID NO: 266790 - DNA, 899 bp, Zea mays
tgccacgcgtccgcccacgcgtccgcatcgcagagccagatcaagggaagacgacgcagatctcgccacgcgaacacagttagatcgagggagtaagtgagagtgagagccatgacggagctgttcgacacggccgtgaccagcctcctccacctgccggaggtgctggaccgcctcgccgccgcagacggcgaccggcggtcggccggccaccacgcggcgcacggccacggccacggacgcgtccacgggctcggcggcggcggcggagcgccggtggacatcgtggagagcccccgcgagtacgccttcgtgctcgacgtacccggcctctccaagtccgacatccaggtgacgctggaggaggaccgggtgctggtgatgaagggcggcagcgggaagcggaagcgcgatgaggaggaggacatgaacggcgaagggtgccgatacatccggttggagcgcggcgcggcgccgcggtcgttcgtgcgcaagttccggctgccggaggacgcggacacgggcggcgttgcggcgcgctgcgagaacggtgtgctcaccgtcaccgtcaagaagctgccgccgccggagaagaaggccaagaccgtgcaggtcaccatcgcctagaagtcggcagtcggcagagtagcagcagtagaatcgtagcgcgtacgtagtggcatgtcgtgttgggtgaatgggtggagtgctcttttgtttacgtttgtgctgctgatgaactggtgggtgggtgtgaccgaccgtgcttcttttctgaacaagaattattcaatcgtgtcggtgaagctgtgcatttgtgcaaggagttcttgtggcctctcactggaatattattacaaggaagtgagtaacaaataaattacatgcccaggactccc

SEQ ID NO: 266791 - DNA, 546 bp, Zea mays
tacggtcgaattccggtcgaccacgcgtcgacacgcgtccgcgacgcgctctagttttccagctctgcagcacacaagctagttaagctcctgcaacctccaagaaactaggcaatcgtttcctcctctgcttcagtatctccccttccagcagtagctaagctgccatatggcgacaagcaggcttgcgctcgtgtccgtgtttgccgcagccgtcctgctgggcatggcgtcggcggcgacctacaacgtcggcgagccggccgggtcctgggacctgcgtaccaactacggcacctgggtctcctccaagaggttccacccgggtgaccagaccgtgttcaagtactcgccccaggcgcacgacgtggtggaggtgaacaaggcggactacgactcctgctcaatcgccagccccgtcgccacccacaactccggcaacgacgccatcgccctggcctcccccggcacccgctacttcatctgcggcttccctggccactgcgccgcgggcatgaagatccagatcaacgtcgtgcccagcgc

SEQ ID NO: 266792 - DNA, 704 bp, Zea mays
ttgacagatttggtgaatttcatctgcgtgagaatgactatgcatttagtcactcgaaagtttggcggaaatgctcaatcaataacaaaaaatcgttgggttcatcacacgtcgttcttgtgggattatgatgtaaaaaatatggattatctcaaaatcccaaagcgtgcacctgaatatcgactggcaagaagccacagatttcttgtgccgcatgaaggagtacataccttcgcggtcagttttcaccgatgaggtcactgcggccctgggagaacacttctcagttcagcccgtggatctacaagcagttctttccggtgatgaaggatccgtgccttctacaaagctgctgtcacaacaggacctagaaagaaattgtttcgtccaaagaatcccttaacaatatagaaagttgaagcgtgaccatgcttgtcgtttttgttgtgaaatatgagcagttttgtcgagctgtgaattcattcaaacattatggtcaacccagtacgtacatacgaatgcccaccaccatctttagtaacaaatggttatgttttggattgtaggtctaccgttccaagcttgggttacacgttatttgcctatgggctctagaccgagtgctaaaactatgagagactggctccaacatactctgtaaatggttatgtcctctaaattataaaaaaattccctgtctcctg

SEQ ID NO: 266793 - DNA, 1147 bp, Zea mays
gaaaatacatatttattggatgctggatttagtgttgtggcatcaggttctgctggcaatgaagttgtgaaagagtcctttatggacctgaaggtcgatgaactcattctgcgggttatgaaggataaatcaaaatctaatgtgcaaagtttgtatgatgccattcgtgttctgttgaaacctgatgacaaccgagtggtagcttctcaggtatatggatactcccggagatttgctgaaatcggggttgcagaagttcttgtcaatgcacttcgtgagcaagtcgctccttccagtttgccatctgcttgtgctgctttaaagtcgattgcagtcaatgatgaaatatgccgttccatatctgaaaatggtggaattgatgtgcttcttcaatgcatcgacggggctggtgagcagaagaacaaagctgtagcaagatcttgctgctctttgttgtccaagcttgctgcaagcgatgcaaacaagtccattatcattcagcgaggtggttttgataggttcctaaagttgacatccagattttctgaagatcctgctataattcaagaggttatgtctatggtgacggtcctcacactgaggtcaccagaaaatgcagcacgtgcaatggaagaaggctatgggacactggctatacagtcaatgcaaaggttcccctcctccgtgcagactcagaagcaagcatgccttatgattcgcaatcttgttgcccgaaaccctgagaataggatcgtcctgcttaatgatggtgcagaaaagcttattagaaaggcaatggcgctgcacagaagctgtaaagatgctgcttcgtctgccttgagggacctgggcctcgacaactacaatgcatagacaccagtgaccagtcacaccatagaaaatgtgcgtcgagttagtttggtagcggtagaatgttttggaggagaaatacattgtatgagttatcgaggtgccgcactgaaatgagtttgtagaattgcgctactgtggttgcatcaatggtttcagtttgttgggcaatcaaacttcagggctattaggttgtttccagcaaatcgtacatatgatcgtacaaaacacttcttttagagggtgagagagtgaacggtgcccccagggggagagg

SEQ ID NO: 266794 - DNA, 787 bp, Zea mays
gaattaccgggcggacgcgtgggcggacgcgtgggcggacgcgtgggcaataacacttggagatcccgttggtgttgatgatgtcaataggatgaagtacaaggacaacatttatgcctcaactccacaggtcgagacatctgacatctggattcagacagctagagagatgccaccattgcaggttccttcatattacaacataccaggtcaagcaacacctggtgcttttgtgccaaatccagcaaatgcatctttcaatgctacagctcaatcccctcatgcgcagttcccaggcttgtaccatcctcagcaacctccctctattgtaagtccgcaccccatggtgcatcaacaggtgccatcggccattggtcccaatgttggggttggggtggcagctccaggcccgcaagttggagcttatcagcaaccacagcttggccatatgaattggagacccagcttttgaagaaggtttcttaattatctgtaattagggggggtcacaagagcctttatgtaacaacagtaggctccttttaacaggaagcacctttgtttttagtgcagctctttctgatctatttaagctataacgaggtttttgttagcctttccttcccccaggtgaattcagtgtcccatctgaactggtatgatgtagattatgagttaaaacattgggcaaaatctcgcacgagcccaaggttgagtgccttccattttgttctattgttttgtttcctaatctaatttgtaggttgagtgccttccattttgttcc

SEQ ID NO: 266795 - DNA, 1219 bp, Zea mays
caacagatgtaaacgggttgcctgaaaaactttcacaagctaacttgcatgaggtggagcatgttattattccggaacatcttcgtgtaccagaatatgagcagacaaagttaaggtttggcagtttcacacctgatttggatttggaacaagtacctgacttgaccccacaagacactgagcaaccagaacatgtacaagaaccagttcaacaggtcagtgaaggcgatagtttggatgatggacatgatgacatggatgagcaagctagatcttcacaacacctgtccacatcaacggctgagatttccttgcccccatctgaggatagtgatcgaatgagtggtcaagtagagaatgatgatggcctgggcttagttcagagcgacactccaattggagcagcagacggtgacaatacccaaatcacctcgactttgactgctttttcggcttatagtcatgaagatcctaatatgcatacaaacaatgaggcccagttatacggactggtggagcctaatgtacatccgcaagtattagcttcctcttctcaggggtacccttcagaaaacccggaagcagataatgctgtgcaagtcttcaggatgccagaatctaatgttcactcacaagttctcccttccacatctgaggctttaaatccacagattgtgagcaacagccctgtttcgatctcgtcacagcagcagcagcatatctcccagcaacaagccgcagcacagatgtaccctcaaatgcatgtgcagcattttccaaatttcatgccatatcgacaactctattctccagtttaccccatgcctatgccaaactattcgccaaatgtcccttatccatcaaatggaaataattatcttcagatgcccagtggaggttcacatttaactgcaggaagcgtgaagtatggagtttcacagtttaaaccactcccatctggtaacccttctggctacggaaattacactcatccagctggttttacaatgggttctcctggtgttattggagctgcagttggtgttgatgatgtcaataggatgaagtacaaggacaacatttatgcctcaactccacaggtcgagacatctgacatctggattcagccagctagagagatggtccacctttgcaggttccttcatattacaacataccaggtcaagcaacacctggtgcttttgtgccaaatccagca

SEQ ID NO: 266796 - DNA, 462 bp, Zea mays
  unsure (1)..(462): unsure at all n locations
agtcacccacgcgtccggcttatgaatatcatgattaaagcgaacatgttncaggcatctgaggtagctttaaatccacagattgtgagcaacagccctgtttcgatctcgtcacagcagcagcagcatatctcccagcaacaagccgcagcacagatgtaccctcaaatgcatgtgcagcattttccaaatttcatgccatatcgacaactctattctccagtttaccccatgcctatgccaaactattcgccaaatgtcccttatccatcaaatggaaataattatcttcagatgcccagtgggaggttcacatttaactgcaggaagcgtgaagtatggagtttcacagtttaaaccactcccatctggtaacccttctttggtgttgattgatgtcaataggattgaagtacaaggacaacatttatgcctcaactncacaagtcgagacatctgaca

SEQ ID NO: 266797 - DNA, 488 bp, Zea mays
cctattgaagggtttggcgtggggagggtggtcgactccactcatccaggattcagtgcgggtgacgccccccccgggacgactggatgggaggacttcagtctgatcaccaagcctgaacagctcacgaagatccagcaaagcgacataccactctcctatcatctgggccttcttggcatgcctggctttacagcttatgttggattctatgagatctgttcaccaaagaaaggggagtttgtttttgtttctgctgcatcgggagcagttgggcaaattgttggtcaacttgcgaagctccatggttgctatgttgttggaagcgctgggacagatcagaaagttgagctcttaaaggaaaaattcggatttgatgcggctttcaattataaggaagagcctgacttgactgctgccctgaaaaggcacttccctggaggcatagacatctacttccagaacgtaggctgcccgatgcttgatgc

SEQ ID NO: 266798 - DNA, 606 bp, Zea mays
ccaaatccgaagctgttcaactgactccggagccacccaaagtccggccactaaccgctgaggattacagaattgccattgggatcgagcggttccgttgccctgaagtcctcttccagccaggcatgattggaatcgaccaggccggcatcgatgagatggtcagcatctcactcaggagattaatggaggacgagtctgtgaaggagcgcctctgccagtcgatccttgtcactggcgggagctccctgttccctggcatgatccctcggctggagtctgggatacggcaatatcggccctaccttgctcccctgaagcttgtcggagcagctgaccccattttagacgcgtggaggggtgctgccgcctttgcggcatcaagcaagttcggcaaacaaacgttcagcctagctgattacggagagcatggagagaacctgtttcatcggtacaacattgtttactcactataaccggaaaatgacatagtgatcgaaccatctcagtcaggctatttatttaacagctgatacaaattgatgtagcaacaaagtttttcaaaaccgccattgatatttttatgccctcccaattggagggttc

SEQ ID NO: 266799 - DNA, 588 bp, Zea mays
atcctggcgcggttccggcccatcgcgcccaagcccacaccggcggcgacaggggaggggagggacgtccccgtggagcgcgacctgctgcggaagctgctggagcccagggtcatatcgccccgggcggtgcgccccgtgtggtctgccatccacgtcgggtgcatccaccgcaccgacgacgcggcctgcaccgccgccgccgtctcgaagacggcggttcgggtggaggcggagctggaggtcgacgcgctcccggcggtggtctccgacgccggcaaccgcgtccggctcgtgaacgacgcgtacaaggagatggtggggcagcccgagtgcccgtggctcgacgccgtggctgccacgtcgaggaggatcagcggggaggtcgcgctggtggtagccaaccagtcctccctgccagagtcgtacggggtgttcacatgcacggcaaagatcgagtgggaggacgacgggaaggtcgcctccatcgatgtaccctgcgacgtcagccggctgcagtgcgagtccagagagtacctcttcgtctggaggttccgtaccgccgacgccgacgcatccgttggctgc

SEQ ID NO: 266800 - DNA, 1202 bp, Zea mays
cccactttctgcttctcccgtattgccgtgccctcctccctctccctgctcgctctctcgctctcggcgctttctttcctggtcgcgccgcccttcatcaggtctcctccgccttagccggtgaagagcgaccaggcccaataaataatcaccatggctcatcaaaagcgtgaaggcagctacgccgatgatgatagtacatccaagcgcatcaaaggcaccgacactgcttctgaaacgggggacagtgtagagtctagtgtttcacagcaaatggatgctgaagctaggaggacctgccaaaaggaaagcgaagcaccatcggacaaatgcgtttcagatggggaatgcgctgcaaactctaaggttttgggtgagcgggaagatggtattgactgttgtcgaggctgatgcggcggacgacaagggttgcaggcacactatggaggacgcctgggatggagttctcaatgctggcgctgaaccctaagcaagcttgactgcataccattcggctgtttatgaggccgactgctgcctcttcgccgctcgctcctcccgccgagggcgccccgcctacgctcctgccccgctctagctacccccaggcgcctactcgttgccgccaggccccagctgcttccgcgcccgcgccacatggactaggtccccgcagccaccgcctcttccgccgactcagcaaccgtctcagccgatgcgcctgccaaactgattgacgggaagctcgtggcgaagcaagtgagagaagaaatagccgtccaagtcaccaggatgaaggatgtgatcggcattgtgcccggccgggctgtcatccttgttgggtcgaggaaggattctcagacttacgtgcggaacaagaagaaggcgtgcgaacgggtcggtataaagtcgtacgaggtcaacttgcctgaggacagctccgaggaggaggttatcaagcacatagcgagtttcaacagtgacccgtccgttcatggcatcttggttcagttgcccttaccaaggcatatgaacgatgagaacattctgaatgcggtctgtattgaaaaggatgttgatggctttcatccgctgaacatcggacggcttgcaatgcaaggccgagatcttgtcattgtaccttgcaccccgaaaggatgcatggagttgctacaccgacacggagttgaaattaaagggaa

SEQ ID NO: 266801 - DNA, 447 bp, Zea mays
tcctcgcgtccggcgtgagagatgactacaggcagctgtccaggctcctgcacgcgatcatcagaatctccggtggcggtgataccgccatcgccaggctgccgcccggctgaccgcgagttcctcgcgctcctggggagggacaccctcgccatggaagacgaggtcttgatcgtcaacaacgccgcgctgctgccgacgaaaaaccgcacggaggccttcctgatgctgcacgacaggatcagtgaagtacctcggccgcacggaccgacagatgaagaggaggatcctctccgggctcccctaccagagcgactggctggacacggtcagggcggtcaagcggatcaaccagtgggccatgaacgtgcagcacgagtacaatgcaacgcaccagtccgacatgctgctgctcaacaagaatgtgaagatgccactgcatgagca

SEQ ID NO: 266802 - DNA, 520 bp, Zea mays
  unsure (1)..(520): unsure at all n locations
cggacgctggncgagacgcgtgggcggacgcgtgggagccgtagcccctagccgcctgtcttgctgaagctgaactgctgatccgtcttccaagctgtggtgtcatccctgagttctgatccaagatgtatctccagtattacatcaacgagaagggggacaaggtctacaccaccaagaaggagtcacctcttggggtgccgacgcagtctgctcacccagctcgcttctcaccagatgacaagtactctcgccagcggtacctgttgaagaagagatttggacttctgccaacgcagaagccagcactgaagtactgaagcttcaactttccaaccatggatgtgcagtttgtgtcactgcttgatgcttgttggttggaatgtagaataggtatctgaggaaacatatcaaacactgctaggcactactatgacatctcagcgcattcaggcactatatgtaatgctatgtgtttgacaggtcttgttcttattatgtacttggtgtgtgggccaaa

SEQ ID NO: 266803 - DNA, 657 bp, Zea mays
cccacgcgtccgcggacgcgtgggatcgcgagttgcgtcgacggtagaggaaaaatcagccggggactctctcctctcttccgtaagccctagcccctagccgccagtgtcgtgcattcgtgctgaggctcaactgctgatccgtcttccaagctctggtatcatccctgagcactgatttaagatgtatctccagtactacatcaacgagaagggggacaaggtctacaccaccaagaaggagtcacctcttggggtgccaacgcagtctgctcacccagctcggttctcaccagatgacaagtactctcgccagcgatacctgttgaagaagagatttggacttctgccaacgcagaatccaggaccgaagtactgaagcttcaagtcaactgtccaacctgcgatgttctttttgtgtcaatgcttgttggttggaatgtactatcttcgttctcgaatatttgtggtccgctagttcaattttgaactaaaccgcgacaaataaaaaagagcggagggagtagaatataggtatttctgagaactgaaatcaaacactggtaggcactactatgtcatcctgcatcacattctgtcactacatgtaatgctatgtgtttttggactgttgacatgctttattagttactgctt

SEQ ID NO: 266804 - DNA, 1158 bp, Zea mays
ctttttctccccaaggatgaaaaggcggcgagagcataagaacaaaaaaaaaacacacacacacacacaaagcgcacttttcaaatcgacaaaggggaaaggttcgcttcttgtggcatcttgctttccttcgagtgccatggccgatccggcggaggagaacgttgtctcgccgccaccgacccctgcggccccagccgtgggcgcctcagactcgcccctgcagcctgctgctgacggcgcctcaacggagaaggtgtctgctccggcgccggaggtaaggtcccggggattcaggcttcttggagaggacacttccgtgcacaaatcccttgggggcggtaaaactgctgacgttctgttatggaaagacaagaaaacttctgctgttgtaataggcggcgcaactgtcatctgggttctgttcgaagtgcttgattaccacctcctgaccctgatatcccatgtactgattggtgtgcttgccaccttattcctgtggtccaaagcaaccacgttcatcaagaagagtccaccggatattccactagtgcaggtatctgaggaccttgttgtgaatgtttcacgggcattacggaatgacatcaacagagcgcttcacttgttccgtgagatcgcaatggggcatgatctgaagaagtttttgggtgtgatcgtgggtctgtgggttctctccggagttggaagcagctgtgacttcctcacgttgacatacattgccgtcctgatgctccacacggtgccaatcttgtacgacaagtaccaggacaaggtggaccatgtcgctggaagggcacacaccgaggccctcaagcagtacaaggtgctggatgccaaggtcctgagcaaaatccccaggggtgcggtcaaatccaagaagcagaactagttaggataagccgcagattgtgaatgcccgtatcctgagtatcgggcttgtggtttgcatggcatatgtaaatctgtctgttggcttcagcttggttcttctgcgactactttgttgatgttattctagtcctatgtatgtcactgtgtacatgacagagatgttcggatgctacgtctaggctactgctgtgctgtagcttgtaaattccagtggtgcgttgctaagcacgatgctccccttgtttt

SEQ ID NO: 266805 - DNA, 543 bp, Zea mays
tattaaaacacacacacacacacacacaaagcgcacttttcaaatcgacaaaggggaaaggttcgcttcttctcgcatcttgctttccttcgagtgccatggccgatccggcggaggagaacgttgtctcgccgccaccgacccctgcggccccagccgtgggcgcctcagactcgcccctgcagcctgctgctgacggcgcctcaacggagaaggtgtctgccccggcgccggaggtaaggtcccggggattcaggcttcttggagaggacacttccgtgcacaaggcccttgggggcggtaaaagtacgtatttctttcttcatttttctgctgactttcttcctgtgctccaattcaatcgtatggtgttagctgggagttgtgcttttttataacaggaggtcaggagacgtggcttgcttctctctgggtattattctaagtgcataggaaacaatagacgagataacgcacggaatgagattgattattattcggagtttctttgagaaagtatattaaatcactccgaccggtata

SEQ ID NO: 266806 - DNA, 306 bp, Zea mays
agcatcccgccttggacttggacgggatcagcacgtcggtcggggaagcaagtggccaggccatccatccgcgaccgcgagtaggaacagtaactgacggcggcaagggagtagaggagggacgggacacgggaagagaggaggagcttgcttggacagccggtggactggtgctggtatatagatagctactagaggtaggcgggcgggcgggcggccaatgctgtcaggcgcgtagggctaggagcatgggcggaaggggcgcgaacgttcacggcttccgtcgcttgttccaccgacggagcg

SEQ ID NO: 266807 - DNA, 921 bp, Zea mays
cgggccggcccacgcgtccacccaagcgtccgcccacgcgtccgcccacgcgtccggacgagggaggggaaaagagagatggtggaggcatcgccggagtccggcgccgcggcgaccggaggtgcctctagtacggcggcggtgcggaaggggaagtcatgcaagggctgcctctactactcgtcagtgctcaagtcccgcggttacaacccaatctgcgttgggatcccccgctccatcccccaagttcctaactacgtggtggatgaacctaaggaggaggcgacggcgcaggggcatgacctcaggcggttcaggtacgggtgcgcgggttactccatgttcgtggacaacagggacggccagggtggtgagagcgagggcaagacgttgttgccatattgcaggggcctcgagttattggtggacagcagattggtcgagagaaagccatcggcaactgaacaagctccagcacatgttgcaaaggatgcagcagctaccatccgctctcaccaacaaggacaacagagacctcagaacttgtcgaggcaggaattcttggacaggtttaagaggagcgctggactggtcgcttcaggtgttgcgaagaatctaaacaaaacagccaattatatcaaagaaaatattcaggacatgtacaccgatcgtcgtccaccaaagtagcaaccatgccgagtgattgtcgtcaagagctgaagaaatcgcttgctactggaaactttacatcaggactacctggaaactttactccactcttctcacttgtaaacaattggagctttttgggtaccatttctttttttcctgctaacctgaattatgcggtgaattggccttcaacactttttaaagaaaaacaaattgttgtctaaaaaaaaaaaaaaaaaaaaaggcgcc

SEQ ID NO: 266808 - DNA, 570 bp, Zea mays
ggacttccttgttggtgagagcgagggcaagacgttgttgccatattgtaggggcctcgagttattggtggacagcagattggtcgagagaaagccatcggcaactgaacaagctccagcacatgttgcaaaggatgcagctaccatccgctctcaccaacaaggacaacagagacctcagaacttgtcgaggcaggaattcttggacaggtttaagaggagcgctggactggtcgcttcaggtgttgcgaagaatctaaacaaaacagccaattatatcaaagaaaatattcaggacatgtcacaccgatcgtcgtccaccaaagtagcaaccatgccgagtgattgtcgtcaagagctgaagaaatcgcttgctactggaaactttacatcaggactacctggaaactttactccactctcctcacttgttaaacgaaatggagcttttctgggataccaacttccttttctttacctgcataatcttgtaattttgcggctgtatatgtacatgcaaacaacttctttgaagcgaaaaatcagatctcgtttggtgtaccgcccaat

SEQ ID NO: 266809 - DNA, 691 bp, Zea mays
tggacaacagagacctgcgaacttgtcgaggcaggaattcttggagaggtttaagaagagtgctggactggtcgcttcaggggtcgcgaagaatctaaacaaaacggccaattatatcaaggaaaatattcatgacatattgtaccacgatcgtcgcccaccaaagtagtagccatgccgacttgctgaggtatatcatctatgctcaaggttgagagctgaagaaatgccttgctgctactggaaaccttacacaagtactacctgaatcgacccctactcttgtattgtagtcccagaacgaagcacagcagccccagctccgtcactgattatgcaaatggagccttccaggattccaacttcactcgctttacttgcataatcttgtaatttagggctgcatatgtacatgcaatttaacttgctgcttgtttgaagcggaaaatcagatttcgtttggtgtaatcggaagccgatgatattggttgaattttgactgaaaattcgagaaacagcatttctcgatgaaaatacacggtttctcggttgagaatgttagacagcgcaggcagacttgagaatgttagacagcgcaggcagacgcatcgcgtgctgctcgcaacaggggcaatgtattctcttccttcattggtattgaatattgatggatatgaagatctattttctt

SEQ ID NO: 266810 - DNA, 427 bp, Zea mays
ggacaacagagacctgcgaacttgtcgaggcaggaattcttggagaggtttaagaagagtgctggactggtcgcttcaggggtcgcgaagaatctaaacaaaacggccaattatatcaaggaaaatattcatgacatattgtaccacgatcgtcgcccaccaaagtagtagccatgccgacttgctgagtcccagaacgaagcacagcagccccagctccgtcactgattatgcaaatggagccttccaggattccaacttcactcgctttacttgcataatcttgtaatttagggctgcatatgtacatgcaatttaacttgctgcttgtttgaagcggaaaatcagatttcgtttggtgccatcgcaaaacgatgatatccgttgccttttgtctgaaaattcgagaaaaaaaaaaaaacgaggt

SEQ ID NO: 266811 - DNA, 343 bp, Zea mays
gcttcgatagctaatttcgccgtcacccgccggacagacacggaggtacaggagcgagggggaaagtgggatggtagtgggggcatcatcggtgtccggcgccgcggcttccggaggtacctctggtacggctccgccgcggaaggggaagtcgtgcaagggctgcctttactactcgtcagtgctcaagtcccgcggctacaacccaatctgcgttgggatcccccgtgccccccccctagttcctaactacgtggtggatgagcctaaagaggacgcgacagcgcatgggcatgatctcaggcggttcaagtacagggtgctcggttactccatattcgtg

SEQ ID NO: 266812 - DNA, 824 bp, Zea mays
tcggaatcggtcgagatcacatatacctatagttcatagtcagccacagcaacctttgcaaagtcctgcaatatataatcaacagttgcaaccaccatttgccccatttgtacaggccgccttttcctcatcagatgcattcacaagtaccatattcatttggggtgacgcatgcaaatgctccgcagcacatgttacaacaaccaatgtctcatccggttgcgaatcctccaactaatttcctccctggcctaccaccattgcctagccagccaccaccacagcagctgtaccaggctagttcacactacaatacacaaaatacgactccaatgcaagttgataggggcgctccctgggggcgggcccctgatgctcccactcctggctcccatttccctggacaattacccgggttgcccggacaaatgacccaaggaattggtggtatccaggcaggccaagcaccactgacacctgagatggaaaagatgctagtccaacaagtcctgggcatgtccgctgagcagattaacatgttgcctccagaacaacggcaacaggttcttcaactacgagacatgctacggcaatgatagatcgtcagttgactgggtggagaagtttcagttcactgcagcagggatcccgagtgtgggtgcctgttcgttctagccttttgtatcacctgattgacatcccgactagtctgcagcctaccttggatatgcgattgtagaatggtagtcgttgtcgtcatttatagaaatgcttgggcaatatgttttcctaaagactcacaaattaactgcatgttttggtcc

SEQ ID NO: 266813 - DNA, 1076 bp, Zea mays
tcccgttcgacgcacgcgtccgcgaaatgacttgaatattgaaaaaacagagaaaccggcctcgagtttaactgcaacagaaatgggctccagtatccaagttgaaccctctacggatgagttagatgaggccatacaacctcctgacgatgacatgggcatctcatcatctgcgtgggtagaagtagagcgtcaagaactagaagtcactgtttcgagtgaaaatgtagttgttgaggatgtaacttctccaggaattgcaccattgccgtcatcaagcccaagagtgcgtcattcgttgtcacaaatgctgcaagcagatagcaatgaaccagaaattattgagtggggaaatgctgaaaacccacccgcaatagtttttcataaggattctccaaaaggattcaagaggcttctaaagtttgctcgaaaaaacaagggagacaacaatgctaacggctgggcaagcccctcggtagtttcagaaggagaagatgaactagaagaaccaagaggcactagtgatggtacaaattcaagcaggagaacttttgatggttcaaagactaatagcatcttatcagctcaatcaactaccggcagcttcaactctttgaactcggataagctacgggagagatcaggtgctgccacatcaacaagagcatcaaggtcgttcttctcactctcaaacttccggagcagcaggtcaaatgagtcgaagcttcgatagtgtctgccttgtttgtccagcagatacatgggtagttcatctccgctcccattcaggacgtctagacttaaaaatggtttgagatttgattgttcggacggagccagcttgctgtgtttcgctctagtcacctgacatttgatatatagatagcttctgcctatgagatgccatacttcgcttctgccgtcctggacatttctatattttactgcattgggtgcgacctgattgagacggccgatatgtttgcatggcttgcaagagatttgcttcgaccaaaagccctttgctgtcaatagtttgttcccaaaattgtcatgaaaaacacccccagggatgt

SEQ ID NO: 266814 - DNA, 382 bp, Zea mays
gaaggaaaccattactgctaccaagccagctataaagggacaagatgtgaagaagaccaaatcagcaacaaagacaagcagaataactaaagtttcaccttcagaagaaaaatcaggtgtaaaaacgaagcaaagcttgcaaaaggtttcaaataaaagcagtgttgtacctcttgagtccaaaaccttgaagaaaaccactggaattagtcagagcattaggtctggtatggtgaagaataaggtaccccaacctaatgacttctcaaaagataccggaagtgttaaccaagctgaagataaggagcaatctcctgtgacaaccgagccaactactaaggtactggaggctgatcttgctcaaccagcacatgatgttgat

SEQ ID NO: 266815 - DNA, 223 bp, Zea mays
acgccttcctctaccttgccctctatccaaggggaaccgtttctctccccctcgatcctggtctgcccaacatcaattcccatgactggtgttggtcagccagcgtccacgccttcgtttcccactcccagggccaccaccacggggctccccttcccggcggcgaccaggcacaagtccggtgatggagccctcacggggaacatcacgacgactctaatca

SEQ ID NO: 266816 - DNA, 1444 bp, Zea mays
agcaaatgcagtcacagatgggttggagaacagtgatattgctgctctccattacagctcggcatccagatgcttctgaagttggtttcgaggctatcatgacagagagggctcacctttcactagtgaactgtcccaagagataaaagcaacatctcgcctagcttgctgcctgatgtttttccaagtcagcaggagtacgagcagcagggcagtgccggccggtcggacgcgtgggtttcagcaatctcagcactgaaggttttgaaagttacggggaaactccagaggttaacgagaccagtggaggtcattgcattcagcgatgaggaaggcatcagattccagacaacttttctgggaagcgctgctgtagctggtacactacctgaatcaattttacaagtatcagataagagtggcactacactacaagatgttctgaaaatgaattcttttgaggctacctctactgctattagtcaagccaggtacaacccggagtctgtggggagttatgttgaggtacacatggagcaaggccctgtcctgtaagcccttcattatccacttggtgttgtaaaaggaattgcaggacagacacgattgaaggtaatagtagatggttcgcaagggcatgctggcacagttccaatgaaattgcgccgtgatccgatggttgcagctgcagagctcgttgtgactctggaacgcctctgtaaagagcccaacagtttgctgacctacgacgaggagtgcagctgcttcactgaggagtccctggccggcctggtgtgcaccgtcggcgagctgaacacgtggccaagcgcgagcaacgtgattccgggccaggtaaacttcacggtggacatccgcgcgatggacgaccaagtgagggagacgatcgtgacgagcttctcgaggcttgttctccagaaatgcgatgacagactggtcgattgcaaggtcgagcataagcactcggcggcagcgacgcactgcgacccggagttaacgtctcagctgaagcgcgcggcgcggtcgaccgtgtcggcaatgccggggcgcaccgtggcggccggcgagacgcccgtgctgatgagcggcgcagggcacgacgcgatggcgatggccaggctcaccaagatcgggatgctgttcgtgcggtgccgcggcggcatcagccactcgccggaggagtcggtgatggacaacgacgtgtgggccgcggggctcgcgctgttcaacttcatcgaccagaacgcggtgtcagaagaactggatgccgggcagaacgtggtggctgtggcgctggcggtggcagagtcgtgatggttcggtggcgattcttttcagtgggagtaggcctgtagcctgcaactgtacataagacttgttattacattgcattaaacaggaataaaaaaaacgcttctcttcgttg

SEQ ID NO: 266817 - DNA, 421 bp, Zea mays
ttactcgcagctaacgtctcagctgaagcgctcggcgcgtgtctaccgcgtcggcaatgccggggcgcaccgtggcggccggcgagacgcccgtgctgatgagcggcgcggggcacgacgcgatggcgatggccaggctcaccaagatcgggatgctgttcgtgcggtgccgcggcggcatcagccactcgccggaggagtcggtgatggacgacgacgtgtgggccgcggggctcgcgctgttcaacttcatcgaccagaacgcggtgtcagaagaactggatgccgggcagaacgtggtggcagagtcgtgatggtcggtggcgattctttcagtgggagtaggcctgtagcctgcaactgtacataagacttgttacattgcattaaacaggaataaaaaaaaacgcttctctccaag

SEQ ID NO: 266818 - DNA, 245 bp, Zea mays
cccacgcgtccgtggatctcatatggacactgtcgttgatgctgggatgtacgatggagccttgggtattatttcagcaatctcagcactgaaggttttgaaagttacggggaaactccagaggttaacgagaccagtggaggtcattgcattcagcgatgaggagggcatcagattccagacaacttttctgggaagcgctgctgtagctggtacactacctgaatcaattttacaagtatcag

SEQ ID NO: 266819 - DNA, 636 bp, Zea mays
  unsure (1)..(636): unsure at all n locations
cccacgcgtccggccacgcgtccagaacttctaaagcagagtctgatggtatgaagaaggggatgaaaataccgaaagtcgaacctgatgttatggactggaaaactcccaaagcatgatctgatgttacgaagaacggcttgagatctccaaaggcagaatgttgccagcctgtgattgagagcgttaaactaaagctggcagagattttgaatactatatcaactcaagatgactgcaaaatgttgcaacaccaacttgatacccagaggaaaagagctagatataagaagatgattcgccggcatatggacttccgaatgcttcactctaagatcaagagtggcgcaatctcttgcaccaaggagcttttgagagatatacttattttcatcaataatgtaataaccttctatccgaaggctacattggagcacatggctgcggttgagcttcgtgagtctgcatgcaaaactgtgaagcagagtgcaagcttgttcttgaaaagccatggagagaccggaacagctggtgcccctgtagtaaagaatactcgagtcctgcagcctcgatgcnctggccccggtgatgcaaggccaagcaaggttttcttcaaggacgctactgccaaggaaa

SEQ ID NO: 266820 - DNA, 631 bp, Zea mays
cgcaccagccacagcccacagttcccccatttcatttgtgtggtagccgaggactgggagggacctactcaaccttttttttgtgtgtgtgaaagatcgagagcgccgctcaacgaatagagcggtttctctgccttgtgtctttcctctgtcctgtggtctgcggtggccgcagctgcggcgcgcggtgatggagttcacatctaagaagacggcttcgcttgccctcctctgcctcaagctctcctgcctcctcctccttcttcttcttccccggtcttcctctgctgcgcctctgtccagaagcctgtcgctgacgaggaaccgcctgcagcccgcggatgaccctgctccggaggttcccgctcccgcccagcagggtgcggatgcgtgctggtgctggtgcggtgggagctcgagaccccggcggcgaggtggcggtgaggatggacatcgaggtcaacgactaccctgggtccggtgccaacaaccgccatgaaccgagaagccctgggaggccattaccataacgattgaaagcttgaagctagcgtacgtttcagacaggaattaagaatgaagaccatggcatggagctgctgctgctgtcttgagagtttttatagtagcg

SEQ ID NO: 266821 - DNA, 866 bp, Zea mays
ccggtctcggatattcccgggtgcgagccacgcgtctcgacgtagaccaaaaaacggtatcagtgggacaatcttcgtgtacgaaggtcgaatccttgagggcgaggttttgacacgtacaacatccccacatgatcttttagtaacctttcaataggcgtcccccaagaactagtaaacatggcaaaactgttgagcctgttcttagccctctcctttgtagcagctatgtttgccataggctctcatgctgatggagactgtgagaatgacctccaaagcctgataagtgactgcaagacatacgtgatgttcccagctaatccaaaggtccctccttcggatgcttgctgtggtgtcatcaagaaggcaaacgtttcttgcttgtgctccaaggtcaccaaagaaactgagaaggttgtgtgcatggagaaggttgtgtatgttgctgagcagtgtaagaggccatttgagcatggcttccagtgcggaagctacaaggttccagcaaactgatgatatcacaagagggaagcgcttgacgtagtctttagatttcaattgttgcagccgatcaaccttcttagggttgtataatatgaagtcaatgttgagactaatgtgaggtgggagaggcctattgatgcatcaaaagtattatgagctaataataaagccttctccccggattttatgaaaaaaaaaaaaaaaaaaaaaaaacaacaaccattacccaaattaacaaaaacatgaaacagataatactgagactacttaaaaacacaacttcaacagcaagccgtccattttgactcgatgtctgtaccagtttatttaacattatttggggggggggggggccgccc

SEQ ID NO: 266822 - DNA, 1681 bp, Zea mays
cggacgcgtgggcggacgcgtgggcggacgcgtgggccgaaccagagccccgtcccaactccaccacctctcttctctacggcgcgagcaagggcggcgccggccgcggcgtcggcgggaaccgggcctcgctctccccatctctccgatcacttctgtcctgtgaaaatggcggatgaactacgctcaacgtctgtgggtcagaagttccatgggcagtccgtgctgttgagcagaatctcttcctattccgccatgaacaaccctgtattcaacaatgcctattctgcttacaatgtgccccagaggtcatatcatgggatgaatgcaactgctggactctcatctgtcatggcaccatctcctgtctttgcttctgccccaaaagagaaaggcttttctggatttatgatcgactttatgatgggtggagtttctgctgctgtctccaagacagctgcagctccgattgagcgtgtcaagcttttgattcagaaccaggatgaaatgctcaagactggcaggctttctgaaccgtacaagggtattggggactgctttggccggacaatcagagatgagggttttgtctcactgtggagaggaaacacagctaatgtcatccgttacttccccacacaggcattgaactttgcgttcaaggatcacttcaagcgcatgttcaactttaagaaggacaaggatgggtactggaagtggtttgctggaaatctggcttctggtggagctgctggtgcttgctctctattctttgtctattctctggactacgcccgtacgcgtttggccaatgatgccaaggctgcaaagaagggtggtgagaggcagttcaatggactcgttgatgtttaccgcaagacccttgccagtgatggtattcgtggcctctaccgtggattcaatatctcttgtgtggggatcattgtgtaccgaggtctttactttggtatgtatgattccctgaagccagtgcttcttgttggtaccctgcaggataacttcttggccagcttcttgctcgggtggggtataaccattggtgctggccttgcctcctaccccattgacactgttcgccgtcgcatgatgatgacatctggtgaggccgtcaagtacaacagctccttggacgctttcaagcagattgtcgcaaaggagggtaccaagtccctcttcaagggtgctggcgcaaacatcctccgcgctgtagctggtgctggtgtccttgctgggtacgacaagctccaggtggttgtcttcggcaagaagtacgggtctggtggtggctaaggatgtataatgatgatgacgacgaacaacaaacatgatgttttaggtgcctcctttaagtaaacatacgtacggaccctcgacaccattttaagttcgctctcgcagaggctggtgagtttgtagcgtggctgtgaccgcacctctttttatgtcagagattggaaataagtgacgttagaaattgctgtcttgctgcatcagttttttatactccgttttttgttttgcgcgtgcaaagggttgctcgaatgtatctatgtaggtttcggaatcccagcttactatgtttgatgaaggtgtatgttctgtgacctttggcagcatcacttcatctgtctagcgctacatgattttaaggatcatctgg

SEQ ID NO: 266823 - DNA, 636 bp, Zea mays
  unsure (1)..(636): unsure at all n locations
cccacgcgtccgcccacgcgtccgcccacgcgtccgcccacgcgtccggtatgattgcctggagccagtgcttcttgttggtaccctgcaggataacttcttggccagcttcttgctcgggtggggtataaccattggtgctggccttgcctcctaccccattgacactgttcgccgtcgcatgatgatgacatctggtgaggccgtcaagtacaacagctccttggacgctttcaagcagattgtcgcaaaggagggtaccaagtccctcttcaagggtgctggcgcaaacatcctccgcgctgtagctggtgctggtgtccttgctgggtacgacaagctccaggtggttgtcttcggcaagaagtacgggtctggtgggggctaaggatgtataatgatgatgccgccgaacaacaaacatgatgttttaggggccccctttaagtaaacaaagggggggaccctggacaccattttaagttcgctctcccaaaggctggtaagtttgtagcgtggctgtgaccgcccctctttttatgtcagagattggaaataagtgacgtttggannnaaaaaaaaaaaaaaaaaaaaaaaaaaaaaaaaaaaaaaaaaaaaaaaaaaaagggcggccgc

SEQ ID NO: 266824 - DNA, 360 bp, Zea mays
gttcctcatcaagcccgccgcattccacccgtggcgcgaccgcgccaccacgcatcccacgcaccggcgccgccctaataaatcccctgcgctccgcgcccgccggctcgcaaccctaaccttcctcccctgctccgccgccgccacggtcgcctctactgccatggtgagcgctgaagtcggcatcgattacgtgctgtggacggaggacgaggtgtccacccgcgtgggcgaggtcgccgccgagctcgcggccgacctgcgcgcgttgccggagcccgccgtcatcgtcggcgtcgccacgggcgcgttcctcttcctcgctgacctcgtccggcgcgtcgacgtgcggctcgtggt

SEQ ID NO: 266825 - DNA, 1812 bp, Zea mays
ccccgtctccctcgctcgcctcgcgcggcgtgttgcctttccgtgtgatctcttctcgccccaggcttctccaccccccaccaccatccacacctccttcgctcgcccgctccttctctccttccctcccctccgctccccacccagacgagcgcgcgcggcgacccggacccagtcagccggactcccatcccctcctccccaagcgagccgagctgcgagcgctgctcgcgcggtcggcccatggcgagcggcggcggcgggggcctgggtgcggctggcgcgggaggccggatctccacgtggagggagcgcgagaacaacaagcgccggaggcgctcgccgccgcgcgatcgccgccaagatcttcgccggcctccgcgcgcacggcggctacaagctgcccaagcactgcgacaacacgaggtgctcatggcgctctgcaacgaggccggctgggtggtggggcccgacggcaccacctaccgccagggaagcaagcccatggaacgcatggatcccatcggttgctccgtgtcaccaagcccatgttcctcgtaccaaccaagtccgcgggcgtcatacaatgcaagccctacctcgtcctcattccccagcggcgcatcctcccccttcctccctcccaacgaaatgcccaacggtatcgacggcaatccaatcctaccatggctcaagacattctccaacggcactccatcaaagaaacacccgttgctcccaccgctgctgatccacggcggctcaatcagcgctccggtaacccctcctctaagctcgccgtctgcccggacgccccggatgaagacggactgggacgaagcggccgtccagcctccatggcacggcgcaagcagccccacgatagtgaactccacgccgcccagccccgggcggcccatcgcgcctgacccggcatggctcgccggcatccagatctcgtccaccagtccaaactccccgacattcagcctcgtctccaccaacccgttcggcgtcttcaaggagtccatcccggtcggcggcggcggcgactcgtcgatgaggatgtgcacgccggggcagagcggcgcctgctcccccgcgatcccaggcatgccccggcactcggacgtccacatgatggacgccgtctcggacgagttcgcgttcgggagcagcaccaacggcgcgcagcaggccgccgggctggtgagggcctgggagggcgagcggatccacgaggactctgggtccgacgacctggagctgacgctgaagctctagggcaggcgtccgggcgctgatggttaacgtagctaacgcgaggcgttgctggtggtgttgttttttttagtgtacctgttattgttctctagttgctgatggaaagccggatcatgtggcctcgcgttcggttagattcacatctgtggtggtggtaattgtggtgttattttaactactcgaattgtagcccggcggagctgtggtcggctagctgttggactccacttggctggtgcattaagctccttgtttgctgttgttgtgacaagtgtaaattaatgtcagaaaaccattcggaaaaaaaaaaaaaaaaaaaaaaaaaaaaaaaaaaaaaaaaaaaaaaaaaaaaaaaaaaaaaaaaaaaaaaaaaaaaaaaaaaaaaaaaaaaaaaaagggggggcccccttttttttttttttttttatggaagaaaacttttaaattcttggggtaccttcccaaaaaaggtaatttttttgccaaatttttggctttcgaccaaatttttaataacctttttttagg

SEQ ID NO: 266826 - DNA, 365 bp, Zea mays
ggtacggctagaacgcatgagaggcaacccaagacgcgttcgcgacggccggccacgcgggggggacggcgtggaacctcttcaagatccggaaggccgtcacgccatcgtcctccatgcccgggaacatggtcaagagcgccatcaagaacaggaactgacgtcggcaccagacagttgctcattgtgctcctcttgatgatcatatacccagaatgatcggacagtaattcaatgcgctcctcttactctggatgataatgtacccataatggcgtgtaactatcgtgtgtgcaccatcgacattaacaaaaaaaaaaaaaaagggcggccgctcgcgatctagaacctagcggacgcgtggg

SEQ ID NO: 266827 - DNA, 493 bp, Zea mays
  unsure (1)..(493): unsure at all n locations
ctcactccccagaccacctcacacgcacgaagcagcagagcagtggactggactagctaggtgggcaacatgaagcctgcggccaccgccagagttgctggcctcctcttcttcctcgtcctcctcctggcgctgccttccctccgcgtctccatggctggatcagggttctgcgacggcaagtgcgcggtgaggtgctccaaggcgagccggcacgacgactgcctcaagtactgcgggatctgctgcgccacctgcaactgcgtgccgtccgggaccgcgggcaacaaggacgagtgcccatgctaccgcgacatgaccaccggacacggcaaccgcaccaggcccaagtgcccctgatgatattcattccttcgctctgtcttgcatgcgtatgtaatgtataggctgtgcaatgcatgcatacatgatacatgccgtgactctggatcggcggatgcctatgcatgcttttcactagctnaatatacta

SEQ ID NO: 266828 - DNA, 477 bp, Zea mays
tccgggtggccaacgcgtccgctcgccgacgcccaagccgcccccggccgacccggaggaggaggccgagccggggaacagcgccgccgacggcgtcgggaacggcaaggagtacgagaagatcgagttcccggacctgaatctcgtggaggagaaccagatcatggtctccgagtacaccaagctgtcgtgcgcggccgtggaaacgcagagctgcgacagcctcctgacctcggagcacgatgacggcgccacggccctgagccgggacgccgccgtgcgcctcgtagatagcttctcgacggacaacagcaccgccgactcggtgggcgccttccagagcgacacgccggtcagcagcgtgtctaccacggagttcccggccacccctcagtctaactccagctcggagccgtccgggaacgcccactcgtcggctgaccacaaggcgaaggcagcgtcggagaccgccgacgc

SEQ ID NO: 266829 - DNA, 1466 bp, Zea mays
gtggtgttatctaacaaggaaaaatattctccaaatgagaatgctgaagagagtggtagttctaacgttgaagcaccacgccgagacaatattgagtcaacatctacttcatcactctcagctgacgaaccagttgtagttgggacagaggaaattgcaagggttgcctcattatggtctgggataccagtacagcagttgactgctgacgataagaaacttctagtaggactggacgacgaactcagaaaacgtgtcattggccaagatgatgctgttgtggccatatctcgtgcagtgaaccgatcacgtgttggccttaacgatcctgatagacctattgctacgctgcttttctgtggtccaacaggagttggtaaaacagagctcaccaaagctctagcagctagttattttggatcggaatctgctatgcttaggttagacatgagcgagtatatggagaggcacactgtgagcaagctcataggctctcctccagggtacattgggtatggtgaaactggtactttgacagaagcagtcaggagaaaaccatttactgtggtattgttggatgagatagagaaagctcaccctgatattttcaacatccttctccaaatatttgaggatggacatttgacagactcacagggtcgcagggtttccttcaaaaatacgttgattgtcatgacttcgaatgttggttcaacatcaatttcaaaaggaagacagagcataggtttcttgaaggaagataccgagtcaggctcatacttcgcaatgaaatccttagtgatggaagagctcaaggcatttttccgtccagagttgctcaatagaatcgacgagatggttgtgttccgtcctctggagaagactcagatgctggccattcttgatatcatcctaaaggaagtcaagggccgacttttggccctcgggataggtttggaggtgtctgatgcaatgaaggacctgatatgccaagagggctacgacaaaagctatggcgctcggcctctgaggagagctgtcacccacattatcgaggatgtcatcagcgaagcgattctttttggcgagttcaagcccggtgacacgatactgatggacatcgatgcagaggggaagccatgcatgggccatctggaccaacagatcgtccaggtctctgacccaacacgggcaatctgaagctgtgttggaccttttccagtgtagtagattagggatctaaatcttttattctttcaagatagagattattaattctttgttacgtagatatatagagtagtatttcattatgtatatatatcaaccagatgatccagataggggaatctggtcagtcattggagttatttgaaattttcatccagctgtatgtatattgttgaattgtttctgattcaactggccatatatatcatcattaaactatcttcatcggcttaccc

SEQ ID NO: 266830 - DNA, 691 bp, Zea mays
atcgggagctacacattcctttggggggctgtagttattgctccgggggttgctcctgcagtgacagtgcaatcaggggctccaacatattctggggttccactacccagtaacatggcctatcctattccaccagcaaacggtggggcattttacagtggttatggggacatttatccccaagcaactccgttgcagcagctggcattcacactcaagcatgcctcatcgtcggcaactcaggctgttccagtgacgtccacaccaacaagcatggctacaaaggggaactcaatcttggatgcggagatggataaacgatcccgaaggaaattccaggaactaccggtttcgaagggcccagcaacagaaagtcaggtttagatagttcaggtaacattgggagctcatcaattgcacctccgaagaaagttcaccctggatcaaatggaatgcctccggcagaagaagcggatatgccatcacatctctctatatccactaagatgctaccaccacccctgaagagcatgctgccactgccactgccacccagaagcatgcccccaccaccacctaagagcatgcctccaccgccaccaaaatttccttcagatgagtttttgtcaagaaacgagaacaagttttttcctttaaaggagcccacagcacctccaaggtccttttgatg

SEQ ID NO: 266831 - DNA, 572 bp, Zea mays
  unsure (1)..(572): unsure at all n locations
atcaaacttatatttacaggcatttgcttctatattaagataacattctgaacctggcaagggtcttgctaactagtattgtgcttccatgtcagatatgcttatatttgttctgtgtgcaaaattgtgtctgatttcattcttatgcatgccattgcgttacctactctataacacaagaatttgatggatgaatcttcttgttttctttcatctttccagaactcacaacaggggtccaaatttgttaagacaggtttagatagttcagctaacattgggagctcatcaattgcacctcccaagacagttcaccctggatcaaatggaatgcctccgccagaagaaccggttatgccttcacatcgctctatatccactaagatgctaccaccacccctgaagagcatgctgccactgccacccagaagcatgcccccaccaccacctaagagcatgcctncaccgncaccaaaatttccttcagatgagtttttgtcaagaaacgagaacaagttttttcctttaaaggagccaacagcaccttcaaggtcctttgatgcaatatcagt

SEQ ID NO: 266832 - DNA, 536 bp, Zea mays
agatgctcaaccagacagtggaagtggagatgcaagccataaatcacctggaagttctagtccggcaaagagcattgcaggagatggcgaagttgagggtagtaagagaaacgtgagtgttgttccaactgttaatcaaactgggagtccggcatcggtagggcagaaagatgttggttctcccaggaacaacaacacagttggagcatcccccccagtgaagaacccggaacagacctggagccaagttgctcccggcgggacagtggtacagtgaataatccgaaaggaaatgctgctgctcagggcagtgctggttcatcagagaaccattcggcccaagtaaactcctcaaaatctggaaataacagcaagggtagcaggtcatcaataacacaggatggtggttctggtggaaataagataggtgattggtacaaggaaatggctagttgcgatatgtttagtggggattgggttagggatgactcataccctctctaccctgagggatcgtgtcctcacattgatgagcc

SEQ ID NO: 266833 - DNA, 1184 bp, Zea mays
cggacggtgggctcggcggtggcagcggtggaagggatcaacaagatcgtgacaggcagcctcatctcgctgtcggagcaggagcttatcgactgcgataagttccaggaccagggctgcgatggcggcttaatggacaatgctttcgtgttcatgatcaagaacggcgggatcgacaccgaggccgactacccgttcactggccacgacgggacgtgcgatctcaaactgaaaaatacaagggttgtatccatagattcgttcgagcgtgtgcccatcaactacgagagagcgctgcagaaggccgtggcgcaccagcctgttagtgccagcattgaagcatctcggcgcgcgttccagctctacagttctggcatcttcgacgggagatgcgggacgtacctggaccacggtgtgacggtggtggggtacggcagcgagggcggcaaggactactggatcgtgaagaactcgtggggcacccagtggggcgaggccgggtacgtccggatggcgcgcaacgtcagggtgagggccggcaagtgcggcatcgccatggagccgctgtacccggtgaaggagggcccgaacccgccgccgggcccgacgccgccgtcgcccgtgaagccgcctaacgtgtgcaacgcggagtactcgtgcccggaggccaccacctgctgctgcgtctccgagtaccgcggcaaatgcctcgcatacggctgctgcgagctggagaacgccacctgctgcgaggaccactcgtcctgctgcccgcacgactaccccgtctgcagcgtccgggacgggacctgccgtaagagcgccaacagcccgatgatggtgaaggctctgcagcgcaagccggcgatgtatactggcggcggcggcggcggcgagcaaagcgggaggagcagctggtgaggagattgagactgtggtggtgcgtggcgtgtactgttcatcgttcagacagatgacttgctggccatgctgtgggctcaggaactgcttcttcacagtggcgatgttctgatctgtaatgcacgaagcacgatactatttgttgtatatgtatgtatgtgtaactacagataagattaggaacggtgtgaaagaataaagaaaccgatggaataagtgatttgggaacaatctcagaatcaatttatgccgccctttaggat

SEQ ID NO: 266834 - DNA, 588 bp, Zea mays
cactcaccggacaatgcatccgtactaaaatgcgacggaacacggctgccaatcgcggataaatggacatgccttcctggtcaagattaaaaaacggcggattcaaaaccaaggccaataacccttcaatgggcaacaacggaacttgcaatctcaaactgaaaaatacaagggttgtatccataaattcgttcgagcgtgtgcccatcaactacgagagagcgctgcagaaggccgtggcgcaccagcctgttagtgccagcattgaagcatctcggcgcgcgttccagctctacagttctggcatcttcgacgggagatgcgggacgtacctggaccacggtgtgacggttgtggggtacggcagcgagggcggcaaggactactggatcgtgaagcctcccaacgtgtgcaacgcggagtactcgtgcccggaggccaccacctgctgctgcgtctccgagtaccgcggcaaatgcctcgcctacggctgctgcgagctggagaacgccacctgctgtgaggaccactcgtcctgctgcccgcacgactaccccgtctgcaacatccgggacgggacctgccgta

SEQ ID NO: 266835 - DNA, 885 bp, Zea mays
gaaatatggagatcacgatgacacagtgacagttattgatcctaaaagatcttacagtgtgaaggctcctactagacatcccatatatgagaacttccgtgtcgaggccttcaaaacgttattagaggcaggtaatacgggcgagcagctgtcagcccttggagaacttatgtaccagtgccacaacagctacagcgcatgtgacctcggttctgatgggactgacagactagtcaacctggtacgagaagtgcaacacaggaggacatccgaaggcggaagccctagtctgtttggcgcaaagatcaccggcggaggctccggcggcacagtatgtgtggttgggaagaactgcgccaggagcagtgaagagattgcagagattcagcacagatacaaggctgagaccgggtatctgcccattcttttcgacgggtcccctccaggagctgggaagtttggttacctgaagatccgacgtcgttgtccctagtggctgattgggaaacgaagaacttcagttcgagctttgtcacatatcactcaattgttaagaacctcactccaactctccaagccattgtagaacatagaggcgtattgtgccacttgcgatgattcgtcgttcacacacaaaatattatcatgtgctacaccaattctggaagctactagaggaaaatgtgaggaatataaagaaactcttggtgagcagatgtagtctagtggtctccgtgtgcttgctgcagtgtaaccaaactccaagtagatgtgctctgggctctggcatgtggtatgtgatgaagtcgaggatggtttcttgccgtttgatgaccagtgtagtcgttggttaacttgtcagtcgtaaactgatgttgtcagtta

SEQ ID NO: 266836 - DNA, 412 bp, Zea mays
tttttccgctcttggatcactagctagctctcgctcgtcgcaacaagcgaagagcttggtcgttttggttatggcggtgatgaagagcaggacggtcatcgtcgccgccgttctgttggcggttgtcattctgtcctcgctgtgtccatgctacgaagccggcggctgcatcgggaagccgcccaagacgccggcgccgaaaaggccctgcttctcgccctactccgaggaccactgtgaccgccagaactgccgcttcgtctgcatgtcgcacggttacagtgacggtggctggtgtgacgagagggaggtgcgcaaaatgtgctgctgctaccattagttagaataataacaatagcagcgtgtagtgttgtgtgctggtgcatgtttatggatcatccatctctgtctg

SEQ ID NO: 266837 - DNA, 583 bp, Zea mays
cccacgcgtccgcccacgcgtccgcccacgcgtccggctagcatcgatccgccattgctcaccgcacaagtgcacgctcacctcacacacgcagctaagtagctaacgccgtaggcgagaacaagaaaaggctcgacatggccgaggagaagaagcagggcctgcagctgctggacttctgggtgagcccattcgggcagcgctgccgcatcgcgctggacgagaagggcctggcctacgagtacctggagcaggacctggggaaaaagagcgagctgctcctccgcgccaacccggtgcacaagaagatccccgtgctgctgcacgacggccgccccgtctgcgagtccctcgtcatcgtgcagtacctcgacgaggcgttcccggcggcggcgccggcgctgctccccgccgacccctacgcgcgcgcgcaggcccgcttctgggcggcctacgccgacaaggagctctacgacgccggcacccggctgtggaagctcaagggggacggccaggcgcaggcgcgcgccgagatggtcgagatcctccgcacgctggagggcgcgctcggcgacgggccctt

SEQ ID NO: 266838 - DNA, 478 bp, Zea mays
cggattccgggtcggcgacgcgtctggcagcgcatgcaggtagcaatggcgggggagacgaagaagggcctggtgctgctggacttctgggtgagcccgttcgggcagcgctgccgcatcgcgctggcggagaagggcatcgcctacgagtactcggagcaggagctgctgggcggcgccaagagcgacatcctcctccgctccaacccggtgcacaagaagatccccgtgctcctccacgacggccgccccgtctgcgagtccctcgtcatcctcgagtacctcgaggaggccttcccggaggcctcccccaggctgctccccgacgccgcctacgcgcgcgcgcaggcccgcttctgggcggcctactccgacaaggtctacgaggccggcacgcggctgtggaagctcaggggcgacgcgcgggcgcaggcgcgcgccgagatcgtgcaggtggtccggaacctcgacggcgagc

SEQ ID NO: 266839 - DNA, 533 bp, Zea mays
ctggcgaaccggctggcgctcctccgcgccgccgacaagtacgacatcggcgacctcagggaggcctgccacgagagcctgctggaagacatcgacgcgcgcaacgtgctggagcggctgcagacggcgcacctgtaccggctgccgaggctcaagggcggctgcctgaggttccttgtggacttcaggaaggtgtacgagatgcacgacgacgacctcaacgcgttcctgcagacggccgacagggaactcgtggccgaggtgttccatggcgttctttccgcgtggaacgggcggtaagccgggcgcatgccatggcactgccgctctgctgcaggtgttgcacatctggttggttcagttcgtcacaactcaaaagcgttgtttgcaactggaggattcttgctgggaaagcgtgtaaatatttgcaaactgtacatgcgtgccagtggttggtctaaaatttactgtgcatgccttgattggattttgttcctatgatgtggaaatcagctcatatgctgttcatatcc

SEQ ID NO: 266840 - DNA, 2013 bp, Zea mays
taccacgcgtcctccaaattgtgcagggtaggcagctcgtctcagcgattaccagccgcagacacaagagcaccttgctgtgaacttgtaacaggtttgaacttcgaaggaaaagataattttggtgctgtgattgatttcactgtgaggagtgaaatgaggctaagtattgggcaagtccatcgaaatgttcttgcgctggcatcttctcggtcatgttttgttctgggagatcgtgtttcgttcaggatgctgtcccaaccacgggtagctggatttcatcagactgcttggcgtggtagtcaaattttggaagataacaggggaggaccattgactcttgctagcctagaagtgcaaagcagggttgaatatggaaaaaaggggaaaatggaacgaactggaggtccaaagccaagttcaagagcttcttccctctatgtgaaaccaaaggtttcttcaaatgtcaaaccagcaaagagtgccttgatgaagccagctgggataaagaagacactgaaggtagatgaggctctgttttcggccaagtcatttgaagaacttggtttgccacctttgcttgttgaccagttgaacacggaaggtctgactgccccaactgaggtccaatccgcagcaattcctataatagcacaaaagcatgatgttgtgatccagtcatatactggctcagggaaaactcttgcttatcttcttccaattctttctgatataggccctctgaagaggactatggaacaagaccattctgagaaaagatcaggtatagaagcagtcatcgttgctccttcgagagaattaggaatgcagattgtgcgagaagtggagaagattttgggtcctaatgacaaaagactggtccagcaacttgttggcggactaatcgttccaggcaggaagaagcattgaagaagaacaaaccaatcattgttgtcggaacacctggccgtatttctgaaatttctgcagcaggtaagctacacactcatggctgccgttttcttgtactggatgaagtcgaccagcttctgtcttttaattaccgtgaagatatgcatagaattttggagcatgttggaaggagacctggaggcacatctagggatattcttggcccacttgcgagacgatctgagcgtcagactatcctggtttctgcaacaataccattttcagttatacgagcagcaaggagttggggtcatgatccagttctcattagagctaaaagtgtagttccacttgattcaatcactgtgccaagacctgcgttatcccaaagtgacgctaaccccagttcgtcatcgcagtcagtgaaccaagctgctgttggcagcttgccgccatctttggaacactactattgtacggccaaggcgcagcacaaggttgacacattacggaggtgcatccatgctctggaagcacagacagtgattgcatttatgaacaacaccaagccactgaaggatgttgtgtttaagttggaggcccgtggtatcaaagccactgagctacatggagaccttggaaagcttgcaaggtcgacagttttgaaaaagttcaaggatggtgaattcagagttctcgttacgaatgagctgtctgccagaggactggacgtgccagaatgtgaccttgtggttaatctggaccttccaactgactccacacattatgctcacagagctggaagaactggacgtcttgggcggaaagggatcgtggtcacaatatgcgaagaaagcgagggatttgttgtaagaaaaatgcgcaagcagttagatgtggccatcaagccatgcgagttcactgaaggcgagcttgttgtccccaaggaggaagatgtggaataaaatcttcataatgcacatgactacttctttttacctgtagcgtttttgcaatagtttcgtatttcaaaatgctggcctctggccctttgcttgtactaccgaattttcatactgtcggggttaaagtttttgaatc

SEQ ID NO: 266841 - DNA, 973 bp, Zea mays
cccaatcgtccgcccacgcgtccgggccaacgacaccttcggttgaaggatcccctttctctacctggaggacatccaaatgaggttcatgaaaaactacggcagagtcgcccactctgcgctggcttagcgccgtgaacgatgagttctccagagtgctccatcagcaaatggagttcttctccagcaacccaagcgccgacacactcaaccgtctccgtggagaagtcagcgagatacacaccgtcatggtcgacaacatagagaaaattcttgacagaggcgatcgcatctcgctccttgtcgacaagacatccaccatgcaagacagcgcctttcacttccgcaagcaatccaagaggctccgtagagctctttggatgaagaatgccaagcttctagttgtgttgacagttgtcatagtagtgctgctctacttgatcatttctgctttctgtggaggcctttccttgtcatcatgcagatcatgagtaacacaccagatggctttgcccctcccttaaatggaggggtaggacaccatggaatgatgcctgctgtgttgagcaccggagcttccggaggcaaaaaaaaaagggagatcgatggataccactgtggtttccagtaactgggatcagtttgtacagtggacgagtggagttggccgttgctgtttttgatgtcgccatggttgtgggtgaactcaattcttaaatcgtggtgtgcttagcatctttcttggcgtgtcaaactgtcgttgtgacttgtgagggatgggactagtgagttgggttttgtagagttacttggttatcaatgtgcagacatatatgtatgccgcgatgagtgttagtacatgcctactatggttatcggtgtacgaaagtgtcttagctgctgttgtttgagactgccatggatggatgtggttgtgttttgaaccagctgcccttgtggccatgtgatgaat

SEQ ID NO: 266842 - DNA, 690 bp, Zea mays
  unsure (1)..(690): unsure at all n locations
ggtaagggtaagagaagaaaaaggaaggagagtagacgtacacgacagagagacgaagacagtgtggaggggaggcagggtagcccccgcggcgccgctccgctcgaaatccccaaaaaggcaagatcaaatcaaatcagatctctccacccccagcccatccatggcgatcgtgtacgccctggtcgcgcggggcacggtggtgctggccgagttcgccgccgtctcgggcaacgccggcgccgtggcccgtcggatcctcgagaagctgccgcccgacgccgagtccaggctgtgcttcgcgcaggaccggtacatcttccacgtcctccgatccgacgccgccggcatcaccttcctctgtatggccaacgacaccttcggaagaaggatcccctttctctacctggaggacatccaaatgaggttcatgaaaaactacggcagagtcgcccactctgcgctggcttacgccatgaacgatgagttctccagagtgctccatcagcaaatggagttcttctccagcaacccaagcgccgacacactcaaccgtctccgtggagaagtcagcgagatacacaccgtcatggtcgatcaaaccgagtaaatgtctgttncgtctctctggacgatatccaactctaactccgtactgcagatacacaccgtcatggtcgacaacataga

SEQ ID NO: 266843 - DNA, 495 bp, Zea mays
ccgcactgatacaaaacatatgaattcaacgactgcttattgggcagataactgggatgatattgctttggataagagaggcaaccatccatgttttgatccaagaaaggatctagtgcttccggcatggaaggaacctaacccaggggccatatggttaaaactgtgggcaaggccaaggaacaaccgtacaacacttttttatttcaacggtaatctaggttcagcatacgaaggaggccgtccagaagacacgtatagcatggggattcggcaaaagctagcagctgaatttggttccacaccaaacaagcagggaagccttggacggcagcatgcggccgatgtgacagttacctatttacgaactgagaaatattatgaagaactagcaagctctgttttttgtggtgtcctgccaggggatggctggagtggccgtatggaagatagcatgcttcaaggatgcattcctggaataattcatgatggaat

SEQ ID NO: 266844 - DNA, 1540 bp, Zea mays
cggacgcgtggcgagacgcgtgggcgaaggaataacgagccgaggaaatggccacgcggtcactcacctccgcacttccgctctccagaaccccgcgcgtcccctcgcatcgtccctctctccgccgactccaaaccctaacccgcgcgcttacctcctcgtcccctcaggccatggcgtcgtcccctacccccaagaaggtgctggtcccgatcgcgaatgggacggagccgatggaggcggtcatcaccatcgacgtgctccggcgcgcgggggccgatgtcgccgtcgcttccgtcgagccgggggcgacgtccgtagctgcctcatggggcatcaagcttaccgccgacgcgctcctcgccgacctcgcggacgatgagttcgatctcatctctctaccgggagggatgcctggttcttcgacttttggagagtgcaaagttttggagaaaatggtcaaaaaacatgtagagaagggcaagctttatgctgcaatttgcgctgcaccagcaatgactctaggaacttggggtttgctcaatggcttaaaggcaacatgttatccttcgttcattgataaacttccttcagaggtacatgctgtggaatcaagagtgcagattgatgggaagtgtatgaccagtcgtggaccgggaacagccatggagtattctgttattttggttgagcaactatatggaaaggaaaaagctaaagaagttgctgggccaatggttatgcgtcctcagcatggtgtggaattctctatgaaagaggtgaattcaactagttggaatgttggtgaaacaccaaatattctagtaccaatcgctaatgggacagaggagatggaagcaactatgataattgacattttgcgtagggcgaaagcaaatgttgtggttgcctccttggaagacaagctagagattgttgcatccaggaaggtgaagatgattgctgatgtgctgttggatgatgctcttaaggagcaatatgatctcattctgttacctggaggtctgggtggtgcagaagcatatgcaaaatctgataaactaatggatctgatcaagaagcaagctgaggcaaatagattgtatggagctatatgtgcctcccctgcgattgctcttgaaccacatggcctactaaagggaaagaaagttacatcctatcctgctatgtggaacaaacttgcagaccaaagcgaatgcaacaacagagttattgttgatggtaacctaatcaccagccaaggtcctgggacttctatggaattctcgcttgccatagtggagaaactctttggacgggagagagcccttgagctggccaaatccatggtttttatttgagttgaaatggtacgtgtacgtattaggtttctggagtatgtacttgtgtaaatcgaggcatgctatgttctttttcttgtggaatgtacttcaaatccccttttaaatagaaataagacgaacgcttgtaatgtgtttcatatgcagtaaaaggtttgaggcaaacattaagcgaaaaa

SEQ ID NO: 266845 - DNA, 1021 bp, Zea mays
  unsure (1)..(1021): unsure at all n locations
tgcagcgcccgctcctgccttcccggatttacccactcgatccacgactccgcccactcgtccgggcataaatagtgtgctctatttctcatcaactgtattcagaagtgtgggggtgccctctaaccttgccaacatatgcatggggatttctaatctatcaggatcaattgtagcaatgcttctaatggacaagctaggtagaaaagtgcttctttcagggagttttcttgggatggcttttgcaatggggcttcaggctgttggagcaaaccgtcagtatcttggttctgcatgtgtatatctttcagttggtggcattctgttgtttgtcttgtcattttcactaggagcaggccctgtcccaggacttcttttgcctgagattttccctaataaaatccgagctaaggctatggctctctgcatgtctgtacattggatcgtgaacttctttgttagtttgatgttcttgcgtcttctggagcaacttggtccacagcttctctacacaatattttcgtcagtctgtgtggtagcctcaatatttgtgaggcgccatgtgttggagacgaagggaaagactttacaagagatagaggtttcactcctgcaaccacaataaaggtacatatttgacgtggctggaaccttgggcaggctgtttgctgaacagaaacaagctggccctgcagaagttgattcctgaagtcatcggcaacgccctacaaatggtctcagggaagttccagatatgcgcctgcgacagctagggcggtgtttccatagagcatcatgtactgaagttatgcctgtatcgcccgccctagataggatattttcatacttgtgttgtcatctgttctatctatgagtcgtaatatcagaaaaaaaaggtactactgttttaccgttgatgagcacagttgaaaaaaggaactatcatcttcattttacatgtatgtactcagtaaccatactccgaataataacactgcatggagattccttgttagncggt

SEQ ID NO: 266846 - DNA, 528 bp, Zea mays
  unsure (1)..(528): unsure at all n locations
tcgttcaagtactcagagttgttctatggtcgccacttcaatggtacaagctgttctatatcctttttgttgtgtttatggacttctaataacctgagttcagtctgtctgtgaagtttgttcattacaagttccttttttggtacagttgtttttattggcacaacgctctttgctttacaacagttatccggcataaattctgtgttctatttctcatcaactgtattcagaagtgtgggggtgccctctaaccttgccaacatatgcatggggatttctaatctatcaggatcaattgtagcaatgcttctaatggacaagctaggtagaaaagtgcttctttcagggagttttcttgggatggcttttgcaatggggcttcaggctgttggagcaaaccgtcagtatcttggttctgcatgtgtatatctttcagttggtggcattctggtggttgtctggtcattttcactaggagcanngccctgtccaggacttttttgcctgagattttcctaataaaat

SEQ ID NO: 266847 - DNA, 1056 bp, Zea mays
cggacgcgtgcggacccctgggacaattcgtgcctgcctgccctgcctctcggccacctccctcgtcctccccctcctacgccgcccccgtcctcggcccccacgcgctcgcgcggcgcacgaggcgacgaacccgacctcctcctccgcgcccgtccctgccaccggtcgccgatattggaaggagctcggagggctggggcgctgacctgagttttatggagagaggatgccagagctgcgaacagtactcgccaagcatgcctaaggtcgaagaagcttgaagatctgcagccaggagagccgcctgcgaaaccggtgtcacctgctccgccgagggcaggaaagcgtgctcctacacgtgctgctaggggcagaaagggtgccactgggaaaggagtgccccccgcacctaagactagaagaaagcggggtaatattgtcgacttggaagctgatccagcttgtgaagaccctcctaaagctgtcaagggactggaagttgctgctgctgctgcacccaagaaccttcctttgaaggaggtagccgaggttggtgttctgaaaatgaatggtgtgagtgcagagaagattattggggctgaagatgaatcgacagctacacctgtcccagagagggttcaagtaggtaattctccagagtacataactgacaggaagttaggtaaaggtggttttggtcaggtgtatgttggtcgaagggtttctggtggtgctgctcgcactggtcctgatgcatatgaggttgcattgaaattcgagcatcgtaacagtaaaggatgcaattatggccccccatatgagtggcaagtttataacactctcaatggttgctatggcataccatcggtccactacaagggtcgtcagggcgactactatatacttgtaatggatatgcttggtcccagcctttgggacgtgtggaattcgatggggcaggcgatgactccaaatatggctgcttgcattgctgtagagagcatatcgattcttgagaagctccattctaaagggtttgtgcatggtgatgtg

SEQ ID NO: 266848 - DNA, 421 bp, Zea mays
atctgactggcgaagcatcttgtagaatctgtcaggaaaacttcagcacaactgttaatggtatgccaaacctatgtataaaactgtaccggttgctcctaatttcacttctatgaactgtactaatttgcatcgaagaaagtttggtcccaaacaactcgtgaactcgttttcttattattgggctgatggacaaggcaacgtgaaatttttcatggtacctgggaacagaacttagcctacaaactgcagaaccattcccatttcatcttgtagtcttgtcttgctaataatggactttgtgggctgtctgttccctgtgtaattcatttggccatgacagttcttgatcatgggttggctttgttcgtgtcaaaaaccgcatcacatcaaaattaaaactggatacaacactatacat

SEQ ID NO: 266849 - DNA, 501 bp, Zea mays
cagacgcgtgggcgcgacctcctcccccggcgtacctccggagatccaccccgacccaccaccgcgtgcctcggcaatggccgccgctccgaccaccgtaaccaagtccccgccgtccctggtcccgccggcggggcccacgccaggcggttccctcccgctctcctccatcgacaagactgccgccgtccgcgtctccgtcgacttcatccaggtcttccccgcccctacgtcggggaaggacgactggagcccctcctccacgatcgcggctatgcgcgagggctttgccaaggcgctcgtgccgtactaccccgtcgccggccgcatcgccgagcccgttccgggggagcctgagattgagtgcacaggggaaggggtgtggttcgtggaggccgaggccagctgctccctcgaggaggcgcggaacctcgagcgcccgctgtgcatcgccaaggaggagctgctcccgcgtccgccggacgatgtgcgcgtggagga

SEQ ID NO: 266850 - DNA, 303 bp, Zea mays
aattaagctggacaccgctcccgcaccaaaccaaatcacctgttcccgcgacctcctccccggcgtacctccagtctccagagatccacacgaccacaccgacccaccaccatctgcatcggcaatggacgccgcgccacccaccataaccaagtccccgccgtccctggttccaccagcggggcccactcccggtggttccctcccgctctcctccatcgacaagaccgccgccgtccgtgtctccgtcgacttcatccaggtcttccccgcccctacgtcggggaaggaggactggagccc

SEQ ID NO: 266851 - DNA, 1498 bp, Zea mays
cttgtcgccggctgcctcgctccatttctgatgcggtaatccccactcccgaggccaaaccctaaacctaaacctctcaccccgcccccccgccgccccatcccagcgcaaccgacttccgcctcggattgaagcaatgtcgtcggacgacgaggtcagggaggagaaggagctcgacctctcctccaacgatgtcgtcaccaagtacaagactgccgccgaaatcctcaacaacgctctgaagatggttgtgtctcagtgcaagccaaaagtcaagattgttgacctttgcgagaagggtgactctttcataagagagcaaactgggaatgtttacaagaatgcaaagaggaagattgaaaggggcattgctttcccaacctgtgtatccgtcaatgacacagtttgccacttctcaccgcttgcaaccgatgatgccgttctggaagaaaatgacatggttaaaattgatatgggctgtcatattgatggctttattgctgtggtggcacatacacatgtaattgcaaatgggcctgtcacaggaagggctggtgatgtgcttgctgctgccaacacagcagcagaagtcgcaatgcggcttgtgagacctgggaagaaaaataaggatgttactgaagcaattcagaaagttgctgctgcttatgattgcaaaattgtggaaggtgttcttagccatcaactgaaacaatttgtgattgatggtaacaaagttgtgctcagtgtctccaatgctgatacaaaggttgatgatgctgaatttgaagaaaatgaagtatatgcaatcgatattgtcaccagcactggggaggggaagcccaagttattggatgagaaacagaccaccatctacaaaagggccgtagacaagaattatcacttgaagatgaaagcgtcaaggtttattttcagtgagatcagccagaagttcccaatcatgccttttactgctagggcattagaagagaagcgtgcgcgtttaggcttggtggaatgcatgaaccatgaactattgcagccgtaccctgtacttcatgagaagccaggcgatcttgttgcacacataaagttcactgtgctgctgatgcccaatggatcagataagataacatcacatcctctacaggagttaaagcccaccaaatccattgaagacaatgcagagataaaggcatggcttgctttggggacgaaatcaaagaagaagggtggtgggaagaagaagaaaggcaagaaaggagatgcagcagaagcagatcccatggaggaggcgacaaacggtgctacaagccaagaataattctgatttttggaattactgccaccagcttttttcttgtttcttcgctgcatctgatggtgttatattacattcagttgtggaaaaattgagtactatttctagcttctaagaaatgaagcatcctattatcgcatccaatggcacaaagataatcgacaaggcatgcccagtgtt

SEQ ID NO: 266852 - DNA, 460 bp, Zea mays
tcgacccattcctcggtcgatttctaattctcctcgcgagcccaaaccctaaacctaaacctttcacccgccgccgccgccaccaccagcactgccactccgccaccaccgtcccgaagccccctcccagcgccatcgacttcatctcggattgaagcaatgtcgtcggacgatgaggtcagggaggagaaggagctcgacctctcctccaacgacgttgtcaccaagtacaaggctgccgccgaaatcctcaacaacgctctgaagattgttgtgtctcagtgcaagccaaaagtcaagattgttgacctttgcgagaagggcgactctttcataagagagcaaactgggaatgtttacaagaacgcaaagaggaagattgaaaggggtattgctttcccaacctgtgtatccgtatgcacagtgcatttacgtgcacggagcgctgagaatgctggta

SEQ ID NO: 266853 - DNA, 557 bp, Zea mays
cggttttcccccctcccgagtccaaacgctaaacctaaacctctcacccggcgccgccgccgccgccgccaccgccgccgccccgaggccccatcccagcgaaaccgacttccgcctcggattgaagcaatgtcgtcggacgacgaggtcagggaggagaaggagctcgacctctcctccaacgatgtcgtcaccaagtacaagactgccgccgaaatcctgaacaacgctctgaagctggttgtgtctgagtgcaagccaaaagcaaagattgttgacctttgtgagaagggtgactctttcataagagagcaaactgggaatgtctacaagaatgcaaagaggaagattgaaaggggcattgctttcccaacctgtgtttcggtgaacaacacagtctggccctttctcccgcttaccacaaatgatgcaattcttgaagaaaatgacatggttaaaattgacatggggtgtcatattgatggctttattgctgtggtggcacatacacatgtaattgcaaatgggcctgtcacaggaagagcagctgatgttct

SEQ ID NO: 266854 - DNA, 339 bp, Zea mays
gacaatgctgagataaaggcatggcttgctttggggccgaaatcaaagaagaagggtggtggaaagaagaagaaaggcaagaaaggagatgcagcatgagatcccatggaggcgacaaacgatgctacaagccaagaataattctgatttttggaattactgcacccagcattttctctcttgtttcttcgctgcatctgatggtgttatattacattcagttgcgaaaaaatgaatacttttttctagtgtctaagaaacgaagcatcctgttgcacattatcgcatccaatggcacaaagataattatctaaaaaaaaaaacaaagtgtggttctct

SEQ ID NO: 266855 - DNA, 469 bp, Zea mays
aataccggcccgacccacgcgtcctatcagccgatgatttgcggataattccttggaatttggaaatcagcaatcaaggggtcggtgttattgatgttaagcctacaaacatggaagatctcactgaggtgataacatctgctgaattccatcctactcattgcaatacattggcgtatagtagctctaagggctccattcgacttgttgatctgcggcaatcagccctttgcgacaatcattcccaaatctttgagcagcatgaggccccaggttcaagatcatttttcactgagattatagcttcaatttcggacataaaattttcgaaggatgggaggcatattctcagtcgtgactacatgactctgaagctttgggatgttaagatgaattctggtcctgttgcaacattccaggttcatgagtatctaaggcctaagttatgtgatttatatgaaaatgactc

SEQ ID NO: 266856 - DNA, 1020 bp, Zea mays
cccacgcgtccgaaagatacgacggggaaggtgactgcagtaatactcaaagatggtaggcaccgtcctgctgacatggtagtagctggtattggcatccgtgcaaacactagcctgggtgaaggtcaactgatgatgtcaacagagaatggcgggataaaggtaaatggacagctgccgacaagcgacagctctgtgtatgccggtggcgatgtggccgctgctccccatcaagctttttgacgatgatatccgacggctcgagcatgtggactcagctcgtagaactggtagacatgctgttgcctccatcttggatccttcaaagaccagggacatcgattacctgccgttcttctactccagagtgttcacgttgtcctggcaattctatggggataatgtcggggaagtggtccactttggagacttcacaagcagcagtccgaggttcggtgcatattgggtcaacaaagggcggatcgcgggtgcgtttcttgaaggcggaagtcgggaagagtacgaggccatatcgatcgtgttcggcgggaagctgtggtcacagacatgggtgaactcgagaaacaaggcctggcactcgccattcaggagagccagaaggaggtgcctgacagtgggcttgctgttgtcggaaaacctacttatgcgtggcatgccacagctggtgtcgttgcagctgtgtcgatcgctgcaattgggtattggtatggcaggaagcgccgcaggtggtgaggatttgcattggggtgattccctttggtctgccgggccgaactgctgctggcggaatatctgggacgagtgctattggctgttaatccaagcatagttgtatagcgtgtatgagagtatagtctgtcgcaaacgtatactgaaacacagatgcctcgtgtattatctagtgaagaaaccagtggctgcctctaactcctcaggggttctcttgttgtaaaattgcaactcttttcttaatgagatccgcaattttgtggccctgcc

SEQ ID NO: 266857 - DNA, 1821 bp, Zea mays
  unsure (1)..(1821): unsure at all n locations
attcccggtgcggcgcccgtggggcccaccacggcgccgccggcagcgtcaccaacccccacccccacctccgccctcccaccggcactcccctcgcctgctccacgacgcttatgcgctcgcgtcccgctctcgccgcccacctccggcgcctgctcctcctctctccctccgcccacctcatcatcatccgccgcgccatggcctccgccgccgccgcgcaggcgcagccaggtggcgccccgccggcgaccgcggagtacgaggaggtgctggggcggctctcctcgctcatcacgcagaaggtgcgcgcgaacagcgccaaccgcggcaaccagtgggacctcatggagcactacgtcaagattctggagctggaggagtcgatcgcgcggatgaaagtgattcacgtcgcggggaccaaggggaagggttccacatgcacattcaccgagtcaatcctgcgatcgtgtggcttccatactgggctgttcacctcaccacatttgatggatgttagagagcgatttcagctagatggggttaatatttctgaagagaaatttttgaagtacttctggtggtgctggaacaagttgaaggagaagactgatgatgatattcccatgccagcctatttcaggttcctcgcgctgctcgcattcaagatattttctgctgagcaggtagatgttgctgttctcgaggttggcctaggagggaagtttgatgcaactaatgtggttaaagcacctgtagtttgtggcatatcttcccttggatatgatcatatggaaattcttgggaatacacttggagaaatcgcaggagagaaggctgggattttcaagaaaggagttccggcctatactgctccacaaccagaagaggcaatgactgctctcaaacaaagagcttcggaattgggtatctctctccaagtcgttgatcctctggagccccatcacctaaaagatcagcatcttgggctgcatggagaacatcaatatataaatgctggccttgcagttgctttggctagtacgtggcttgagaagcagggacataaagatacgttaccactcaatcgtactgatcccttaccagatcattttattagagggctatcaagtgcttctttgcaaggccgagcacagattgttccagattcacaagtgaattcagaagagaaggacaaagattgttctcttgttttttatttggatggagcgcacagtcctgaaagcatggaagtatgtggcaagtggttttcccatgtcacaaaggatgatacaaggctaccatcttctgtggagcagtctcatacatctaggtctcaaaagatccttctgttcaactgcatgtctgtgagagatccgatgagattgcttccttgtctcctggatgcatcaactcaaaatggagtccactttgacctggccctatttgtgccgaaccaatcacaacacacgaagcttggttctaacacttcagcaccagcggagcctgagcaaatcgatttgtcatggcagctgtcacttcaaacagtgtgggagaagttacttcaggataaaggtataaatactacaaaatccagcgacactagtaaagtttttgattcgcttccggtcgcaatcgagtggctaaggagaaatgcccgagaaaaccaatctacttctttccaggtgctggttactggctccctgcttttcgtggnggatgtcttgagaataatcaagaggtgatacgccgctcgaatccagactgggactggactatgatctatggtctctcccaggcttacatgattagcaaggggag

SEQ ID NO: 266858 - DNA, 940 bp, Zea mays
agcgccacagacctccctcccagtggtcgattctttgcttgtagctagctgtaccagcctctctctctccgtctcttgtgttgaaggggagacagagaagggtaggcgacacgccatggaaccgacaaggctgctgcttcttctcctcgttctcggcgtgtcgctgcaaggatgcattgcgcagggcggcggcggcgccggagggctcacgcgggggagcttccccaagggattcgtcttcggcaccgcctcctccgcttaccagtacgagggagcggtgaaggaggacggcagagggaaaaccatctgggacaagttcgcgcacacgtttgggaaggttgcagacctgagtaacgccgatgtcgcggtcgatcagtaccaccggttcgaggaggatatacagctcatggcggacatggggatggacgcgtaccgcttttcgattgcctggtcgaggattctgcccaatggtaccggccaagtcaaccaggccggcgtcgaccactacaacaggtttatcgatgcactgctatcgaaagggattgagccatacgtgaccctgtaccactgggacctcccccaggcctctggaagacaggtacaacggatggctggacaggcagatagtgtacgacttcgccgagtacgccgagacatgcttcgaggccttcggagaccgcgtgaggcactggggcgcgctcgccgggccgcacacggtcgccgtccagggctacgacgccgggctccaggcgccgggccgctgctccctgctgctccacctctactgcaggtcgggggactcggccaccgagccctacgtcgtcgcccacaacttcatcctggcacacgccaaggtctccgacgtgtacaggaaaaagtacaaggcggctcagaacggagagcttgggataagcgtcgacgtcatgtggttcgagccgat

SEQ ID NO: 266859 - DNA, 748 bp, Zea mays
gacgagctcggattcggccacgtgcaaacggccggcggcggacccctgctccccgaggaactcattatctgggagatcctaacccgtctgccggcgagccctcctccgatgccgcgctgtctgcctctcctggtgccgccgactcacctccgacgccaaattcctcctcgcccaccaccgtcgccagccctcgctcccgctcctcactgaaggggacaggagcaccgaggagaggaggatcgacgccctggactaccgcaccggcgagcggcgccccatcgcgcggacaacaggccggaccgccgccaacggggacgacctgaacgtgctggcttcctgcgaaggcctcctcatcctcctcgccaacggcggcctccagatctgcaacccggcgacccgccagcgcgcgccactcactcttctccacggcgcctattgcatctccgcgctttatcctcacatcccgtccaggtcgtaccgtgtgtcgggtgctctgctgcttcgagagagccgaggacaggccacgccgtgtaccacgtgcacaccgtcgggtcgcgcgagctcaggtgcgtcggagaacctcccgcgctgtgggcgtccgcagacgtgacgatggcgatgccgattatgttgtgctttcgcccgcacgtcgtggcaggcagcaggatctactggcagccggtaaagctgaccggcggcaacgggaagaaaaagcaccactgctcgcgcttcgtatacagctgaccga

SEQ ID NO: 266860 - DNA, 757 bp, Zea mays
  unsure (1)..(757): unsure at all n locations
accggnctcggattcccgggtcgacgcacgcgtccggggggatagagcacttggcctcgccttcccttgcgtgtttaccgacgccaccggccgccggtatatcttcacccaactccgtccctctctcccggcccagatagatctttcccccgtcctccctcgccttcgccttcgcccgccggcaggagatttccaccaccaccgccggaccgccccgaccctcctcccctctcgcgctatggcccagactgttgtgctcaaggttggcatgtcctgtgagggctgtgttggagctgtcaagcgggtcctgggcaagatggaaggcgtcgagtcctacgacgtagacatcatggaacagaaggtcaccgtgaagggcaatgtgacacctgacgccgtcctgcaaactgtttccaagactggcaagaagacttcgttctgggaggctgaggccgtgacaagtgaatccgccacacctgccggtgccaccgcctgacaggttcgatgatctggaagtgcccagcaaggcggcaaaaaaaaaaatgtgaatgtatttagcttggatctgttacaaataattgcaaactgctagctcggtctgtacattttacagttgctatttgtatactgtgatgttctcgtatgtttgtggaggcgataaaccaatatttgtatgatatatgtgtcgtgttccataaggtaaggttttgacggtgtgctatcatcacctgaggtgactttagcatcaccaggctacttc

SEQ ID NO: 266861 - DNA, 587 bp, Zea mays
ggctcaaataaggttagaaggagtttacatatggccttttagacaacttcgcatggtagcaaacagtggtgcagatggtgaaccactccaggaagaggattatttcttgtcaaatccataccatttattgcggattttctcctctcaagtgtttcaagaatcttctgaagagaagaaccgaaggaagaattctctcacatatgacatggagaaacattgcaacacagaaatagctgctaaggtggttcgtgtgtcatctaacccaaatgatggagaacacgagaagtaccgtttggagggtttgatggagagtccagccgtcgatgatgatggggaatgcttctctcctatcttattgaatgcaacttctttgaatgttgaagtttattacaacaaagcagtcaactacacactgatggtcacttttatctctttccttcaagttttgctgctgattagacaaatggagcatagcaacacacaatctggagctgctaaggtttctattttaatgattggccaacaagctatcatggatgcatatctctgtctacttcacctgactgctgggatattggttgagtcac

SEQ ID NO: 266862 - DNA, 943 bp, Zea mays
cccaagcgtccagcacggcagtcctccgtttcctcctcgtcgctcgccccggttgtctcctcctcgacctcccccgtcgcgacaccgcccgatctctctagcgcacggcgggccggagaagaggaggagggggggacgatctcattcatcggaccggcgtgcctgtgtcgtctgctgttttcgtttttttctttactcttttttttccctcctttgcttgttcaattcaatcagtatattaagatttctgatttgggggcggctcgccatgggattcggaatggggaataataacaacggggcgagctcctcgtcgtcgcggctggaccccgcggcgccgctgctgccgcgccacggcagcagcgggggccgcgagggtggtggcctgtcgtcgcagcccaagacgttcgccaacgtcttcatcgcggtggtcggcgccggcgtgctggggctgccgtacaccttctcgcgcaccgggtgggcggcggggtcgctgctgctcttctccgtcgccgcgctcaccttctactgcatgatgctgctcgttgcgtgccgacgccgcctcgccgacgagcaccctaagatcgcctcgttcggggacctgggggacgccgtgttcggcgcgcacgggcggttcgccgtggacgtgatgctggtgctcagccaattcagcttctgcgtcggctacctcatcttcatctccaacaccatggcgcacctctatccgattaccgccgcggcctcgtcctcctccgcgctcctctcccccaaggcgctcgtcatctgggcgatgctgcctttccagctggggctcaactccatcaagacgctgacgctgctcgcgccgctcagcatcttcgccgacgtcgtcgacctcggcgccatgggcgtggtcctcggccaggacgtcgccgtctggctcgccaagcccgtgcccgtggtc

SEQ ID NO: 266863 - DNA, 633 bp, Zea mays
cacaaacccctcgcttactgcacctttgcagcaccgctctctcgatcgaatcccaaggaacgaagacgacgacgatggcgtcgtctgcctgcttgctccaagcttccacggccttcgctccacgcttctccctcccgtcccgaccccagcccccgctacacctgcgtctccgcggctcccccaaccgtcgccgtggcatctcactcactgcttcctccgccgcgtccccggaagtcgagaaagagtcctcgccctcgtcctcgccgcaggaatctctgtctgctgtcgcggacagtgtgaaggtgctcaaggtggcagccaagacgaggaaagtacctgccccggaaattctctcggcgctgtccaagatcaagaaggcaaaactcgacacgtcggcattctttgagacactcggtggtaccgagtctccaggcaggacctggatgcttatcttcactgcaaacggtccgctggagaaagggcactatttcccagtgacagcagtccaacgcttcgatgctgccggggaacgcatcgagaatggcatatatttggggcccatcgggtgcttgaccttcgaatggaggctgtcattgaaaaagaaaatactcgcgttcgtcttcaagcgggttc

SEQ ID NO: 266864 - DNA, 263 bp, Zea mays
ctcgagccgttttcttgaaagtatcatttagccattaatgccatcgcttcataattgcttgcaagtttcatggttctttacaaggttcccctgttacgcaactagtgaaaacatttcttttatgtgggtttagcgtaggctgtcgcggacagtgtgaaggtgctcaaggtggcagccaagacgaggaaagtacctgctccggaaattctctcggcgctgtccaagatcaagaaggcaaaactcgacacgtcggcgttctttga

SEQ ID NO: 266865 - DNA, 825 bp, Zea mays
ataatctttgttggattaagtatagtttctggtgatagaaccaataaggatgtttgtagctagctgcaattcacgccccccgcgacgggcgacgctaattaagtagagctgcaacacctgggttggaggctagagcttgcaaacaccaccagcgaaaacgtcgtggccagccatcccggtgtcgtcccgcgttctacagccaccgctgtcgtcgccgtcctagactcctagatccgtcagcttaacgagctccattccttcgaggccagccatcccggtgtctcagcagcggcggcggcggcgtcgagctcttgctttctgtgggaggacgcatggcgatgtctgcggggcgtgggctcttggtcctcttcttctctgccgccgtagtggctgagctcgcctctgccgcgaacggtcctttcctgtccgatagcgtcttccagtcgagcgccggatctacagggaggagcttgctgcaggccaagaatagttgccctgtgaactttgagttccaaaactacacaatcatcacaagcaagtgcaaaggaccgaagtttccagccagccaatgctgtgccgcactcaaggattcgcgtgcccttttaacaattacctcaatgacgagagcaatgaatgtgcatcgacaatgttcagctacatcaacctctatggcaagtatccaccaggtctgttttccagcgagtgcaaagaaggcaagatggggctttcttgcgcagatgtcccccggaaggacagttccactgcaaacagtggttatcgcgcccaaagcagcttgcttgcgttgattactgtcttgagcgtggt

SEQ ID NO: 266866 - DNA, 615 bp, Zea mays
aggagccacccaaggagaagcccccgccacctaaggaggagccgcccaaggagaagccacccccgcccaaggaggagccgcccaaggagaagcccgccccggcaccgcccaaggaggagaagcccgccccgccgccgcccaaggtggtggaggtcccctacccgtggccgtacccgtacccgtaccctgcgtggccgtccgactgctgctgccaccacggccacggcgggtgccactgctgctcctgcggcaaggcccccgagccggccccggcccccgccccggccccacccccgccgcagtacttcccgcagtacatgccccagccgtacccctgcaacccctgcggcggcggctaccggatcgtctgcgaggaggacccctcctacgcctgcgccatcatgtgattcgtttattatcaatatcatcccttgatgagtgtaccgtccgtgtgcgtaccatggccttaattaccattatacccaaccccaccctaaaaaaaaccccagtacgtcgtctcatcatcattccgtacctcctcctgtataatcgccgtacagattcatcatatatatactctatacatatatagcatcatgtatacaccggcgtacc

SEQ ID NO: 266867 - DNA, 477 bp, Zea mays
  unsure (1)..(477): unsure at all n locations
ggaagataaatttacctcgcagcatcaactcatgaacggttgcgaattggttcataaacgcgagggttcgtctatggaagccgttgatcgaggagatgtaccaggacctcaagaggagctcgggtgcaggaggaggagggcacggcccggcgatggagccacagcagcacttgagcaagcgtcgaatttgcgagctggaagatggtggccagtgaaccatccagctccatagctgcctgccgtggatttaccattggcccttgtagtttccctgtgctatgtttatgtacatatcattgccaacgccagcatttaacatctgcgcatcttttatcctgggttgactgggaagggccaagagcagcggcggcggatactgctggatcagggttctggatgctctattcgtccgctcagcattccgatggttgcccgtttcagatatagcggatttcatgctntggttctggtcatgtc

SEQ ID NO: 266868 - DNA, 615 bp, Zea mays
gtctgctgagtcttattcagttccaaagggcctcaagatactcgagaatttggccgatgcatctagtctaatcactgggcttgagcatgaattgccagttccttgggcaaaacttaagcgagttttctggttcgatggctttggtaacgatgagtcagccaccgagcaggctctcttgcagaagttcttcgcgagtattgccatcaagattttgtcggaacagctgtccggcctgcaggtcatcctgatcatgaaaaacacgagatacattcagttgcaggtggaaagattggcgcgggagtgcttctttttcctcagcgaatcgtttctgtctgatgaagcaaatctaggatggttctcagatacctccacgcacacaagaaggatgcaagtggcagcaccggtgacctacgtcttcaacctgcaccctccctcctctactcagtttggggattatccggcggaacttcgggaggctttacgcagggattagttaggccaggttatccacgtgaatagctagtgtcatctggatttcgtagcagtgaaccttgttcgtggtattggcactgaagccctttctgtctgtgagttgtgagcttgcttactcgttct

SEQ ID NO: 266869 - DNA, 1259 bp, Zea mays
cgcactcactctccagtgccgctcccgtccctcgtcacgctcacgcagcacgctgtcgtcttgcggctctcgcccgtctccccacggagccccgaaaccaaagccgagccgagagcccgagccccgaccagcccgacctcatcttctcctcgtcggcttcacccctccaccacctccatggggtcgtcggaggccgacgaggaccagctcctcaagagcttcctcgcggaggtcagcgaggccgagcgggacaacgaagtgctcaggatacttggttgcttcaagttaaaccccttcgagcatcttaagttgtcttttgattcatcaccagatgaggtgaaaaagcaatataggaagttgtcattgctggtccatcctgataaatgcaagcatcctcaggcacaagaagcttttgcagctctggcgaaagcacaacagctcctgcttgatccacaggaaagaggctacattcttgaccaagttactgctgcaaaagaagaattgagggcaaagcggaaaaaggagctgaagaaagacagtgcgtccaagataaaatctcttgtagatgagggaaaatatgaagagcagtttgaacgatcggatggatttcagcagcaattaataattaaagtacgtgaaattttgaccgacaaagaatggcgtaggagaaaaatgcaaatgaggatatcagaggaagaaggaagacttaagaaggatgaggaggaaacaaaagagatgtggaagaggaagagagagcatgaagagaagtgggaggagaccagagacaagcgggtctccagctggagggatttcatgaagacaggaaagaagggacggaaaggtgaaatcaaacccccaaaactgaagactgaagatccgaacaaatcttacgtgcaaaggccagtaaagcgaaactgagtggaatgtcagcaatcaaagaacatccggtagcggcctttcatctcaccagattagagctgcaacccttcaatgttgtacttgtcctgaatgtggtaaggttgaattacgcccgctgggaaacagaacggaacagagcagattttacccgtattgctagctagagtgatttggtttgatgtactcatcatccgtctgaagattttactgggaaaaaaagtacaaacttttccgttggaaaagaacctaatgaagtgaatgttgacaggccgtctctttactgcttcaaaaaaaaaaaagacaaatgaaggaacgaaaaaaccaaacgaagcgagggagag

SEQ ID NO: 266870 - DNA, 1612 bp, Zea mays
gctgttcacgggtttgaagcgaaaattcgcccaaaccaggccggcgacggacgcctcctcgttctccacgccgccgccgccgccgccgccgcgttggctaggttgacctgaccgatcttgacttctctaggctcttgcatccccgacgccggaaatagcctccgagtttccaacagggtggctccggtcgaccacgaagcctcgatctgcatgacgaggctactcgtcatcctgttcgccggggcgaccctagtagtcgccaccaccgcgcacgagcaccatggtgaggcgcccacctgcgccggaggcagcgagcacgtgcttgcggagttccgccccggtgaggtgaccgtggacgggcacaacgaggactgggagagcgtggaggcctcggagttcgcgctgctgccggctctagatccagacgatgataaggcctactccggcggcaagatcgccgtaaaggctgtgcatgatggcgtcaacgtcttcttcttgcttcaggttgatggggcttacgcttacactaaaggggaaagtaacaaatgcccttctgttgctctgatgttccaagttggagagaaagccacattttacaatatgggaggatgcaaagatatgccaggttcatgcacaagtaaaagttgtagaggtcatgaggttgacattatgcacttctcaattggaaatgctatccctggacgactttacgggggcaatcacatagacaatgcagctgggaatggaaacgacagatttggtcaccttgttgatgtctatgcatggaatccacattgccgatacctcgatggagtgggccctaaagagaacaattcaaatgctcaaaatgattggcatggggcttggtggcacagttcattgaccttccattcaggctttgttgatgacgataatccttatggacaacaagatgagaagggtacatattattttgagttttcaagacccttaagaacaatggatcaatttcagcaggatgcacaattcacaataggacgtcccagcaatatgtccgtagccttgtggtacccagacgatggcaaagcatggagcaactccgatcattactcagccagctgcaactggttggttttggatatacaaccttcgtccgaagctacgtattaccgtccagctcctaatcgctcttgggatgctgcaactggctttgctttacttctttcagtggtagccatttgcatgtccatctttgtgggctaccgattttctaggaacaggagcactgcccagtttacaccacttgaacagatccagtttgctgaagaacgccattgattggaattgagattaggcgaagcatcaagcaacaatgtttcatctgttccaccattgtacctccaaagttgacagattgctgcattgaagttttgaaccgggttgttgtgatccagtatagggagatattgaaagcatacacgatacataatttaattacagactgccggtttttatcgtaggaaacaatttctatatgctatacatcaaaccggttattggcggctcatgactttgacgattgtttcattggttgcagaatatttgaatatatataccttcggttcgaatgctg

SEQ ID NO: 266871 - DNA, 897 bp, Zea mays
  unsure (1)..(897): unsure at all n locations
cccacgcgtccgcccacgcgtccggggtagagggctagggttcagagcacgacgagcgataacttcaacaagcagcgggcgggtctcgggcggcgcgcgggcgcttggtggacgacgctcaagcggaggcgggcagcgcttgggagtcaggcgtgcgaccttgcggctgtgctcaggcggggcgttgcgtgaagcgctagggagtcgggtgtgcgacgggcggcgctcgttcctcaggcatgtgcggacgacgctcagacgcatggctgtgtcgaccacttgcagacgacgccgacacagatccaggtccaggtccaggttaagtattgttttttggtgtgtggacgtgattcttctagtgagatatgttctgaagcggcaaggtaaaccctcttagtctacttgtttaacttttaaaatatacccatcggtttgaatgatgcaaaactacaataatcttcatgtacttgattgactaatgagttggatatgattcgtattctatttcttaaaaaagtaaggcagaagatagctagattcatgatttggccaatacaacctcaaattaacttgcctattcatcgattatgttcaggaaataatgtatcaattaattgaaggaagtaatagtagtggctcatctagaactcattcgattcctagttctaactatgaccactaacttttgccttgctagctggctatgtacaagcctgcaacacattcttatgataccatcatgtcattaaatgtcaagggctgagtatccccggacagcagggcctcgactacgcagttcgtaatcgtgacccatcttctnncgcgagattatgcccctcaancacaagttttgttggtgaagtgagaggagagattagagagaataaactttgctta

SEQ ID NO: 266872 - DNA, 615 bp, Zea mays
ggccttcttgatacaatggtgaagctgacaatgatagctcgtgtcactgacggccttccactggcagaagggttggatgatgggcgagatctgaaggatgctgatttctataagcagcaagctaaacttcttttcaagaacttggcaaaagggcatcatgaagcttcacggatgtcaattgagacagggccctactatttccactacattattgagggcagagtatgttatctgactatgtgtgaccgctcttatccgaagaaacttgcattccagtacctagaagatctgaaaaatgaatttgagagggtcaatggcaaccaaattgaaactgctgcaaggccatatgcttttatcaagtttgatacattcatccagaagactaggaaactgtatttggatacaagaactcaaaggaacctcgcaaaactgaatgatgaactctatgaggtgcatcaaattatgactcgcaatgttcaagaggttcttggtgttggtgaaaagctagaccaggtcagtgaaatgtcaagcaggttgacttctgatacaagaatatacgcagataaggctaaggacctcaaccggcaggcgttgattcggaagtatgctcctgtc

SEQ ID NO: 266873 - DNA, 460 bp, Zea mays
gtttagattcttgttcacgcgttcaaagatgcgtggggaaaacaacatagtcctccttctcctcctcctgtttgctgtaatttctccgaaccaagtaattggtagtgcttgtactccggaacagaaggctgccatcctaaatcaatgcgaagagtacatcaagcctggatacccccttatactgccatcgtacgccagtgtgtgttgcgacaaggtgagagatgtgccaaatagggacatgaactgcatcgtcgatctgctcacgcctccagagaaggcgaaacacggtgtcgacaagataaaacgtctgaaagatctctgcgacaacttcgcctcatcatcaggtggtggtgtagacagacagcagctgtcattgctaatggaagttcggaggcaagatatatggtctaagtaaataaagtcgtcgatcaaagcatgacaactgtcaaatgtatctttg

SEQ ID NO: 266874 - DNA, 430 bp, Zea mays
cccacgcgtccgcccacgcgtccgcccacgcgtccgcccgcccgtcccggccgcccctcaactcgccggagctgccgcttgggcacgcggcgcggctggccaagaaggccgagtgccgggccatcttcatcttcggcgccgaggagaggtcgctccacaacatccgtgacctcgtcgaggctgcgcgacacacgcttgggctgctcaaccgtggccgcctcccgtagagaggaacgaggaatctatctgtaagatttggttctggtgcgtgccgatgaatggctaaattggtctgttctagtataagctactatcaatatactgtacacttgctaattaaaagaaagaagttttatgtatgaaaaaaaaaaccaaaaaaaaaaaaaaaaaaaagggcggccgcccgggaattcggacggtacgtgcggcg

SEQ ID NO: 266875 - DNA, 572 bp, Zea mays
gccggtgcggcgaggtgaccacggcggcggaagaatggcgaaaggcagcgggctgatctgggcgacggcggaggatctggcgcggaataggccggtggtgctgtcgctgtacaggcagattctgcgggccctcgactcgccggagctgccgcttgggcacgcggcgcggctggccaagaaggccgagtgccgggccatcttcatcttcggcgccgaggagaggtcgctccacaacatccgtgacctcgtcgaggctgcgcgacacacgcttgggctgcgcagccgtggccgcctcccgtagagaggaacgaggaatctatctgtaagatttggttctggtgcgtgccgatgaatggctaaattgatctgttctagtataagctactatcaatatactgtacacttgctaattaaaagaaagaagttttatgtatgaatgaactgcaacttgagtcattgaaaagttgttgctggtcttctttagtttgagttaggggatgcgtcatgcgtggttttgaaggtgttctgcttgcaatattacatcataatctgtgactgatgcactgatgtct

SEQ ID NO: 266876 - DNA, 754 bp, Zea mays
  unsure (1)..(754): unsure at all n locations
acccacgcgtccgttctatttcaatacaatgatggttgtgctaactgtctatgcatttgtatgggggcgcgttttaccttgcactcagtgggcttgaggactacatcaacaagaacacttcctcttccaataatgcagccctgggagctgttctcaatcagcagttcgtcatacagctaggcctgttcacagctttacccatgattattgaaaattcacttgagcacgggttcctcactgctgtgtgggatttcatgaaaatgcagctacagtttgcatctgttttctacacattctccatgggaacaaagacacactattatgggaggacaatccttcacggaggagcgaaatatcgagccactggcagaggttttgttgtggagcataagaagtttgctgaaaactataggctctatgctcgcagccatttcatcaaagctatagaacttggtgttatattaactctttatgcatcttatggcagtgcatctgggaatacattggtgtatattctgctgacactttcaagttggtttcttgtgtcatcatggattcttgctccattcatttttaatccctctggttttgactggctgaagaattttaatgactttgaggattttctaaactggatatggttccggngtgggatctcagttcagtcagatcaaagctgggagaagtggtgggaggatgaaactgatcatctccggacgacaggtctatggggctgcatcttgaaatcatatta

SEQ ID NO: 266877 - DNA, 1289 bp, Zea mays
aatggttccggctgaatcagaagctggttctacttcggtgatttgaggcggttaccacttaccaagcaatctaaaatagcattcccatcaaatattccagaattgaagtacataataatctgccgtgacaatctactcagtgcctatgcttgtgttggttctaacactacgatgacagtgcaataaccaaacattccctttctaccaagaagccaacccataaaagagacctcaccagataagctacgacagcattttaacatcgtttgaagtaggaacctcacccagattcattgaaccaccagctctgtcatcttatccttgcaacgtgaagtgacgttcttggcgaccccagcaatctcctcgatttggatgtccacgagctcattgagctgttgctcctgcgtcctgagatcctctggctgctgctcaacaacgcttcctgttagttccagaggcactgccaaggatctcccccttcatgaggtcatatatgcaggccctgaagttgtccatgctcttatgatcctgagagtcgaggcttaggaagatcagaatttcccagcaccggaggaactgtttcttctttatcttcagcttctaacgaacagtctccatcaggtcagccggtggaaccattctcaaactttgggccctttttgacaggttggtctccttcagagacgagacaatagcaccaagtgcaggtttgatcggatcaaacatgagcaaacggaggcagtcaacggatgatctcacatactgcaggtcaagaagcggaaggcgcgggtgcctctcgacgtcgccgacgccgtgatggagccagtacggcggtccggccggctcgccaacctcccggataagcccgtgtaccgcgagaaggttcccgattttgggatgaagattaggaggacgtacggatcggtgagaagagatctgaccaaccgggtgtacgcgaccgacgaggcgaggagctacgccatctctaaggcggaggatctggagcaagagctggactccagcttccccgtcttcatcaagcccatgacccagtcccatgtcaccggaggcttctggctgggcctcccaaatcatttctgccggaagtacctgcccaagcgtgacgagacgatcaccctgctggatgaggatgacaacgagtcctacacgctatacctcgcattgaagcgaggcctcagcgctggatggagagggttcgctatccagcacaagctggttgatggagattgcttggtcttccagctgactgagagaacaaagttcaaggg

SEQ ID NO: 266878 - DNA, 559 bp, Zea mays
ctcaactgcaggatctgattcatatgagccatcatgcttaatggcactaccatttgtcactgcagttctgatatattcacattccttcgaaaatgtatgcaggaattcctctttttctaccaagttttctccaaaaatgttctgaagaacaggctttagatctgttattcctttccctccatcagatgtttcgtcaaatgaaacatcagcatatccatggaaagatttcgcacttatccacacatttatcttaagatttttgtaaccatatatttttccatcttcaccaaaaaaatggtttaggtcaaatggctgaatagcagtcgcggtctacagagcccacctcgcctggattccatactagaaacactttcatacactcatttgcctcaacaccagcatcggtgtcggagaagaagacgcggcggcgcttcttggtaccggtgtcggtggcggcggcgtcggtgcccttctgcttgagcgccatgggggaggggaggacggcgcgtctgcctggggtcgttagcgagctagggttttgggattttgggagtagaag

SEQ ID NO: 266879 - DNA, 888 bp, Zea mays
accaagcaatctaaaatagcatttccatcaaatattccagaattgaagtatataataatctgtcgggacaatctactcagtgcctatgccgtgacattccctttctaccaagaagccaactcgtaaaagagacctcaccagataagctacgacaacattttaacatcgtttgaagtaggaacctcacccagattcattgaaccgccagctctgccatcttatccttgccacgtgaagtgacgttcttggcgaccccatcaatctcctcgatttggatgtccacgagctcattgagctgttgctcctgcgtcctgagatcctctggctgctgctaaacagtttgttcatccacatccccaatctcatgtgtccaatacacagcaaaagatgcctccttattgaaactggttggcatctgcaacagacgcttcctgttagttccagaggcactgccaaggatctcccccttcatgaggtcatatatgcaggccctgaagttgtccatgctcttatgatcctgagagtcgaggcttaggaagatcagaatttcccagcaccggaggaactgtttcttctttatcttcagcttctaacgaacagtctccatcaggtcagccggtggaaccattctcaaactttggtgccccttttgacaggtaggtctactttagagacgagacatatctcaccaagttcacgtgtgatcagcttaatcattaccgatcagattcagtctacctatgatcttatatactactggataatatcctacattggtgtgtacctttacacgtttatttctactattgttttgctgtctgtctgattgcttattattgtgtttatctatattaaaatgggcgcttcttgtattgtttttatactttt

SEQ ID NO: 266880 - DNA, 542 bp, Zea mays
cttccattccgttcgcctttgaaaactacccacaccacaaagaaatcgaagaggggaacagacgagagagaagggagatggcggaggcgacggcgtacgaggagcagcgccggaggcaggtggaggcgaacaagcggaagctggaggagcttcagctccactacctctccgccgccgtcagagaggccgcagccgccgccaagccctcgccggtcaagaagcggaaggcgcgggtgccgcttgacgccgccgactccgtgatggagccactacggcggtccggccggctcgccaacctccccgataagcccgtgcaccgcgaggaggttcccgcttttgggaggaagattaggaggacgtacggatcagtgagaaaagatctggaaaaccgggtgtacgcgaccgacgatgcgaggagctacgccatctctaaagcggaagatctggagcaagaactggacttcagcttccccatcttcatcaagcccatgacccagtcccatgtcaccgggggcttctggctgggccttccgattcatttc

SEQ ID NO: 266881 - DNA, 968 bp, Zea mays
aatttcccagcaccggaggaactgtttcttgtttatcttcagcttctgacggacagtctccatcaggtcagctggtggaaccattctcaaactttgggccctttttgacaggttggtctccttcagagacgagacaatagcaccgagtgcaggtttgatcggatcaaacatgagcaaacggaggcagtcaatggatgatcgcacatactgcaggtaatcagaagggctttctattgtaacatcgtaaatgttctcagactgtgcaatataattgattgcttcaagaagaccaagaccatggccttcaccctgataaggtggcaacacaagtatctggctgattcgtaagcgaatactctcaggataatgatagaagttatgcacagatgcaaaacctagcagttcaaattttgaaccagcctcatgtgttgccttttttactaccagaagcatttcccatccatgttctccaatatatataggcgtggaaccttcaaccagaagaagtacaagaggtaccagacgagaataaaagaaatgcagcagcaccttggagttcaactcgaacaatctcaactgcaggatctgattcatatgagccatcatgcttaatggcactaccatttgtcactgcagttctgatatattcacattccttcgaaaatgtatgcaggaattcctctttttctaccaagttttctacaaaaatgttcgagtcagatactgcttcaattcctctttttctggaggaggcccggccactgtagcccctgcttgatgtcaaagttgatgacgtggacgcggtcatggctggctgctagaacatcattcatggcttcctgctcctccggttggatggtgatgtccaccttgtctgacttttgattcttaagtagatccaccagccaccaaattttggtgacaaaatttgttatagttaatggtgagagtagttccggacgagtggg

SEQ ID NO: 266882 - DNA, 453 bp, Zea mays
ttctgaggcttggcttcatggtacacaaggtgctagccgccccttggactgggacgccaggatgaggatagcacttgatgctgccaggggattagcatacctccatgaggattcgcagccttgcgtaatccacagggatttcaaagcatctaatatattgcttgagaatgatttccatgctaaagtgtccgattttggtctggcaaaacaggcgccggaaggtcggacgaactatctttctactcgtgttatgggaactttcgggtatgttgcaccggagtacgccatgacaggacacttgcttgtaaaaagtgatgtatatagctatggagttcgtctacttgaactactaactgggaggaggcccgttgataattgtcacagccctctgggcaggaaaacctagtgacttgggcacggccaattctccgagaccaagatagattaggagag

SEQ ID NO: 266883 - DNA, 371 bp, Zea mays
cccacgcgtccgcccacgcgtccgccctcgcgtccgcactgaggctatatccactatccagcaaagaaggcaaaatgcaaaatagggtatcgcacggcactttagcacaatggcatgtctctaatagggtatgcattaggaggtaaaatgcatatgagaggggatatgcaaaatacagtattgatttgcatatgcatgatctgttggaggaatctatactatatgttttttttgtgaaattgaaagaaaagaaactaccgatctgaatttattaactagcatgatgcggatcaaccgaagacttaggctgctgcaaaagttatagtctatggcgggaagctatatgcaggagggtggttccggttccctcc

SEQ ID NO: 266884 - DNA, 1060 bp, Zea mays
actgaatcgggtcagatcgggccatcggggaggcgagggagctcacgcggcgccatggacgaggaggagcacgaggtttacggccaggaaatcccggaggacggcgacatggacggcgctgacgttgatatggctgcctccggggatgacgcggcgaactgcaggagctcgacgagatgaagcgcaggctgaaggagatggaggaggaagccgccgccctccgcgatatgcaggccaaggtcgccaaggagatgcaaggaggtgaccctagtgcatctacagctgaggcaaaggagcaggtggatgcccggtctgtgtatgttggaaatgtggattatgcttgcaccccagaagaagtgcaacagcatttccaagcttgtggaactgtcaacagggtcacaatcttgactgacaagtttggacagccaaaaggttttgcttatgttgaatttctggaacaggaaggtgttcaggaagctcttaacttgaatgaatctgaattgcatggtcgccagattaaggtcgccccaaagaggactaatgttcctgggatgaagcagcgtccaccacgtgggtataatccataccatggctacccttatagatcatacggggcaccgtatttccccccatatggttatgggagggctcctagattccgccgccctatgcgctacagaccttacttctgaagtacggggtagggtaatgaagttcaatgcaaaaccagcccatggtcactggtcagtcccgggaataatcaactgtatcgtttgcactgttgcggctcaatgctcctgtatcagctgccttttctgacctttgtttcaagtgccgccataagcgacggacatgttgtattggcttgtaatacaggacgtagtaagtgcacacactttctgtaagcgtgctttcccacttcccagggttactactgtttgcaatttctgtagttctttgggtcggtcggttaggacatgggagtggatcgttctatgcccatttgaggtagattagttatatgaagagaaagcttcgcatgcggggctgtcttgtttgc

SEQ ID NO: 266885 - DNA, 309 bp, Zea mays
ctttcctcaccaaacccacacctgcctcaactaatcgggtcagatcaggtcatcgggaaggccgccatggacgacgaggagcacgaggtttacggccaggagatccctgaggacggcgatatggacggcgctgacgttgatatggccgccgccggggacgacgcggcgaacttcaggagcttgacgagatgaagcgcaagctgaaggagatggaggaggaggccgccgccctccgcgatatgcaggccaaggtcgccaaggagatgcaaggaggtgaccctagtatatctacagccgaggcgaaggagc

SEQ ID NO: 266886 - DNA, 1075 bp, Zea mays
gcagagttgcagttgcagaccgtccaaaacctggtggcctagtggcgatcggcggccggagcagctaaatctaccggcccggcggctgaatcgaccggcgcagcgaccaaatctacggccagcgggcgggaggtggtcccctggaggccggatcggcaagtggggacttgggggcgtcgggctgctggtggggtttcgctggaggctgccgtcgtggagcaccggccaccggggctggcaggcgggcatcagcgatggagtaaagggtgcagcacgacagcacgccagcggccagcagggggcaccgggcaggtgggcagcagcaggggacaggctgcaagcagaaatggacattaaaggtcttgaggcagataaactggagtgcaggctctatgtagggaacctagacttcaggatgtcagagtccgatgtaatcaagatgttttccccttttggaaagattacagccgaggattttctgtggcacacacgcggtccaaagagaggcgaaccccggggctatgcctttgttcagtacaccactaaagaggaagctcagttagcaaaggagaagatgaatggaaagttaatctgcggacgcccaatggtagttcaccttgctagtgagagaagttctctaggctcttcaagttcacatagagcagtcaaagacaagaaattggcaggtggttcaggtgccaaatcacaatatactgatacagctgcaaagatagctgctataaaaaataagttgaaatctctggaggatgggggatgtagcacaaaaaaaccaagacttaatccagacaacttgacagaaatcagggaacagtctcataagaagttttgaagcgaggattttttttcgttctctggaacattgagtgcttttgccctctcatactggtgacacttctaaagctgctgctattctataattctagcctccagttagtcaagtgagtcacaagtgtagtgtttccacagtgtatcaaatatgtacaatagtttgtaccgatcatctttttcctgaatgaattgcccttttgttgggggaatataaaaaaaagaaaaa

SEQ ID NO: 266887 - DNA, 458 bp, Zea mays
attccgttccgagagccaaaaactccactgctttcatcaactccggcgacttggagaagacgaagttccagaatccgatcggaagtttggtgctcgcgccttgacggattgatttcggtgcgccgatggggcaggcgttccgcaagctgttcgatgccttcttcggcaccagcgagatgagggttgtgatgcttggtctggatgccgccggtaaaaccaccatattgtacaagctgcatatcggggaggttttgtcgactgttcccacgattggtttcaacgtcgagaaagttcaatacaagaatgtgatgtttactgtgtgggatgttggtggccaagaaaagttgaggcccttgtggaagcactacttcaacaatactgatggcttgatctacgtagttgattcgttggatcgggagagaattggaaagccaaagcttgattcaggcaataatcaa

SEQ ID NO: 266888 - DNA, 1550 bp, Zea mays
cggtctcggattcccgggtcgacgcacgcgtccgcccacgcgtccgtcttcttgtatggaagggtttatctggcactctctggccttgactactcaatatctcgccaagctaggtttttggggaacactgcactagatgcagctttgaatgctcaatttttggtccagattggtatttttacagcagtgccgatgataatgggtttcattctggagctgggcctgatgaaggctgtttttagttttattacaatgcagctccagttctgttcggtgtttttcaccttttcgcttggaacaaggacacattactttggtagaacaatccttcatggcggtgcaaagtatcgtgctactggaagaggttttgttgttcggcacataaagtttgctgaaaattataggctctattctcgaagtcactttgtcaaagcgcttgaggttgctctcctcctgatcgtttacattgcatatggatacacaaaaggcggttcatcttcatttattctgattactatcagtagttggttcctcgttatgtcctggcttttcgcgccttacattttcaacccttctggtttcgagtggcaaaagactgttgaggactttgatgactggacaaactggttactttataaaggtggagttggtgtaaagggcgacaacagttgggaatcttggtgggatgaggagcaggcgcatatccagacattcagaggacgtattcttgagacaatcctcagccttagatttctcatgtttcagtatggcattgtgtacaagcttaaaattacagatcataatacttctcttgcagtttacggcttctcatggattgtactctttgttatggttcttcttttcaagctttttactgcaactcctaggaagtcgacagccttgccgacttttgttaggtttctgcagggcgtccttgctattgggataattgcaggaattgcccttcttatcgtgctcacatcattcactgttgctgatttatttgcaagtgcacttgcttttatagcaaccggctggtgtgtcttgtgtctggccgtaacatggaagagggtagtgaaagtccttgggctatgggattcagtccgtgagattgcaaggatgtacgatgcaggaatgggagccatcatctttgtgcccatcgtcgtcttctcatggttccccttcgtgtcaacattccagtcacgtttcctcttcaatcaagcgtttagtcgaggtctggagatctccctcatccttgcagggaacaaggcgaatcagcagatttgaaaggccctgccgcatccatcgtatttttctgttgtatattctgggaattactgagagctgcttagttagtttgaacaatttaatgagctcgatttgaatgacaaccttctacataattgcccctgtaatttgtacactaattatgcggagaggcagctacggcagtagagatgagctgatgtatgtcgatttgatcttaaccaaacctctctttaaggctacgacggttcagtaggcccgcactagtatgttgcacccatccc

SEQ ID NO: 266889 - DNA, 428 bp, Zea mays
agcagagggcgaagtgcagcgcagtgtgccccgtctcggaacagcgcggaccaccagagcgtgcgcgtccgtgccccacccctccctctctatccatggcggtcccccgcgggtgcctcgggctccccctggtcgccgtgctcctcgcgtccctctgccgcggccaggcggcggtgagggagctcaaggtcgggtactacgccgagacgtgcccggaggccgaggacatcgtccgtgagaccatggcgcgcgcgcgcgcacgcgaggcccgcagcgtcgcctccgtcatgcgcctccagttccacgactgcttcgtcaacgggtgcgacggctcggtgctgatggacgccacgccgacgatgcccggcgagaaggatgcgctctccaacatcaactccctgcgctcgttcgaggtcgtcgacgagatc

SEQ ID NO: 266890 - DNA, 484 bp, Zea mays
gctatagatcactcactcacatacattccaatatgaataatatgagtgatagagccttggtggtacttatgttgcttctatctgtattattcgttgcgcaatgcggtcgtcctcatgatgatgaagttgttggaaccgcaaggggccgccgagctgcttttagcctcaccgagaatggatattgtgacacggagcaccaaaactgtaaagtggtctactgctgctcgcatccacagccaaagcattgctatgccacttttatgcagtgtcgggccaattgctacgttcataaacgcaagtgatccatatctgatgctgtggttctaaaaacatcatcattgttagcttaaacaatgtactttacaatggttggtaatataataatatggggaagtcgttctatggttaaaaaaaaaaaaaaaaaaaaaaaaaaacaaaaaaaaaaaaaaaaatttaaaaaaaataaaaaaaaaaacaaaatatt

SEQ ID NO: 266891 - DNA, 1601 bp, Zea mays
gcgggaaccaccaccgtggacatcacgcccgagtgcgctggcatgctggagaaactcgggctcgcgcaagcgcaggagtgcttcttcgagaaggtcataagtggagggaagccaccagcgctgtgctccaaagtggcgcggcaagtgggcatattctatgaagaagcatatgcagctctcagtgcacctcctctaagtcagcactttgataagacatgggtgtcccatgtcctgctgaaagctgctcaattctatgccgatgcttgctataggtattcattagatcttcatcagaaagaagaaattgctgaggaaattgcacgtttgaagattggtatgagtgccttggcagatgctaagaaggctgcgaagggagttgctgcccagcttctggattccgtcaacaagctggaaagtaacatgaaaaccaacttggaaagggctatgaaggagaatgatcgtgtttacctgatgcgggttcccgctgctggttccttgggtgccctccctgcagcgtcccttgtaaagcctacctctttggctgaagttttagatgccagtaaggaaaggcttttttcatcacttgtgcctgatggcagcatgaaagcactttctaaatacacagagatggtagataatattatccggacccaggcagagaaattgcagcaagctagtgagatcactagagttaggtcgaaggaaatggacttaccagattctattctttcattggaaggaaatataaccttgcccttggatctaaaggaagacgtagaggctgtgcagataagtggtggccctgctggtttggaatctgagttgcagcagcttagggatttgagcagggtcaatcaggaactacttgttcagactgaagagcttctacagaaggaggcgaatgaagacgctcagtttcgtacacaatttgggagtcgttggactagacctcaatcaagcaccctaactaagaacattcaggatagattgaatctgtttgcttctaatctgaagaaagctgctgatagtgattctctgattgaacgaggcgtgaaggagaactatcccttgatgtctatccttgacaaaagaccgatagagtctgcacttccaagtatttccaggcctatcatgtccttggatgggaatgaagatgccattgttggagccctgaaacaaagcttgagacaactggaatctcttggagcgcatagggcaggtcttgaagacatgctcaaagaaatgaaaagaaaggatgatatactgcctaagttgatggctggcgtgggatcacatgatgatcttttcaagaaggagattgctaagtatgatcctatctgtgctgatattgctgataacattgtggcacaggaacaattgttgctacaaatacaggtaagcaggcatacctctctgtgttaaatttgcgtaaagttctatcaacaacaaagtgtattaaaactgagtagcagtgtcgttgttttgcaattgagacagtgttgagaaaaagaagaaacagcaggagaagtgtttataagagcccaatgccctatattttgccatgtactttcgtcttgtgtctaacacttagatactggatc

SEQ ID NO: 266892 - DNA, 842 bp, Zea mays
cggcgacctcccgacgcgtgctcacctcctcttcggatcgtggatccgctgctgcgcggcgggaataatcaattccgagtgaaataaattacatatagccatctagaagagagtcctttctaggtgagtaggtgtcctcttacgcgtgggtgagagaacccactaggagccacagccacctcacagtctgttctcctgttggatcgggaggagcagagccgacgcgacgggatcaagatttgtatttgaacccggacgacgggaggagtacgaggcccagtcatggaggaggagaagcaagtgatggagggtgccgctacggcggcgaggcggcggctggtgatcggggtggggttctgggtgcagggcttccggctcttcccgtggctgggcgtcaatttcttcctcaaggacggcatgggcgttgctgcctcctcgctgcagatcctccaggcctccgccaatctgcccatggtcgccaagccgctcattggcgtcctctcggatgccgtccccatacgcggccatcgccgcctgccctacgtcgccatcggcgctctcttgcaggcaatttcatggctagcaattgcactttggcaagatatctctcttcaagttcttaccatttttctcctcttgagcaactttggtgcttccatatgtgaggttgccaatgatgccattgtagcggagtctgggaagaaagcggcctcttcctcaggatcaggtcagcttcaatcgtttgcttggatgttcggctcttctgctggtgctttaggaaacctcctaggtggcattgctctcagctatttttctcccaaagtcatgtttctgtttttcgc

SEQ ID NO: 266893 - DNA, 539 bp, Zea mays
ccgacgcgtccgcccacgcgtccgcgctcgagggttcggtttcgtggtcttcgctgaggccactgtcgccgagcgcgtgaccatcgaaaaacacatgatcgacggccgaatggtggaggccaagaaggctgttcccagggatgaccacagtattgtgagcaagagcaacacaagcagcatagggtcacctgggccgggccgtaccagaaagatctttgttggaggtctgccctcaaatgttacagaggctgacttcagggggtattttgagcagttcggtgtcataactgatgtggttgtgatgtatgatcacaacacacagagaccgaggggctttggattcatcacctatgattcagaagatgctgtggacaaagccctgcacaagagctttcatgagctaaatggtacaatggttgaggtcaagaaggctgttccaaaggagcagtctcctggacctgttgcacgctcacctgcaggagtggggcagaactatgctatgaacagggttcatagcttcttgaatgacttcaaccaag

SEQ ID NO: 266894 - DNA, 433 bp, Zea mays
cacctctctcccccttccatcacctcgctagtaccaggtcaccgtgtgtgtgcgcgccatggggattcatctgccgccgcctgccctcgccttctgcctctcggcgcccactcggttctagtggccgcttcgaggaggcgctcgcgcgcatcgaggagctccaggagcgcgacactggcgccgacgatagcagcacagcctcgtcgttcttgagcgacggagaggcggcgtcgcggccagcaggcgagcagcagtcgcactccgcagatttcttgagcgacggagaggcggcgtccggtggcattcagagacgtgcgtgacggtcggaggtcgtcgagcgcgtgtaagcttgttgaccattttcagcatgtgtaaattggcggttagatttcgttcaagaactagatagcatccaagacaaatagcgttggtc

SEQ ID NO: 266895 - DNA, 1244 bp, Zea mays
  unsure (1)..(1244): unsure at all n locations
cccactcgtccgcggacgcgtgggtggcaccgtcgcagctgcttggcagcaccgatctctggcggcccgttgccgccgcgcgcgggggcggctgggccacggccgccgtgctcctcctcctccttgcctctcacctcgcagtcctcctcgtccgcctccgccgccgcctccgcggcggaggccgaaacgcccatccggaggccgccgtggcacccgcgcctgcctccacgccccctggttccgcttccgcctcaggaatagagggattagtgacggagggcgatctgaggcagctggtaggcagtctgggcttgggcgcgcacgaaccaaagagggagggctgggagcacgtcatctccaagagcagcgacgacgtctcctacaaggcctggtgcgacaaccccacggctggccctcctaaatatctgagtattacaacatacgagaactgctcggcagagcagctgagggacttctacatggataatgagtacagaatggagtgggataacactgtcaaaaaacatgagcagctgcagtatgacgagaacagtggggtggaggtagggcgaacaattaagaagtttccacttctaacaccaagagagtacatattggcatggcgagtctgggaagcaaacgacaagtctttctattgctttatcaaggaatgtgaacaccctcttgcggcacgacagagaaagtttgttagagtgcaacttctaagatcaggatggtgtattaggaaaatcccaggcagggatgcatgccaaatcacggtgctgcatcatgaggacaatggaatgaatatagagatggcaaagctagctttttccaagggcatctggagctacatatgtaaaatgaacaatgctctacgtcggtatcctcagcatggcagtccatcagtgtcaattctgaccatgcagaaacttatgaagaagtttccccaggatttggagactgccgacgcaagcctttctgcttctcagaacactgcagcatcggtcgttccttccacaccgacttccaggacttcaccatgcaagcttgaggggaggaagtctcgccaaatgatcgcgagcgggattctgctggttggaagcatcgcttgtctatctcgaggccgatccaacctcggggcgcagctcgcgatggccttcttcctgaaaaaggccttcaagcaagagaggcaatcaagctcctcatcgacatgaatggtgnaaacatacgtgactagatgc

SEQ ID NO: 266896 - DNA, 2047 bp, Zea mays
gtaaaatatgtcaagaatgtagcacatatttgttcagtatcggatatggggctgcagctgtttcgcaagcatctatcactatccccagagattgaacacaaaactgtaactggccttctcagattgattgagagtgagaggcttggtgaagcaatagataggacattacttagtcatcttttgaagatgcttaccgctcttggaatgtattctgagagttttgaaaagccctttcttgagtgcacttctgaattttatgctacggaaggtgttaaatatatgcaacaatctgatattccagactacctgaagcatgtagagtcgaggttgcaagaagaacatgaaaggtgcattctgtatttggaagctaacacgaggaacgccactgatcgcaactactgaaacgcaattgctagaacgtcatacatctgcaattattgagaaggggttcgctatgctcatggatgcaaatcgtataaatgacctcttgaggatgtacaaccttttccagagggttaatgctgttgagctgctaaaacaagcacttagttcatatatccgggctacaggccagggcattattatggatgaagaaaaggacagagagttagttccatttcttcttgattttaaggcatccctcgacaaaatattggaagaaagttttgctaagaatgaggctttctccaataccatgaaagattcgtttgagcaccttatcaatctaagacagaaccgtcctgcggaattgattgcaaagtttcttgatgagaaacttcgagctggcaataaagggacatcagaagaagagctggagggcatacttgataaagttttggtcatgtttcggtttatacaaggtaaagatgtatttgaggcattctacaagaaagatctagctaagaggttgctgcttgggaagagcgcatcaatagatgctgaaaaatcgatgatcacaaaactcaaaactgagtgtggaagtcagtttaccaataagctggagggaatgttcaaggacattgaattatccaaagaaataaacgattcattcaggcaatcatctcaagctaggacaaagcttccctcaggcattgaaatgagtgttcatgtgcttacaacaggctattggcctacatatccaccaatggacgtgaaactcccacacgaactgaatgtgtatcaggatatatttaaagagttctatttgagcaagtacagtggaaggcgtttaatgtggcagaattctttgggacactgtgtcttgaaagcagactttcccaaaggcaaaaaggaactcgcggtgtcattgtttcagagtgtggttttgatgttgttcaatgacgcacaaaaattaagcttccttgacatcaaagattccactggtatcgaggataaagaattgagacggacactgcaatctcttgcatgtggtaaagttcgggttctccaaaagataccaaaagggagagatgtagaagataaggatgactttgtattcaatgaagattttagtgctcccctctatcgcataaaggtaaatgcaattcaaatgaaggagacggtagaagaaaacacgagcaccactgagagagtgttccaggatcggcagtatcaggttgatgcggccatagttcgaataatgaagacgcggaaggtcctgagccacacccttctaataaccgagctttaccagcagcttaagttccctgttaagccagctgatatcaagaaaagaatagagagcttaatagaccgggagtacctggagcgggacaggagtaacccccagatctacaactatctggcttgacagagctttggaggatcattaaagagaccgctcactttattatcagaaaagacactgtaaattggtttgttttccagttccttgttctttcctgtttttcttctctgggagggagttgtaactgttgcaacgtgtctgtatacgagaacgtttttttttcagtatcagtataaaatgtataagcataatgcatgtatctgtttacattacatgtatgcttgtcagttcgtgtcgtct

SEQ ID NO: 266897 - DNA, 1025 bp, Zea mays
gagatctctcgtttctcgatctgatctcgcctcggtatggcgtgagagttcctaggggagggcaaaatcctcggagttgagattcttgcgtccatttgctagtctcaataccgagcatccgatctcgaacagtgagacaaagtagcgacctttgtgccgttccttgtaactgagcttgcccccgcctgcgtatcggtgggtgacggcgagctctacggcgctgcccattcctatgaatggacgggagggagtccacggtggcgtcggggcccaacttctcgtcgttctacacgcagcaccggggcatcggggcgccgggtgtccccggccactcggcggtgctccatgacccgccgcccgccgggtaccggcagcatcttgatgctgtctctgctgggtacgcattccagaccccgcaggttgggggttcccacattggacaggggtaccaccatgtcgaggcctcaccccatgtggcgcaatacagctccggtggcggcaccagctccggcggtgatatggacattggcatgggttcggctgtgtgcaccaatgttaagggggagctggggagcgggcctgcccaagatgagcaggtgaagaagaagcggggtaggccaaggaagtataagcctgatggggcggtgactctcgggttatcaccctcttcatcattaacacctcactcggccagcttggggatgggaaccatgattagtgctccaggttctggatttgggtcggggggatcaggggcttcaggcttgggtgcgccatcagagaagcgtggcaaggggcggccacctggctctggaaagatgcaacagttggcttcgcttggaaagtggtttcttggctctgttggaactggttttactcctcatgtgattattattcagccaggagaggacgttgctgcgagaataatggccttctcacagcaaggcccaagggcagtgtgcatcatttcagcaactggagctatttctacagcaacccttcaccaggattcagactctggtggt

SEQ ID NO: 266898 - DNA, 562 bp, Zea mays
cccaggggtacttctgcacatttcaacacctggggcctttcatccgcagttgaatactcctggactttcagaactgcctcatgccttatctagttcaattgatagtaatggaagtgaagtttctgcttttctcgctgatctaaatgctgtttcttcagcctcagctttgtgttccacattccaaaatgcttcttcattcatggaaccagtaaatctagaagctttcagttttcaaggggcacaaagtgattctgttttgaacaaaacaacccatccaaatgggaatatctcagtatttgacagtgctgccttggcatcactacatgatagcaaagagtttatcagtggtaggctcccctcatttgctagtgtccaggaaacaaacgtagctgctagtggtttcaagactcagaagcaggagcaaaatgcagtgtgcaacgttcctatccctacgttcactgcacttaatcaaattgcagttgctgcaatgcccggatcactgatccctcaaaagattccttcatggatcaatgaaaacaaaagtgagggtcctgttagccat

SEQ ID NO: 266899 - DNA, 1963 bp, Zea mays
gcttgctggggaggtcgtatttggtgccagttttctgaaaagactaatcgaacagtccatagatgatcctgaagcaacaaaggaccaagtattcccccttacactttagtttttttatatacctcctgctcagattcaatcttgttcggtttgaagactaaccccggattaacagtgctactgttatacgtgttcctccgggaaacaaatagaagtctgaaacatgttataaagtccgaagcattcaagcagcaagctgacttgcgtgagaataagccttttgtgttcatttgcatggcatgccaaatattacatcccacataactgggctctgctctctattttaacatgggctaaactgttgctcataatattgaattttcacatctgtccttataacagatcgagaatttagagcgtgaaatccagcaaaagaggagacatatgcgagccctggaaaaacaaatcatggaaagtggcgaggcatcagttgctaatgcatccatgatggatatgcagcagactatcacgaaactaacagcgcagtgcagtgagaaggctttcgacttagagttaaagtcagctgataatcgtgtactccaggagcagctacatcagaagaatttggaaatctacgatttacaagaaaaagctcttcgcgttgagcaacaactctcagcagaagtggatatatcccctgagcaggaaactgattgtgcacagcaggaggctattgatttgaaatctaaacttcagtccaaggaagctgaattcgaaaagctgaaattcgagcatctgaaaattactgaggaacagtgcgacttgatcaatcaaaaccataaattaagtgaggaagctgcatatgcaaaagaattggcatcttcggctgctgttgaactcaagaatttggctgaagaagttacaaagctatctgtactaaatgtgaagcaagcaaaggagttactagttgctcaggagatggcacattcaagggttcatggtagaaagggtcgtacagccagtaggggtagggacgaggttgggacatggagcctcgatttggaggacatgaaaatggagctacaggccagaagacagagggaggctgctttggaagctgctttggcagagaaggagcttctcgaagaagagtacaagaaaaagtttgacgaggcaaagaaaaaggaactatctctggagaatgatctagcaggcatgtgggttcttgttgctaagttgaaaagaggagctttaggcatatctgatttgaatgttgacgaccgaactgttaacctagctgatataactaacagcacaaaggagaacaaaggtggaaagaattttgctctagttgagaagcaagcttcacaagattctgtgaagtcgctgagctcagaagagcatacaagtccggagtttgaaccacttcttggtcgtctgaaggcttacattcaggagatgaaggaaaaggacattgatcccctgaccgataaagatgggaactcacatgtctgcaaagtttgtttcgaatctgcagccgctgcagtattgcttccttgccggcatttctgcttgtgcaagccttgctcgcttgcctgctcggagtgccctctgtgccgcacaagaatcgcagacaggataatcaccttcacgtgagctgcgttctagcttcaggtcattctgaagcacacatcctcttgtaaaatcttcaatggtatatgtttctctttttccttagcaaagaaggtgccttttatgttccttctgtgttgtatcgccattctttgggttccccttcccctatatagcttcacgccttcaccttacgttctttgttgtatcgaggagttacaaatgatgacttctcgctctgcaaatatgtatagatacgcaactcgacgctgtaacacattttgattctctactcctgaagaaaagcagcgaacgacatgatgacgtgtgt

SEQ ID NO: 266900 - DNA, 522 bp, Zea mays
ctatgaaaatgtacttttgtgaaattcctgtacaattcctgcattccaatggggtctcatcgtttgcaactccttgataaagaacgtaaggtgaagctatatagccatataggggaacccaaagaatggcgatacaacacagaaggaacataaaaggcaccttctttgctaaggaaaaaaagagaaacatataccaccgaccattttacaagagtgcgccatgcttcagaatggcctgtcagagatacacagcacatcattaggtacatttcagagggatagcgttggcatgagcaccaacatgcaagcatctaagtgtttggcacctgaagctagcacgccgttcatgtgaacgtgattatcctgtctgctattcttgggcggcacagagggcactctgaacaggcaagcgagcaaggcttgcacaagcaaaaatgccggcaaggaagcaatactgcagcggttgcagattcgaagcaaactttgcagacatgtgagctcccatctttacccacacgtaag

SEQ ID NO: 266901 - DNA, 819 bp, Zea mays
tgttttcgtcagctatctacctgagcgtggagtgagtatgacaatcaactaaatgtttgcttactcgtcattcctttgaaatgtatcttggcaaccttattcattctactagggaagggatgacatggatttttctcgttcgagcatcaggttttgcgcgttgattatggcgtgctcgttggtgagactgcgacgtcctcgttcaagtcagctgctaatcgtgtcctccaggagcaactactacagaagaatgtggaaatcaacgatttataagaaaaagtttttcacgttgagcaataactctcagcaaaagtggatatatcctctgagaaggaagctgattgtgcacatcaggagactattgatttgaaatctaaacttcagtccaaggaagctaaaattgaaaagatgaaatatgagcatctggcgagggaggctgctttggtagagaaggatcttcttgaagaggagtacaagaaaaagtttgatgaggcaaacaaggaactatctcttgagaatgatctagcaagcatgtgggttcttgttgctaagttgaaaagaggggctttagacacatctgatttgaatgttgatgatcgaactaaagtgtaagggcgtagagatcgccacactgttgtctcataattggtgttaataaaaaataacatggtgctgcacggaatctctactttgtcttgtaagcaggattgttctgtcggtataatttcatttgtatgtataatgtcttcatgctttaaaaaaaaaaaaaaaaaaaaaactcgagttttttttttttttttttttttttttttttttttt

SEQ ID NO: 266902 - DNA, 613 bp, Zea mays
cccacgcgttcgcttttcgctcggtgctccgtttgagctcaaatttttacagcagattcctgactcctttctggggtgacccaaacttgattaggtacctgggagaggaccatcaaggacttgggaaaggccaaggtgttgaggaggagcagcaagggcgtccacaacaggaaggagatcatgtcccagtcgcctgcgactctatctcgggttccaggaccagtctgcactaaaatagacgcccaagatgcatccggactccgattgcgacggactggatatggttggaaagataacgagattatctaaccaacccaactggttccaccctaaaattcatccggagtcaacgggaatcgtcgaaacaagtcagcgttcagattctgttttggtgctgcgacaccgtctgttgggccgttgggccgtgtatcgcgtcggagcccattaggggcgagtccaggggtcacgcacgccctaatactctatttattcagcagcccccgccacatttaggtttgggttttgcttagatcaattctgtcatcgaacagtgtcgccgtcatcggcttgtgagaccccatctcgtaagcaaaacaattttggttgcgtttcc

SEQ ID NO: 266903 - DNA, 2489 bp, Zea mays
cggacgcgtgggcggcggaccgccgatggaaaactttggaggctcctaacttccaagataccaactagctcccagcctcccaccgtcttctttccacccttggctgatgctagggagatgggatttttggagctctaagacaaatagttctgctccttgcgccctgcgtgttcttgatctggcctctaagtttgttggctgttttctcgtgtttgaggtgatatctcgattctaaaaagctaccagatttcttctccctgtttgtatggacaaatttgggaatgaaccctagtctgtgtgcaaagcagccaaattggtgttcttgcggatcaaagctaaagctgcagcagttggtgaggatacaagagatgcagggagaaacaggagaagggcttgttagattctgcagggacactcttattggttgatattttttccatcaactccggccagatttgcggatcctcgcaattttaggagccatttgatcttggacatggagaagcatcccagcgtgcgacatggtgccctagagagactgaagagcttccgggggatggagaagcagagaagcttcaagttcttgtccatggagaagcagcagagcttcaaaaggaacaaggacagccctgggaagcggggtgacaccgcgctccacctcgcggcgagagctggcagtgtcgcacatgtccagaggatccttgcggagtgtgatccagagctgctggtggagttagctgcccgcccgaaccaggacggcgagactgcgttgtatgtgtctgctgagaaggggcatgtcgaggttgtgtgtgagattttgaaggcttcggatgtgcagtcagccgggctcaaggccagtaacagcttcgacgcattccatattgcggcaaagcagggccatttggatgtcttgaaggagctgttacaggccttcccctcgttagcaatgacaacaaattctgtaaatgccacagctttggacactgctgcaactcagggccacattgacattgttaatcttctgctagaaacagatgcaagccttgctaggattgcaagaaataatggcaagacagttttgcattcagcagcaagaatgggccatgtggaggcggtcactgcactgttaaataaggacccggcgattgggtttagaacagataagaagggacaaacagctctacacatggcttcgaagggccaaaatgcagaaattctgcttgagttgttgaagcctgatgtctcagttatccatgtggaggacggcaaggggaatagaccattgcatgttgcaactcggaagggaaacaccattatggttcagaccctaatatcagttgaggggattgaaatcaacgcggttaatagagctggagagactgcttttgctattgcagagaaacaaggtaatgaagagctcgttaacatcctgagagaggctggtggagtaactgcaaaagagcaagtaaatcctcctaatccagcaaagcagcttaagcagacagtcagcgatatcaggcacgatgttcaatcacagatcaagcaaacacggcagaccaagatgcaattccagaaaatcaagaagagaatcgaaaagcttcacatcggtgggctaaacaacgccatcaactccaacaccgttgtcgcggtgcttatcgccaccgttgcctttgccgccatattccagctccctggtaattttctggaggatatgagtcaggcacatggcccagacatgaccttggggcaagcatggatagccagtgagccagccttcataatcttcttggttttcgacgctctggctctcttcatctcgctcgcggtcgtcgtggtccagacgtctctgatcgtcgtcgaacagaaggccaagaagaagatggtcttcgtgataaacaagctgatgtggctcgcgtgcctctgcatctcggcggccttcatagcgctgacctacgtcgtcgtgggccgagacgacgagtggctggcctggtgtacgatggcgatcggcaccgtcatcatggtggccactctgggttcaatgtgctactgcattgtcgctcacaggatggaggagaagagcatgaggaggatcaggaggacctccacgagccagtcgtggtccatatcgatcgactccgaaacggagctgatgaacagcgagtccaagaagatgtacgccatttaggataggcaacggccatgcttgccatctgagtcctgtatatactggtacccaaagtccatggcattggattgactgagctatattttagtccgtagacatggcacctgtatgtaactgcagacagtctgcagcctccgcctcacgaacgtagatagggtgtagccccctttttgttggcaaaatatgaacatttgccaagcccgatgcccctatcttatgctgtatttttgtgggtgcggcaatgaaaaccatgggattgtatctgtatagtagaatagtatggaataagttgcccttgtgtccc

SEQ ID NO: 266904 - DNA, 969 bp, Zea mays
  unsure (1)..(969): unsure at all n locations
gcgtccggccgcgcgctaggctcacgagcgcgaacacgaacacgaaccgcttaacgcggcggtcatggtgggcggcggcggcgacccaaggccggaggacgagcccttctccgacggagacgccacggagtcggacaccgacgagtctcctccgcaggggattagtgctcgccgccccggcgccaccaccaacccgatcctgactcgcctcgcggtgtcgcggaacccgagcccgctggccgcggccaccgcggcccccggggtgtgcctcctccgcttcgcctgggagtccgccgcgggatccctcgtcggcgccgttgtcggatacggtaaaggtctggtcatgaggaagggttttaaaggatcatttcctgatgctgcttcgtctgctaagatatttgctgtccttgctggcgtacaaagtttggtagcctgctctttgcgaaaactacgtggaaaagatgatggtatcaatgcaggagtggcaggctgttgcactggccttgcgctgagctttccaggtgcaccgcaaactctgattcagagctgcctgacctttgggactttctcgtacatcatagagacgctaaacaagcagcagcccgcactggcgctaccactggctacagagattaaggatcaaaaggctggacaaagtgttcttcctcccttcacgctccctcttccgcaggatgcgatggatggattttctaagttccagaactttttgtcgtcgaaatttcagggaaaatgagtccccttatggagtgacgtttagttgccttgtaaatgcctcaatctgagcccttttttgggtttatttctctgcaaatgtatgtttctaaggtagtgtgttgttaatgttaatgattctacacctttctgtgacagttttgcgaataagaggagcccctcatcctttgttcaaaaaaccaaaaaaaaaaaaaaaaaaaaaaaataaannaaaaa

SEQ ID NO: 266905 - DNA, 457 bp, Zea mays
tttgttgcaacgtgtggctgtggcgccatttggagggccttagttgcggacttgggatgatggggcgccactccgtgcgcctcaggtaaaggtttggttatgatgaaggggattaaaggatcatttgctgatgctgcgtcatctgctaaggaatcaatgcaagagtcgcaggctgttgcactggccttgctctgagctttccaggtgcaccacaaactctgattcagagctgcttgacctttgggactttctcttacatcattgagaagctaaacaagcagcaacctgcgcttggcgctcctgcctgcgacaggtgatggatccgaaggctggacaaagctgtcttcctcccttcacacttcctcctttggataccatggacgaatttactaagtttcaaaactttttgctatccaaattttcgggaaactgagttatcctggtggagtgacgccta

SEQ ID NO: 266906 - DNA, 1249 bp, Zea mays
cgtaaaacccggggcggcccacgcgtccgggattgaggagaaaataaactaattttctttctcaatcccctccaatcctcctcgtctgccgggtcaccaaatcagccctaaaaccttgttcgattaatcccgttatccatggattagatgagattggaaaaaattaagaaagtgtttgacttagatgggatttaaactcatccaatcctactcaatctatgtggattgggggctaaccgaacaagccctaacagtgtgcgttttcgcaccccaactgcctttctctctataagggaaactcctcatcgatcaccaccaaagaacacagtaactagctagcagatcaaacaagtagcgacagctcgacaaagatttgtgagagtgatccggcgctgagaagagatggctaagatcgccgcagccgccgcggcggcggcggcgctgtgcttcgcggccctggtggccgtggccgtctgccaaggcgaggtcgagcggcagaggctcagggacctgcagtgctggcaggaggtccaggagagcccgctcgacgcgtgccgccaggtcctcgaccggcagctaaccggcggcggcgtcggcggcccgttccggtggggcaccgggctccggatgcggtgctgccagcagctccaggacgtgagccgcgagtgccgctgcgccgccatccggagcatggtcaggggctacgaggaggccatgccgcctctggagaaaggctggtggccatgggggcggcagcagcagccgccgccgcagggaggaggaggaggacaggggggctactactacccctgcagccgggcaggagagggataccaaacgcagatgtatccaccgtgtcgtcccggcaccaccgggccaaggatcggccgcgtgaggcttacgaaggcccgggagtacgccgcggggttgccgatgatgtgccggctgtcggagccccaggagtgcagcatcttctccggcggcgaccagtactagctaccagggttaaaaaaaaaagagtgagtcggcgcgacgtgcaaggcgcagcatgtgtactgtgcgcgtgcaaatccagaatgacgtagctctgacgtgggctcgcaatattctcgcgtgttcgttacaataatgataataactatgaggaataaatatgggaatgttgccagtgccagacagtactggcgccggttcttcgtaatgaaaaattatatttttttattttatattattttttttttttattttt

SEQ ID NO: 266907 - DNA, 718 bp, Zea mays
cgacgatgcttccccacaactcgagaccatcacgtagcttccacccggcccccatccgcggcctccctcctccgattcccttacccgttttcctcctccgcttcccgattcaactcgcaacgccgccgccttcgctacccatgagcgggcgcgagccgatttaggcccgccgctactgtgatttcgagagaatttttgggctagcggggtgtgaacagaaacttggtgccccgctgctctgccttttgtcgtccactgtttcgcgtcaattctcgcgcgaaaagggatgggcactggagaggggtcgccgccggcgaggcggggcatcagcggtaggcgccgtcgatggccggacggagaggacgacgacgagtatgtgctggatgaggaagaaggagagggataccaaacgcagatgtatccaccgtgtcgtcccggcaccaccgggccaaggatcggccgcgtgaggcttacgtaggcccgggaagtcccccgcgggtttgccgataatgtgccggctgtcggagccccaggagtgcagcatcttctccgtcggcgaccagtactagctaccagggttaaaaaaaaaagagtgagtcggcgcgacgtgcaaggcgcagcatgtgaactgtgcgcgtgcaaatccagaatgacgtagctctgatgtgggctcgcaataaaaaaaaaaaaaaaagggcggccgctcgcgatctagaac

SEQ ID NO: 266908 - DNA, 1159 bp, Zea mays
cccacgcgtccgctcgcggtgttattcctctcgagtcgcctccccctcaagttccacaaacgcaagccccaatctcgccgtcaccacccccaatccagcaaacgcaaaccccatctcgccgccgccgccgccgcgatgtctcgccgctatgacagccgcacgacgatcttctcgccggaggggcgtctctaccaggtggagtacgcgatggaggcgatcggcaacgccgggtcagccctcgggatcctagcggccgacggcgtggtcctcgtcggcgagaagaaggtgacctccaagctcctccagacctcgcgctccgccgagaagatgtacaagatcgactcccacctggcgtgcgccgtggccgggatcatgtccgacgccaacatcctcatcaacaccgcccgcctccacgcccaacgctacgcgctctcctaccaggaacccatccccgtcgagcagctcgtccagtccctctgcgacaccaagcagggttacacccagttcggtggcctccgcccctttggggtctccttcctattcgccgggtgggacaagcaccacggcttccagctctacatgagcgcacccatccggcaactacggcgggtggaaggccgccgctgttggggccaacagccaggccgcgcagtccatgctcaagcaggactacaaggacgccttgacccgcgaggaggccgtcggtctcgcgctcaaggtcctcagcaagaccatggactccaccagcttgactgccgagaagctggagctggccgaggtatttctgcagcccgacaccggggaggtacagtaccaggtgtgctctcctgaggcgctggggaagctgcttgcaaagtccggcctgacacagccaacacccgaggcataatgtactggtttgctgtggcatgtgatgccttctactgctcttagacatggtttaagcagttatgcttctgttgtgtgaacttaaatattcgacaattatgtgttctatttttgtgttgagcatccttgatccgttaatgtttcatctgtaatagtgcattgcattgaattggttgcaaattgttgatctctaaaaaaaaaaaaaaaataaaatataaataacttaattaaaaattataataatataaactaaaattaaaaaatttcaatt

SEQ ID NO: 266909 - DNA, 942 bp, Zea mays
aatggggatgctcagactgttctgattgttaaagatacagaaggatcaatttatggtgggtatgcttcacagccttgggaaaggcacagtgatttttatggtgacatgaagacattcctcttcaaatgctatcctcaagcatccattttccgccctactggagcaaacaagaatttgcaatggtgtgctgtaaacttcagctctgagaacatacccaatggtattggatttggagggcagccacatcatttcggactctttttatcagcaaattttgaccaagggcactcatttacgtgtagcacatttaccagccctcccctttccaagacaaataggttcaggccagaagttattgaatgttggggtatacaaatgagaggagcacaagatgaaaaactggagttagtcaaggggacagtcctcgagagattcaaggaggaccggaacatgctgaagatggttggtttggcaaatgcaagtgattaagtgatagaggatcacaatgatgtacatgatggagagtctgtacagcacatgttcataaaaataatcaaatctgagaccatgtttctatattctactgttcatattttgtcactcaaaatattcatctggtccacactttgtaacaattgaccagtcgtgaaggacagccgagccaatgttgcgtttgatctcaagaatgacgtcatccaagataagatggtctcatatgagttcatcccattaactttaatgggatgactttatcctttctgttgtactaatgtgcttgtaagatgagaaagtatctagatctttagtggttttggtgattaatgccaacacaagattattgtaactaacatgtgtgtttacaaagataaattaatgttaggtcacaatgatgaaaaaaaaaaaaaaaaagggccctaaaattaaaaataataaacataaaaa

SEQ ID NO: 266910 - DNA, 1632 bp, Zea mays
cgacgatattgcatcagatgactatagcattgttacaattacacttggtgacaaaagaataggaattcggactattgtgctggaagagaaagcaacagcttgcaacatgctgtgctgctatgctgatgagcttaaggagggtttcttcccatggattgatcaggttgccccaacgttggttcctctgctgaagttttacttccatgaggaagtcaggagagctgctgttgcggccatgccggaacttctacgctcagcaaaattggctgttgagaaagggcaggctcaaggccgtgatgagtcttatgtcaaacagttgtctgactacataattgcagcacttgttgaagcactgcacaaggagccagaaacagaaatgtgctcatccatgctggattctttaaacgagtgtatgcagctttcgggtcttttgcttgatgaagcccaagtacgagctatcatagatgagattaaaaacgtcattatagccagtgccacccggaaaagagaacgctcggagagaacaaaagccggagaattttgatcctgatgaaggagagctactcaaagaagagaatgaacaggaggaggaagtatttgatcaggtcagtgagtgcctagggactttgattaaaaccttcaaaggttctttcttgccgttttttgaagagctctctatgtacattacaccaatgttgggaaaagataaaacacctgaagagagaaggatagctatctgtatttttgatgatgttgcagagcaatgccgtgaatcagctctgaagtattatgacacataccttcctttccttttggaggcatcaaacgatgaaaattcagatgttcggcaggctgctgtctatggtgtgggtgtatgtgccgagtttggtggtcatgtttttcgccctctagtaggagaggccttatcaaaattaaacaatgttataaggcatcctgatgcacgacttcctgataatatcatggcatatgacaatgctgtttcggcgcttggaaaaatatgccaatttcatcgggatggtattgatgcagctcaggttgttccagcctggcttagctgcttgcctataaaagacgacaaggttgaagctaaagttgtacatggacagctttgctccatggtggagaggtcggatgctgaaattcttgggcctcacagtcagtatcttcctaaaattgtttcaatttttgcagaggttttgtgcaatggaacagaacttgccactgatgaaactagaaacaggatggtgaatgtcttgaggcgtttccagcagactttgcctcctgattttcttgcatcgacgttttccaacttgcaaccgcagcaacagctactgctacagtccatcttgtcgacatagttgttttttctgtcgctgcaaggtgggggcttgttatttttcttgatgttttatcagccaattctttatgtcgtatctttttctggtggggtactttgtgaatgcattgtttgcttcaacgaactggaggctgtcaccacacatggttttgatagagtgtatattgtctgtcttgtattcgaaatatggtttgagatgtgctgcaacagaggtgcaagggaaacggtgggatttattgtcggatgggttggac

SEQ ID NO: 266911 - DNA, 762 bp, Zea mays
  unsure (1)..(762): unsure at all n locations
atgccacagctaaccatctttgtgtaagcaggcggcacacatgtttaaactacatggacgcccttattatgaaaataaaaatatagaaaaaaccctctccctggatactgtttacagtctgagcacagtgacaggcttttttgtctactcttcgaccagttcggctctatcttaaggtgctggctgcagaaaatgagcttcatggcttcaataactagctgtatgatcttcagattcttggactgttgaactgtttaacggcagatattaacagttgcagccttacaggtgcttcgtcaaatgttgaggcattgctgcttaataactgtttgggggatagagtttgggttatacactgtaggtgaatcttcacgttgataccacaaacaatgtgtggaagtttcaaaaccattatcatatcaagtgtgcagtgaatcttaacgttgatgccagaaaccatgtgtggaagtttcaaatccttacaaaggaaaggtggttgaaaatatcataatttacaaacgtgcttcgaaccctgggactcaagttcgtttctggtgcccgaacatctgatttcacgggtgagttagttttgaaggctaggcgcttgagtagatgttctgggttcagaactgcacttggattcccatgttttcaagcacattagtaatgttgaccattgtctgttctactctgtcgggtgtcaacgccgtcacacataaaaaacagccataagtgagattgaatgaaaaaaaantgaataaa

SEQ ID NO: 266912 - DNA, 1203 bp, Zea mays
gtgaagaacagtaattttattctggcggcaaagtaatctatgaagacgcatattttacaggcatagggcgtgttcggctggctacaagccgacactgttgcagctgtttggattgctgcagctgcaatccatagagagaaaaatactgtagaagccgcagccgcagccggattgcagccgcagcaagccgcagcgaacaagctgattttccagggattaacttgacccaaataaacataacgaatctctcgaacctttatccaggccacgcatacatataattaacgaattaagagagtttgaagaacaagaacactgacaactcatgatttggacttaaaactgaagtggccgattgtgttgtcgggcatgcaccttctagttggcttccgcctcccacttgtccatcacctcgtcaagtgccgtcgtggcggcaccaccctcacggaggccctctgccgcagccttctgcagctgggccaccttggcccgcaccatggcgcccttcccttccccttccaccagctccctcaccaccgccgcgatgctctccttgtccttggtctcgggcagccgtatcgcagcccctgccccctccgacagcatcaccgcgttgagccgctgctcggcgaacaagggccaggccaccatgggcacgccgtgcaccaggctctcgagcgtggagttccacccgcagtgcgtgaggaacccgccggtggcgccgtgggccagcacctgcgtctgcggcgcccacgagggcaccagcagacccacctccttggtcctctcgacgaagccctccgggaggtacgcgaacgggtccttcttgctctccgcgtcgtagtagttgccgttgagcgtgccttcgtcgtcgctggggctgcgcaccacccacaggaaccgctgcccgctgcgctccagcccgagcgccagctcgtgcatctgctccttcggcagcgcgccgccggagccgaacgagacgtagacgaccgacctggctggctgccggtcgagccactcgaggcacgccgcacgtggaggcgtgccgtcgacatcggcgccggtgccgccggactcggactgaaggatcagcgggccgacagggtacacgggcggccagccgggctctgctgggtggcgcagcgcctcggcggcctcaggctcgacggcgtcgaaggagttgacgaggatggcgaaaacaac

SEQ ID NO: 266913 - DNA, 683 bp, Zea mays
ggacggccttagctcccactatactactccatatatattgcccctgctccttcctcacgagctagctcaccggccgctcccctagtccagcatgtacagctactatttgtactggcaggggaagtggtattggtggtcggggtactggaacgatcctaacgatagcagacgttacccagcagttaatatagttatattaactaatgcctccttcaactatgcgttgggcatgggagcattagccgaaccacctcaggacagctctgccgacggtgtgatcttgatcaaggatatggcggagtggcaaaagcactgggaccagactgctccatacaacaagctgctggtgtatgagttctacgaaaagaattcctcgctgtgcaaggccatggacaagccgttcgagaagctcgccacgcagtacaaaggcagggccgacttctgcaagctggacgtggacaactttgagcttttggcgcggatttgcggagtggaaggagcgtatccgacgttcgtgctgttcaagaaatgcgcgcaggtgggcaaggtcgttggcctcaaggaggacgacctcgagcggatcgtccagcgagcgataataagctagctaggagtagtggtcaactcgtcatgtagtaccacacagactcagttttcgcggacgcgtgggcggacgcatggga

SEQ ID NO: 266914 - DNA, 854 bp, Zea mays
  unsure (1)..(854): unsure at all n locations
ntcttttttttttttttttttgtttgtacatttttttttttattggggcctgtaactgcaatgatatttttacttcacatgtatggtataaagacaccaatgacgtacacacttatgctttgatcatagacacatagatgtattaaacagtttacaacctccaaataaaatgctcaatttacaaggcaaccaccaagcttggcaagtaaaataagacatcggctgtctaaacaaacaccagtactatatgccttgaccttggagacgatcaatcctatgaaaggacataaaactgtctagttcgtgtagttattgatcagataattaacgctttaaacgaaacctctttgtgatgacttttttcatcttctggccagtggttttgtcctcagcggagacattcaggataccgttaatgtcgacatcgaagcaaacagtgatctgaggaacgccgctaggtgcgggaagaagggaaaactcaaactcacccaacaggtggttgtcacgagtaatagacccctcaccctcgtacactcggattcggatacaaggctggttgtcggagtcagtcgataagaccctctcctttttggttggaatggtggtattccttggaatcatcaaggggcgtgttcggttggctgcaagccgacactgttgcagctgtttggactgctgcagctgcaatccatagagagaaaaatactgtagaagccgcagccgcagccggattgcagccgcagcaagccgcagcgaacaagctgaagaaggtcatgaggcccccatccgtctccaaaccaagagaaagaggggtagcatccaacaggagataattctggatctcataaccaccc

SEQ ID NO: 266915 - DNA, 1124 bp, Zea mays
gcaaacctctgcaatttagttgacatttagcttctctcgacccctctcaacttcggggttatgcaggtggaagtcaagaggacagctccgagggaagagatgaataccaaagatggccctaagacaagaaagatcttcatcgagtgggctacctgcatctcttactgaaggttggtgttggctatcaacaaacaaatgttgaattcatcttgtttatgatactgagaaggcacaaaatttcagatgagttgaaggatcactttccattgtatggcaaggtgctcgaacatcagataatgcttgatcatagcactgggcgttctagagggtttggttttgtcacttttgaaagtgaagattctgttgaaagagtcatatcagaggggagaatgcgtgatcttggtgggaagcaggttgaaataaagaaggctgaaccaaagaaacatggatctgaccacagcggtaatgggagatcaagccaagggggtggaggttaccgcagtacttaccgtggtggtggtggagctggtagtggcagcagcggcagcggtgggggtggttatgggtttggtggtgcttatcgatctgctgcagcaggttatggatatgatggtggcgcaggagcaggatatggctatggtagagggtatggctatggaggcaatgctggctttgcgtctggttttggtggtgggtatggtggatccatgtatggaggtgctgcctatggtgcatatggggcctacggtggtggcgcctatggaggaggtgcctacggaggtggtgcctatggaggcggtgctgcctatggtggcgccccaggtggttatggcactggcggatacggcagttatggcggacaggtagtactggtggtgggagcacaggtgctcggggttctagcaggtatcatccatacggaaaataagcgacgagtttaaactatttttctgggtctcaggtgttcctcttctcctagaagttcagatttcatggcatgtccatctaaacagtgggcattggaacgtagttgggtctaattaagtcaccgtgagaactgtgtaattgctgcagctgagcctccctgcctgccttgtttgcagtacaagctacacataaaacct

SEQ ID NO: 266916 - DNA, 680 bp, Zea mays
cggtggatccatgtatggaggcgcatatggtgcatatggggcatacggtggtggtgcatatggagggggtgcctatggaggtggtgcatatggaggcagcgctatggtggtgccccaggtggtggttatggcactggcggactcggcagttacggtggagcaggtggtactggtggtgggagtacaggtgctcggggttcgagcaggtaccatccatatggaaaataagggcgtgttcggctggctgcaagccgacactgttgcagctgtttggactgctgcagctgcaatccatagagagaaaaatactgtagaagccgcagccgcagccggattgcagccgcagcaagccgcagcgaacaagctgtactatacttgcgaccaagtggccagcacacttggattttctttctttctcccttcgtcgggcgggcctcgaggcggggcccacggggataatgtattgtatgccctgccccactgacaggaacaattcagaggagagaggggagaagacgaagacgaatagtaatttgcgtttgaagcaacaagcaaacaatcattgatcctctgatttttacacccgagaagacagcaatgcgaggacgaagggaaagaacagcggcgtgagtaaaaagtacctgttgccgagctgctcgtggaggctgatgatggcgtcc

SEQ ID NO: 266917 - DNA, 620 bp, Zea mays
gcgtccgggcatacggtggtggtgcttatggaggtggttcctatggaggtggtgcatatggaggcagggcctatggtggggccccatgtggtggttatggcactggtggatacggcagttatggtggagcaggtggtactggtggtgggagtacaggtgctcggggttcaagtaggtaccatccatatggaaaataagctacaagttcaatcaagttttctcggtgtcgggagtttctctggtcctcctagttcaggcctcatgccatgtccacctcaacaggggcattggtgcatattggggttgaacacgttaccaccggaacaattgtgtaactgctgctgttgagcctgcccgcctgccttcgctcgctgttcaagctacacatgaaacctgtgttgtattctgtagttcggtatgcagagtttataaccctgagatacaagcattttatggtaaggacagcattagttccggtagaactatattctgtgctagaacttgctgacgcaagtgtaactgctgatcttgttcattcggttgcacagaaatcgaaagggattaaaggagatcagcttaaatctctacattgaacgccatgctgaatgtgtaaagtttgt

SEQ ID NO: 266918 - DNA, 559 bp, Zea mays
tggacaagccgttcgagaagctcgccacgcagtacaaaggcagggccgacttctgcaagctggacgtggacaactttgagcttttggcgcggatttgcggagtggagggagcgtatccgacgttcgtgctgttcaagaaatgcgcgcaggtgggcaaggtcgttggcctcaaggaggacgacctcgagcggatcgtccagcgagcgataataagctagggcgtgttcggctggctacaagccgacactgttgcagctgtttggattgctgcagctgcaatccatagagagaaaaatactgtagaagccgcagccgcagccggattgcagccgcagcaagccgcagcgaacaagctgctagctaggagtagtcgtcaactcgtcatgtagtaccacacagactcagttttcgcacgtgtgccaagacaaaactacaaaaggacatgactatgcgtacgcatcgatcggcacagtggcggatctacaccctctgtggctggggcttgatccatgtatctttatataagtctctatttaatacgatataaaatagttaagat

SEQ ID NO: 266919 - DNA, 417 bp, Zea mays
ccagcataggggaacggggcgtattttttggcagcagtatgatcgagcagcatgccaatacaaggggtgggttcggttggctacaagccgacactgttgcagctgtttggactgctgcagctgcaatccatagagagaaaaatactgtagaagccgcagccgcagccggattgcagccgcagcaagccgcagcgaacaagctgaatctctcattttggagattttggggaacccagtattcactgggtacagaacactcatgcagtcatgcttccgcatcattgcagtaatccacttctctttccccaacccatggctatgatgtacaaaatcacgcagccagcaacggtccccaaagcagtttcccaaaatttcctatttgaagctcgagtttcctcctcggttgttgggtctgcg

SEQ ID NO: 266920 - DNA, 608 bp, Zea mays
ctttttattattttaattatagttattatttttttttttttttttaagaatcaaaccctatttatattaatttttaaactaaaatttatttaggaccctacaattccattaccacgccttgccctatccgcaacccttaatcctgattgaccctaggaatctgcgcgctgtctctacattgccactcagaacaggaatcgcgttacaaggtgtgtacttctcctggtcgatctattgattgagtctatgggcgtgttcggctggctacaagccgacactgttgcagctgtttgcactgctgcagctgcaatccatagagagaaaaatcctgtagaagccccagccgcagccggattgcagccgcagcaagccgcagcgaacaagctgtcccagcttgttcgacgcacgtagtccatccccttgtctggtggccgtaacgggacggggcatccagtagcttgcaatagcattatttagctgttgatttgaggtctctgtccccatcgcttcatttaggctctggaaaatcatttgttcatacccaatgttaatctgtgcttcctgaacttcaaatgtttacgggattggaaaatgggaagcattttgtt

SEQ ID NO: 266921 - DNA, 427 bp, Zea mays
gtcgtagcaacacctcttgctttccttttaattagtagaaaccgcccgccgctctctgaaagcatctagctggtgtatgagttctacgaaaagaattcctcgctgtgcaaggccatggacaagccgttcgagaagctcgccacgcagtacaaaggccagggccgacttctgcaagctggacgtggacaactttgagcttttggcgcggatttgcggagtggagggagcgtatccgacgttcgtgctgttcaagaaatgcgcgcaggtgggcaaggtcgttggcctcaaggaggacgacctcgagcggatcgtccagcgagcgataataagctagctaggagtagtcgtcaactcgtcatgtagtaccacacagactcagttttcgtacgtgtgccaagacaaaactacaaaaggacatgactatgcg

SEQ ID NO: 266922 - DNA, 615 bp, Zea mays
atgtgaaccaccaaatggcacatatgttcctaagagccatggtaattacagaggataaggtacaagttatccagcaagggaaaaaaaaggcgagggacaactcctaattctttcagagtatcttttcccaaagataactgaagcaagcaacaagtgacgggcacccagctggcagccagtcctgtaattctggctctccgttccacagcatgtcaatgacgaaggaaacactaaatctaagagctaatatggaattcccacacacacacacctgttataccatgctacagctacttgaaccttttttttcacagcactaaatgggtgaagagtggacaaaggatgtggcacatggtggaattgcaactcccagtaaagaatcggcaaaaggttgtaaaactcaggggagtagatcaagaagagattgccaaactgacagttacagactttacatgtaccagccgggatgcacgctatcgcttatgggcgtgttcggctggctgcaagccgacactgttgcagctgtttggattgctgcagctgcaatccatagagagatgaatcctgtagaagccgcagccggattgcagccgcagcaagccgcagcgaacaagc

SEQ ID NO: 266923 - DNA, 441 bp, Zea mays
ctcctagtccagcatgtacagctactatctgtactgggaggggaagtggtattggtggtcgtcggggtactggagcgaacctaacgatagtacgcatgcggtccctatctatctatctatctatctatctatctatctatctatctatctatctatctatctatctatctatctatctatctatctatctatctatctatcttgtgtttctcttcatgctattgtatcgaataaaagaatttgcctgtaattttaaccggctagccgccggtgtcttccttgatctatgtgcatgtaggcagacgttacccagcagttaatatagttatattaactaatgcctccttcaactatgcgttgggcatgggagcattagccgaaccacctcaggacagctctgccgacggtgtgatcttgatcaaggatatggccgaatggcaa

SEQ ID NO: 266924 - DNA, 354 bp, Zea mays
tgaagattctgttgaaagagtcatatcagaggggagaatgcgtgatcttggtgggaagcaggttagatttttaatttttttggtgtaaacttatgtttcacttactagtgaagttgaacaagaaagctaaatgaaatagacttagaaatgttcataactttgtatgctactggagtgaaggatatttaaattctagaatacgacttagggtttggatatgtgactctattttggctatataatgggtgattcgcaattccaaatggagctctatagctcttctacgaggaaaattagcaattttcattcccttctaaattcacatttaatggtattgctctcacctgatcttaa

SEQ ID NO: 266925 - DNA, 256 bp, Zea mays
ggcaggggaagtggtattggtggtcggggtactggaacgatcctaacgatagtacgcatgcggcggtgctccctgttctatctatctatctatctatctatctatctatctatctatctatctatctatctatcttgtgtttctcttcatgctattgtatccaataaaagagttttcctgtaattttaaccagctagccgccggtgtcttccttgatctatgtgcatgtaggcagacgttacccagcagttaatat

SEQ ID NO: 266926 - DNA, 610 bp, Zea mays
gacccacgcgtccggcgagagcaagcaagagaggacgacatggcggcgccacggagcctggcggaccgcgcgctgcgcggcgtggcggacctgataaagctgctcccgagcggcacggtgttcctgttccagttcctgagcccgctggcgagcaacaacgggcactgcgccacgctgaacaaggcgctgagcggggcgctggtggcgctgtgcggcgcctcctgcgccttctcctgcttcaccgacagctacgtgggcgcggacgggcgcgtgtactacggcgtggtgacgcggcggggcctgcgcaccttcacgcccgacccggacgccgatcgtccgggacctgtcggcgtaccgcctccgcgccggcgacttcgcgcacgccgcgctctcgctgctcgtcttcgccaccctcgcgctcctcgacgccgacaccgtcgcctgcctctacccggcgctggagctcgccgagcccaccatgatggccgtgctcccgcccgtggtcggcgccgtcgcgggctacgtcttcatggtgttccccaacaaccgccacggcgtcgggtaccagcccacgcccgccaccgaggacttccagcacaaatactagcca

SEQ ID NO: 266927 - DNA, 416 bp, Zea mays
ctggtagacaagaatggtcatatgaaattgtcagattttggattgtgtaagccaattgattgttcgaagttgtcaacactgaatgaaaatgaaccaatgactgatgaaaaccttagggagtctatggacatcgatcattctctctctgatactgcaaatggtaggaggtggagaagtccaaatgaacagcttcagcattggcagaacaacaggagaaaattggcattttcaacagtcgggacacctgattatattgctccagaggttctactaaagaaaggatatggactagagtgtgactggtggtctcttggtgcaatcatgtatgaaatgcttgttggttatccaccattttattcagatgatccactagttacatgccaaaagattgtgcattggagaagctatttgaattt

SEQ ID NO: 266928 - DNA, 862 bp, Zea mays
  unsure (1)..(862): unsure at all n locations
ggcttacagcttctgagattcccctcttcacacagccaactagtgccccaccaccttcaaggccaccgccacctcttgcagttaagcaaaaacatggatcaaaatcaacaagaaaagatgaacatttgcggcggtctaggaaaaacaatgaccatcaaagaagttcgtcaaatcatgctggtgtttctacagtagatgaactagaagattttgccatgggtaagcctcagagtgtgcatgctttaaatgcggaagaatttgagagaagtacagcagcagcagcatctgcagctgctatgaaagaggccatggataaagcagaggcaaagttcaaacatgcaaaggaggtacgagagagagagcgtgatgcgaagattagaaatagagaacaacgggaacaagatagtgtaacaaggtcgtatgcccaggatcgtgaggacaaagagagaaaggaaagactagaacaagaaagagagatgaagcaaaatgaggaaaaggaaagagagcaacgaagacttgaagaggagagagaacttgagcgacatagagaaagagaaagagctaggcaagcagtggagagggctacaaaggaggcacgggaaagggcagctgctgaagctcgtgcaaaagcggagagggaggcacgccaacgttcagaacgtgctgctgtgcaaagagcccaacaggaagcacgtgagagggcagcagcggatgctaaagatcgagcagagagggctactgcagaagcaaacgaaagggctgctactgaagctaaggagaaagctgctagtcaagcgagggatagggctgcagcaaaaaaagctgctgtggagagagctcatcangaagtgaggaagagagc

SEQ ID NO: 266929 - DNA, 1452 bp, Zea mays
cttctatctcaattcatttgcggacaagggtggcgcgcagtatttcgtgcctgcgggaaggtggttgacggggagttttcatcttatcagccatctcactttatcactggacaaggatgcaataataattggatctccggattcatctcattggccagttatcgatcctcttccatcctatggtcgaggtagagaccttcctggaaaaagacatcagagtctgatttttggattaaatctgacggatgtaattataactggtgctaatggttcaattgatggtcaaggagctatttggtggggctggttccacaaccacacattgaattatactagaccacatcttgtggagttgatgtattctaccaatgtcgtcatatctaatctaaccttcaagaactcgccgttttggaatatccaccctgtgtactgcagccaagtgcttgtccggcatgtcacaatcctagcgcctttgaattcgccaaacaccgacggcgttactccagactcttccacgaatgtgtgtatcaatcattgctatgtaagaaatggcggtgatgttattgtcattaaaagtggctgggatgaatatggcatttcatttgctcaaccaagctccaatatcagcataagcgacatcacaggggagacaaggggtggttcagggattgcctttggaagtgagatgtcaggtggcatatcggaagtacgggctgtgggcctccgcattgtcaactcccttcacgggatcagaatcaagacggccccggggcgcggagggtacgtggagaatgtgtacatagcagatgtgagcatggacccggtttcgatggccatcaggatcactggaaactatggtgaacatcctgatgacaaatatgacagcactgctctccctgtgataagcaatattacaatcaaggatgttgttggcgttaacattggggttgctggtatattggaaggcattcagggggacaatttcagcaacatttgtctgtccaatgtttccctcagtgtgcaatctgcacatccatggaattgttcacttattgaagggtattcgaactcggtgatcccagaatcatgcgaacagctcagaagcaattgtagacagacatccatttgctacgatggaagcagttcttcagtaatgagtgtgcagcaaccaagacatacatcgcccaccagccggttgctagatctttttactggagttggcttcattttagtgtaggtagagctgtgcttgttcttgctgcaaagggggcttgcttcatgtagtgagagccctattagtcatgtatatctgattcttgcaattatttgtgattagagtgccacttgcttcatgtatatagctgttgagatgactgtcggtgtatctttgcctgttttgttccaatttttggtatgtgaatgcaatctgcataactttatggttttgaacac

SEQ ID NO: 266930 - DNA, 464 bp, Zea mays
ggccactttagagcacagggagtgcctctgaaaagaaagctaagggaatttcctgtcactgaggatgcgctgcttcctgttggcacaagcatcacagttcgtcactttgttcctggacaatttgttgatgtcactggaatcacgaaggggaaaggttttgcaggtgtaatgaaaagatatggtttcggtgggatgcctgcatcacatggaacatctttggcgcatcgcagtggtggctctactggtcaaagagatgctcctggaagggttttcaaaaacagaaaaatgcctggacgcatgggtggtgtgcaacgcacagtgaagaatgtatgggtctatcaaatagacccagccaggaacttactgtatctgaagggccaggttcctggtcctcaaggtagctttgttttcgttaaggattctatatataagaaacctgacacggctatgctcccatttcctac

SEQ ID NO: 266931 - DNA, 727 bp, Zea mays
agatctggattatggtggtacagtggctaggaatgtacttggagttcaatgcttggggaatgagttttcttcgtacctcaggcacacttcagatggttgctgtagttcatatatgcactgtcgacattgttatacaacaatgttacatttgcacggaactgaacacttctattttcatgagcttttattgctttgattcgacgcggcatcatggcttttggaaccaagttgttaaagctgcattttggatattgaatcagttgtttctggaacgttttgcagatcaccagcaagatcgaaatctcctaatgtttctccagcaaatggtgaagcagcaagccccaagaagcagagcccaaacaggagcccatctggctcacgctctcctgatgcgaagcctgaataaaattgctatgctgttaaaggattgcagatggagtcaggagctcttcttttcttaacatttgtcctctgttctagtaccatcagtgtcttatcgcagtacgagattggatgatattaactatctgtatcagcttgtatcgatggactccaagtgttgtcactcttgttgtctagtgtgctgaaggacccatttacttttgctaaacttttccattggtgattgttggatgcatggtgtggatttgtgctgtgttggctaaatcatgttgttctagaccttgtgcatttttttcatttcactaaattacctgacggttgctgc

SEQ ID NO: 266932 - DNA, 482 bp, Zea mays
taccgattcggaattccgggctcgaccgcacgcgagaaggaatccgatccatccaagccaagccaaggcagagaagaagaagaagaggaggaagaagaagcatcggcagcatgtcggaggggactgccaactgcgtggacatcctgatcgccatcatcctgcctccgctgggggtgttcctcaagtacgggtgcggccacgagttctggatctgcctcctcctcaccttcctcggctacatccccggcatcatctacgccatctacgccatcaccaagaacaactagctagtcatccttgccgacgacgatccatgtctctgtatctgtgtctgttcatatgcctgatgccgacttgtgctgtatgtagttgcttgaattcagtcgtgttttgctaccgtacccaccccatgcatcatctgtcaccgcgacgcaataatcatagtaataacaagttcagataatcattcattcgctgctttt

SEQ ID NO: 266933 - DNA, 503 bp, Zea mays
tggattcctttaaagcgaaccaagccttcgggaacaacctcatttccccaacgccggaaagcggagtccggattgcagttgcttcggtccatccggccgtcacatcagccacacgccgacgcgccgccagtcgccgcacgagggggcccgtgatgccgaagaagatgggcgtgaactccaaggcggaggcggcccgcgaccgccgctccgccgcggaggccgaccgccgcgaccgccaggagcgcgccaaggaggagcagtactgggccgaggctgagggccccaagtcccgcgctgcgcgccgccgggaggaggacgccgagaagcgcgccgaggccgcggctcgcaaggccgagaaccgccgcctcgccgaggcagaggccgccgccgtcgccgcttccgcatcggcgccgtccaaggccgccgcgcgcaaggcgtcccgcgttgccgctccgccccccaaggttaccgaagccgagctcgtgcgcctccgggaggaggag

SEQ ID NO: 266934 - DNA, 627 bp, Zea mays
acgagagcggaaaggaccgaacggctcgggttgatccatcggatccgaaggggcatggctctggtcagattggcgtttcccgtgttcttcttcctcgcagcggcggagttcgcggcggggacgcggtcgccgtcggctttcgtacaaaacgccatctactccaaccgcatcaccatcttctccaagacttactgcccctactccatgcgtgctaagcacatatttcgagaccttaaggaagatccatatgttgttgaactagatacccgagtggatgggcgtgacattcaaagtgttctcctggacctagttgggcgtcgtactgtgccacaggtgtttgtcaatggacagcatattggtggctcagacgatacagtaaatgcgctttcaaatggacagctccagaaacttctcgggaagagtcagtcacaatgatgggtcgctggacaagcttgcactgtcaagaacacgtgagtatatgtttgggaggggtgttcttttgtgtttagggctgaacagaatctggtgttgtgacaaccatctgtactgctggatttgtgatctgctcaattgcacccatccatgttttaccttgttccttatggaaattattagtataggtagctc

SEQ ID NO: 266935 - DNA, 1095 bp, Zea mays
agaaaatctcgtataacgcaagtcgtcaaaataccgaagttaacaggcagattatggacagtataagggaagatgaaatagatcttgatatggagaatgttgataaatcaagtattaagaagaagaaaagaaaactagaactgaataaggccattttggatgatgatcggttcaaagaaatgtttgagaataaggattttgaaattgatgaagaatcaaaagaatacctcgcacttcatcctcaggcagccacaaaggagcctcgcctgattgaagaacattttgatagtgttagcgaggacgatcaacaatctgatggtaacgcatctgacactctagcggaatctgacagtgatgatgtcatgcataattcaaagcgtataaggttatacgaggtcaaggatgaacaccatgcggaagcatttttgaacagcgtctctttatcaaacgaggatgctgttccccttgaggataggatagctgccctggaaaggaaacagaactccaaagcacttgatgcggtcaagtacgggcctggtggctcacgagagatttcgtttttctctaaaagccggagaaggcacaaggaagagtcgtctagcgacgatgaacccaagggtgtcaaaaagagagctgtgcagccgctgggcttgaagcagggaaaagccgagttctaatatgtttggcggaaatcgtggcataggtagaggcggtggtggcagaggtggaggcggtcgaggaagaggtggaggacgaggcatgggcaggggcagaggatgaatggggcccgtcacattgaccccgttcctgcctttgcaggggttttggtaagcttgaaatggattgatcctgcacatgcagtgggtagaaagtgtgttccttcacaacataggcaagagctagagtaactgaggattgctgcttcagaatttttgggaagagaactttgttagaagacaatattacatatcttatggtctaccttgtaacggatcgttgcattctggtgggtgtctatgggtacggtatagcattttttttgtaataggcaacataactgctggcattttcatttttgagtactgaaggctctcc

SEQ ID NO: 266936 - DNA, 888 bp, Zea mays
ggcatttgagaattctaatgaggaggattatgtaactgaaaagttttttcagtcactagtagcaggttctattccggttgttgttggtgctccaaatattcaagagttttctccgggagaaggcgcaatattacatattaaggagcttgatgatgttgcttcagttgctaagacaatgaaaaatattgcttcaaaccctgatgccttcaatcaatctttgaggtggaagtatgatggtccatccgattctttcaaagctcttattgacatggcagcggttcattcatcttgtcgtctttgtatacatattgctaccaagatccatttaaaggaggaaaggactccaaaatttacaaatcgtccttgtagctgttccaccaaaaagggaacaatttaccacttatttatccgagagagagggcggtttaagtcagagagcatttacatgagatcaggccagttaactctgggagccttggaatccgcagtgctcggtaaatttaggtccctcagccacgttcctgtatggaaggatgaaaggccaccgagtattagagggggggatgacctgaaactatacagaatttacccagtcggtctaacgcaacgtcaggctttgtacggttttagatttagggatgattctgaactcgagcaatatatcaaagaccatccctgtgcaaagcttgaagtaatttttgtgtaactactatgccctaggcttaacgttttccccccgattcttactgaactctgtgtgcgagtttcagttgtactgtaatgtagagtgttatgtgtagcaaagaaactcatgccagtacggatcatctgccggttgtaaattttccatgacagtaaacatcattccttcttttcagtaacaaccgc

SEQ ID NO: 266937 - DNA, 578 bp, Zea mays
tcggtttcaggagcgcacaccgcacggcgcacacacacacgcctcccgcggcaagcagcgcaggacaccgacgacgaagcgaggagaggggaggaggcggagccgagcgcccgagcccaaccccgcaaccacgacccacttccccgtcgcgattcgcattgcccttccctcgggttctacccccagcctcgcgccgccgccgccgccgccgccgcccttgccagagagatcaccccccattcccacaatcccgtccctccctccgtccctcgaggagccgagccctccgcgcggccgtgggatggggcagtgaccggtgagtggcgtggggagccggtgggcggtggcgagggcatatcatggtgcagtgcctggacggggtgaggcagctgctcgcggtcctgctcaattgctgcgacgtcgagctcaagcagccgcgggggctccaagacccccaggtcctcgcgagggagaccgtcttcagcgtgagtgaggtcgaggcgctgtacgagcttgttaagaggatcagcaacgccgtcattgatgatgggctgattaacaaggaggaatttcagttg

SEQ ID NO: 266938 - DNA, 494 bp, Zea mays
  unsure (1)..(494): unsure at all n locations
ccgacgacgaagagaggagaggaggcggagcgngtagctcgagcccaaccgcgcaacttacttccccgtcgcgatttgcattgccctcctcttggcccccgatctcgccgtgccctacccccagacccgctccgccgccaccggagagatcgcgccccccattcccacaatctaatccttccgtccctcgaggagccgagccctccgcgcggccgtgggatggggcggtgacaacaccggtgagtggcgtggggcagggagccggtggcgagggcatatcatggtgcagtgcctggacggggtgaggcagctgctcgcggtcctgctcaagtgctgcgacgtcgagctcaagcagccgcccgggctcgaggaccctcaggttctcgcgagggagaccgtcttcagcgtgagcgaagtcgatgctctctacgagctgttcaagaagataagcagtgctgtcatcgatgatgggctgattaacagggaggagtttc

SEQ ID NO: 266939 - DNA, 442 bp, Zea mays
gacgagtcgtccgtcccaggctcccagccccggcgccccgtctcaaatcaaaaaaattgggctcaaatctcaaacccataaaaaatactgtattttccaaccaagccactcgcccgaccttcatccgcattccacgcgcactccgctgcctcactccgagactccgccgctgcttccaacttccgttgcgcacgagcgaaacatccggagctagcaagggaggaggaggaggaggcgatggcggggggcggggataaggtggactacgtcttcaaggtggtgctcatcggcgactccgctgtcggcaagtcgcagatccttgcgcgcttcgcccgcaacgagtttagcctcgactcgaaggccaccattggggtcgagttccagactcggacgctcgtcatcgaacacaagtccgtcaaggcgcagatctgggacgccgggc

SEQ ID NO: 266940 - DNA, 705 bp, Zea mays
cgacgcgacccgctcgctctcgctctcgtgtccccagtccgatcgggtcggtgcctaccgacccccgctggccgccgcacccaggcgaggcgaggcaaggcgcgtcccgaacaacggaaccaactgcaccgaccgagtcaatcaatccggcgagtgaccgagtggggtaggttgtgtgcggcatgacgaccacgcgcgaccgtggcgccggcgtgcggatcggcgtcgagggtcggtgacggggacgtcgacctgggcgagggctgggactggggcgccatcccgcggctcctctcctccgcctgcctcttcctctgctccggaggctgttttggttgctgcgataagactgtaaagcaactgggtgaactgtccagaaacttgatcacccaggaccaaattaccattggagagccattttggagcacaaccaccatcgaggttgaaccagcagatctcagtggtgttacttcagtcaatacatctaacttggcctctggaactggtagcagtcataaccttcctggacttggtaataatggacttgttctgtgggaacatacaaggcaggagtggactgaaactagaagtctgcggctgaaggtgaagcatgttcgtgaaccagtattgagttggaatgcagcatatgagagtctgcttggatcaaataagccattttctcaacccattcctcttcatgagatg

SEQ ID NO: 266941 - DNA, 455 bp, Zea mays
  unsure (1)..(455): unsure at all n locations
gtcgcgcgccgctgcgttgagccaaggcgcaatggcaacctccacctcagttcccgtcctcctgctcctcgccgccgccgccggcctcctcctgctccccggctcgctggcgtggcagagcagcaactgtgcaccgggcgcgcccggcagtggctcgccgacgtggccttcacccggctccggctccggcggcggccacagcaagccgcccaagcaccaccatggcaagccgcccaagtgcccgccgtgcaaccctccgtacgtgcctccgacgcctcggccgtcaccgccgtacgtgccaccgtatgtcccgccgacgcctcggccgtcaccgccctacgtgccaccatacgtccccgtcccgccgacgcctcggccctcaccgncgtacgtgccaccatacgtccccgtncccccgacgcctcggccctcaccgncctacgtgccaccatacg

SEQ ID NO: 266942 - DNA, 678 bp, Zea mays
gataattccaataatgcaaaagaggcccgatttcggttttgtaagtttcctggagtctgagtccgtaaaacagatcttatcagaaaggggccctcatttcatctgtggaaatgaagttcatgtcaaagcatacagggaaaagcatgaattggagtacatgatgttaactgagaaagatatccattgtaactgcggtgtacgcgatgtgtcagatgtgggcgatttgcaattttgccaccattggcagtggacttcgctaatttgctatcggacacacaaatcatagacacataccggacccacaaatcatagacacttgggggtggcgacattgcaaatatttcgtcagatgtagatgcagttggtgagcatcatacagtgactattggtgactttgggcttcagacgaccttggaatttgactactgagactctgagaggaagcttcgtccactaacaaacattgacaaaagactcaagtgcaagtgctctgatcagtgacttagaagacttcaaatacagttcatttttcagttaacaaaaggaggaagttagaactacgccgtataacaatcaaatacaatacaattcatttttttcagttaacaaaagaggacatgacagaacatgaacatttcatacgaaacctgtatgaccggcagatacatctaggtgtag

SEQ ID NO: 266943 - DNA, 676 bp, Zea mays
cagcgcaccaacaggtgagcttccgcgggcttatcatggagaccaaggacacgtgtctgcgccttacgtcgctccgtgggctcagccgcagtcccagaccgcaggaagtcagcaaccgacacgcactcaggcacaggtatcttacagctcgtatgcttacccaccgccgccatgggcgtcacaggacagcaccgaatcgaacccttttgtagcggcagcatcgtcatctcagcaataccagtccacttcgagaacccctaccatgccaccgaacttgaggcctctactacagcagtcgcattcttttggagtaccacttccaaccgcgagtctggactcgccaataaatgggaacctgaagcaaccgctgtctgctggggctcgcaggccatcttatgtttcttccaacaagttcttcgacgacttgtttgagaggaactcggatggtagcctgaaagtaggcagcacaaggcacggtgatgtctatggaaaataaatgtcgttctcttgtcctgcctgcgtttgatgttatcagctgcctgcatattagaacgatttagttgatgcttctggcgaacttgctggcctttccataaataattttgccaaaccaaactatgtggaagcttcagcctatgagctgtcccctgtccagacatgttgaatggcaaaaggc

SEQ ID NO: 266944 - DNA, 1366 bp, Zea mays
cccacgcgttcgatctcgccctgcccgccgaagagcgcgcaagccccatctcgccctgcccgccgaagagcgcgcaagcaccaccgtcccggcagcgcggagatcggtccactccatccacgcggcgtcaggcgagcggggcgcacggacgctgcgaccgatggatctcaaggatagcctctccaaatttaagcaacagcaggagagatgccagtcatcactggcgagcatagctgcttcgacctcaaagccaaagcacagggcccaaccagcgcatgctcctaacgtcccagcaagaccatcacaacctattaagttttcaaatgatacagaaaggctgcagcacatcaattcgattaggaaatctcctgttggagcacagatcaagcttgtcattgaacttctttacaagacaagacaagcttttactgcagagcagataaatgaagcaacttatgttgatattcacggtaataaagctgtctttgacagcttgagaaacaaccccaaagtaagctatgatgggaggcgtttctcttacaagtccaagcatgacctgaagggaaaagatcaactgcttgttttgattagaaagttcccagaaggtcttgctgttgtggaagtcaaggatgcatattcaaatgtattggaagatttgcaggctctgaaggctgctggtgaggtttggctgttatcaaacatggactcccaggaggacattgtatacccaaatgatccaaaagcaaagatcaaggttgatgatgacctgaagcaactcttccgtgaaatagagctgccacgtgacatggtcgacatagagaaggagctacagaaaaacggtttcaagcccatgacaaatactgccaaacgacgagcagctgcccagatcaatggcgtaaaacccaaggctaagcccaagaagaagcagcgtgagatcacaaaacggaccaagctcacgaatgcccatctgcctgagctgttccagaatcttaacacttaaacgtgctacagtatctgacgacggaagatggttcattttactcctatttattgctacgttgtgtgtatgtgttatgcagctatgctgtatggcttatggttatgagcgccacaaatttgtttgtcaagattctggatgatatacttatgcattctgacataataggaggcaaaacctcaagattttccttatttttattttatcaattccagcattttctgagtttgcggcattatgtttggttgattttgggtcaattaggttggtgtgaggacaagctgaacatattttgatggattgcttagcttggaatgataccagaatttaaacctcataattacgagtactgcggatctgcaggtttag

SEQ ID NO: 266945 - DNA, 299 bp, Zea mays
atcaactgcttgttttgattagaaagttcccagaaggtcttgctgttgtggaagtcaaggatgcatattcaaatgtattggaagatttgcaggtgaccttaactctcctcatcagacaattgagatgtttctgaacacgatgtgacgcagatctgttcttaaaggtgtccaactagttaacagcaacaatgctgctaaaataataactccaagttagcagcactacatggtctataatcacaaagatacccagtgtggctgagtttagtcagtgagcccattattgcctttccaagaca

SEQ ID NO: 266946 - DNA, 806 bp, Zea mays
tttatcgcgtccgaaaatttcccctttccccaactaacacgacacccccttcccttcctccgatccccccgcctcccccaaaatccgacgcgtaatcgccgccatggccgccgccggcaagctcctcctcctggtcgccgccgtcctggcggcttccctcgtcgccgacgcgcgcccgtgcggccacgcgcagacgctcctcgtctccttctcctccgtcctcaggccgaacccggaccccaccaacccgacgccgctcaccaccacagtcgtcaccgtcctccgcgtccgccgcctcggcccgcaccagatccgccgccccgtggcgctccccgccgtcgagtcggaggtcgccgcctcgtccgcccaggaccgcgccaaggacatcctcgtcgtcgtctccggcctcctcttcggcttcggctgcggcgccctcaccgccgcgtccatgtacctcgtgtggtcgctcctcgcctccacctgcgcctccggatacgacgacgacgtctacagcgacgacgaggaccggctgtccgactccgagagccccaagaaggccggctacgtcatcatccacgacgctgacgagtacggcgccggtaagaactagggctggggatccgtcttcggtctcgccggggggtcagcagaaggattttcgtaataacatttgcatgattgcttggaattgtgcagtatactctatgcacctttttaatcatgtgtgtcgcgtctgtcggtatggtatcgtcgtctgggggaaaggaaatttaaattatatgaaatgaatatgctgttgatgtgtc

SEQ ID NO: 266947 - DNA, 1969 bp, Zea mays
cggctcgagctcgagcttcgggaggcaagtgcgatttcgatctcgcagccaccttttttttgttctgttgtgtatctagtagttggaggagatatgcagtttgcacttgcattggacacgaactcaggtcctcaccagataagatcttgtgagggtgatgggattgacaggttggaaaaattaagtattgggggcagaaagcaggagaaagctttgagaaataggtgctttggtggtagagttgctgcaactacacaatgtattcttacctcagatgcttgtcctgaaactcttcattctcaaacacagtcctctaggaaaaattatgctgatgcaaaccgtgtatctgctatcattttgggcggaggcactggatctcagctctttcctctgacaagcacaagagctacgcctgctgtacctgttggaggatgttacaggcttattgatatccctatgagtaactgcttcaacagtggtataaataagatatttgtgatgagtcagttcaattctacttcgcttaaccgccatattcatcgtacataccttgaaggcgggatcaactttgctgatggatctgtacaggtattagcggctacacaaatgcctgaagagccagctggatggttccagggtacagcagactctatcagaaaatttatctgggtactcgaggattattacagtcacaaatccattgacaacattgtaatcttgagtggcgatcagctttatcggatgaattacatggaacttgtgcagaaacatgtcgaggacgatgctgatatcactatatcatgtgctcctgttgatgagagccgagcttctaaaaatgggctagtgaagattgatcatactggacgtgtacttcaattctttgaaaaaccaaagggtgctgatttgaattctatgagagttgagaccaacttcctgagctatgctatagatgatgcacagaaatatccataccttgcatcaatgggcatttatgtcttcaagaaagatgcacttttagaccttctcaagtcaaaatatattcaattacatgactttggatctgaaatcctcccaagagctgtactagatcatagtgtgcaggcatgcatttttacgggctattgggaggatgttggaacaatcaaatcattctttgatgcaaacttggccctcactgagcagccttccaagtttgatttttatgatccaaaaacacctttcttcactgcaccccgatgcttgcctccgacgcaattggacaagtgcaagatgaaagatgcatttatctcagatggttgcttactgagagaatgcaacatcgagcattctgtgattggagtctgctcacgtgtcagctctggatgtgaactcaaggactccgtgatgatgggagcggacacctatgaaactgaagaagaagcttcaaagctactgttagctgggaaggtcccagttggaataggaaggaacacaaagataaggaactgtatcattgacatgaatgctaggattgggaagaacgtggtgatcacaaacagtaagggcatccaagaggctgatcacccggaagaagggtactacataaggtctggaatcgtggtgatcttgaagaatgcaaccatcaacgatgggtctgtcatatagatcggctgcgtttgcgtctacaaaacaagaacctacaatggtattgcatcgatggatcgtgtaaccttggtatggtaagagccgcttgacaggaagtcgagcgttcgggcgcaagatgcgttgtctggcatgctgttccttgaccatttgtgctgctagtatgtactgttataagctgccctagaagttgcagcaaacctttttatgaacctttgtatttccattacctgctttggatcaactatatctgtcatcctatatattactaaaaaaaaaaaaaaaaaaaaaaaaaaaaaaaaaaaaaaaaaaaaaaaagggcggccgc

SEQ ID NO: 266948 - DNA, 501 bp, Zea mays
cgtgtacgcgtggtgatacctcccaagagcgtgggacgtagatcatagtgtgcaggcgatcgcatttttacgaggctatttgggagcgatcgttggaacacactcaaatgattgctttgatcgcaaacttggcacctaacatgagcatgccttccaagttttgacttttatgaatccaaaaacacgctttcttcactgcaccccgatgcttgcctccgacgcaattggacaagtgcaagatgaaagatgcatttatctcagatggatgcttactgagagaatgcaacatcgagcattctgtgattggagtctgctcacgtgtcagctctggatgtgaactcaaggactccgtgatgatgggagcggacacctatgaaactgaagaagaagcttcaaagctactgttagctgggaaggtcccacttggaatacgacggaacacaaagataaggtgcggttggatgtggaaccaccggttagttcccaaaaatatcactcact

SEQ ID NO: 266949 - DNA, 392 bp, Zea mays
gcaataccattgtaggttcttgtaaccttggtatggtaagagccgcttgacaggaagtcgagcgttcgggcgcaagatgcgttgtctggcatgctgttccttgaccatttgtgctgctagtatgtactgttataagctgccctagaagttgcagcaaacctttttatgaacctttgtatttccattacctgctttggatcaactatatctgtcatcctatatattactaaatttttacgtgtttttctaaaaaaaaaaaaaaaaaaaaaaaaaaaaaaaaaaaaaaaaaaaaaaaaaagaaaaaaaaaaaaaaaaaaaaaagaaaaaagaaaagtatagggtgaaaagaacaaagtgtcagaacaaggttaagtaagaaaagggggggcccc

SEQ ID NO: 266950 - DNA, 528 bp, Zea mays
agcaaaccacaccagtcaccagcctcattgcctcaaccccaaaccaatccgtcgcagacactcaaggtcgcaggatgccgccgccgcgtgagcaccaccagccccaggacgaagaggacgacgataccgcaggcgttgtcaagctcatcagcgccgagggcttcgaattcgttgttgacaggaaggccgccatggtctccaacaccctccgcaacatgctcacatccccaggcggcttctctgagacgcgccagggcgaggtccgcttcccagagatccccaccaacatcctcgagaagatctgccagtatttctattggtcgctccattactccagtgggaaggagacagcggagtttccaatcgaaccggagataaccctggagcttatgatggccgcaaactatctggacacttgatgaggagcctgaggggtataatcctagtttgtccgatccagtgtggtctggcacaatgtaatgtacaggtgggagggaagcagaaaccaattgcaatctacagtgtgtg

SEQ ID NO: 266951 - DNA, 438 bp, Zea mays
tgagaatttggtctctcgatatgatgagttagaggaggaaaatggtgagcctatgaatggcgagtatgatgagcagatctcaggctatccaagggacaattctgagttcagccccatacagatgatgggtgatgtgagccacgatgaggatgctgaaagggatgagggcgaggaggatggagaggactatgaaactgaagatcctgctggtgatgaggatgatgacgttgagatggattgggatgatgacattcgggacaacgatgatggtaatggagcagccaacgcagatgaggatgaaggtggtacatcatcatattcttcagagtatagtgagtgatgagagtggattgaagttgtgcaggtttgtggtctgccaactatgtaagaggctgccagttctaaactgtgctgtggctatggccctatttctattca

SEQ ID NO: 266952 - DNA, 760 bp, Zea mays
ggaggatctcattaaatgccttgcaccaacttacagaggcgatttttctttacctggagcactgctgcggtcaaaaggactgaaccggataggaaatctgttggtgcccaatgacaactattgcaagtttgagaactggatcatgccactcttcgaccagatgctacaggagcaatctactgagaatgtttggacaccgtcgaaggtgatagcgcgccttggcaaagaaataaatgatgaaagctcctatctttattgggcatacaagaataacatccctgtatactgcccagcattgactgatggatcacttggagacatgctgttttgtcatgcagttcgtaatcctggccttattattgacatggtacaagatatacgtctgatgaatggggaagccatccatgcaacaccaaggaagacagggattatagttcttggtggaggccttccaaagcatcatatatgcaatgccaatatgttccgcaatggtgcagattatgctgtgtatattaacacggctcaagagtttgatggtagcgattctggagcacaccccgatgaagcagtctcatggggcaagattaagggttcagcaaaacctgtaaaggtgcattgcgatgcaagtatcgctttcccgcttcttgttgcagcaacatttgcacgtaaggttcataactccaaatgaacagactgaatgggattcggtggagtgaatgggcaacagaattttgttgaactcttcaaatgaccttttgga

SEQ ID NO: 266953 - DNA, 449 bp, Zea mays
cttcggctccacaagagccttcagccacaagaaccccctcaagtcagactggtgcctcggaaagctgagagccgcactggaagacatgggataccgagacggagacaccatgttcggagccccctacgacttccgctacgcgccgccgtcccccggccagacgtccgaggtgtactcccgctacttcaaggagctgatggagctggtcgaggccgcgagcgagaggacccggaagaaggccgtcatcctcggccacagcttcggcggcatggtcgcgctcgagttcgtccggaacactccgccggcgtggcggcgcgagcacatcgagcgcctcgtcctggtcgcgccgacgctccccggcgggttcctggagccggtgcgcaacttcgcgtccgggacggacatcctctacgtgccagcgacgacgccggttgccacgcgagccatgt

SEQ ID NO: 266954 - DNA, 418 bp, Zea mays
ccttcagactatgtaacatggttactatgatcccatatggccatatgggaagcgtaattagtagcattgtgatctttaacattgttctgcagactgcatggatccagtaacaatagtgttttcaatgcagtaggagtattgattaaacgatgtataaccctgctggttgtatatttctttgtgatgtggtaagtgagaccatagacttgtgttttttagccttcttattgagtgtgctttgagtatgtcgaagatgaacacttgtagttctgaatcttaacacatccaacatgtaagagtgtgtttacttcgaaatctaaaacgaaaaaatttctaatgaatacctactaaagcatttgggatgctcttgcacacctaaacttacttacccaaaccacttaagtaaatggatttggtc

SEQ ID NO: 266955 - DNA, 529 bp, Zea mays
ttgttttcactaaactatgttttatataagttgggatctatgttttttggtctaaaaaaggtaaatacgcaaagtttccaaaagaactctaatattctttttttcaattgcgtatggcatatccctactctgtttactgtcactgcattccctcttcacagttcttcatgacctgcattgcaattttcttagaataaatcaggatctattttctgttcattcaaaggatggttacatttaaatgataaatctccaatatcatttgtccttcaaatggaatcttttagtttttttaaatggtattcggttaatctaatttcttttcaattttgtcatctcgctaaggtaaaagtacctgggcatgtacattaggcccggagctccacacatgagggaagcttgcatatgttcttgacggcgataacttaagacatggtctgaacaaggatcttggctttaaagctgaagatcgtgcttaaaatataaggagagttgggaagtgtttcaccatctagataaaaaggacaga

SEQ ID NO: 266956 - DNA, 547 bp, Zea mays
cgcggcgcgcggtgtgggggggcactagtgagccttgcccccatttcctccccgggggtgccattccctccgccctggccgttgcccgcgcctcgcggtcgcgcacctgaaccggagccccgcgtcaaatctagggttgcatccgcgccgccccctcctcccgagactcccagcggctggaaccagaacgagggtgacaggcgacgaaagctgcgagggacgccccctcgtcgaatgcactggcgaccgttccgtcgaggagcagccggagcacgcaggagttgagggaaaagctttgaaaatgtcatccaccgtgccgaagtcatcaaatatcttctggcatgattgtccagttggcaagactgatcgccagaagctactcaagcagaaaggctgtgttgtctggattacaggccttagtggttcaggtaaaagtaccttggcatgtacattaggccgtgagctccacacaagagggaagcttgcatatgtccttgacggtgataacttaagacatggtctgaacaaggatcttggcttaaagctg

SEQ ID NO: 266957 - DNA, 516 bp, Zea mays
ggctgccaacagcaacgaagccgcaccaggccccgcactgcccatggacgcacgcctcccggggctctcgtgtccctgtccgtctcccgcttgcggcctccacagcaacgcggcgcgcggggtggcggtgctctcgcgatcctcgtgtcgattccagcggcgggggtgccattccctcccctggccgttgcccgcgcctcgcggtcgcgcaccggaaccggagccccgccgcgaatcgagggttgcctccgcctcgccccctcctcccgagactcctagcggcaggaattaggacgagggtaacaggcgacagatgctgcgaaggacgccccttgtcgaatgcgccggcgaccgatccgtggaggagcagccggagcacgcatgagttgaagggcaagctttgaaaatgtcatccactgtgccgaagtcatcaaatatcttctggcatgattgcctagttggcaagactgatcgccagatactactcaaccagaaaggctgtgttgtctggatcac

SEQ ID NO: 266958 - DNA, 997 bp, Zea mays
gcggcgcgcggggtggcggtgctctcgcgatcctcgtgtcgattccagcggcgggggtgccattccctcccctggccgttgcccgcgcctcgcggtcgcgcaccggaaccggagccccgccgcgaatcgagggttgcctccgcctcgccccctcctcccgagactcctagcggcaggaattaggacgagggtaacaggcgacagaggctgcgaaggacgccccttcgtcaaatgcgccggcgaccgatccgtggaggagcagccggagcacgcaggaggtgtccgagcgaagttatttgcagacgcgggccttgtatgtattgcaagtttgatatctccatataggagagaccgtgaatcttgccgtgcattgttgtcggatggtagcttcattgaagttttcttgaacatgtccttggaattatgtgaagcaagagatccaaagggcctctataagcttgctcgtgcaggaaaaataaagggttttacaggagtagatgacccttatgaagcaccactgaattgtgagattgagatcaaagaggtagatggtgtatgccctccgcctgctgagatggcagggcaagttgttacttaccttgaggagaaaggcttcctgcacgagtaggctgacgctgaatccaagctacatccggggaaggtttcaatcagacaagcgcagaataagtcaaaagcgctgccagttaccgtatggttacatagattgatctggatgcctagtatttttctttccgcgcttgctctaccacaagttccattcagtttcattcagatgagcctagatggttcctaatttctttgacctctggaatagattacctgtaatgcaattctgataacagcttggggcagtatcgatttgtcaagggaaggtccgcctaatgttgagagaaactgtattcttgtgctcccctttctgcagtgccgacgtgtaccctttccgttttactaaattataattagcttcccttctttt

SEQ ID NO: 266959 - DNA, 1113 bp, Zea mays
gtgttattgatggttctctatacagaacaaagcagaagagatgacttagagtctcttggttatgtgctgatgtacttcttaagaggaagccttccttggcaaggcctgaaagctggaacaaaaaaacaaaagtatgacaaaattagtgagaagaaaatgctaacctcaattgaggccctttgtaaatcttatccatcagaattcattacgtacttccattattgtcgctctttgcgttttgaagataagccagactatagctatttgaagaaaaatttccgggatttattcatccgtgaaggttaccagcttgattatgtatttgattggactgtgtcaaggcaagctgtggacaataacagattgcgactgagcgggaagacaggtggcttggtgggaccatctgtggatagggctgaacgagctgcagcaagacaagatgttccagatagattcactggtcaagctggtgcttttgctagaagaaccggctctggttctggtcaatacggagaacacacaaagcacaggactctgttggattcacttatggcatccaagatggctgttgattcagataaaagaaagcattcatcatctcggaatggaagcacatcaaggaaggctcttctgtcaagcagccgaggttctggagatcccagcgacccaaatcgcagtagccacctagtcccgaccaccagcagcagcagccgtccatcaaccaatcaaaggcttcaccagtcaactggacttgagggcaggacctcgtcattcccaaaacctggaagaatcggccaggatgaccccactatgaggagttttgaacgccttactatcagcgcagagaggaggagatgaatctttggaggtgcaaaaggtctgaccattgacgagtatactgatttcattgaatattcattcggttccagatgatgcttactgatgagcaagtcaaaagattatgtactgtgcatgatgctgagctcttcacattgcgatgctcgtcgaatcttggcacaaatttgagttctgtacattcgttttccaaacggttagcgaagcatttagcaccccgttagggacgtgcaaaatgatgatgattaacacttatat

SEQ ID NO: 266960 - DNA, 382 bp, Zea mays
atcatttccaaaacctggaagaatcggctatgatgatccccacaatgaggagttttgaacgccttactattagcgcagagaggaggaaatgaatctttggaagagcaaacgatctgagctgctcccggcgagtatactgattcactgaatggattctgtgctgtgcatggtgctgagctctgcacatagcggtgctcgttgattcttggcacagatgatttgagttatgtacattcgtttaactcttccaaaaggttagcgaaccattttacaccccgctatgagggaccggggatcggctgcaatgtttaagccgtggtgatttaagatgatgttgactctaatacttatataatgacaatgaaaaaaagttccctagcct

SEQ ID NO: 266961 - DNA, 1104 bp, Zea mays
gggtcgatacacggcgctccaccacaacagcgaaggagaaagcagaccaacctagccacccagggagaaagaggccaaaagggaggggagagtgtcgtcatggcttccattgtcgcttccaggagggccgttcctctagttcgcgctctggagaagctcatcgcagcgtcctccgctcccgggactggctccgccctcaggccggtggcagtcgccggcggcctccgcggctacaacaccggcgctccgctccgacgctacgagggggccgagtcggaagacgatagcgtccgcgagtacgatgggcggcacggcggccgggactacgctgtgcccagcctgttctcagatattttccgtgatccgcttagtgcgccgcacagcattggccgcctgctgaaccttgtggacgacttggcggtggcggcgccaggtcgtgcggtgcgccgtggctggaacgcgaaggaggacgaggaggcgctgcacctgagggtggacatgccaggcctggggaaggagcacgtcaaggtgtgggcggagcagaacagcctggtgatcaagggcgagggcgagaaggaggatagcgaggacgaggccgccccgcctccgagatacagcggtcgcatcgagctcgcgccagaggtttacaggatggacaagatcaaggcggagatgaagaacggcgtgctcaaggtggtcgtgccgaaggtgaaggagcagcagcgcaaggacgtgttccaagtcaacgtcgagtagatgtttccaaatagaagcaagtgccggtacgggatggaggattggaggggcactgccaaactaggattcctctctctcaatctgatctggattctggaatcagatttctcttctttcatttttctcgtctatcttctatcagtatgaaataagcaacgtcgcttcagttttcgtgtcaaggccggtggagtcgcctatgtttattttattttctttgtatttcctacctggacacacgttctctatgccgtgtttggtttccgcagatttttaaaatatgaatgttcaaaccccaaaaaaaaaaaaaaaaaaaaaaaaaaagggcggccgcccgggaatccggacgta

SEQ ID NO: 266962 - DNA, 924 bp, Zea mays
  unsure (1)..(924): unsure at all n locations
acaacaggaggaatgtgggttttgattcacgggcaggatctgcacaaggtggatcatgttcatcgcataatggttttataggctctggcagcaatgcctctggccactcaaaggaaagacacgaacctgaggatgataaagttgtcttgcataggaagcaacatgcacaatggaacattgatatcattagctcctccaagtcaagaatggcagagtcttcattttcttctgtgagctctattaagaagcaacctcaaccaaattttttgctagaaagcaccaatagtttgaatcaccgtggaagcgaagcttctggcactgtgacttccactacaacagcgggtgcctcttcaaccccggccactcagttagttttgaataaaggacctgtatccagtgctgcaacccagaatgagaagccactacctctgcaggtgcttgtaccatccaaatctgaagtgcagaagcaggcttccctaactggcagtgcaactaccgaggccgtttcagtatcaaggcccttgactgccccacaagtccctgcagcaaaacaaagtgcaccagtcacttcaacagctcagaatgcaccttttctttctcgttcaatgagtgctgttgggcggttggggaatgaaccatctgccaatgctcctagtttcgttccccgttcacgaacatatcgcaatgccatgatggagaaaagttctggtggtggaagctgtttcacacatcagcaaggttcatcggagcaagcagttgcaccatggcaatcgatgtttacatcgcaacctttcattcggccatcagagaccttgtcttggaaagaggaaacattattgagatctgggtttacatttggaactgtgaagcccgagtcactgaacccatatcanggcagagaagagaactcacagcaagcgagca

SEQ ID NO: 266963 - DNA, 688 bp, Zea mays
gagaaagatgaatttagcaggctgttgaaagcaaaaatcaatgagcttggcatgtcggagaggatcgagtgtacaccaaatgattcaccttcaggaaaattgactgtgcctgtgctgcaagagctcatttctgcccttgcaactgacatgagcacttcaatctcccaatgtagcaactactctggtgcatcagcacccttacgctgcaatggaaatgttgactgcatcaatccagcgcattgtatattctccaatgagcaatcacctgattttcagaaatgctatcagggtgaacaagatgttgattcttctgctacatcgctaaacaatgagcccaatcagccaagtccaacatcagtccttgaagcatccttctcaaatgatacttctttaggaagtccagttgaaaagaatgaaggaaaagacttcattgtgtcaattgagaacaagatggaagatctctttaatttggagtctgacatcgtcgatttagcaatgtcaattgacacaaggaaaactgatgctgaagaagcacaccatgacaatgacaagttatcatgtttacagaattacttgcacatgattacaacatcttagaatccaggctctgcagcattagagaagctatttcaaatgctgaactgcttgtgggcagtaacctctcgcgtacacagcatcaagactccca

SEQ ID NO: 266964 - DNA, 495 bp, Zea mays
cccacgcgttcgatcccgtccgccgccccccaccaaccacgaaccacgcaagcgaacccggccggcgcggggcagcggcgatggcggagatcccggtgatcgacctgcgcctcgccggctcgtcgcccgacgagtcggcgcggctgcgcgacgcgtgcgagcgcctgggctgctttcgggtgaccggccacggcgcgcccgcggggctcctggccgacatgaaggccgccgtgcgcgcgctcttcgacctccccgacgacgccaagcgccgcaacgccgacgtcatccccggcagcggctacgtcgcgccctgccccgccaacccgctctacgaggccttcgggctcctcgacgccgccgcgcccgccgacgtcgacgccttctgcgcgcgcctcgacgcgccgcccaaagtcagggagaccgtcaagacctacgcggagaagatcacgacgggatcgtcggcgtcgccgcgagcttgccccagcctggggctgg

SEQ ID NO: 266965 - DNA, 742 bp, Zea mays
acacattttcgcgctttggcccaccgccaaaccgacagatccaaggccaaagattgcaacagtggatcctggctccaccttggcagacctccacgctgctcctaccccggtgccggcgccgcagctgaggaggcaggcgagcttgggcggcacggcggggtcgaccttgaccacctggttcacgtccacgacggtgtactcgctgaagctggagacggcgaggaggtcgtgcagcgggctcccccgcgcgtcccggaaccgggtggtgccgtcgcgccgcatcccggggccgatgacgaacggcaccgcgtcgcacacgttgctgtgctccgacgcgcagctggcgcagcgctcgcactgccccaggaacgtcggcaccacggtgtcccccgccgcgaagccctccacgtgctcccccacgctctccactaccccgtacgcctcatgccctagtattcttggaaacaccggtgccaccttagctttccagaaggtgatatcggtgtggcagagtgaggtgcagatgacccggatgcggatctcgtacgctttcggcgggtcgacgacgatctcctcgatggtgagtggctcgccggcggctcggcacaccgccgctttgcagtggatgggcttggggctccggtcctccgccatggcgaactgggacggtgccagctgagatcgatctcgaacgcagagggcacagatgaaagtgcctcggacgcgtgggcggacgcgtggg

SEQ ID NO: 266966 - DNA, 1198 bp, Zea mays
  unsure (1)..(1198): unsure at all n locations
tgtcntgcagtcccagctcatgcgtgaccagcgcgtccagctgcagctccttgtccatgcatttcttggcgaggacgngaatgtgggtcttgggcttcagcccgccgaagagcgaccccatgacgcacctcccgaacagcagctccagcgacggcaggcacacctcgtcgctgtccctccccagccccagcacgatcgtcttgcccttccccatcttggtgcatctgaaggcgtcggtcatcaccgacggcacgccgatgcactcgaagctgtagtccacgccgccgccggtcatctcaacgatcacctctacgacggaacgcttgtccagctgcggtggtccaaggcgcgaaaatgtgtggcgcatccaagatcatcggcgttgatctcaaccctgacaaggaggaagtaggggggacgccacgcggccgggagatcgttcggcgtcacagacttcgtcaatccatcgcagctggacaagcgttctggcgtagaggtgatcgttgagatgaccggcggcggcgtggactacagcttcgagtgcatcggcgtgccgtcggtgatgaccgacgccttcagatgcaccaagatggggaagggcaagacgatcgtgctggggctggggagggacagcgacgaggtgtgcctgccgtcgctggagctgctgttcgggaggtgcgtcatggggtcgctcttcggcgggctgaagcccaagacccacatccccgtcctcgccaagaaatgcatggacaaggagctgcagctggacgcgctggtcacgcatgagcttggactgcaggacatcaacaaggccttcgacctgctcctgcaggggaaaagtctgcgctgcatcctctggatggacaaggacaagtaacggaaggagaggggcggccggaccaatccttcctgtctctgaataaatttgccctgttttttcagcgaggcgtcgctgaaagctggtgttagcggcgaccaagactatctgttcctgaaaccctgtgtatcagtatcgtttcgttgtctgaactgattaaatcctaatatcgatagattagactctccccagcaaccgctttgtcccctgaataaagtgattcatcatctcttttttacgtctagcaacataagagaaaacgaaggttaccgtctgtcccctagtgtcgttgtttcggaaatctgacacacgagttatact

SEQ ID NO: 266967 - DNA, 500 bp, Zea mays
atgacgtcgcttgcccccttccttagcctgggattcgggttgagccaaccacaactgaaagggagagccgaagagggaagggggagaagcgaccgcgccgccaaaccctagccccgcgcaagcgaccgtgggggagctccactccgccgcgccgccccccgtccccgtttcgcgacatggccgattccccgcgcaggaggtactcaaggtccccttcatacagcagggggcacccaaaagggaggtcaagatcacaatctccagctcggtctcagtctaggtcacctgtccctgatcctagatctcaggcgaggtcaagatctagaagccaagagagggaggaggatgctgttaaccgtgggaatactctgtatgtgactgggctctcttcgagggttactgaaagggatgttaaggattatttttctaagcatggaagggtggttggttgccatgttgttcttgaaccccatacacgtgtttcccgtggatttgccttt

SEQ ID NO: 266968 - DNA, 420 bp, Zea mays
ttcatcggcagcttgccggacaacctctgcgactctcccgcgatgagcatcatcaacatctcccgcaacgcgctctccggcacgatcccggcgttcaagaactgcaggaggctggtgtcgctgtacctggccggcaacggcttcaccgggcctataccggcgtccctcggagacttacaggtgctgacgtacatcgacctgtccagcaacgccctcaccggcggcattccgacggagctccagaacctgaagctcgccctgctgaatgtctcgtacaaccagctctccggccgcgtgccgccatctctgatcaccgagcttcccgccgtgttcctccagggcaacccggggctgtgcggcccggggttgccgaaagactgcgacgccgacgcgccatcgcggaggcgtcagggactcgcg

SEQ ID NO: 266969 - DNA, 1054 bp, Zea mays
attaagtggtcataaagatgagggatatgcattgattggagtcacttgttactggaagacttgtttctggcgactgcaataagtgcattcacctatgggagccgacttcaaacaactggaacgtagatgcaaacccatttgttggacactctgcaagtgttgaagatctacagtggagtcccacggaagccgacatatttgcctcatgttctgtggatggtacgatatcaatatgggatatacgtacagggaagaaaccttgtatttctgtcaaagctcatgaagccgatgtgaatgttatctcatggaacaagcttgctagctgcatgatagcttctgggtgcgatgatggcagtttctcagttcgtgatcttagatcaattgaggaggactcgttggtggcacattttgagtaccacaagaaagcaattacatctatcgagtggagtccacatgaagcatcatcattagctgtaacatctgaagatcatcaactaacaatctgggacctttcactggaaagagatgcggaggaggaggctgagttcagagcaaagatgaaggagcaggcaaacgcacctgaagatttgcccccacaacttctctttgctcatcagggccagagagacttgaaagaactgcactggcacccacagataccgtcgatgatcatatcaacggcaattgatggcttcaacgtgttgatgcctagcaacattgatacaaccattcctggcagcactgatgcagcaatgccatctgctgagccacagcactagccaacattgatacaagcattcctggcagccctgatgcaatgccatctgctgagccatagcactgatgtaggcgtttcttgtagcatggctcccagcttagaattccaggtctacgcagtggtgtatccgagtgcggttggcatttgtgttgagagtgctatgatgctatgtttgtgtttgagcatgatgggaaaggtttggttggctggcattccataatatatgataagatttattaatatgtgcattctatgatatatgataagatttattaa

SEQ ID NO: 266970 - DNA, 1391 bp, Zea mays
cggacgcgtgggctgtgaaggagtctggtgggctgaaagaaaaattgtttcatactgcatacaatgccaagagacaagcaatccttaaagggaaaaatccatccccagtgtgggataagttggtatttaacaaaataaaagctaggcttggtggacgagtgagacttatgagttcaggtgcttctccactgtcagcagatgtcatggaattcctgaggatatgctttggtggtgaagttcttgaaggctatggaatgacggagacatcctgtatcatatctgcaatggatattggtgacagatcaattggtcatgttggatccccaactgcatcttgtgaggtgaaacttgtggatgtcccagaaatgaattatacatctgatgatcaaccttatcctcgtggagaaatttgtgttagaggacctataatattccagggttactataaggatgaagttcaaacaaaagaagtcattgatgaagatggttggttgcacactggagacataggtctgtggctacctggaggacgtttaaagatcatcgataggaaaaagaacattttcaagttagctcaaggagaatacatagctccagagaagattgaaaatgtctatgccaaatgcaagttcattgcccaatgttttatatatggcgacagtttcaactcttccttagttggtattgttgcagttgaaccagaggttatgaaggcttgggctgcatctgaagggatccagtgcgaagacttgaggcagctttgtgctgaccctagagcaagagctgcagtcctggccgacatggattctgttgggaaggaagcacagctaagaggttttgaatttgctaaagctgttcggcttgtcgctgagccattcacagtggacaatggtctcctcaccccaacattcaaggtcaaaaggcagcaagcaaagacatactttgcaaaggaaatttcagatatgtacgcggagctgcgggaggcagaggcacccaggtcgaagttgtaatgatcaattcaaggagaagcgacatatacaggcttacagatcatatgtctagaagaaacgtaatcatctttttactggcgcagcaaataatggttcctgcaatggtcaggaagagtcgagacggaggcagtgcttggtgcaaatcatatagatgaatcctcgttatgaacctctcaactgaatgccgttttcccttgtccaacgtgccaagccacgttagcctgatactaggtagagaggaaaaagatattctgcaaatgtaacagtgaacagttaacaatcgtggtgtgttgttgcatatctagttgatcggaacgacctagagaaatgtgaagaacacgaagcgcctttctgtttgaatttaaataaggattattcgcg

SEQ ID NO: 266971 - DNA, 1034 bp, Zea mays
ttgtggacgtcccagaaatgaattatacttcggaggatcaaccgtatcctcgtggagagatgtgtgttaggggacctataatattctgtggttactataaagatgaagtccaaacgtaacttgttatcattacacatctatttacatcctttaaataaatacatccattaaactttgataaatgtatttgaaaacctgcagaagagaggtcattgatgaggatggttggttacatactggagacataggtttgtggctgcctggaaggcgtctaaaaattatagataggaaaaagaacattttcaagttagctcaaggagaatacatagctccagagaagattgagaatgtctatgctaagtgcaagttcattgctcaatgctttatatatggtaatattcatgctttcatctgagctgaaagcacctcgtgtacatcttaaggttgttgatctggatgcaggtgatagtttcaactcttccctagttgccattgtagcagtcgaaccggatgtgttgaaggcttgggctgcatcagaaggaatccagtacgaggacttgagacagctctgtgctgatcctagagcaacagctgctgtcctggctgatatggattccattgcgaaggaagcacagctgagaggtttcgagtttgctaaagcggttactcttgttgctgagccattcacattggataatggccttctcaccccaacattcaaggtcaagaggccgcaagccaaagcatactttgcaaaagaaatctcagacatgtattcacggttgctagagacagagttagctaggtcgaagttgtaacttgtgcggtatcagtatcaggagaagggccatcaatacagccgtacaggagattggattctgcaattgtttattccacctcacgaaataagtagtaaaatctttttactgatacgggaaataacggatcatgccatgctccggagtcgatagtttttttcaccagacggggcagtgcttggcgcatgctgaatatatggttctagttataaagaa

SEQ ID NO: 266972 - DNA, 653 bp, Zea mays
ggccttcattttatgagtttcgaaagcgataatggtcccacccacccatccccccgcacgcccaggaggtggacctaccaatcatcactgtccctgttctcttccagcggcgcgggggatagctcgccggagtccggagtcgccgctgccggtccacagccccaccgtctgcttcacctcgcccgtcatgtctgctgccgcagcagctgcagctgccgctcggtgcgtccctctccgggtgtcctcgccggagaccgcgaagtccgccgcttccattcccacctcctcggccgcctctgcgtctgctcccctccgcgccgccgtcgccgcgggacccggccgccggcttccggcgccgccgttccggtgctcctcatcgtcgccggagaactctgccccgcgcgatcttggattgcttctggaggtggaaggagttcttgcagatgtctaccgttttggcaatcgccaagctttcaatgtaccatttcgaagcctcggactagattgtgcaaattggacagagcccatatatgctgatttggtgaggaaagcttgtggtgatgaggaaaggatgctggcattattctttgacaggattggctggcctacatctttgccaactagtgagaaaggatcatttattaaagtgttct

SEQ ID NO: 266973 - DNA, 805 bp, Zea mays
gcagcagctagctagctagcatggccgggaaagagcttacgctgctggggttatgggcgagcccgttcgtgctccgggcgcgcatcgcgctcagcctcaaaggcctcacctacgcttactccgaggagaacctcgacgacaagagcgagtttctcctcagctccaaccccgtgctcaagaaggtgcccgtgctcatccaccacggcaagcccgtctgcgagtcccagatcatcgtgcagtacgtcgacgaggctttccccgccgccgcacctaatttccttccatccgacccctacgaccgcgccattgctcgcttctgggcctcctacgtcgacgacaagttctacagcgcgtggatacccgtgttcaggggcaggacggcggaggagatggcggaggcggcgaggcaggccgtcgcggcgctggagacgctggagcaggcgttcagggagtgctccaaggggaaggccttcttcggaggggacagcgtggggctcgtcgacgtcgtgctcggcggccttgttgggtggctgtacgccaccgaggccatctgcggggtgaaggccctcgacgccggcaggacgccgctgctggcggcgtgggcggagcggttctgcgcgctggagggtgtcaaggggctgatcccggacgtggacaggcttctggagtataccaaggccaggcgggccgtatttggcctgccgccgctccgtccttaggcatagtggacatgtttcttttctttttttttaaaaaaaaattatatgttctatgtttgtttgaaataaagtactgttatggtgtt

SEQ ID NO: 266974 - DNA, 685 bp, Zea mays
tttactcgtccggcgagcttctcctcagctccaaccccgtgctcaagaaggtgcccgtgctcatccaccacggcaagcccgtctgcgagtcccagatcatcgtgcagtacgtcgacgaggctttccccgccgccgcacctaatttccttccatccgacccctacgaccgcgccattgctcgcttctgggcctcctacgtcgacgacaaggtatctaccattttttttttgttttctagtgtacatacggtcagtttcaccgatgcatttttttgctgatggcagttctacagcgcgtggatacccgtgttcaggggcaggacggcggaagagatggcggaggcggcgaggcaggccgtcgcggcgctggagacgctggagcaggcgttcagggagtgctccaaggggaaggccttcttcggaggggacagcgtggggctcgtcgactcggctcggggcttgtgggtggctgtacgccaccgagccatctgcggtgaagccctgaccgcggagccgtgtgcgggcgacggttgcgctgagggcaggctgtccgacggacagtttgagataccaagcagcgccgattggctgcgccgtccgccttagcatagtggacatggttcttttctttttttttaaaaaaaaattatatgttctatgtttgtttgaaataaagtactgttatg

SEQ ID NO: 266975 - DNA, 502 bp, Zea mays
  unsure (1)..(502): unsure at all n locations
caagccaccatcgccattgccagagccacagccacagccaccacagatgctgatgacgtcaacgaaaaacagagggggcaaatggaagtttgtattgaccggggtccttggtggtgctgcaattctggtaacacttggccttagcgttctggtattttgcttgttgagaagaaaaggaaggaaaccgagagggagaggagtggagcagactgaggagggcattcggtctgggcggagaagtagtagtgtgaatcccgtcacaatgtcacccatggcatcccccagagccagtggttcaccaaagggcgttcctattatcacagatgaattcacctatgagcagttgcaccatgctgcagggggctttggggacgataacctcgtcaagcatgggcactccggtgacatgtactatggtgtcctggagagtggctttcaagttgtcataaaaaagattgatctgaagaccaagaagaatgccaaggcgnattgagctttctta

SEQ ID NO: 266976 - DNA, 770 bp, Zea mays
ggacaagttcgggcatgtttcttcaaagaggaagggacaaggttattcgagtaattgagaagaggattgcagattataccttcatacctgtagatcatggagagggactccaagtactgcattatgaagtcgggcagaagtatgagcctcactttgattattttcttgatgagtttaacaccaagaatggtggtcagaggatggctactcttctgatgtatctatcagatgttgaagaagggggcgagactattttccctgatgcaaatgtgaacgtcagttctttaccatggtacaatgagctttcagagtgtgccaagagaggcctttctgtcaaaccaaagatgggagatgcacttcttttctggagcatgaaaccagatgccaccctggacccattaagtttgcatgggggttgtcctgtgattagaggaaataaatggtcgtcaaccaagtggatgcatatccacgagtacaaagcttgagccttcaagactcgagagtcgagcgtaccaaagatggatctctatgcatgtgacttggggctgtctactgggttgacacccatgtatgctttacagacccactgaagctgtattctttgctcctttgtgggacgggggagaattgcagataataggggccaataagcaggggccttgctcatccctgcagtatttttgggtctgatccttgctgacttggcttttgtcttttcttttctttttcttaccttgccgtaccccagctatagaggaatggtgtagtgt

SEQ ID NO: 266977 - DNA, 562 bp, Zea mays
  unsure (1)..(562): unsure at all n locations
agagaagcatcgcatctctgagtctgaaaccctagccgcctgtctccctgtccggtctccactcgtccgggcgacgagacgacgacggagggtttctgcgggggatttgtttgtcgctgactcgccggcgaccaagatgaggccggttttcgtggggaacctagactatgatacccgccactcggagctcgaccacctcttctaccgctatggcagggtcgagcgcatcgacatgaagtcaggttgcccgcccttgcttttgcccacccctcgttttgtcgtcgtgttcggtcgatttaggttcgatctgatcttattgtgtacctagtcagctgttatatcttgatgtttgaatttcattgaattgaaggaaaaaaagtgagggaatacccccattctgtataaaaaaataaacaatgagggaatgagcacgtttgtacagtaattgttttgataagattcatcatccaatagtgctggattagttgttccagttattcttgatngattagctaatgattttgttgaaatgattcgtcattctaagtttggacacgttata

SEQ ID NO: 266978 - DNA, 924 bp, Zea mays
tttcacgcgtacgaagcatcgcatctgggaggctgaaaccctagccgcctgtctccctgtccggtctccactcgtccgggcgacgagacgacgacggagggtgtctgcgggggatttgtttgtcgctgactcgccggcgaccaagatgaggccggttttcgtggggaacctagactatgatacccgccactcggagctcgaccacctcttctaccgctatggcagggtcgagcgcatcgacatgaagtcaggctttgcttttgtctactttgaggatgaacgtgatggcagtgatgccatacgggctcttgatggttatccatttggccctggcagacgcaggctttcagtagagtggtcacggggtgatcgagctgctagacgtgatggcaacaaaccagaagcaaatactaagccaactaggacactgtttgtcattaactttgatccaatgaacacaagagtcagtgacatcgaaaggcacttcacaccatttgggaacatatcaagtgttcggataaggaagaactttgcttttgttcagtttgaaactatggaagaagccagaaaggctcttgaagctactcatgctaccacccttttggacagggtgatttctgtcgagtacgccttcagggatgatagtgaagtgagtgataggtacggcagcccaagaagaggtggtggctatggtaggcggggtgatagcccagcgtaccggtcacgtcctagtccagactatggtcgcccagcaagtcctgtatatggttcatatgacggtcctggtcctgttcgtgatcgctatcggagatctcctgcttatcgatcaaggtccccacctgcgaaacgaagagcatatgactaatcgagaaccctctgttatgccatatatggcctaagaacaccctgtagcaagaacttact

SEQ ID NO: 266979 - DNA, 523 bp, Zea mays
cacacgcgtccgcacacgcgtccgcggacggtggcgtttgaaaccatctgttcatgtgccctgatgcccactgttactgtctgctcgagcatgtttagcgggattgtgattcatgctatgtcatcagcaccatcatgccttaccatgtcacgatagaagtatcaccaacatgacaacatgctatgttactacattgataagcaagagagttctatttatggtgaagcatgttcaatgtctccggtcataatttcttactttggatataagttgttgaacaccatgcttagccctcatcatgaatggagtctaccactctagtgctcttcatgccatcagaattatgcaggctttgcttttgtctactttgaggatgaacgtgatggcagtgatgccatacgtgctcttgatggttatccatttggccctggcagacgcaggctttcagtagagtggtcacggggtgatcgagctgctagacgtgatggcaacaaaccagaagtaaatactaagccaactaaaa

SEQ ID NO: 266980 - DNA, 412 bp, Zea mays
ggtaggcggggggatagcccagcgtacagatcccgtcctagtccagactatggtcgcccagcaagtcctgtatatggttcgtatggcaggaacaaaagtcctgttcgtgaccgctatcggagatctcctgcttaccgatcaagatccccccctgccaaccgaagagcatatgactaatcaagacctatattatgatgctataaatgctagcggcaactcgtgtcgggctttttcagggctgcagccagcgggaagaacttactgtgcctggaccggagtgtccccttaattgctttaaacccccggtctttaaaatggcatgttatgttatgcgcctgtcggagtttagtacatgcaatatcgtcccctgccaaaaaaaaccaaaaaaaaaaaaaaaagaaaaacgaataag

SEQ ID NO: 266981 - DNA, 420 bp, Zea mays
cgggccgacccaagcgtcaggacttcttggtgagagcgatatgagtgtcccaggtcaatgctcatcccagccacaatttatcaccagcgttgggaggagtaaccgctccaatggccccggcactcctcttatcgaaagcatagatgttgatcaaattgttattccagagaaaaacagttggaagaacttattctcatacatagggcctggatttctcgtcccaattgcatatattgatcctggaaactttgagacggatctacaggctggagcacagtacaaatatgaggtgcctgctgcttcagtcttatgttcccacttcttctttggatcataccttgtgcatcctgtgctgctcttattattcaatcacttgcagccaggctaggggttgtgacagggaaacatcttgcagagcat

SEQ ID NO: 266982 - DNA, 645 bp, Zea mays
aatgagtttgcctctatcccgcccacctcaccgtcgttgtctccgccaccgccactgctcccaccactgccatgcattaacctcaacccttccgcaaactattcactgtcactttgtcatcggcgctccatcgttcactcaaatgtggtctccgatacctggcaccctcatgaggactagttcactccctgctgtcattgaggcttctggcaatgatgactggaagaaacgaaaggaagcacagagcctgaagaggctcgaggttaagaagaagaggattgagaggaggaactctctcgcctgcaacacttcaaaagaagctgctgggcagagtccaaaagagatgaatgcaaacactgacaaattagtaagttctgatgaaactattgtcagcgctaacgaaagtcatagcagtggcaagcatctggtgaaggggcttccaccaaagtaccaggccacaattacatcagaagacagttcgtcagcaatgcgaaagaagccaaactcggccttcaaaggaacagccatcactgatgagcagaactcatcatcgtctgttccttccttcggtgaagctataagtagcgtgactgcaccaattcttgccttgttgtctttggttcccattacatcaaccttttgttt

SEQ ID NO: 266983 - DNA, 957 bp, Zea mays
cccacgcgtccgggacactggattgattctctttcagttcttccatcatatggtagtggaccagatgcaaccaaaattttatctatctgtccatctctgcagaaggctatcaagtcttctaaagcagtggtatttggagagtcatgtgtcttcagtaacatgtttattaagggtatttttgaccgacttgagaaagatatggactcgtttggtattagacttagtgttggtcaaggaagacctgtgaatacgaatctgggtagtgagcacaagacagggtctggtcagcactcggacacaaaagatcttggtggtaatggcactagcagtaccggtgcttcatcagacagagggtcaaagaagaaaagggggaaagggacagggtctaccaaaggtggatcacttgaaaaggatgatgacaatgaagaaagcattcctgttaagggcaagaaatctcacaggacaaacaaggatgcttgtgcatctggtgacataaaacatggtggtaaaaaaacgtcagagaaaatgatagaggagaatgcaaatatctttcctgatgaattgatagaagaaaaggttttggctggtgctccagagttagaagagttgggaggctctgatgactcaaatgccccccttaaattgttgtcttctcacctgaggccaatgcttgttgactcatgggcaaagaaacggaacaccatgctgtcaggaaatgctgaaagaaggcgacgcttgctcgataatctgcagaagcagatagatgaggctgtcctggagatacaactctatgaaaaagctttggatgtatttgaggaagatcctactacttctggtatactacacaagcatcttctaagaagtatgggcactccaatagttgacaaagttttgattacattggataaggacaacaaattgaagaatggtatggagggtgaggatagcgaaatcatg

SEQ ID NO: 266984 - DNA, 1341 bp, Zea mays
ggacgctggacaaaggggaagttctcgccagcgtgctgccttgcaagctgctaactagaataggaattcgacgtcgcccccgcccccccctgtgaaaattcgtgatgcggagaacagctaccgccgccctcgtcctcgtccccctcctcgctgcggcggtacagacctccgccctgcctttcatcgtcctgcacgggattggggaccagtgcgccaaccatggcgttgccaagttcactaaacttctcgccgattggtccggctccgacggctactgcctagagattggcagaggaacatgggactcttgggtcatgcctcttcaacaacaggctgatataatctgcaacaaggtcaaggaaatgaaacaactgagaggtggctacaacatagttggtctgtctcaggggaacttgattggtcgagcagtggttgagtactgtgatgatggaccgccggtcaagaatttcatctctctaggaggtcctcatgctggtaccgcttcagtgcctctttgtggttctggatttttttgcattattgttgatgctctgatcaaattggagatctactcagactatgtgcaggaacatcttgcacctagtggctacctcaaaatcccaactgatatggcagatttccggaagagttgtaggtttcttccaaaacttaacactgaaattccagataaaagaaatgccacctacaaggaaagattcagtagcttagagaatttggttctgattatgtttcaggatgatgcagtcctgataccacgagaaacggcatggtttggttactaccctgatggagcctttgatccagttctaccacctcagaagacgaaactgtatgaggaagactggattggtttgaagacactggatgaagcagggcgggtgaagtttgtgtctgtgccgggaggtcatcttggtatctccaaaggtgacatgaagaagtacattgtgccttacctgacaaacaaaaaggcatcggtgacggtttctgatttgctagttgccatttggcacgctgtgcttgggctggcactggcagagggtgatgacgctgttttgatttgatgcatgggcttccgacagtggcttggattgttacgctgcctctgcttggttggcttggcactcagtcacaaataagattcatctcatctcatattctgttctgttggaaggccctttgattcatggtcacagaaataacagaatgcatgcatgcatgcatccaactagctagctagcttatagtcggagacaatctgtgcggtgcagctagttaattatctatctatacagggcaggcccatgccatgagtattgttgg

SEQ ID NO: 266985 - DNA, 1544 bp, Zea mays
cgctacgagtctacgaccagttcggcagcacggcgagcatcccgtccgaccatccgctcgctcctcagagctagcctccaaactcgcaactatataactaccgtcccttgcaactttccagaccttttgcccccctgcttcctccgcctgcaccctctcacgagcgcccgctcgcccagatctagggttccatccgcgggcaagatgagcagcccccatggcggcctcgacgaccagatcgagcggctcatgcagtgcaagccgctcgctgagcccgaggtaagggctctgtgtgagaaggcaaaggagattctgatggaggaaagcaatgttcagcctgtaaagagtcctgttactatatgcggtgatattcatggacaatttcatgatcttgctgaactcttccgaattggtggaaagtgtccagatacgaactacttgtttatgggagattatgttgaccgtggttactactctgtcgaaactgtcacacttttggtggctttaaaagttcgatatcctcagaggatcaccattctcagaggaaaccatgaaagccggcagattactcaagtgtatgggttctatgacgaatgcttaaggaagtatggaaacgcaaatgtctggaaaacctttacagatctatttgattacttccccttgactgcattggtcgagtcagaaatattttgcttgcatggtggattatcgccatccattgagaccctcgacaacatccgcaactttgaccgtgtccaagaagttcctcacgaaggtccaatgtgtgatcttctgtggtctgatccagatgatcggtgtggttggggtatttctcctcgtggtgctggttataccttcggacaggatatatcagagcagttcaaccataccaatagcctaaggcttattgctagagctcaccaattggttatggagggattcaattgggctcatgagcaaaaagtcgtgactatatttagtgcacctaattattgctaccgctgtgggaacatggcatcaatcttagaagtggatgattgcagagagcatactttcatccagtttgagccagccccaagaaggggagagccagatgtaactcgtaggacacctgactatttcctgtgacgcaaaagtgatgtggatcatgcagagcgaaggtttgatagataggcgcagtttcctggttgcagatatatatatttatatatgtttttgctgggacccctccgtgtgctattcttattatttttgccctggctcgccggccgctctgccgcgtcgtgattcaagtgtatacctacagcctgctacagctggaaggactggactgtgttctcaccttttctcaaactggttggtgcttttggctcggtgtggggccccagtggtgtggggggttgaagcatcaagcagcgatttgtgttatgggaggaaactgttccccctgaattattgttcattttgttccccaaaaaaaaaaaaaaaaaaaaaaaaaaaaaaaaaaaaaaaaaaaaaaaaaaaaaaaaaaaaaagggcggccg

SEQ ID NO: 266986 - DNA, 476 bp, Zea mays
tatatttatatatgtttttgctgggacccctccgtgtgctattcttattatttttgccctggctcgccggccgctctgccgcgtcgtgattcaagtgtatacctacagcctgctacagctggaaggactggactgtgttctcaccttttctcaaactggttggtgcttttggctcggtgtggggccgcagtggtgtggggggttgaagcatcaagcagcgatttgtgttatgggaggaaactgttcccgctgtattgttcattttattccccttctctttctcaccgcctgattttcttcccctttgttccccccttgctgtgattcttgtagagttctgcccttgtatggttctatgttgttgggccattagttttttttccctttctgtttttgactacctcgatttgccatatagatttttttaccatttaagcgcagctagtcaacctgtagcattgtttgcaatcggcatt

SEQ ID NO: 266987 - DNA, 1817 bp, Zea mays
cccacgcgtccgctagttctagatcgcgagcggccgcccgcgatctagaaccctgctccccttctgttcccagcccacgggagggcgactagggttaggcgcgaccggaggtccccgcgcctgcccaaatccacccatcccttccgttcaagccgccggagctcccaggccgctggtgtcgaagccggcgtcccttccttacaggcccgcctcctctctgtccgttctgtcttggtcgacgaagctcaagaccacagtgtcaggaagctctccaatcttccagccaaacacaattcatcagtcagatacacttttaccaaggaatttttcagaatcactccacgagaggatcagctttcgaagctagagaagcagagctctaccaaacaggccaggacgtctctcaaatccccagttcagtaactggctaactgtaggagaaggagagagagatggagaacggcggcgctaaaggcgacgtccccgacgatgcgaacgagcattgccctggaacacagtctgaggaggcaggcaaggcagatgcctgcgctgggtgccccaaccagcagatttgcgccaccgcccccaaggggcctgatcccgatgtggttgctattgttgagaggttggctactgtgaaacacaaattgttagttttgtctggaaagggaggtgttggaaaaagcacattctcagcccaactctcgtttgccctagctgaaatggaccatcaggttggccttcttgacatagatatatgtggccctagcatccctaaaatgctaggccttgaaggacaagatattcatcaaagcaaccttggctggtcacctgtgtatgttgagtccaaccttggtgtgatgtcgattggtttcatgctgcctaatccagacgatgctgtcatatggaggggtccccgcaagaatggactgatcaagcagttcttaaaggatgtcgattggggggagattgactatcttgttgtggacgctcctccaggaacatctgatgagcacatctcgatcgtgcaataccttcaagccacaggaatcgatggcgcgataatcgtcacgactccgcagcaggtctctctgattgacgtgaggaaggagataaacttctgcaagaaggtcggtgttcctgtcctaggtgttgtggagaacatgagtggcctgaggcagccgctttcagacctcagattcatcaagtcagatgaggcgggcgagacagatgcgacagaatgggccctgaactacatcaaggagaaagcccctgagcttctgtcggtcatggcctgcagtgaggtatttgatagcagcaagggaggcgccgagaagatgtgccatgaaatgggggttcctttccttggtaaggtgcccatggatccgcagctgtgcaaggcggctgaggaagggaggtcatgctttgctgatcagaaatgcagtgccagtgcgccggctcttcggaacatcgtgaagaagctgatcaaggccgagtgagaaaatagtgttggcctgctggggaatctggtagtgagaaatgagatgaaatgacagacgccagagttctcgttaccaatatatatatgttacggcgttacacactgaatctgtattagtgctagtgttggatctgtaagttttttgttcgtgaataatcagtgggtgcacagactattaaaagcttagtttctgctctaccaagtggactatgttttgaggcgctgcctgaatgatgcttgaatgatctgtattgtacgccccagaactgaatgaaaaaaaacaaaaaaaaaaaaaaaaaaaaaaaaaaaataaaaa

SEQ ID NO: 266988 - DNA, 554 bp, Zea mays
tcctttggcccctcacctgctcggctgctccccttctgtccagcccacgggagggcgactagggttagggccttaggggcgacgccaaccatctagccaccggaggtcgccgcgcctgcccagatccactcatcccttccgttcaagccgccggagctcccaggacgctggtgtcgaagccgtcgtcccttccttccaggcccgcctcctctctgtccgttctgtcttggtcgccgaagctcaagaccacagtgtcaggaagctctccaatcttccagccaaacacaattcatcagtcagatacacttttaccaaggaatttttcagaatcactccacgagaggttcagctctcgaagctagagaagcagagctctaccaaacaggccaggacgtctctcaaatccccagttcagtaactagctaactgcaggagaaggagagagatggagaacggcggcgcttaaggcgacgtcccccacgatgcgaacgagcattgccctggaacacagtccgaggaggcaggctaggcggatgcctgcgctgggtgcccca

SEQ ID NO: 266989 - DNA, 444 bp, Zea mays
ggtcgagattcacggggccacgcacgcgtccgcatgaagaagctgatcaaggccgagggagaaaatagtgttggcctgctggggaatctggtagtgagaaatgagatgaaatgacagatgccagagttctcgttaccaatatatatatatgttacggcgttacacactgaatctgtattagtgctagtgttggatctgtaagtttttgttcgtgaataatcagtgggtgcacagactattaagtggactatgttttgaggcgctgcttgaatgatctgtactgtacgtaggggagtgtacggtgttagcaatatccctggctgcgcttcattgctctctcgtggcacgagcacgacatgtttgtaataaagttaccaggtagtggggctgtcgggcaaaaaatcaggacagcaccttaaaaaaaaaaaaaaaagggcggccgct

SEQ ID NO: 266990 - DNA, 379 bp, Zea mays
ttcacgttcgcagcgcaggcatcgaacacaaagtagctggcggctcggcgcacctacagcgccgtataccgagtccgagaccacgactccacgagacgacacaaaccccagtttaggaacagttggaaaagagggagaaatggagaacggcggcggcaaaggcgacgttcccaacgatgcgaacgaacattgccctggaacgcagtcggaggaggcggggaaggcggatgcctgcgctgggtgccccaaccagcagatttgcgccacgcccccaagagcccgatcccgatgtggttgctattgttgagaagtttggctactgtgaaacacaaattattagttttgtctggaaagggaggtgttggaaagacacattctc

SEQ ID NO: 266991 - DNA, 452 bp, Zea mays
tgccagacctaggctatttccgatcagacctgttatttcccgatcagacctattcctctctcggcctcccaccgccaccggcggcgacgagtaactcgcccgctgaccccagcaggcagccatgggagggcacggcgggttgaacatcctgccgcagaagcggtggaacgtctataacttcgacaaccgtgagaaggtgcaaaaagacgaggccgccgccgcccgggaggagcagctccagcgcgaggcggaacgccgccgcgagtcggatctacgcctcgctgcactacgccgtaaccgcggcctggtccaggcggagacgccccccgctcctccatctcaccccgccggccccgctgatccggcggacgcccttccttccccggcggacgcccttccttccccggcaacggatggagaccacatcaacctcttctcaggtggatcaagcg

SEQ ID NO: 266992 - DNA, 1300 bp, Zea mays
aaaaatcagtatgtaacaccagaaaaggcttcggcaccctcagcaacactcgagtcagatccattacctctcgtatggggaaaacaacgagatcacccgttaagtgtcgaagagtggacatctttcttagatcgtgaaggtaggattatggattcaaaggcactgaggaaaaaggttttctatgggggagttgatcatgctttgagaaaagaggtctggaaattcttgttggggtatcatgaatatgattcaacatatgctgagagggaataccttgctgtcatgaaacgagcagaatatgaagtcataaaatctcagtggaagagtatctcagccacccaagctaaaagattcaccaagtttagggaaagaaaaggcctaattgacaaagatgtggtgagaacagataggtccattccctattatgaaggagatgacaatcagaatgttgtagttttacgtgatattctgttaacatattccttctacaatttcgaccttggttattgccaaggaatgagtgactttttggctcccatactttatgtcatggaggatgagtctgaatcattttggtgctttgcttccctgatggaacgtctaggtgccaattttaatcgtgaccagaatggcatgcatgctcagctacttgcattatccaagcttgtggagcttcttgatccttcattgcacaactattttaggcaaaatgactgcttgaactatttcttctgtttccgctgggttcttatacaattcaaaagggagttcagtttcgaccagatcatgcttttatgggaagttctgtggtcccattatttgtcagaacatttccacttgtacttgtgcgtagcaatcttgaaaaaatatcgtcagcggataattggggagcagatggacttcgataccctccttaagttcatcaatgagctcagtggtcagatcaatcttgaccgggctatccaggacgcggaggcattgtgtactattgcaggagaaaatggggcttcctgcattccacctggaaccccaccttcaatgcccgtcgagaccgatggtggcatgtacgtgcaagaagacgaggtcttgtgagatatcggtcaccctagaaaataattgcatagaagcatcgcaagtttttatccagtagtgctttcgtcgtcgtcataaatgtgatccgttgtaagtttggaagaatcatgaaaacctagagttgtgtgtatatactaccttgataaacctgtaattgatactttcactattctgtatggaaccccagcttttacctcatttgaagtag

SEQ ID NO: 266993 - DNA, 1343 bp, Zea mays
cccacgcgtccgcccacgcgtccgcccacgcgtccggcccagacggcggaggaagggggaaagaggagggcagagcagcaacagtacatcgagcgagggagtagagcaaattgaatcaggtttcgtgtcgattcggaggctttcgcttctgcttgcggagttgcggtggagatttgaggcctgcggcgacgatggcacctgcggaatccggggagaaggcgaccagcttcgccatggcctgcagcctgctcagccgctacgtcaggcagaacggtgccgccgctgccgatctcggcctcgctatcagagctgaatccgatgcaaagaggacgtcgacggacatggaaaagggggagacggggaaggagaccatggatctcttcccccagatcgctggattcggctcggaggccgccacgaaggaagcccctgatgcgagggagccagagaagcgccaactgactatcttctatggcgggaaggtccttgtgttcgatgacttccctgctgagaaggcgaaagacctgatgcaaatggccagcaagggttcatccgtagcccagaaccctggcctgctgcctccttccacagctgcaaccgttactgacagcaccaagatcgcagcagtgccagccgcaccaattgctgtggccaacgcccagaagagtgcagcagatataccgcaggctcccaaggcatctcttcgcaggttccttgagaagagaaaggatcgccttactgcgaaagcaccgtacccgggttccccttcagatgttacacctgtgaagaaggagatgtcggatggtcagccatggcttgggctgggacctcagatcgccaatcctgatctgagcttgtccaaggaggcgagccagtgatcgatgatccagcatcaccatcttcaaaactgcgatactcaacagccatgtgtggaagtgttctgttttgggcccctatcattccgggttttttttcgcatggataaataggttgtacgaaaggtaaagaacacagctaatgacggacttcagtaaggattaccggcgctggggcaggtttgctgatcagcctttgctggcctgacccaagtggccattttagaaagatgaaaatgtaatgtagtagttgctagaacaagttggcatcttgggatgttctgtgttgtttggctttggcactggtgcgtgtcagtgtcacaaagctatttattttcacagatacatgctatatgattttttctattatcttctggttgtctctgtagggttatgaaatatcacagcttttctttctaaaaacaaaaaaaaaaaaaaaaaaacccacgcgtccgcggacgcgtgggt

SEQ ID NO: 266994 - DNA, 1246 bp, Zea mays
ggccgtcccggcgtccccgtcccgagtcaccaccgacccaagcaaaaccgcacgcaccctgccagcggccccccaactcccaacccaacccctactccagctagctcgcggcggcggccagcggccatggccttccggctgagcaacaacctgatcggggtcctaaacttcgtcaccttcctgctctccgtcccgatcctgggcgcgggcatctggctgggccaccgcgccgacggcaccgagtgcgagcgctacctctcggcgcccgtcatcgcgctgggggccttcctcctcgccgtctccctggcgggcctcgtcggcgcctgctgccgcgtcacctggctgctctgggcctacctcctcgccatgttcgtcctcatcctcgtcctcttctgcttcaccgtcttcgccttcgtcgtcaccaacaggggcgccggcgaggccgtctccggccgcggatacaaggagtaccgcctcggggactactccaactggctgcagaagcgcgtcgagaacaccaggaactgggaccggatcaggagctgcctccaggactccaaggtctgcaagagcctgcaggacaagaacgagaccgtcgcccagttcatgagttccagcctctcccccatcgagtctggctgctgcaagccccccaccagctgcggctacacctacgtcggcggcacggactggacgccggtgaccaccaactcgacggacccggactgcaagacctggagcaacgacgcctcggcgctctgctacaactgccagtcgtgcaaggccggcgtggtggccacgttccagcggaactggaagcgcgtcgccgtcgtctgcatcgtcttcctcgtcttcatcatcatcgtctactccgtcggctgctgcgccttcaggaacaaccgcagagacaacgcctaccgcggcgggtggaagggcgggtacgcttgatccaccatcgcgtcgtttaggagcggagccatgcacgcgcgctcggtgctctgctctgctccctgcccgccgctgtcgtcgtacgtacatgtttagtaggctcgttgtagctctgtacaggtgatggagatcgttgttgcggattcttatcgtcttcctggttacatacttacattattgttatgatctgatcagcggtaggttttgtatacgctgctcattgattcgtctgcctgctattttcgtatatcgatgcacttgttttaccagttgctttcgttcaaaaaaaaaataaaaa

SEQ ID NO: 266995 - DNA, 438 bp, Zea mays
  unsure (1)..(438): unsure at all n locations
cccacgcgtccgctcatttttctcgtctgaaaaagaagagagcacaacaggcatccctcttctaacctcctgatgatggcactcaacggcggttggagaaagaccttcgtgtccatcctgacgacatgctttcttgtggtggttgtaattgtttccctatcctgcgaagcaaaaggcggcgtcgtccccaggttgcggccaccattctgctttccatacgatcgtgaatactgcacgccatttcactgcggcaaagtttgccaagagtacaacttccctgctaagaatggcggctactgcgataaacgtggtgacccatggaagtgctgctgtccatattgaaacgtacaaaatgcatgcatccatccgggctgctacctgatcgatatacatgtcaatcatcatcaatatatataatgaatgaantaaatgcatgtg

SEQ ID NO: 266996 - DNA, 1369 bp, Zea mays
cccacgcgtccgcccacgcgtccgggaggagctgaaagctactgtacaaggtgtcctcaattgttgctcacactatttttgcttcgcatgcatcatggaatggtctagggttgagtcgagatgcccattgtgcaagcagcggttcactacaatcaccaagtcatcgaaggtagatcttggtcttggagtgagaaaagctgtaatcaaggtcgaagagcgtgatcaggtttatcagcccactgaagaagaaataaggcgttggctagacccatatgaaaatgttgtttgtatagagtgcaatcaaggcggcgacgatactctcatgctactatgtgacatttgtgattcctcagcacatacttattgtgttggcttgggtagagaagtgcccgaaggaaactggtactgtggaggatgtagactcggtgacgagggaccatcatatactggaattcagcgtacagtagcttatgaaagacaaaattacagaagtcatgtcgatagtagttctgtaagttttggcatggctgcaccaggcggtacatttgaaaggccgtcatcagtcaatcctcgccattcttttcaagggattgatctaaatctatctccaagagagtttcccggagaatcacatcctgctgaatcacaagtttcaactgatagcgtatcaactcccactggaagagctggaagaactatttcaggaaggcgtgaaatacaacggtacattcagagtttgttcagaccaagtctacctagtagaccagacacgtaccacaatattgcgcagaacagtggtggtgtatcaagaaatgaaccgaaccgctggaacttcccttcttcatcagaagcaaacacatcacagaatctgcctgatggcattcagaaccatcacagtgaccttccatttgttcaagctcacagcaattttgctccatttatgtccccagatggggatgatttccagcaaattgagggtgtcaagagcaacctcaggaacatgcagtagagcccttacggcgttactagaagctcgattctaccctgtgaagcttaccaagggggcaacatgtgccgttttaatggcttgtggaactgaacataacaaaagcttgtgcctgttgcattctcccagaaattgatgtggttcggctcatttgcggagatgtgatgtggtcaacgatataagatacatgctctctttgtttaagtttaggcattttttgttgtggtcattcttattcattcagtcattaagcccaccctcagattacccagcgaaggcatttttgaatgtcttgatagcttcaaatttatacattgtaatattgtggtaaccccaatttcattaggctgaccattcttttcc

SEQ ID NO: 266997 - DNA, 1813 bp, Zea mays
gctggctactacagcgaagctgatgctcctagtcgcagacttggcaagcctttgatattttgcagaactgagagtgatagccccatggagaatggttatgctcgtcctgtagaaggaatccatgttgttgttgatatgcagaataatgctgtgatagagtttgaagataggaagttggttcctctaccccctccagatcatttgagaaactatactcctggggagacaagaggaggtgttgatcgaagtgatgtaaaaccacttatcatcaatcagcctgagggtccaagttttcgaattaatggctattttgtggaatggcagaagtggaacttccgtattggcttcacccccaaagagggtttggttatctattctgttgcttatgttgatggtagccgtggacgtagacctatagcacataggctgagctttgttgagatggttgttccttatggagatccaagtgaaccacattatcgcaagaatgcatttgatgctggagaagatggacttggaaaaaatgctcattctcttaagaagggatgcgattgcttgggctacataaaatattttgatgcacatttcacaaacttcactggtggtgtggagacaattgagaactgtgtttgtttgcatgaggaggatcatgggatcctttggaaacatcaagactggagaactggtttagcagaagtaaggcggtcaaggaggctcactgtttcatttatctgtacagttgcaaactatgagtatggtttttactggcacttctatcaggatgggaaaatagaggcagaagtaaagcttactggaattctcagtttaggggccttgatgcctggggaatcgaggaaatatggcacaactattgcccctggtctgtatgcaccagttcatcagcatttctttgttgcccgtatggacatggctgttgattgcaaacctaatgaagctcataaccaggtggttgaggttaatgttaaagtggaaagtgcaggcacacataatgtgcataataatgctttctatgctgaagagaagttgctcaaatctgagttgcaagcaatgcgtgattgcgacccttcatctgcccgccactggattgtacgcaacacacgaactgtgaatcggacggggcagccaactggctacaggctcgtacctggttcgaactgcctgcctttggctctgcctgaggcgaaatttctgaggagggctgggttcttgaagcacaacctctgggtcactcaatacaagcgtggcgagatgttccctggaggggagtttcccaaccagaatcctcgcatccatgagggtctgccaacatgggtcaagaatgataggcctctggaggaaaccgacattgttctctggtacgtgttcgggctcacccatatccccaggctagaagattggccagtcatgccggtggagcacataggcttcatgctcatgccacatggattcttcaactgctcgcctgcggtcgacgtgcctcccagctcgtccgatgcggatgtcaaggaagccgagtcgcccaaggccatccagaatagcctcatatcgaagctgtgagctttgctgttctgccgaggaaaaaggatccgcgcgcggctgctctccctactatttttttatcgtattccgcgagtaaaaaggaaaactgctcgatgtccttttgtttgttgcttggtaataccgttctgtttgctataattgtttgatggttttctatgattatcgatcagcgggatgtgaagtactgtttacattgctcgcgttctaataaagtactgtttggacttgctta

SEQ ID NO: 266998 - DNA, 622 bp, Zea mays
  unsure (1)..(622): unsure at all n locations
cagaagaatttcagagttgatcacctttcttttccattcgtaaattgttgttcattggtttcagctttcctgcttatccctactactctataagcacggcgtccgggcgtccacaccgtgcaccatgttcttagttttggtagaattctttgtcttaaagctgactggaaacctcagcttaggggccctgatgctcggggaatcaagggaaatatggcacaactattgtccctggtctgtatgcaccagttcatctacatttctttgttgctcgtatggacatggctggtgattgcaaattgaatgaggttcataaccaggtgggggttgccatctatttgcaccttttttaattgatcagattgcccactaaaatttgtttgcaatctaaatgggaccacaacgaaacgaattctaactgggtttattaggtggttcgagtagcactcaagttttgagtttgattgcctataggagcgaatttcaggttgatccctttcttataccccattgtgtgggagcttccagcaaagggtatgatctttacatcaaatcaaataaaataaatcaaaatgatgttatacctgctaatgttacatanactacttagatgaaatctact

SEQ ID NO: 266999 - DNA, 539 bp, Zea mays
cccacgcgtccgaccaaagttcccgtggtcgtcccacactcccacccctaccaacgctctgcgccaacgaacgcgtccgcaagtcaaaccaggcccggagccaccagcaaccaaccgagcgcatggaggccgcggcggcgaccgcgctcccgttcgcggcggccgtccccactgcctggagggtgcccgcgagcccgcggacgcggcggcgctccgtggcggcgaagctggagcgcgggctcggcaagggggttcccaccaccaactacgtggtgccgctcgacaaggccaccgggatgacgcgcccgctcgtcgagatcctgcgggacctcaacaagcgcgtccccgacaagatcatcgaccccgacactaacaccgtcaactggtaccatgccaacagaatgcttagcttttacgcaccaggttggtgtggagaagttcgtgatgttatctattctgagaatggaactgtaaccgtggtatatcgagtgatacttaaaggaactgatggagaggcatacagagatgccacgggcaca

SEQ ID NO: 267000 - DNA, 793 bp, Zea mays
cggctcgaggtcttagttatgtttgatatcctcaggcgaaagaagagcgcaaaattggaaaaccttgtgttgaataggctttcatttgcccaaacagttgaaaatgtttttgcactatctttcttagtgaaagatggtagggtggaaataactgtagatgatagcgggcatatagtacggccaaggaatgcacctgctgctagcgctatagcctcaggagaagtctcatacagtcattttgtttttagatttgacttgaaggactggaagcttatgaaagaagttgttacagagggagaagagctgttgccacataggacttcccagagcaatctttgcaacgaagaaaacgaccaaccatatctggagttccaggccccgttgcagctgggagtggttttatactcgctgatgacatcaagtcttaggtgcttccattgatcaataactcagggaaatatggagggatcatgatgtggttcaagtactatgatgatcaagatggctacaattcttgagtgaagagtgatgtttaggttgttgcctgtggtgtgtcacaatatctgtgtgttacttgtgtgtatgtgagaaattatgtgactctggagtctggatagtgcaataagtattactcaagtatatgattgaatcttctgtcatactattcaaattatgtcatattgtatcttttaaggtatgtaaacatccacttttagcgatgctagcaaaagaatacaccaataattagtaaattccacccaaaaaaaaaaaaaaaaaaaaaaaaatataaaaa

SEQ ID NO: 267001 - DNA, 382 bp, Zea mays
ggctttgcaacgaagaaaacgaccaaccaaatctggagggaaatatggagggatcatgatgtggttcaagtactatgatgatcaagatggctacaattcttgagtgaagagtgatgtttaggttgttgtctgtggtgtgtgacaatatctgtgtgttacttgtgtgtatgtgagaaattatgtgactctggagtctggatagtgcaataagtattactcaagtatatgattgaatcttatgtcatactattcaaattatgtcaaaaaaaaaaaaaaaaaacaaagggaaagagaaaaaaaaaactaaaaaaaaaaaaaaaaaaaaaaaaaaaaaaaaaaaaaaaaaaaagaaagaaaaaaaaaaaaaggggggggccccccg

SEQ ID NO: 267002 - DNA, 633 bp, Zea mays
gaaggatcagaggctactccgttaggaggagaggtaccatgccaacagaatgcttagcttttacgcaccagcgcgtgacgcaatgttggagcaaagttgggaaaatggatattggcggtggtcgagaggtcactcttattggaagtctagaaatgccaaaggatgacatatggcttgtcacagctatcctatctggtctgattgaataatgtgcgaagatataagtcatatatttcttggcctcctatcttcgcctcaggcagctgggagtggttttatactcgctgatgacatcaagtcttaggtgcttccattgatcaataactcagggaaatatggagggatcatgatgtggttcaagtactatgatgatcaagatggctacaattcttgagtgaagagtgatgtttaggttgttgcctgtggtgtgtcacaatatctgtgtgttacttgtgtgtatgtgagaaattatgtgactctggagtctggatagtgcaataagtattactcaagtatatgattgaatcttctgtcatactattcaaattatgtcatattgtatcttttaaggtatgtaaacatccacttttagcgatgctaacaaaagaatagaacaacaattagtgttttcat

SEQ ID NO: 267003 - DNA, 787 bp, Zea mays
aggcgtccacaccgtgcaccatgttgttagtttttttagaattctttgtcttaaagctgactggaaatctcagcttaggggccctgatgctcggggaatcaaggaaatatggcacaactattgtccctggtggttgaggttaatgttaaggtggaaagtgcaggcacacataacatgcacaataatgatttctatgctaaagagaagttgctcaaatcaatgcgtgattgtgatccttcgtctttgcgccattggattttccaggccccattgcagcactacactgcgctaatggaccttcaggactattctgagaatggaactgtaaccgtggtatatcgagtgatacttaaaggaactgatggagaggcatatagagatgccacgggcacaacacagttccatgaggggcgcagggaagatgctgttgcagccgcagaggaagctgcattcagcaaagcttgcgcatggttcggttttggcctgtatctgtaccaccaggatgaatctcattacgacgaccacttccattgaggctcaatctgcaaaagagttgatcataagttgtaacatgcgttggatatgcccctagaaaacttcgtatctagaatcaatttttggtctttgcgtagtatcatactcataacacaaagaagtgaacctatgtagatgctatttgaaacctttttattaatattataattcttattaatattattgtataattactttttgagtggagagaaggaaggccttttccagctaccaagtaacaaaccccttttgc

SEQ ID NO: 267004 - DNA, 604 bp, Zea mays
gttctctggtacttcataacagaccatttgctgttatgaagaatttggaactgctgttcagattacatcttacaaaaactgataaaaccttgttctgcatctgcaggtacgtgttcgggctatcccatatccccaggctagaagattggccagtcatgccggtggagcacataggcttcatgctcatgccacatggattcttcaactgctcgcctgcggtcgacgtgcctcccagctcgtccgatgcggatgtcaaggaagccgagtcgcccaaggccatccagaatagcctcatatcgaagctgtgagctttgctgttctgccgaggaaaaaggatccgcgcgcggctgctctccctactatttttttatcgtattccgcgagtaaaaaggaaaactgctcgatgtccttttgtttgttgcttggtaataccgttctgtttgctataattatcgatcagcgggatgtgaagtactgtttacattgctcgcgttctaataaagtactgtttggacttgcttaaaaaaaaaaaaaaagggcccgcaacagtaaatagttcacagacacgaccatcagcctctgccgtcacaggaatgactgtttt

SEQ ID NO: 267005 - DNA, 193 bp, Zea mays
gctgctacgcctgcaggctaccggctccggatattctccgggtacgacaccaacgcgtgccggtttttccatcaaacaattatagcaaacagaacggtgttaccaagcaacaaacaaaaggacatcgagcagcgggatgtgaagtactgtttacattgctcgcgttctaataaagtactgtttggacttgctt

SEQ ID NO: 267006 - DNA, 747 bp, Zea mays
cccacgcgtccgcccacgcgtccggtgataacaagttagaaaatcttaacaaggctgctgagttggaccctactcttacatatccctatatgttccgagctgcatctttgatgaaaaggcaaagtgttgaagctgcattgatggagatcaaccggatccttggattcaagctggtgctggagtgcttagaactaaggttctgttgctaccttgcccttgaggattatagggctgccttatgtgacgtgcaggcaatcctcactcttgccccagattatcgtatgattggtggccgggttgctgccaagcagctgcgaatgctagtgctagagaatgtagagcagtggacacctgctgactgttggatgcagctttatgatcgctggtcatctgtggatgatatagggtccctctctgttatatatcaaatgttggagtcagataccgccaaaggagttttgtactttaggcaatctttgcttcttctcagattaaactgtcctgaggcggcaatgaggagtttgcagcttgctcgtgagcatgctgcgagtgatcatgaaaggcttgtctatgaaggatggatattgtatgatactggccactgcgaggaaggattgccgaaggctgaagcatccattgcaatacaaaggtcatttgaggcattttttctgaaagcttatgctttggctgattcgagtcttgatccttctacctcagcaacagttgtatcacttctagaagatgcat

SEQ ID NO: 267007 - DNA, 364 bp, Zea mays
ctattctctatctctagcagtggtactttttggcggcgatcgccgtgctattgcttgggccttggactgagtaggtttggaggtagcgatacgagacactcgcccccgattcccctcccgttgccgaagcctgtgttgcacggatcgttcgcggaagcggtttttgatcggcgagagagaaagagagagcgacgcacggacgtggcgatggacgcggcggcagccgcggcggcgcagatggagaggcactcgtcggcggcggcgcacatggagaggcactcgtcggcggcggccttcgtggacggcggcgttcaggacggctgccatgacacctgcagcatctgcctcgagaccttattcgaca

SEQ ID NO: 267008 - DNA, 1048 bp, Zea mays
aaagattttagctttcaagatgctgatgtccttaaaccagacatacttgctcctggcaatctcacgggggctgcatgggcgcctaatggaacagatgaatcaaattatgctggtgaaggatttgcaatggtttctggaactagcatggctgcgccgcatattgctggcattgcagcactgataaagcagaagaacccaaagtggagcccctcagcaataaaatctgccctgatgacaacggccaatacactggacaaagggagccgtcctctcagagcgcagcagtacactgcatcggaaatgatgacactttctcgggccacaccgtttgattgtggtagtggcgctgttaacccaaaagctgcccttgatcctggtcttgttctagatgcaacccacgaagagtacatcgcatttttgtgctcgatccctgacgtcaaccagagcgaagtgtcaaacatcgccggctcggcttgcaactccaactccaaggggcgtcaacgccccttcgacctcaacctcccctcgatcgccatctctcagcttcgaggcaccgtgacggtgacgcggaccgtcacaagcgtgtccgaggagaccgagacctacaccatcatgacgagaatgccgccggaggttgccctggaggtgacgcctccggcggtgacggtgctgcccggagcatcgagagagctagctgtgaccctgacggcgaggtccgtgaccggcacctacagtttcggagagatcgccatgaaaggcgaccgcggccacctcgtcagaatcccagtggtagctatgggattcaagtagatagaagacgaccgcgaccggcgctagagagagtaagtacgaggagcgagttgtgcctctgagatccgaggtcttgagctgcagaggaatgctgtaatttttccatagtttgtagagaataaaagttagggtctgtttggttgggctgtggctgtgaaaaaagttgctgtgggctgtgagctgtggaaaaagctgctgtaggctgcaagctgttaaaaagctaaaaactgtttggtgg

SEQ ID NO: 267009 - DNA, 375 bp, Zea mays
gtccgtgaccggcacctacagtttcggtgagattgccatgaaaggtgaccgcggtcacctcgtaagaatcccagtggtagctatcggattcaagtaggtagcagtcggctgtggcatctcctagcgagtagaggatagcaagagcgagttgtgcctctgtactctgaggtcttgagcgccagaggaacgttgtataattttttcataggttgtagagaataagagttggcgcaatcctgtaagtgttatgcatgccccctccagggtgtaaaatatatttgggtgccctaaatcctctgacatggtgactagagggcctcttgtattgtagtccagccttgttctgattctatgatgcatgaaggtttgaatctc

SEQ ID NO: 267010 - DNA, 437 bp, Zea mays
cggaggaggagctggggctggtggtggttacggtggaggagcaggtgcaggtggcggcgggggcggagggtatggcggaggtgccggaagcggttacggtggaggagctggtggaggtactggcggtggatacggtggaggtgcacgagcaggaagtggctctggaggcggctatggtggaggcgctggtggaggctacggtggtggtgctggcgctggtagtggcagtggccttggctctggcggcggtggaggttatggtggtggtgccggaggcggaggcggaggtggtcgtggaggtggcatcggcggcggtgtgtgattcaacctcttacatccatgcatggcgtgtgcatgcaagtgctcgacgcactcctctttgcagtttaagcatgcgtggagtcaagctaatagcatgtgtgcgatataccgatcga

SEQ ID NO: 267011 - DNA, 950 bp, Zea mays
ggtctagaataccgggccgagccacgcgtccacccacgcgtccgcccacgcgtccggaccgcccccagcagcgatccgaagctcaatcaattcactcaaacctcttccccaaatcttcgattagattctcgttgacaagaagactagaaccgaacctgaccatgtcgctgatccgccgcagcaacgtgttcgatcccttctccctcgacctctgggacccctttgagggcttccccttcggctccggcagcagcagcagtctcttcccctcgttcccgcggaccagctcggagaccgcggccttcgctggcgcgcggatcgactggaaggagactccagaggcgcacgtgttcaaggccgacgtaccggggctgaagaaggaggaggtcaaggtggaggtcgaggacggcaacgtccttcagatcagcggcgagcgcaacaaggagcaggaggagaagacggacacctggcaccgcgtggagcggagcagcgggaggttcctgcgcaggttccgactgcccgagaacgccaagacggagcagatcacggccgccatggagaacggcgtgcttacagtcactgtgccgaaggaggacgccaagaagcctgaagtgaagtccattcagatctccggctagacctcggtctgcggtcgtcgtacctgcgtggtttgaggaacggcagttcgcctcggtcgttctgtgaaataaaattgggttacaagaattatggcgtttgtcaatatggtcgtaatgtcgtaggatggtggaatgtggtcacaaactttgcgtatgttgggtctactggtggtgtctgaatctatgtatggatgtcatgagtttgtctactagagtcccagttcctgtggtgttcgtatgatgtatatcatgaggtaacgctatctaaaatttcttattatggtatttttctaaggggaatctgtccttcct

SEQ ID NO: 267012 - DNA, 474 bp, Zea mays
gaacagccaagaacagatacccgagtcgacgaagcaaccgctcacaatcccaatctcccgcgtcactcataacccgaagtaacaaccgtcggtccgaccaacaatgtcgctgattcgccgtggaaacgcattcgaccccttctccctcgacctctgggaccccttcgagggcttcttccccttcggctccggcgacgtccgcagcctcgttccctcgttgccgcgcaccagctcggagaccgcggcatttgccggcgcgcggatcgactggaaggagacccccgaagcgcacgtgttcaaggcggacgtgccggggctgaggaaggaggaggtcaaggtggaggtcgaggacggcaacgtcctgcagatcagcggcgagcgcaacaaggagcacgaggagaagaacgacaggtggcaccgggtggagcgcagcagcggcaagttccttcgcaggttcagactgccggacaacgc

SEQ ID NO: 267013 - DNA, 894 bp, Zea mays
tgtacctattgcgtccgttcacgcctgcgggaacggagggggacagttggcagcgttccgaggcgcattcaatgctttcgaacctccaccccaaattttcgattagattctcgttgacaagaagactagaaccgaacctgaccatgtcgatgatccgccgcagcaacgtgtgcgatcccttctccctcgaccgctgggacccctttgagggcttgtcccctgcggctccggcagcagcagcagtctcttcccctcgttcccgcggaccagctcggagaccgcggccttcgctggcgcgcggatcgactggaaggagactccagaggcgcacgtgttcaaggccgacgtaccggggctggcaccgcgtggagcggagcagcggtaggttcctgctcaggttctgactgcctcgagaacgctaagacggagcagatcacgcccgccatggagaacggcgtgcttacagtcactgtgccgaaggaggacgcccagcagcctgaagtggagtccattcagatctccggctagacatcggtctgcggtcgtcttaccttgcgtgtttgaggaacggcagttcgtcttggtcgtttccgtgaaataaaattgggttacaagaattatggtgtttgtcaatatggtcgtaatgtcgtaggatggtgccatggtggaatgtggtcacaaactttgccgaatgttgggtctactggtggtgtctgaattttattgtatggatgccatgagtttgtctactagagccccagttactgtggtgttccgtatgattgcttatcattgaggtatacgctattcttaaacgtttctccatttctggccattatatttaaaaaaaaaaaatatgggatggtcccttttagaggattcaagctttattta

SEQ ID NO: 267014 - DNA, 496 bp, Zea mays
  unsure (1)..(496): unsure at all n locations
gcggcgtcgtgtctatccgggtctatccgcgaacacgtgagaactctccagaaactgctttctcctccacttcatctctctcgctttccctctttaaaaggaccccttctaggaatggagggagacagcaggcaccaagcagcgatccgaagctcaatcaattcactcaaacctcttccccaaatcttcgattagattctcgttgacaagaagactagaaccgaacctgaccatgtcgctgatccgccgcagcaacgtgttcgatcccttctccctcgacctctgggacccctttgagggcttccccttcggctccggcaacagcagcagtctcttcccctcgttcccgcggaccagctcggagaccgcggccttcgctggcgcgcggatcgactggaaagagactccagaggcgcacgtgttcaaggccgacgtaccggggctgaagaaggangaggtcaaggtggaggtcgaggacggcaacgtccttcagatc

SEQ ID NO: 267015 - DNA, 217 bp, Zea mays
ataaaattgggttacaagaattatggcgtttgtcaatatgatcgtaatgtcgtaggatggtggaatgtggtcacaaactttgcgtatgttgggtctactggtggtgtctactctgaatctatgtatggatgtcatgagttccagttcctgtggtgttcgtatgatgtatatcatgagttaactctatctaaaatttcttcattatggtatttttaag

SEQ ID NO: 267016 - DNA, 994 bp, Zea mays
cccacgcgtccggttatgcaaggattttggatctgaaaagaagatttctggaagctgcacttcgatattatgacatttctcaaattgaacaacgcaagattggagacgaagagattgatgaaaatgcacttgagcaagctcttagtgctgctgtgacatgcacaatattggctggtgctggtccacaacgctcccgtgttcttgctactctgtacaaggatgaaagatgctcgaagttgaaaatatacccaatactgcagaaggtttaccttgaaagaattttgaggaaaccagaaattgatgcatttgcagaggagcttaggccgcatcaaaaagctttattaccagataagtcgactgtgcttgaccgagcaatgatcgagcataatctccttagtgccagtaaactttacacaaatatcagctttgatgagcttgggacattactggggattgatccaaggaaggctgagaagatagcatctcggatgatttatgaggatagaatgcggggctcaattgatcaggttgaggctgtgatacattttgatgatgacacggaagagctgcagcaatgggatcagcagattgctggactgtgccaagccctgaacgacatccttgacagcatgtcaagcaagggaataactattccggtgtgaataaatatctcatgctgtcggtcgatggtgcatggcagaactgctaacatgccccggaatctagaatcaacattttgtatagtttgcagctgcaaatgtgtatcttgtgattttggggggaggatgcttgtttaagtaacgctcactggataccctgtagcactactgtttcaagagcgctcgaatgattcagtaagggctttcggtttcatcagaatccatatgtggattggctgagtttcaatccatagcaagtcaaaaaaaatttataattttttctaaaaaaaaaaaaagaaaacaaaccacatacaaaaaaaaaaaagggggggccc

SEQ ID NO: 267017 - DNA, 1869 bp, Zea mays
  unsure (1)..(1869): unsure at all n locations
gaaatataaaaccctttttaagggacgatggccgaaaccaaactggtgctttttaccgtgtcctttgttgcaaacgctaaatttctcacgaattcttccgtcgtcggcggcgcagattgaatgccaaaaccctagctcgccctccccaattccccatttcggccacaccctccttgcctccacggctccacccctgcttcaggttacctgtgccagcgacgccggtagaagccatggacagctctctcgcgagcgcggcggcgatagccgatcagcgccagaagatcgagcagtaccgccacatcctcgcctccgtcctctcgtcttccccaccggacatctctcaggccaagcgcttcctcgaccacatggtttcggacgaagttccgctcgtggtgtcgcgtcaattgctccagacgttcgcgcaggacctagggaagctggagtcggacgcgcagaaggaggttgcccactacgcgctcacgcagatccagccgcgtgtggtctccttcgaggagcaggtggtagtgattagagagaagcttgcagagctatatgagtctgaacaacaatggtcaaaagcagcacaaatgcttagtgggattgacttggattcaggaatcaggatgcttgatgacaccaacaaattatccaagtgtgttcaaattgcacgactctatttagaggatgatgatgcagtgaatgctgaggcttttataaacaaggcttcatttttggtcaccaacagccatcaggaggttctaaacttacagtacaaggtctgttatgcaaggattttggatctgaaaagaagatttctggaagctgcacttcgatattatgacatttctcaaattgaacaacgcaagattggagacgaagagattgatgaaaatgcacttgagcaagctcttagtgctgctgtgacatgcacaatattggctggtgctggtccacaacgctcccgtgttcttgctactctgtacaaggtaagatttttgtagttttatctcaatgtccttggattacgtgctggtagtacccattctcagctgtgttgctactctgtacaaggtaagatttttgtagttttatctcaatgtccttggattacgtgctggtagtacccattctcagctgtgttttgcaattgtgagcatcggaatacaactatctagatgcattacgtgttaaatgccttggatttgttcatgtcatctatataaaaacatgtttcatgtttagcttatcatagtttatagttgagactgtaatactcatctctcacttgttttctgtcaaggtggtgcaacaaataccaattaatctggatgtttatggcttttctggtaaatatgggttgacagaaattatagcttctggcttgagctgggtggtttcagatcttgtccagtgccaaccagtgtgtatatatacatttttaaggtcttgtaacctagataattagtgtcaacttcgaggctgcgagtccacactttatctaccgtgcttgtctctttttctttatttacacatgcatttattttgcctcttattgcattatgcccctttcaggatgaaagatgctcgaagttgaaaatatacccaatactgcagaaggtttaccttgaaagaattttgaggaaaccagaaattgatgcatttgcagaggagcttaggccgcatcaagaaagctttattaccagataagtcgactgtgcttgaccgagcaatgatcgagcataatctncttagtgccagtaaactttacacaaatatcagctttgatgagcttgggacattactggggattgatccaagggaggctgagaaaatagcatctcggatgatttatgaggatagaaatgc

SEQ ID NO: 267018 - DNA, 537 bp, Zea mays
caggcgcttgaataccgacctgttaagctcctcatatcctcccgcgagctcgctgagtccctcaagctgaacaccactctgccccgctgtactgcagaacctgtttgatcgtgaaagatacatgtagaatctcctttcagatggccgcgcttcacctgacttgagtcgccgctttcatgtcgcaccggcttgtcaagttcatgtttcactgtaaaccggcgattgtattagtatcttgtccactgttcgctggaaaaggtgtgggccgtgtggccaactgcccagcgtgagtcgtgacctgcctgtcaatcgcttgagtcttgaccatgggccacacggaattagatatctgtggtgcactgattttgggctaacgacccgatttctatctaaaaaaaaaaaaaaaaaaaaaaaaaaaaaaaaaaaaaaaaaaaaaaaaaaaaaaaaaaaaaaaaaaaaaaaagagcataaaaagaaataacaattataataagcgtcacctaaaatcaaatcaatggccaataaaatacaacaaat

SEQ ID NO: 267019 - DNA, 790 bp, Zea mays
  unsure (1)..(790): unsure at all n locations
ttcgcgttcatgcagtgaaagttggtggaaatctggcagctgaagaggcaaatcaggaaaagattgtagaagcaggtggcctcacttccctccttatgctacttaggagctctgaggatgagacaattcgtagagtagcagcaggagcaattgctaatcttgcaatgaatgaaacaaatcaagatcttatcatggcagaaggaggtgtaaccttgttgtctatgacagcatctgatgcagaggatccacaaactcttagaatggtggctggagcaatagctaacctttgtggcaatgacaaactgcatatacggttgaggggagaaggtggaatcagggcattgcttgggatggttaggtgtgggcaccctgatgtccttgctcaagttgcacgtggcattgcaaattttgcaaaatgtgaatctagagcagctactcaaggaaataaggtgggaaaatcactattaatcgacgatggagcgctcccctggattgtaaaaaatgccaacaacgaagctgccccaattaggcggcacatcgagctcgcactgtgtcatttggcacagcatgaagtaaattcgaacgacattatcaatgaaggtgccctatgggagcttgttcggatctcaagggactgttctcgagaagatataaggaagttggcataccggacactgacatccagccccactcttcaagccgagatgaggagactaggaatagaaatgtgataacagaacagagtgcagctgnggctcacactatgaagttccatttctcgtgcacatac

SEQ ID NO: 267020 - DNA, 749 bp, Zea mays
cacattttcaaaatatgaccaggcaaaagctcttggaaagacaactattgatgtggctggtattgctgccgggttgccatgtggtagtgaaagcttcctcttgatgtttgccagatggagaaaacttgagagggatttatacaatgaaagaaaggaccgttttgacattacacagatcccagatgtatatgattcctgcaagtatgaccttttgcataatgctcatctcaatcttaagggtttggaagagctattcaaagttgctcaaatactcgctgatggtgttattccaaatgagtatgggatcaacccaaagcaaaaactgaaaatcggctcaaagatagcgcgccgtttattgggaaaaatcctaatcgatctacgcaacactcgtgaagaagctatcagtgttgccgaaccaaaatttattgaagacgaagctctattcctaccaacaagagaagcagagcaccagcagaaggttcatgttagaaatgaggatggaagaagatctagctctacgagtgagaagtcattggaccaagaagatgaagatgatagagaaactaaataccgattagatcccaagtatgccaatgtaaggacacctgagcgccatgtccgcactaggctttacttcacatcggaatctcatatacactcattgatgaatgtccttcgttactgcaatttggacgaaagtctacaaggagaggaaagccttgtctgccagagtgctttggaccgtctac

SEQ ID NO: 267021 - DNA, 1067 bp, Zea mays
ggtagggcccgcggcggggcgccgtcgccgcccacatggacgtcgacaaggtcagcttcaccgggtccacggaggtcggccgcctcgtcatgagggccgcggccgagagcaacctcaagcccgtgtcgctcgagctgggcggcaagtctcccgtcatcgtcttcgacgacgccgacctcgacatggccgttaacctcgtcaacttcgccacctacaccaacaagggcgagatctgtgtggccggcacgcgcatctacgtgcaggaagggatctacgacgagttcgtgaagaaggccgccgagctcgccagcaagtccgtggtcggagacccgttcaacccgagtgtcagccaaggcccccaggttgacaaggaccagtacgagaaggtcctcaggtacattgacatcgggaagcgcgaaggcgccacgctggtcaccggagggaagccctgcggcgacaagggctactacatcgagcccaccatcttcacggacgtcaaggacgacatgacgatcgcacaggatgaaatctttgggccggtgatggctctcatgaaattcaagaccgtggaggaggtgatccagaaagcgaacaacacccggtacggcctggccgccggcatcgtgaccaagaacatcgacgtcgccaacaccgtgtcgcggtccatccgcgccggcgccatctggatcaactgctacttcgcgttcgacccggacgcgccgttcggcgggtacaagatgagcgggttcggcaaggacatgggcatggacgcgctcgacaagtacctgcagaccaagaccgtggtcactccgctgtacaacactccatggctctgaccgaccgacctcatccctgtccgatgaacagttcaacatcacaaacaagaagaaacatgtcttgtaagatactcctccaaaggatcggttgcctgtagctgtactcttacacctgcatggattgatgatgcagtgcaatgtagcattcagaacaataaagacatgtttcggactgctggtgtctgatcggttgcccagcatgtttcagtattacccccccttttcaccgcc

SEQ ID NO: 267022 - DNA, 885 bp, Zea mays
cggacgcgtgggcggacgcgtgggcggacgcgtgggcggacgcgtgggcggacgcgtaaaagaacagctcgccgcggctccgaatggcaacttccccgaaccccgcgacgattcaccgagccggcgcccagtgacccttccagaagcttccagaaggtcaccgccatggccgcgcccttcttttccactcctttccagccctacgtctaccagagccagcaaggatctgtgacggcgtttcagatatccggtggagatgtgcaggtcctgcaggtgatgctgaagtctcaggagaagctgactgcaaaaccaggtgcaatgtgctacatgtctgggaacatgcagatggacaacaattacttgcctgaaaatgatggaggcgtgtggcagtggatttttgggaaacgtgtaagcagcaccattttctttaattctggatctgatgatggatatgtcgggattgctgcaccatttcctgggaggatactgccggtagatctaacaaactttagtggagaacttctttgccaggcagatgcttttctatgttcggtcaatgatgtctccgtctctagtacagttgagccaaggccacggaatattgagattggtgcagagatgatccttaaacaaaaacttaggggccaggggatggcttttcttgttggtggtggatcagtcatgcagaaaatccttgctcctagagaggtgattactgttgatgctgcttgtattgtggctatgtcggccaccattaacttccagttgaagagccctaaccagcttagaagagcagtttttgggggtgataaccagctaacagcatctctcacgggaccaggtgttgttttcattcaaagtctgccattccatcgactctcacag

SEQ ID NO: 267023 - DNA, 856 bp, Zea mays
  unsure (1)..(856): unsure at all n locations
ccctttcgttcgcgcgacgattcaccgagccggcgcccagtgacccttccagaagcttccagaaggtcaccgccatggccgcgcccttcttttccactcctttccagccctacgtctaccagagccagcaaggatctgtgacggcgtttcagatatccggtggagatgtgcaggtcctgcaggtgatgctgaagtctcaggagaagctgactgcaaaaccaggtaactggattcagtccttctgctatgcagcttgcctgttcaactaagtatctttgtctgtggccttcagttaaactaaacctagtaaacagggtgctaactagtcattatgtggcagaaattgacaaattgtgtgttttagatatcttcgtacaaaagtatgtagctctagtgtctacttttcctgttggcagtaaccctgcccttaactcacaacggattaaccttctggtcagtagttgctgataatgataaccttctggttggtagttattgagaactatctgttatatatatagtgtaataaaaagtttaccatataatcctagaaattgttagcttgcgaatagcgactatttcatcagtcatcattattgttttctttaggtacaatgtgctacatgtctgggaacatgcagatggacaacaattacttgcctgaaaatgatggaggcgtgtggcagtggatttttgggaaacgtgtaagcagcaccattttctttaattctggatctgatgatggatatgtcgggattgctgcaccatttcctgggaggatactgnccgtagatctaacaaactttagtggagaacttcttttgcaggcagatgctttctatgttcggtcaatgat

SEQ ID NO: 267024 - DNA, 535 bp, Zea mays
ctgggtcagatgatgatgatgacgatgaatacgatgaagatgaagatgaagatgatggtgatgatgatgatgatgatgatgagggtggtgacgacgacgatgaagacgatgatgatgaagaggggggtgatgaagatgatgatcctgaggctaatggtgaaggggggagtgatgatgacgacgatgataacgatggtgatgatgatggtaacgatgatgacgacgatgaagatgatgacgaagatgaagatgaagaggatgacgacgatgaggaagaacagccaccttccaagaagaagaagtgatttgctctttcatggattcacctcagcttctccatgctgttagttgtgttggttagatcatggaacagctttgggacaaatgttgcttgtcatggtattatagtgtaggaaaccttgacatctgatgttaaatcgttatcctactttctcctctgcatgtagtcttaattgtgtgttttagatttttacttatggagctggtgattgtgtcatgccatccagttttaaaa

SEQ ID NO: 267025 - DNA, 893 bp, Zea mays
tctgaaaggcgttcattcactctgtaaggcgttcttgttcttcacccaacgcttctcgcacgggggtcttctattgaccattgaagaaaaacatttgactggagatagcatctggaatatatgaatctagtataacgaactaggtctgaaaatctgggcaattccagattcgattctcatgtgagatgataaaaacgtcataattatcctgcgtactaaaaaatattcgctagttgagtcgttccggcatatacaaaattattagctacagttgttcctgcatgcgtgtaatgtccttcggtgaacttgtctgtcattatcatttaaaaacgtatctagatgcattacggaagatttttagtttcctttgttatatttgagaagttatatattgtatatacagagagatgcagctgtgtattatttgctgtagcttcgattgcgagacgcatggttgcagtcattttattgtagttagtttatatgatacgtcgttgtcaccgcatgaagattaactgctgtgccatatgaagacctcctgcctcatcacggtgtttgtatataagatcaactgcagtgcctacacggtggacggagtatttgtatgatgtgaaggtcactattcagcatcgtcagtatgaaatggctatggccttcaaagctttctttcttggtcaccggacagggaagaaatattctgctcaagctcacaattagatacaagacataactcagataagagcttgttcaacttgcactatagttcatttgagtatttacctattattgatctcttgagttgaagctaggtttcaagtatctcctaaggattcgtatatgtgaaaaccagggattctcttttttttttgcactacaatctgtgaagttttaat

SEQ ID NO: 267026 - DNA, 1045 bp, Zea mays
cgtgtcgcgtgggttttgcctaccccggtaccccgcctttgccttggtgtagaaaagtcgccgcgttcctcttgcctgatgaaatcaatcctcttctcgtctagatctgagcctccgcgtggcttccagatcagatgcttggtccgatcaacgacggtgagtcttgctctgttagttgattgttcgaaatgcatggttttgtttttgtgatgatgtgcaggttccgatcagtttcgtttgattgatgagttgacgcatcggttcgaagcgagacgaggctgcatggtttttgtgcctggaggtttctgatcagcgtgtttaaggaaactggatgctacaatttgttatctgcagaccttcagagctgcgacgttccggcttccgggggatctggatcttggctgactggacaattgcgaggcgttgacgggcttctaaagcgtggctggattgctggatctcctttctgccccgcgactcgatgatatctctttgtattggtaattattggatgaaaattcgataattattagatcggagagatgttggtcgcggcggtccgtgcctaactgaaggcaaggtaaggtccgagacaaaagaggggaaaaggatacatgaaaaagaagtgagatgtgacatcttgaaggcctttgccatgttgggtgcgctcgcatggcaggcatcgtaataaagatgttggttttgtgtgctgggtgggagatcgcacagggaattgtttttttcatccctgggttctcccgcccattgtgtccctgtgccctgcttcgtgttgtttggcttctcgacctacgctcctcccccggcgctgctgcaaattgaacggggctacatcgcaacgcaacacacaaggtacaaaccggatctaaacattttcaatttacagcgaagttagcaagttactgaaatcaccatcaatcgttcaaaactcagcgcgccacaaacttctacgcctatactacgccatgcatatgcagttcatccactcaacgcatatcccgtaaggctataaagcacatgcgaaagg

SEQ ID NO: 267027 - DNA, 803 bp, Zea mays
cggacgctgtgggcggacgcgtgggcggacccggcgcctgggccttggtgaagaaaagtcgctgcgttcctcttgcctgatgaaatcctcttcccgtctagatctgagcctccgcgtggcttccggatcagatgcttggtccgatcgaacaacggtgagtcttgctctgttacttgattgttcgaaacgcatggttttgttttgtgatgatgtgcaggttccgatctgtttcgtttgattgatgagttgacgacgcatcggctcgaagcgagacgaggctgcatggtttttgtgcctggaggtttctgatccgcgtggttaaggaaactgggtgctacaatttgttgctacaagtgcccgatccgtcgaattgatatctgccgaccttcagagctgcgacgttccgggggaatctggatcttggcggactggacaattgggaggcgtcgacgggcttctaaagcgtggctggacaattgtgagatgtgacatcttgaaagcctttgccatgtcgggtgcgctcgcatggcaggcatcataataaagatgttggttttgtgtgctgggtgggagatcgcacagggaattgtttttttatccctgggttctcccgccctttgtgtccccgtgccctgcttcgtgttgtttggcttctcgttctacgcttcatcaccggtgctgcttcaaattgaacggatcttctcgtctcgcggcgtgctgcaaattgaacggggctacatcgcaacgcaacacacaagcgcgccacaaacttctacgcctatactacgccatgcatatgcagt

SEQ ID NO: 267028 - DNA, 865 bp, Zea mays
  unsure (1)..(865): unsure at all n locations
ggacaattgggaggcttgggcgggcattataagcgctgctgctttgttcctccnccaggcggcccngagactagatgatctctctttgtattggtaattattggatgaaatttcgataattattagatcggagagatgttggtcgcggcggtccgtgcctaactgaaggcaaggcaaggtccgagacaaaagaggggaaaaggatacatgaaaaagaagtgagatgtgacatcttgaaggcctttgccatgttgggtgcgctcgcatggcaggcatcgtaataaagatgtcggctttgtgtgctgggcgggagatcccacggggaacttgctttttccatccctgggttctccccccctttgtgtccccgtgccctgctgcggggtgtttggcttctcgttctacgcttcatcaccggtgctgctgcaaattgaacggatcttctcgtctcgaggcgtgctgcaaattgaacggggctacatcgcaacgcaacacaacacgcaaggtacaaatcggatctaaacattttcaatttacagcaaagttagcaagttactgaaatcaccatcaatcgttcaaaacttcgcgcaccacaaacttatatacgcctatgctacgtcatccatatgcacttcattcacccaacgcttatcccgtaaggctataaagcacatgcgaaaggcgttcagtcactctactctgtaaggcgttcttcacccaacgcttctcgcacgggggtcttctattgaccattgaagataaacttttgaatatatgaatcagctgtgtattatttggtgtagcttcaaatgcgagacctatggttgcagccattcttattggagttaggttatatgatacatcg

SEQ ID NO: 267029 - DNA, 759 bp, Zea mays
cgcacggggaattgttttttcatccctgggttctcccgccctttgtgtccccgtgccctgcttcgtgttgtttggcttctcgttctacgcttcatcaccggtgctgctgcaaattgaacggatcttctcgtctcgcggcgtgctgcaaattgaacggggctacatcgcaacgcaacacaacactctagttagtttaaatgatacatcgtcgtcaccgcatgaagatctactgctgagccatatgaagacctgctgcctcatcatggtgtttgtatatgaagatcatctgccagtgcctacacgctggacggagtatttatatgatgtcaaggtcaactgttcggcatcgtcggtatgaaatggctatggccttcaaagcttccttcttggtcactggacagggaagaaattttctgctcaagctcaaaattagatacaagcttgttcaacttgccctatagttcatttgaggacttacctgttattgatctctattgagttgaagctaggtttcaagtatctcctaaggtttcgtataggtgaaaaccagtgattctccctttttttttttttcgcactaccatctgtgacgtttcatgcccttagtttgagccttctccttagtgaggttattaatttttcttcttttccaaatcaaaacatgttttgactttccatattttgctatgcatttagttaaatctacactgtagataaacaaatgtttgtggataagtaaaaatgccttatttggtcgtc

SEQ ID NO: 267030 - DNA, 532 bp, Zea mays
ggcgttcattcactctgtaaggcgttcttcacccaacgcttctcgcacgggggtgttctattggtagtcattatttgttcaggtgaactaggtctgaaaatctgggcaattccagattctcatgtgagatgataaaaatgtcataatcatttgctaagtttaatgacctacgtcagttcttacgtactaaaaaatattcgctagttgagtcgttccggcatattcctgatgtcctacggtgaacttgtatgtcattatcatttcaacgtatctagatgcattatggaagatttttagttttctttgttatatttgagaagttatatattgcatatacagagagatgcagctgggtattatttgctgcagcttcgcgatgttgcagtcattttattgtacttaggttatatgatacgtctgtgtcaccgcatgaaaatctactgctgtgccatatgaagaccttgcttatcacggtgtttgtacctaagatcaactactgggcctacaccgtggacggagtatttaattgatg

SEQ ID NO: 267031 - DNA, 411 bp, Zea mays
ccagcaccttttgcctaccccggcaccaccccgcctttgccttggtgttgaaaagtcgccgcgttcctcttgcctgatgaaatcaatcctcttctcgtctagatctgagcctccgcgtggcttccagatcagatgcttggtccgatcaacgacgaccttcagagctgcgacgttccggcttccgggggatctggatcttggctgactggacaactgcgaggcgttgacgggcttctaaagcgtggctggattgctggatctcctttctgccccgcgactcgatgatatctctttgtattggtaattattggatgaaatttcgataattattagatcggagagatgttggtcgcggcgggccgtgcctaactgaaggcaaggtaaggtccgagacaaaagaggggaaaagga

SEQ ID NO: 267032 - DNA, 865 bp, Zea mays
  unsure (1)..(865): unsure at all n locations
attgccggactcgctgtcagagtctgacatcgcttgggcgtctggacggtcaacgttaaccccacgcacgcttcttctcccccagttcaagtgccacaccggccgctcgtcgccttcccatctcgccgcgccatggatttctgcagccacctccgtctcgcggctgtgctcgcgctcctcaccggatgcgcttctgcggcgagccggggcgctggttccttcgacccatcccgcgtggttcaactctcttggcgccccagggcgttcttgcacaagggtttcctgttggatgcggagtgcgaccacctcatcgcgctggccaaggacaagctggagaagtctatggtggcggacaacaagtccggtaagagtgtccagagtgaggtgcgcaccagttccggcatgttcctcgagaagaagcaggatgaagtagtaacgagaatagaggagaggatatctgcttggacatttcttccaccagagaatggtgaagccattcagatattacactaccagaatggtgagaaatatgaaccccactacgactacttccatgacaaaaataatcaggccctgggcggccatcgcattgccactgtgctgatgtacctatcaaatgtcgagaagggtggagagaccatcttccccaatgcagaggggaagctattgcaacccaaggacgacacttggtctgattgtgcaagaaacggatatgcagttaaaccggtaaagggtgatgccctgctgttcttcagtctccaccctgattcaccaaccgactctgacagtttgcacggtagctgccccgtcatcgcggaccacttntggccttcgatcggacgcgtcggtcgacccgggnattccg

SEQ ID NO: 267033 - DNA, 634 bp, Zea mays
  unsure (1)..(634): unsure at all n locations
atcttgaccagttcttacctaacgtgactagggcccatggctctttttgcttggtaatgtcactagggtatagtttctttagctcggcgctgcacatcatgtgagtagtaccttccaccatgcgcatttactctgctgtctatctgctgctggtttccttgtgcagttaaaccggtaaagggtgatgccctgctgttcttcagcctccatcctgatgcaacgactgactcggactgcttgcacggtagctgccccgtcatcgaaggccagaagtggtccgcgactaaatggatccatgtgaggtcatttgacctccccgtcaagcagccgggtccctctgacggatgcgaggacgacaatgtcctctgcccccagtgggcggccgtgggcgagtgcgccaagaaccctaactacatggtggggaccaaggaagcacctggcttctgccggaagagctgcaaagtatgcgcagagtaagcaaccattgggatattcttggccggcgccggcggcctgtgggtggcgacgattccgtcgttgacgttgcctgcaagtgccctgtacttgtcnctcctggtgagaggcttgtgcactcgtacgagagcgtttcggtatccaccggcggagagggatt

SEQ ID NO: 267034 - DNA, 385 bp, Zea mays
atggatccatgtgaggtcatttgacctccctgtgaagcagccgggttcctctgacggatgcgaggacgacaatatcctctgcccccagtgggcagctgtgggtgagtgtgccaagaaccctaactacatggtggggaccaaggaagctcctggcttctgccggaagagctgcaaagtatgcgcagagtaaggtagtagcctgctgtctgatatgtgtcatggcgtgttgcgtagtagtctgctgtttggataccgactggagtatagcatgtatgaagtagaacccggaagaaggaatcgtacgagagccgagttatctgataacttgtctcttgtgggaaatgaaagcgttccttaattaagcgaggaggtgctttgtggtgtc

SEQ ID NO: 267035 - DNA, 554 bp, Zea mays
gtcgtctgcgacgtctgcggcgacccagccatcggcccggaggaccaccccctcgaaggtgcggaggttgctgtcctctgcatcacaaaatctggtgaggttatcaactatcaagccttcacaaactccaagggcgtgtatactgtcgccgagactatgccggagagcgacaggtgggactcgtgcttggcgaggcctatgagcagcttccatctacattgcacacggcggggtgatgctcactctggggtgaagttcacttacaacaaatcgtctgggaacccgcacaccgtcaagcctttcctctacaagccggccaccgtccctctgtattgtagttaaacaacacatcttgctggaacgcagaagatagaacatacatggatgaaaatatgtattcgtgcccagactccatatgacaatatgtaagtaaacactgttagatgtaaatcaaaaattcacttgctaatggaagctggtcatatgtctgtcaaccaatccttgtcaggaaccagaattggcggcctaatggtggttattttaatggttttctt

SEQ ID NO: 267036 - DNA, 514 bp, Zea mays
aattcccgggccgacgcacgcgtccggtgggagtaacggaagctgcccatgctgctctagggacagctaacaataactacctatggacattttcaaggttaggggtctaagcctcacccatctacctcgcacacggcggggtgatgcccactctgggctgaacttcacttacaacaaatccgtatgggaacccgcacaccgtcaagcctttcctctacaagccggccaccgtccctctgtattgtagttaaacaacacatcttgctggaacgcagaagatagaacatacaggaagaaaatatgtattcgtgccccgactccatatgaccatatataagtaaacactgttcgatgtaaatcaaagattcagctgtctatgggagctgttctagtgtctggtcacccatacctgcgaggaaacagatgttgcgtgcttaatgttgataatatcagtgtttttcaccaactgtaaaaaaaaaaaaaaaaagggcggcagctcgcgatctagaactag

SEQ ID NO: 267037 - DNA, 510 bp, Zea mays
  unsure (1)..(510): unsure at all n locations
gaaganccggggcgacccacgcgtgctaagacgtttgggcttactcttgggttttttcgtgggcggacgcgaggggcctgatactgtgccgttttgcgacaggtgggactcgtgcttggcgaggcctatgagcagctttcatctacattgcacacggtggggtgatgctcactctggggtgaagatcacttacaacaaatcgtctgtgaaccttcacaccgtcaagcctttcctctacaagccggcctccgtccctctgggttgtagttaaacaacacatcttgctggaacgcagatgattgaacatacaggaagaaaatatgtattcgtgccccgactccatatgaccatatataagtaaacactgtttgatgtaaatcaaagattcagctgtctatgggagctgttctagtgaaaaaaaaaaaaaaaaaaaaaaaaaaaaaaaaaaaaaaaaaaaaaacaaataaaaaaaaaaaaaacaaaaaaaagaataggacaaaaatacataat

SEQ ID NO: 267038 - DNA, 1640 bp, Zea mays
cggacgcgtgggtagccatagtaatgaattagtgccaggaggagcagcttatgggtcacttgggtgttgtgctgtatgagtacttacgagaggagtatcctgaggtgcttggttcaattcttggagccttgaaggctatcgtcaatgtcattggtatgactaaaatgactccaccaatcaaggatcttcttcctcgtctgacccccattcttaagaacaggcatgagaaggtccaagagaactgcattgatcttgttggtaggattgctgatcgtggagcagaatttgtgccagcaagggaatggatgaggatttgttttgagctgctcgaaatgttgaaggctcataagaagggtattaggagagcaactgtgaacacatttggttatatcgcaaaggctatagggccacaggatgtgttggccaccctgttgaataacttgaaggtgcaagaacgacagaaccgggtctgtacaactgtagctattgctatagttgctgaaacttgctcacctttcacagttttacctgcccttatgaatgagtaccgggtcccagagctcaatgtccaaaatggtgttctgaagtcactctctttcctctttgagtatattggtgagatgggtaaagattacatatatgccgtcacccccttacttgaagatgctttaatggatagagatctggttcaccggcagactgctgcatctgctgttaagcacatggctctaggtgttgctggcttgggttgtgaggatgctcttgttcatctgcttaactatgtttggcccaacatatttgagacatctccccacgttataaatgctgtcatggaggcaattgaggggatgagggtcgcactaggtgcggctgtgattttaaattattgcctgcaaggtctcttccatccagcaaggaaagtacgagaagtgtattggaagatatacaactctttgtacatcggcgcgcaggatgcacttgttgcttcttatcctgccctggaagacgatggggataacatctttagtcgtccagagttggcaatgtttgtctgattaacgctggatgtgcatgtccatgtgtcttcatccatattcttatgaagcttgaactgggtggtacttgagttagagcttgtatttttaagttacttggtgacccctcttgtgatgtgcatgtaattaaatttgcatctgtttctgtatttgcaggattgttccttccgaagggggtgcacaatgtttaggaatttttattatggtttactgtaatgcaactctaaatcactgtcgtaatctgatctactaaccatttgggaaatgttctgttttcaggatagtccgtgttgaagctgctgaagagttccactggattgaggaccgatttcgaggctgcagaggaccctttaattaatccatcatgatcctatgttttgaaggagaaatgacgatcctagcgtgttgtcttaatattagacgttggcaccttctgtgttcttgaactttttgtgatagccgtggatgttgttgttatatataggtgtggacagtggaacattgcaaacccctctgtggccttgattcctcgccgtattcctgagaaagcccccattagcgtgccttgatcaagggaaatattaa

SEQ ID NO: 267039 - DNA, 628 bp, Zea mays
ccgggtcgacctacgagtctgaggttcgcaggatcaccatgttcaaccggctaaacaagtttgggccaaaaatatttgaaacaccccccaacttaaaaaatgcggtcagggaggcaattgaggggatgagggtcgcactaggtgcggctgtgattttaaattattgcctgcaaggtctcttccatccagcaaggaaagtacgagaagtgtattggaagatatacaactctttgtacatcggcgcgcaggatgcacttgttgcttcttatcctgccctggaagacgatggggataacatctttagtcgtccagagttggcaatgtttgtctgattaacggtacctcatgttgcagctgctgaagcgttacactggatttaggaccaatcctaaggctgcagcatgccaattaatccatcaagatcctatattgtgaaggacaaatgacaatcctagcgcgctgtcatctttttatgaatattaggcgttgggcatttaccgtgttttaaaactttgtattacacatggatgttgtattatgtggtgtggccaatggaacgttgcaagctgacctgaacctgattccttactgtccccctgagatgttgatatgccccccatgttagtgt

SEQ ID NO: 267040 - DNA, 525 bp, Zea mays
ttggttatgtttgtctgattaacgctggatgtgcatgtccatgtgtcttcatccatattcttatgaagcttgaactgggattgttccttctgaagggggtgcaatgtttaggaattttttttcctggtttactataatgcaactcaaaatctctatcatagtctggtcttactaacgatttgggaactgttttgttttcagggtacctcatgttgcagctgctgaagcgttacactggatttaggaccaatcctaaggctgcagcatgccaattaatccatcaagatcctatattgtgaaggacaaatgacaatcctagcgcgctgtcatctttttatgaatattaggcgttgggcatttaccgtgttttaaaactttgtattacacatggatgttgtattatgtggtgtggacaatggaacgttgcaagctgacctgaacctgattccttactgtattactgagatgttgatatgcatgtcatgttagtgtacgttgtgttccccttgtcatttagtttgccct

SEQ ID NO: 267041 - DNA, 472 bp, Zea mays
aattattgcctgcaaggtctcttccatccagcaaggaaagtacgtgaaagtttattggaagatatacaactctctgtacattggtgcacaggattcacttgttgcttcttatcctgccctggaagacgatggggataacatatttagtcgcccagagttggcaatgttcgtctgattaacggtagtccgtgttgaagctgctgaagagttccgctggattgaggaccgatttcgaggctgcagaggaccctttaatgaatccatcatgatcctatgttttgaaggagaaatgacgatcctagcgtgttgtcttaatattagacgttggcaccttctgtgttcttgaactttttgtaatacccgtggatgttgttattatccataagtgtggacagtggaacattgcaaacccctctgtgaccttgattcctcgctgtattcctgagatggctgttattagcgtgccttgatc

SEQ ID NO: 267042 - DNA, 433 bp, Zea mays
cgctgttttgggctgctggttgtacacacttatgatgcttgactgttgtcagctagtggggcacttgttaccatttgagcatgtattatcaagcagtatttgatctgtatgactgtattgtgtttattttctgacttatgttttttcctgtcatgttatgaatgcaaaggaagaatctgatatggaaacgcattgacaggctggatgtccatgtccatgtatcttcatccatattcttgtgaagcttgaactgcgtggtatctgagttagagcttgcatattcaagttccctcttgtgatgcatgtaattgaatttgcatctgtttctgtatttgcaggattgttccttccgaacggggtgcacaatgtttaggaattgttattatggtttactgtaatgcaactctaaatcactatcgtaatctgatctact

SEQ ID NO: 267043 - DNA, 2379 bp, Zea mays
  unsure (1)..(2379): unsure at all n locations
tcttaaggatgtagagaaatcattcactggagttaccgagtcactttcatctttgcggagaaatttgaatcgcttccatctggtgttcttattataggatcccacactcagatggacagccgcaaagaaaaggcgcatcctggaggttttcttttcacaaagtttgccagtagcagccagacactttttgaccttttcccggatagctttggtagcaggtggttgcatgaaagaagcaaagaaagtccaaaggcaatgaaacatctaaataaacttttcccaaacaaaattttgatccagcttccacaggatgaagctctacttacagattggaagcagcagttggatcgtgatgttgaaacccttaaagccaaatcaaatattggtagcattcgcatgtttctgagccgcaatggaattgaatgcaatgatcttgaagaattattcatcaaagaccaatcattgagtaatgaaaatgtggacaagattgttgggtacgcagtgagttatcaccttaagcagaataaaattgaaacctccaactcgaaggataataaacttgtactcacaagtgaaagccttaagcatgggctcaacatgctgcaaagcatgcaaagtgataacaagagctcgaaaaaatcactgaaggatgttgtcacagagaatgaatttgagaaaaggcttttggtggatgttataccacctaatgacattggagttacctttgatgatattggagccttggagaatgtaaaggacacattaaaggagctggtgatgctccctttacaaagacctgaattgttctgcaaagggcagctaacaaagccttgcaagggaatattgcttttcggacctcctggcactggaaaaactatgcttgccaaagcagtagcaactgaagcaggcgctaatttcatcaatatatcaatgtcgagcattacatcgaagtggtttggtgaaggggagaagtatgtaaaggctgttttctcactagcaagtaaaatagcccccagtgttatatttatcgatgaggtcgatagtatgctaggaaggagagaaaatccaggggagcatgaagcgatgcgcaagatgaagaatgaatttatggtaaattgggatggactgcgcactaaagataaggagcgtgtgcttgttcttggtgctacaaatagaccttttgacctggacgaggctgtgattaggaggttcccccgcaggttaatggtaaacttgcccgatgcatcaaatagagagaaaattctaaaagtaattttggcaaaagaagagctgggatcggatgttgatctcgactcacttgccaatatgactgatggttattcaggaagcgacctgaagaatctgtgtgtgaccgcagcgcattaccccattcgagaaatcctagagaaggaaaagaaggagaagagtttggctaaaacagaaggtaggccagagcccgcattgtatggaagcgagcacatccgtcctcttagcatagacgacttcaaatccgcccatgagcaggtttgcgcgagcgtttcatccgactcggcaaacatgaacgagcttctccaatggaacgacctgtacggcgaaggcgggtcgaggaagaggaaagcgctgagctacttcatgtgacggcgagagacataaaaccagaaggatcacaaccgcgccataaagccagaaggtatcgcagttgcgccatattgtacagccgccatagtacttcccccctccctggccctaaatccagccagggttttcctcctccctcctgggtagccgtggccgcctgtagtccctccctcgtgtaattagaaccgtgtaccgagtcgagttcatttacccactgtttgaggttccagagagttgagatttaaattttaagtggcgccattgcccttcctttcttcctcccctcctaagtattaactttgttgcggccattgttgtcgtgactctggccatagatccttttatgtacatgcgaaatgtaaccaagggatatggaataagaacatgttcatcctgttgtagacagcatggtggtacaggaattctttttatttttcatagttgattggtgatgaactggatcggtgccagcataagaattatgataaggtaccttttctgccgctgaattttttggtgtatgtcgatttgtcgagtggatttagtattgagatgaatgatatgacatcacatggattttaaaaaaaaaaaaaaaaaaaaaaaaaaaaaaaaaaaaaaaaaaattataaaaaaattaaaaaaaatttaataaaaaccctcttaaaaaaaaaaaaaaatttttttaatttaattatatttttaatttttaaatatattattttatttnggggggggcccttt

SEQ ID NO: 267044 - DNA, 951 bp, Zea mays
tttcgaccgacgcgtacgcatacgcgtgtatctataaatcctatagtattattaagaacgagaagagtttgactaaaacggaggatttatcataacccgcgtgtggatagaatcgagcacatccgtcctcctatcatagactacttcaaatccgcccattagcacgttttcgctagtgtatcatcctactcggcaaacattaactagcttctccaatggaacgacctgtacagctaatgtgggtcgatgaagaagaaagcgctgagctacttcatgtgatggggtgagagcatagaatccagaaggatcacagccgtggcataagatcagaaggaacacagagcggccatagtaccacacccactatggccctaaatccagtcaagttttcgctccttccccctccctcagtagccgccgccgccccgccgccgcctggtgtaattagaactgtgtacggagtcgagttggtttgccagctgtttcaaggttacagagttgagatttggaattacaatggcgccattgccctcctccaacccccctttttcttcctcccataagttgcgatcactgtccttcttggactctctcgcctttgttcttgtaaatgcgaaatgaagggatgtgaaataagaacatcttcgtcctgttgttgacagtatggtacacatatttaatttttggacttgaccggcgatgataaattggatcggtgccaacataagaattatggaaaggtgcccttcctgccccccgaaatctgtgtgtatgtcgagtgggctgggtattgttaggtgaaattttatgcgtctcccgtcgtcctgtgggtgcgaaatgcgtgggagcaaacgtccggcataatgaaccttcgtcatttcttatggctgcgaaatgcatgggttcgggatgtatgaattttctccgtcataatgaacttggattctgatt

SEQ ID NO: 267045 - DNA, 2187 bp, Zea mays
gtcagcttgttgggcaatggcaagatcctggctagatgttcaagtggatctagaattcgcccggtaccaaacaagtagaccagaaaagcaacttgatgacgacatgaatggagcccaaagttcagttggtccagaaagttggccataccatgttcttgatcagcaacctcatgatttaactgctcttctgcagaaactccactcaagtgaccttgttcatgaaactgtctctcgagcatgccgagagcagcatcgacaagttcagatgaatctgatgagtggaaatatatctcatcttcttgaccttctatggtcatggttatcacctgctgaagagaaccataataatactgcaaggccccttgatgaccctgagatgatacggttcggggcacatattgttcttgtgctgaggcaccttttcagtgatgggatggatgatgagttagatgaaaaactggttactgtcggtgatctcatcatcaacatgtacgtgaggtatttgttctcagaggatcaagaggagttggttggaatatatgcctcacagcttcaacatgacctttgcattactttgtttgtagaaatgatggaactaaggttaaatagcagtttgcatactatgtacaagctcttcctttctgctgtggagtatctgccattctcatctgataatgtatccaaggcttgttttgaagagatcatcgagagggtgctttcaagatctcggcaaacaaaacccactaagtatgatggggatttctctgatgttgcgcatcaacatcacctgcaatcacttcaaaaggctatggttattcagtggctttgcttcacaccaccatcctcgattccagactttcaaatgatcagtgggaagcttctgatacgggcattgacacatagcaatacactgttcagggagttttctctgatatcaatgaggagagtccctgagctaccagcagggccacacaagttgcttgccattttagctgaaccgttaaagcaaaaagaaaatttaatttcacgggaagatccggaggtatctgataacttgccggagtttgaagattggcatgaatattactcccttgacgcgacttaccgcagttggcttaaaattgagatgatgaatgccgctgtttctcctgagatgctttcggcagaggaaaagggtcaagctgttgctgcagctaaagaaacactgaacttggcatgttcgttactacgcagggatggaagaccatggctgtatgctgtcgagagcagtccatttgaatcccccgatgttattttccttgagctgcatgcttctgcaatgctctgcctaccttctggagaatgtctgttaccagatgcaacatcatgcacagctttgacaagtgcactatattcaactgtcagtgaagatgatgtgctgcatcgcctgttgaaggtggatgtccaggtctcttctagagacccctgctgtattgaagttgctcttcgctgcttagcagcagaaggtgatggatatgggcttcatgaagccaacgatggaggtcttcttgctgcagtcatggctgctggctttaaaggtgaactcagtcggttccaacctggagtttcgatggcaatttcacggcttgatgcttggtattctgaccggagtggttccgtggagagcaccgctgcttacataattcgagggctgtgtcggaggtgctgccttcctgaaacaattctaagatctatgcaggcatgtatcgcactctccgcggctggtgatgatctagattactctctagataaatgtgacgaacttgttgagttagttggttcagccgagtctggaatgatgcatttgttcagccagcagcagttgcaggagttcctgattttcgagagggaatatctcatatgtacaatggagcttgaggaggaccggttgccttgtgatggctaagctttttccccacttgctgactaatccatgagacatgaccggcatgtgcattttgcggcgccgtgacccaagaacctgctgtgatgtatcgctacaccatttcaaagcggaaagatggaatttagtgcgtaacgtggttctgcccgtttgtgcacgagaattggcccgttttggaaagtcaatataagattattcaagtcgaaatccaagatttttgttcatgataaacaacaatgttcggc

SEQ ID NO: 267046 - DNA, 565 bp, Zea mays
aacccgttctccttttccgtctcctcgacgcaactcgtcgccgtcttctccaactcgcacctcgttcctcgccccaccatttgccgctcccgcctacgatgtcgacgagtgaggtgtggagcttgtccgatttcgaaatcagcaagtacatcggtgagggcaggttcggcaaggtctacctcgcccgcgagaagcagagcgggtacgtggtggcgctcaaggtgatatttaaggcgaaactgcagaagtaccacttccacgcgcacctgcggcgggagatcgagatccagcagagtctcgaccaccctaacgtgctccgcctcttcacctggttccacgacgaagagcgagtcgtcctcgtcctcgagtacgcggcccgtggcgagctctacaaggtccttcgcgctgctggccgcttcaccgagcgcacgtccgccacgtatgtagcgagtcttgctggtgcactggcatactgtcacaaaaagcaagtcattcatagggacatcaagcctgagaatttgctaatcgacaacgagggccggcttaaaattgcagattttggatg

SEQ ID NO: 267047 - DNA, 637 bp, Zea mays
cggacgcgtggcgcgacgcgtgggggccgaagttgtacagtgaaccatctcccacctttgacacttcgcgctccccatccaaaccgtactaatccgccggccgacgttctccatttcaaattgcaaacctatactccttttccgcctcctcgacgcaactcgtcgccgtcttctccaactcgcacttcgtccctcgccccacccaggggcggatctccacccggggctgcctgggctgcagcccctgtcggcagtcgcggcccagtccatcatcgcgcgacatgacctagcagtagcagcagacgtcctacgtccagccccagccgccgccgtttggctcctgcgttcgatctcgctgcgtcctggtcctgcgccctgcggtccagcctcctctccaagactccacttctccagcgcgctcgcccgcgccagccgccaggccgccaccggccaccgccattggccccaccatttgccgctcccgcctacgatgccgacgagtgaggtgtggagctggtccgattttgaaatcagcgagtacatcgctgagggcacgttcggcagggtctacctcgcccgcgagaagcagagcgggtacgtggtggcgctcaaggtgatatttaaggcgaaactgaag

SEQ ID NO: 267048 - DNA, 448 bp, Zea mays
tgtatttgcagtcgctctcacagatcatgaatggttctatggacgagctggctcgatgcccaggaatcggtgagcggaaggtaaggcggctctatgataccttccatgagccgttcaaacgggttcctgcccgaccacgaccaaacctcgtagtacccgataccccggaccgggagaaagcaaaaggccaaccttcgtctacagatggcagcagtttgcaagatgcggtagagaagccagatgcgtcgaagaagacgaagaaaggctctgatgtaagatcagccctcaccgttgcctttgccaagtattcggagaagatccgcagtcagggccgcgatgcgccaaacgaggccggtgagagtactggcggctcgaccgtggaagctgagagggcgggagactagatttagctgtaggatggttaacggtgcttgagtaatgctagttt

SEQ ID NO: 267049 - DNA, 951 bp, Zea mays
  unsure (1)..(951): unsure at all n locations
aagcaatccgcaaaccctttctactttcttcccctgctcgattcgcgcactgcatcaccggcgacggcggcgatggcacggaggagaaagacggacgccccgccgcggctggacgaggcagatcgcacgctctactccaccttctgcggcgccgccaactccctctcccagctctacgcgcaggccatggcccagcagaagctcaacttccatgccggcgagcgccacgccttagaaaagctctaccagtggatcttgaggaagcacgatgaagaggctaggctcactgtggctgaaataatgtctcatatccagcatgagatagactatgtaggtactgatgcacatgtctccccaagagtacctcagcatcctcagattgcaaatccattcgccaattcagttgtcccacctggaactggtttgtatgggcaatcagcagctgggtttgctcctagacccagtgtcactgaccagtcgaagaatacaatattctctaatgccttatcaagcccagtgcgcaggagtctccagaactctcataccactcaaggtgctggcaatggaggccggaatgcagaagcaaacttagcaggtgcaaatagagaggccaattctacaagctccaacgacacttctatggatatggtttcagacacgaatgaattctaccagtgatttgcagtaagatccttctgcgatcaagcagcatcgcatgccagtgttttttttgggcctttcctttcgttgaggttttcacctaaactctcaccattaggtgagcaatgtagttgcatgtccggtgattctggtttgttcaagttggtatttaagttgaaacgtgttgggcatgcattattccctacaatgtgttcgtgagttcaatattatgaatgtacaggcagattgcgttgtgataatgtgatatattctgctacaggaagttgnctg

SEQ ID NO: 267050 - DNA, 432 bp, Zea mays
gtgcccggcccggtccctctccactgcactgcgctgcgcccatccatccttaaaccctcctgcgcgcgtaggcctcgtcttgtccttccccagcacaacctctcctcctccttcgccaggtgcctcttcgttctcctctccgggctatcaggacgaaataactggccgcgctgcacgccggccgcctcgagaagaagcgctcgccccgcgcgcgcggctccgggctaccaggacgaaataactggccgcgctgcacgccggccgccgcgagaagaagcgctcgccccgcgcgctctgccgctggttcggccgtgccatcccgacgaggttcccccagctgtgcccgctcgatctccttccgcgcgcacgcgcacgcagtggtccgtcgccgctgattgatcctgcaggaaaaacaggtcaaggagcttcttt

SEQ ID NO: 267051 - DNA, 1081 bp, Zea mays
ggcttggccgagatctccgcactaccccttatctgcgttaaaaccaggacctgcttgtttgattgtttcatcgatcgtcaatgcaagtttgtccattcgcattggtctgaatactgtagctactagcgcgagtgccactgtgccgcagctgcctgctcgccattactgcaagctgtgttcaatcaaagcttaattaggctccctctacatctgatccagctaagtagctagccagcactacagaagggcgtggcaagaatcaggagagagatagcaggggggctagctagctgagctcgtgcgacgaagaatggccggaattggcaggaacatggtggcgccgctcctggtgctcaacctcatcatgtacatcatcgtcatcggcttcgcgagctggaacctgaaccacttcatcaacgggcagaccaactaccccggcgtggccggcaacggcgcgacgttctacttcctggtgttcgccatcctggccggcgtggtgggcgcggcgtccaagctggcgggcgtgcaccacgtgcgcgcctggcgccacgacagcctggccaccaacgccgcgtcgtcgctcatcgcctgggccatcacggcgctcgccttcgggctggcctgcacagagatccacatcggcggacaccgcggctggcgcctgcgcgtgctggaggccttcgtcatcatcctcgccttcacgcagctcctctacgtgctcatgctccacacgggcctcttcggcggcagcggtggctaccgggaccacgactacggcgtcggcggcgcggccggcgagcccaagggggtcaccagggtctgaggattctgatcgatgcagctcgtacatgtgtcatcatatcaggcgctgctggagtgtgatgacgtaataagtagtacccatatatatatatatggtgtgtgttgacgtaccacgtacactacgtacgtgtgtacctagtagctagctagtcagtccatcgtctgctcatctcgtcaggtcatcagatctctcggttctggtttgtacatcagtacgtgcatgcatgtatcacgtgtcaaatgtatttcgtcaccaaaa

SEQ ID NO: 267052 - DNA, 459 bp, Zea mays
agccccaccagctctgctcagccaccaccatcctcctcttcctcgaacggtcgaaccgccgaaagcacgcaccccgccgccgcgtaccctcccctcacccgctcaccatcgccggccgccgttcggcgcgacgcggattcgaatccggaaagcgggcgatgggggcgaagcgcgcggtgctggtgggcatcaattaccagggcaccaaagcggagctcaagggctgccacaacgacgtcgctcgcatgcgccggtgcctcgtcgaccgcttcggattcgacgagtccggcatccgcgtcctcatagatgacggctccgcgccgcagcccacgggggccaacatccggcgggaactcgcgcgcctcgtcggggacgcgcggcccggggacctcctcttcttccactacagcgggcacggcatacggctgcccgccgagaccgggaaggacgacgacaccg

SEQ ID NO: 267053 - DNA, 767 bp, Zea mays
ggcgctcgctgggaggcggcagcgcgacgctcgcaaggaggcaacgcgatacctgtaggcggcctcgttgagacgttgtccctatcgtggaggtcttcctctcgacccagcagccgtagcccagctgtagcccaactcagatctctgctgtaacgtcatccaataggctaaggagttcctttgtgcttccggtgacaagcgaaaggaagtcctctccagtatggaggaggaggcagataagctcagtggttctgctgcaaggcatggaaaggtctatgtaaccatcgcaaagaagattctagagaaaggcaacgagtatactgagaaggaaaccaagaggcttgatcgcatgttggagaagtccatcagcccctccaaggccgacgagtttatcatcaagaagaacgttctttcgactttctcatcctaaggcatctgctagctccattttcacgtttcagatataggcgacaaaaactgcaggattataagtgtgataatgagagttaaatggtgctagaactaattttggggctttccctcgaggatatgtaatactcgtacgtcttgcgaattagttcttttccttgtgcttctggatttattccgtagcaccatagtttattttttggtttgacatggaggacattgtgactacagaactgagttttactatccaataacactgctcacttgatggggcttatgcgaacctgttctggtacgtgctttgggaatacatgatcacgtgcctgcttatccagtcc

SEQ ID NO: 267054 - DNA, 706 bp, Zea mays
tatcctcgtgacggctcctcgccagtcgcctcgtctctccctgccgcgtcgcctcgcctctccctgccgcgtcgcctccagttccgacgccagcgcgcctcccgcctccgccgcgcctgacgaacgcagtgtaggactgtgcaggtagagaggaggagggtccggcgagatggggatgcgagataagaagcggaaccagaagcgagtgctcgcgcgccgtaccgcggtaccgcgcccaggcgagggcaaggacttcctgccgctggaaggaggccccggtaagaagctcctgaaggtgcagcagcctgaagagcccgaaaacacagccacagtcgtctacattgggcatatcccccatggtttctacgaggacgagatgaaagggttctttaagcagtttggggatattaagaggcttaggatcgctcgtaaccgcaagacaggaaagtccaagcactatggattcattgagtttgagaaccctgctgtggcaaaggtcgtagcagatgagatgaataactatctcttgtttgagcgcaccttgcaagttgcacttgttgagccagagaaagttcatcctaaattgtaaggctctctaagtgcctattagatttgactactatattctgtttgtttttgcgcttatccttataaatgggagaagtagaattgattttcatgtagctgggttttaatattcaatagc

SEQ ID NO: 267055 - DNA, 1088 bp, Zea mays
  unsure (1)..(1088): unsure at all n locations
ctccttcgtttgcccatcctcctgacggctcctcgccagtcgcctcgtctctccctgccgcgtcgcctccagttccgcctccgccgcgcctcccgcctccgccgcgcctgacgaacgcagtataggactgtgcaggtagagaggaggagggtccggcgagatggggatgcgagataagaagcggaaccagaagcgagtgctcgcgcgccgtaccgcggcaccgcgcccaggcgagggcaaggatttcctgccgctggaaggaggccccggtaagaagcatctgaaggtgcagcagcctgaagagcccgaaaacacagccacaatcgtctacattgggcatatcccccatggtttctacgaggacgagatgaaagggttctttaagcagtttggggatattaagaggcttaggatcgctcgtaaccgcaagacaggaaagtccaagcactatggattcattgagtttgagaaccctgctgtggcaaaggtcgtagcagatgagatgaataactatctcttgtttgagcgcaccttgcaagttgcacttgttgagccagagaaagttcatcctaaattatggaaaggggtgcgaaggggatttatacctgttgatcgagtagcaattgaacggaagagacacaacaaggataagactgtagcagagcacaaaaagatggttgaaggaattgtaaagcgggatggaaagcgtcgcaaaagaatcaaggcagctggtattgactatgagtgtccagctcttatagggagcattcaaccatcagcgaaaaagatcaagttcgatgaggcatagtattttattctaatgggctgttggatccttagtagacgaggcggtggaatggttgagcaatatattcaccttttgaggagacggcagacaactatgtatttcacttttgaatttctctatgttttatgaatgacaccgacacagatgttacaacttaagtatgaaaatgcaatgggctgtgttcttcatttgcccttggaaggttccatataacattgtgttcttaattcaaaacaaaaaaaataaaanataaaaaattaataaaaaaaaaaaaaaaata

SEQ ID NO: 267056 - DNA, 870 bp, Zea mays
cccacgcgtcccggcacataaccgtgctctagttgaggagcgtgaactgttaagcagggaaatacaagctggaaaagatgaggtccgccacttgaatgtgatcattgctgacattaacactgagaaagaagcttatatcagtaagcttatggacaagaggaggaagcttgaagctgaacttggagcaagtgagcacttgtgtgatgaggtcaggcatcttcgtggtgaaattgacaagctcgttaccgctcggaaagaactatctgcagaggctgcatctctcgtggaagagctgaacagggagcaatctgttaaacagcagctacctgtgctgaaaacagaaattgatggtctgcaacaggaacttgttcacgtgaggactgcttgcgggttagagcagaaggggaatttggaattgctggaacaaaggaaggcaatggagaagaatatgctttctatggcacaagagatcgagcagatgcgaggcgaattagctaattttgaagttagaccaaggggcccaggtggagcatatgggatgcagattgggagttcggaagtgaccttcactaagaacccatatgaagatggttataatgcttatggggttcctgagaaagatcctttgcatcctcctgaatatgcttcgtgggggacatatgacaggagtcgccttcagtaccgctaagaccagaacttagtcattggagaaagaattgccttctaggttttaatggccatgtcttgtcgtttacagtaccgaagctttatgcctgctgcttggttttccattaagagttgtccttttcaatgcttctaatcataactttttccattacaaactggctagattattaaactattggtacc

SEQ ID NO: 267057 - DNA, 725 bp, Zea mays
tctatataagaaatacacacggcaagggtctggggtcttggctcttgcatacgaattgcttcctgagatgcctgttagtgaagctagaagtttggaaagggatcaagtagagagcgacctaacgtttgctggctttgcggtcttcaactgccctataaggggtgactctggtgctgttttacaagaactcggacaatcttcccatgacttggtcatgatcaccggagaccaagcgttgactgcctgtcatgttgctagccaagtacatatatcttccaaacctgttttgatcttgacacggataaagactggcggttttgagtgggtttcgccagatgaaactgatagagctccatacagtgctgtggaggttgcagtgttatcagaatctcatgacctttgtattaatggggactgttttgaaatgctacaaagtactgaggctgttctccaggttatcccttatgtgaaggttttttcacgtgttgctccagaacaaaaagaacttgtactaactacattcaaaagtgttgggagggtgacactgatgtgtggagatggaaccaatgatgttggtgcactgaagcaggcacatgtcggcgttgctcttttgaatgctgaaccagttcagaaagtggattcaaaatctaaagctgaaaataaatctgggaaattgaaaaacaagaagcctgctaatgaagcatcatcacaagtgactccggtag

SEQ ID NO: 267058 - DNA, 580 bp, Zea mays
  unsure (1)..(580): unsure at all n locations
aaccccccttgtcgtcgcttcggttcaagcgaggaagagagagagagcgagagtggtacaagcggcgccggcggccgcactgtagagtacctcgagcttgttcactgccgtcgcggcctcaaagcaagccacatcatcgatggcggacgcagctcacgtcttcctgctggtagcggtggccgccgcgctcgccggccgctcagacggcgcgtggtgcgtgtgccgcccggagctggcggacagcgcgctgcagaaggcgctggactacgcgtgcggcgccggcgccgactgcaagcccatcctgcagagcggcgcctgcttcgccccggacaccgtcaaggcccactgctcctacgccgtcaacagcttctaccagcgcaacggccagaacccgcaggcctgcgtcttctccggcaccgccgcgctcagcaacgtcgacccgagcgccaatggctgcacgtaccctgcgaccccaagtgctgctgcaacgacgagcagcagcagcggttcggccggcgtgtacagccctncagcgatgggtccgtcggccctcaacgaccacagcgctgccgccggcgtc

SEQ ID NO: 267059 - DNA, 380 bp, Zea mays
aggaagcgaacgcgagagagagagagagttgtacaaggctcgtcgccggccgcactgtaggggtaccttgagcctgttcaccgccgtcgcctgccgcctcacatccacagcatccatggccgacacagctcgcctcttcatgctggtggcggtggccacggcggcgctcgccggccgctcagacggcgcgtggtgcgtgtgccggtcggacctggcggacagcgcgctgcagaagacgctggactacgcgtgcggcggcggcgccgactgcaagcccatcctgcagggcggcgcctgcttcgccccggacaccgtcaaggcccactgctcctacgccgccaacagcttctaccagcgcatcggtcagaacgtgcttgcct

SEQ ID NO: 267060 - DNA, 627 bp, Zea mays
cacgccgaaaactccgtataaaacacacaccgccctcctacggatcaaaccacccctcggaaaaccccaaaaaagcgtcagaaaaagaagagagagctgggggatggacacgcacgtcggcaaattaatcgactcggtgggctccatcttccgcggcagcgacgtcctgccctggtgcgatcccgacatcatcgccggtttcgagagtgaggttgctgaggctgcaaatgaagaacagaaaaccgagagcctgatgaggctctcctgggcgcttgttcactctagacagcctgaagatgtcaaccggggcatcggaatgcttgaagcttcattggacaggtctagcagcccagaggaaacaagggagaagctctacttgttagctgttggtcgttacagaactggggattatacaagaagccgacagcttttggaaagatgcttagagatccaacatgactggagacaagccataactttgcaaaggctcgttgaagaaaaaaccaaaagagatggtatgattggcatggctatcatcacaggcgcctttggagttgtgggtcttgttgctggtgggataattgctgcggcttcttcgtcgtccaggaagagatgaggatatcttct

SEQ ID NO: 267061 - DNA, 648 bp, Zea mays
accagcgcgtccgcggacgctgggtcgagatgtacatcaagcagcgccgcgtgccccgcggcagcaccaagggggtctgccaccagacgcgcgggacgcgtgccggggcgtctccgacgccgccgccgccggctccatcgccgacgtcatcgaggcgctcaaggtttaccacccgttcagcagttaattcttgctgctgtggatgtgctgggtggggcctggactggcctgggtttggacgtatgtgcatgcagcattcattgcgttgcgttcaactgtggtcaacaagggagggagacggatgcagatgcagtgtgagatgtttgcatggaggcccctatagaaacaagtgaaatgtttaggcgcccttgtgcacatgctggtcgcattccttgcaagaataccaggggtggggccagaatggcatgagctgggtgttcctttctaactcttcttcttcttcttctcctcttcttctttatttacatttttcttttatgtgttttcgtctaattaaggttctggttttgtagttctaccgtgcaactcattgtaccggaaaagaatatatgaacaggaaatcccatatgatctttgccaactttaacccaaccaaaaaaaaaacccacgcgtccacgggagcgaagg

SEQ ID NO: 267062 - DNA, 465 bp, Zea mays
cgccgccctgagcgccactgcacagacgcgcagagacagacattgcgactttgcgagagacaaaacctcccagataacgcccgcgcgctccccgatggcgtcgtcgtgccagaacgtggagattcccggcaagccgacggagacggggacggcgctgctggagacggcgacgggcaccatccaggggttcgcgccgctgagccagatccaccagcacctgtgcgcgttccacttctacgcggacgacatggggcggcaggtggaggcgcaccacttctgcgcgcacctgaacgaggacgtgcggcagtgcctcatcttcgacgggcccggcgccggcgcgcgcctcatcggcgtggagtacatcgtctccgagacggtgttcctgacgctgcccgacgccgagaagccgcttgtggcacacgcacgagttcgaggtgaagggcggggtgctgttcatgccggggg

SEQ ID NO: 267063 - DNA, 860 bp, Zea mays
cggacgcgtgggcggacgcgtgggcggacgcgtgggggttaatctccacacgaatcacggacacggagacttgccttccttttggtgcggaaaaagaaagagaggagaagcgaaggaggttctcagttggagcggctccctctccccgcgcgcgccaccgcctccgatccgagcagccgcctacagtcaacccattcaacctcaaatgttccttgtgaggtatcatgacagaacagcaggaaggtgttagcaagagctcttcctcaagtattagcagcagcactcaggagagtgaggaggaactgaccatcggtacccttataaccgaagcaacaaacacaacaaacagtgccaagagtcttggaaagcgcctttcacacttagattcgatcccgcacactccacgtgttaatgggaaaattccagattttaataatgcgacaattgatcatgaatcattattagaaagattaggcacttatggcttagctgaatatcaaatagaaggagatgggaattgccagttccgagctctggcagaccagatattccgcaatcctgactatcacaaacatgtgaggaaggcggtagtgaagcagctgaaggagttcaggaaacactatgaaggttatgtgccaatggaatataaggtttacttgaagaaaatgaaaaggtctggggaatggggtgatcatgtgaccttacaggcagctgcagacaggtttgctgctaaaatatgtctgttgacatcgtttagagacacatgcctagttgagatagtccccagagatgccactccaacaagagagctttggctaagtttctggtgtgaagtacactacaattcattgtatgcagtt

SEQ ID NO: 267064 - DNA, 654 bp, Zea mays
cggacgcgtgggttggggtacaagtcatgtcaatgagagtatggtaactggtgaaggtgtaccaatctccaaggaagtatccagtctagtcattggaggcacaatgaacttgcatggtgttcttcatatacaagcgacgaaagtaggatctggaacagttttgagccagataatttctctcgtggaaaccgcccagatgtctaaggcccctattcagaagtttgctgattatgtagccagcatttttgttcctattgtcatcaccctgtccttcttgacattccttgcatggtttctatgtggatggttgggagcatatccaaactcatggtctgctgaaagtagcaattgctttgttttctccctaatgttctccatatctgttgttgtgattgcttgtccatgtgctcttggtctggcaacaccaactgctgttatggtagcaactggagtcggggctagtcatggagtacttgtaaagggcggagatgccctggagagagctcagaatgtgaagtatgttatttttgacaagaccggaacactgacccaaggaaaggctactgtaactgcaacaaagattttttcaggaatggatctgggtgactttctcacgttggtagcgtctgcagaggcaagcagtgagcatccact

SEQ ID NO: 267065 - DNA, 618 bp, Zea mays
tcgtcacgcgtgcgtacacgcgtccgcccacgcgtgcggccatcgctaacaatatttggaaatgactacgcaacaaaggatgggacaggggttcgtgattatattcatgtggctgaccttgctgaaggacatcttttcgcattaaagaagctttttgaaagctcatctaacataggatgtgaggcgtacaaccttggaaccggaaaaggaacatcagtgttggagatagtcaatgcatttgagaaggcttctggaaagaaaatccctttggtcatgggtcaacggcgtcctggtgatgctgaggttcttttttcatcgccggcaaaagcggagagagagctgcactggaaagcaaaatatggcatcacagaaatgtgcagagacctgtggaactgggctagcaagagcccttatggatacgcggcatctgagtctcccaagctgaatggcagttcacgctgagcaacgccgattggcccgtgtggactcacttgtacatgagactgtagtgcctgccaaccaggataaatgtagatctagtcggtcggtcatacagagagaagttctataggcctaggaaagaaatgttatcctgttcctcagcataagctcccatag

SEQ ID NO: 267066 - DNA, 661 bp, Zea mays
catgtcaagcatggccacggggcaaacagggacaccatgatgatcctgcagaacagcagctacgacgcgtccgggtcgttcatggtctactcctctctcgacaagcatctggtggagacaattacgaacccgggtgacagccaggcgatgagcagcatcaacctcttccccgccggcttctccctcgtccccctcaccaacccggacccggcgccgcaagagggctccggcagcatcgcacagcctggggcgaccgtgatgactgccgggttccagattctgatgaagatggcccgtgggaccggcctttgccctcgctcggtgtcgtccgcggtcaagatcatgtcagacaacatcaccaacatcaaagacgctctgttgaaaagccaccctgttttctacaagagcattcagtctgtcgactgaatagcggcaaggggagaaagggaggtcgtccaatgcttgtggaggctgctgtttaaatcaaggatactgaaacggaaccccatcagctttggtcgccgcctgcgtttctcccggcaatatatacccgttccgtctactgtgtggaactgctcttggctgccaagagcctgtaatgatgttagtggaaccgaagttgtgctatgtggacccgtcacctcataatgtatgccatgtt

SEQ ID NO: 267067 - DNA, 1930 bp, Zea mays
cccacgcgtccgcccacgcgtccgcgcttgcatctccccgccgccgccacgcgcccacgcttccttccgaacaaagctgtcgtgctgcctttcttgccgtccaactcaagcagccgtcctagtcctcgttggtcctcatctgctgcccttctacggtggaggagagaagaggagaggagcggagcggagatccagccgctttccggctgctttcttcttctaattgcggagcaagttccgtcaatactgcttgtggtgttgcgccaatttaagttcctgctgtccgcaaaaggagagcttccgcagctcctatggcaaagcctcccaatagcattggccgtagcagcatgccaagatcgaatgagggtttgaggctcatattttcggcagttataggtatcatgctgggttacctgtttgggatctccttccctacagtcaacataaccaagcttcacttcccttcgagtatcatatcctatattgaagacaggaactctggcatcacaacccagacattgttgaaccatgcttgggcatctgcaaacaatcgtaaaaagaatagctctgaatctaacactgatgaaattcccgagatttatgttcctacaaacccaaaaggtgctgagagacttccaccaggcattgtagtgtctgaaacagatctttatccccgaagactatggggtgatcctagtgaggaccttactagcgagccgaggtatcttgttacatttactgttggtattgggcaaaaggcaaatattgatgcagcggtcaaaaagttttcagacaaattcaccattatgttgttccattatgatggtcggactactgagtgggatgaatttgagtggtctaaaagagcaatccatgtgagtgtcaggaagcaaacaaaatggtggtatgcaaaacgatttttgcatcccgacgttgttgccagatatgattacattttcatctgggatgaggatctaggtgtagaacatttcaatgcagagaagtacattgagcttgttagaaagcatgggttggaaatctctcagcctggtttgcaacctgataaaggactaacatggcaaatgactaaacgaagaggtgatcaggaagtccacaaagtaactgaggagagacctggctggtgtagcgaccctcacctgccaccatgtgcagcgtttgttgaaattatggcaactgtgttctcaagaaatgcatggcgctgtgtatggcatatgattcagaacgacttggtccatggatggggccttgattttgctcttaggaaatgtgtggagccggctcatgagaaaattggagttgttgatgctcaatggattgttcatcaatcagttccttcacttggcaaccagggcaagtcagataatggaagaccaccatgggaaggggtaagagcacgctgcagaaaagaatgggggatatttcagacaaggctggctgatgcggagaaggcttattacttggagcgaggcatcacacccccgaactcaacatcagtttagatgaacacatgctcctcagatgccacggcaaggtttctgttgggggaacctgctgcaaactggcatgttcatcgaagctgctgcagcccagggcaaatccatatattttgtacattagaggtcccacgaatcgccatgattaatctttagtgtcgctcacctggttttaatgtcatttcttttgttagtgatactagctgcgatgtaagtaggaggatacagcagagaccgtgatgatacccatttgtgtattaatgacctgatgcaatatggatgttgataatcctttcctcagtttcagcatgtaaattgtttgttctagaccagctgtatgcaactgggtcaaatactacattgatgtaaggcccaaaatttgtataagaaaaaaataataaaataaatatatgaag

SEQ ID NO: 267068 - DNA, 576 bp, Zea mays
gttacttgcatcgccccgtcaagcacgccgccggcacgcggccctcggtctccccgccgcgccctctgcctccgcccgaacaaagccgtctcgccgtcgcgttgccttccttaccgtccaccgcgggcagccgtcctagtactcggttggtcctcccctgctgccctcctacggtggaggagcggagatcctgccgttttccggctgatttcttctaattgcggggcaagttccgtcgatagtcgatactgcttgtgctgttgagctaatattaagttcctgctgggagaacttctgcagttcctatggcaaagcctcttaatggcagtggccgtagcatgccaagatcgaatgagggaatgcggctcatattttcggcagttgtaggtgtcatgctgggttacctgtttgggatctccttccctacagtcaacataaccaagcttcacttcccttcgagtatcatctcttatatcgaagataggaactctggcatcacaacccagacattgttgaaccatgcttgggcatctgcaaacaatcataaaacgaatagttctgagtctaacactgatg

SEQ ID NO: 267069 - DNA, 406 bp, Zea mays
gggtaagctaactaataccagttactaattttacatatttcgccgtgggaatgcatgaaagggttttatgttgctgttctgtctgttacaggttagagcacgctgtcgtaaagaatgggggatgttccaaacaaggttgactgatgctgagaaagcatattacttggagcacgggatcactaccaccaaaatcgacggtagcttagctgcacgcaccgacagtagcttagctgcactgcatgcctgcatacaggcacctcgcgagtcacgccaaggtttccgctttgtgaacctagcgccttcctgtccgataagcaactgactctgtagagatgcagcaccacagccagatttgtacagaatcgatgtacgtttttactcttcttaatcttctttacttgttttc

SEQ ID NO: 267070 - DNA, 611 bp, Zea mays
cccacgcgtccgagatgatgcaaaagaagttaagaaaatcgagaaagtaaccaaccatgacgtgaaagccgtggagtactttctgaagcaaaggtgcagctcaaatccagagattgcaaaggtgtcggaattcttccattttggctgtacctctgaagatatcaacaatctgtcacatgcattggctctgaaagagggggtaaatagagttatgttccctgccatgatcgatctatgcagagcaatgtgttccttggcaacacaaaattcaggctaccctatgttggctcgaactcatgggcagccagcatcaccaacaactgtgggaaaggagatggcaaacttcgcggccagattatctgatataggaaagagtttctcagaggtgaagatactagggaaatttgctggcgctgttggcaattacaatgctgatgtggttgcatatcctgaagttgactggcctaaggtggcagaagagtttgttaggtccttgggtttgcagcttaatccctatgttactcagatcgagcctcatgattacatatcaaagctcttcaatctattcaccccagttcacaatgtgttgactgattttgatagagacatgt

SEQ ID NO: 267071 - DNA, 794 bp, Zea mays
  unsure (1)..(794): unsure at all n locations
cccacgcgtctctcctgcgtagggtttaaccactcgcagcagccgccgggactcgagaatcatgtcagcgccgccgtcgctcaagaccccggcaaccgccgtagcggtctctcggcgctcggtcgccaccccgagagccaccgggcttcgcggcgcctgtgctcccccgactcggcgcctccggtgctcagcctccgccgccgtggccggggcttccaccgagatggctgatgctccgctggactgggcagagaggtcgctggaggagttacgcagcttgccggaccacgacacgttctgcttgatggcgctctcgccgctggacgggcggtacgaccgcttcgttaaagagctgatgcctttcttcagcgagttcggcctaatcagataccgcgttctcattgagatcaagtggttattgaaactttctcaaattcctgagatcactgaggtgcctcagttcagcaaggaagcccaagccttcttgattgctattattgagaacttttgcattgatgatgcaaaagaaataaagaaaatcgagaaagtaaccaaccatgatgtgaaagccgtcgagtactttctgaagcaaaggtgcagctccaatccagagattgctaaggtgtcggagttcttccatttgggctgtacctctgaagatatcaacaatttgtcacatgcattggctccgaaagaggggggtaatagaggtatgttccctgccatgattgacacatgcacagctttgtgttcctggcgacacaaattcagctccctatgntggctcgactcat

SEQ ID NO: 267072 - DNA, 436 bp, Zea mays
accggtccggaattcccgcggcggcccacgcgtccgcccacgcgtccggtggttattgaaactttctcaaattcctgagatcactggggtgcctcagttcagcaaggaggcccaagccttcttgattgctattattgagaatttttgcattgatgatgcaaaagaaataaagaaaatcgagaaagtaaccaaccatgatgtgaaagccgtcgagtactttctgaagcaaaggtgcagctccaatccagagattgctaaggtgtcggagttcttccattttggctgtacctctgaagatatcaacaatttgtcacatgcattggctctcaaagagggggtaaatagagttatgttccctgccatgattgacatatgcacagcattatgttccttggcgacacataattcaggctaccctatgttggctcgaacttat

SEQ ID NO: 267073 - DNA, 1170 bp, Zea mays
tttacgcgtccgcccacgcgtccggacgcttccggctttccgtgcgaccgtgcccttttcctcctctcgcagctcgcaggcgcaacagattccacccgttccttcgggtggccggacggaacgaggaaggaggcaggatggcctccgatggccacccgccggagccggggaagaaggaggatgtcgccaccacggccgccgggcctggagcaaacgatctggacgacccgcaattcatgtgctgcgtatgtctggatcttctgtacaaaccagttgttatatcatgtggtcatatgtcatgtttctggtgtgtccacaaagctatgcatattttccgggaatcgcattgtgctgtgtgtaggcagccctatatacacttcccgagtatttgtcagctcttgcatcatttgcttctaaagcttgaaactaatgattacaaaagaagggaaaaagaagtactagaggaagagaagcgcatgcaaacatactctccccaaatcattgagttcttaaactacaagactaacgttggaagctataaggagaacagaaatgaagacagtaaagctagacctccacaagaagttccattgaatgacagcgttccagatgagcatttgaagaaaattaaattggaggatgtttcatgccctctctgtatggagatgctgtatcaacctgctgttcttaattgtggtcatgtgtattgcgtatcctgtttgtcatccttgaatgaggaaacgctgaagtgccatgtttgtggaagtcttcaccctggagatttccctaatgtttgcctggaccttgatcatttccttgaagaatattttccagcagaatatgaattgagagggcagaaagttcaatttaagaaggatcagtgcaatcgtgaaacatcatcttcaggtacttcaggcagaaaaggaagcactagggcactgcatgctgaagacccgtcaaatattcacattggagtaggatgcgactcatgtggggtatatccgatacgtggtaagagatacaaatgccaggactgcactgagttaataggctttgacctttgcgaagcctgctacaactccagttcaaagctcccaggacgctttaaccagcggcacacccctaatcacagaatggaagttgacaattcagcactcgtgcataagatac

SEQ ID NO: 267074 - DNA, 471 bp, Zea mays
tcatcgcgaacgccttcttctcggcagaagatacctgaagagcgcaccaatgacctttggacacacacgactcgggaaaccactaaagcacccataaagccccacaaagcctcttgcaatgcgcatgggacccgcgttgtgcagaaggttatggacaccatgaatacccctgaccaagcgtcaatgttagtgtccgccttaaatactggaatgatgtgtgcaatgactgatccctatgggaattcatgttgcggaccactgcctgcagaaattgttacctgagcacaaggcattcattcttgaggctgctgcatcatgctttcttaatttgcaagagaacgtcatggttgctgtgttccccagaaatgaattggtcattcaagtgatgaacagagaaacatcttgttgtgcaagataacatccagtgcccttacactctcagaaaatccggatggggaactatgtattcag

SEQ ID NO: 267075 - DNA, 838 bp, Zea mays
cccacgcgtccgtttttttttttttttttagtccaaactccaaacaggagtccaagttataatcatgctctgttcaaacagtttagctggaacccatcccaaggtcatccatccaaataaatgtataaaggaatgaaagtgcaccatatatgataactcaaaaataataatacagtaataacaagatggtcacttcttttgttgcagacatagataagggaatatgatcaaaacaaattgctatggcatcatcaatgatggaaggcctccgaaatttgatgtttctagattattggtatgacatcttttgcatggtatcatcttctagatcttaagactgatccaaatgtaaatgaaagaaaaggattagtcggggcggaaactgacgtatgaactcaagttttacaagatcctgctgctgctctgctgatgccaactacatcagctaccaggtcaaaggcagaaactcatggagtgctgaagctaaacaggccttccattgtgaatacctctctttgtaaacatcactgtgcagaatccttgatgaagcgagctcagcagcccatcacagcgcaattatacacaaaatttccagatggccgtctgtccatcagattccacacaggtggcttgtcatcaggaatccatgaggttagctcaatcgttcccccaactggcgttcttgggccaccaatgacaataagcctctcaccacatgccctgaatgcaaggccccatccattcatggacacagatcgctcaggcaatttaccaagtgtgatccacctattattctgcttgcggacgcgtcggtcggcacgggtattccgagaccggt

SEQ ID NO: 267076 - DNA, 796 bp, Zea mays
cttacgcgtccgcccacgcgtccgcccacgcgggcgagatgttgttcgaggcgttcccctcctccacgcaaccttctcccctccagatccaggattgccgggctccttgactcgttacctcgcgcgccctcggtgagctactttgtttcgatttagcgacaaatcagtttgcttcatgttgcgcaggcttagatctgaatgccggattcttcgtcttacggcttgaatcgagctgggaggctgtggatctgagcacgggaggtacaacaaatccgcgtgtatgacgagttggatcggcaccggttagtctctgaccgcaagattttgttgttgtgttgggctgatctgccgcgttgttttgcttcaggttctagagctagcgaaatcgcaaggctattagggttcctttcggagcgcgtctgaagcgatgatggctgaagtcggcggtgggatcgggatcttctctgccctgctccactcgggatgatgaatctgctgcgctgataattattggatgaatttcgataattattagatctaagagatgcgccgacttgaagaggcgaggtaaggtgcaacatgtataagacgtgacatgctatagaggcctttgccatggtgggtgcgctcgcatggcaggccacggtaataaaagaagatatttttgtgtcctgggggtggagatcgcacgggggattgttttttggccccgggttctcctccctcgtggtgttccgtgtccctatgtgcattggtctttgcgtggtttgcgatctcagctcacctacacgcgtcg

SEQ ID NO: 267077 - DNA, 676 bp, Zea mays
gcctgctgcaccgacccggacttatctggctggaccgacgcatcgcgtggcctctgtttggatggctggactatgttgaaagatttccacagggggtggcagcgggacctaaggaaggtggtggatgcacgggtccgtgcatctaatagccggcttattagttggggatgctaaggcccagcctatagaagtgaacgtggtcagtcatccgatccagagatatgcggtatggtttggtggctctgtgcttgcttcaactgccgaattctacgaggcttgccacacaaaggcagagtacgaggagtacggtgccagcatctgccgaacgaatcctgtcttcaaagggatgtactgactcagagcggttccctgtggctgacgtcgtggatgatatccactcaaagcttaaatggggagaagtgacagtggtcgtggagacaggactgtcgagagggatcctgatcgtggggaagcatagccgtacgagctgtacaaaagagaagcgcaaatagataggtttatgtttcaccatacaatttagatgctggtaggcctgacaggatgggtttgccacccctgctgaattgggtggcattgtaatttgtagcgtcaacacttctggcggtgcgagattgctccttgtatacatgttgattcggcaacgatgttttctttc

SEQ ID NO: 267078 - DNA, 772 bp, Zea mays
atcaacttctaaaggaaagaggtgagaacattccagcagaagaatcttttgatgtagcaagaaggattaaagaaatgtactgctatacttcttcggacattgtgaaggaattcaataaacatgacaaggagccatcaaagtacattaaacactggacgggcaccaaaccgaagactggtgcaaaatacacatgtgacattggatatgagcgattcctagggcctgagatcttcttcaacccagagatatataacaacgacttcaccactcctttgcaagttgttattgacaagtgcatccaatcatctccaatcgacacaaggagggctctttataagaatattgtcctgtctggaggctcgactatgttcaaagatttccacaggaggttacagcgggacctaaagaagatagtggatgcacgggtccgtgcatctaatagccggcttattagtggggatgctaaggcccagcctatagaagtgaacgtggtcagtcatcctattcagagatatgcggtatggtttggtggctctgtgcttgcttcaactgccgaattctacgaggcttgccgcacaaaggcagagtacgaggagtacggtgccagcatctgccgatcgaaccctgtcttcaaagggatgtactgactcagcctatcatagtcctgttctcaagggtatatatgtatttataccgagatctgttccctgtggctgacgtcgtgaatggcgtccactcaagcgtaaatggggagatctgacagcggaaacgg

SEQ ID NO: 267079 - DNA, 657 bp, Zea mays
cccttcttttttggttcccccggcatactctcactcactctctccctcggtccctcctcgtcgttctcccgtgtccgccgtgcactgtctgtctctggtggcggcgactgggcggcctccgccgctgccctacgccaggatcccaggctgcatcttccgtacgccaggaggagggcctcgccgcaggttgggtgggaggcggagatgagccgggggcggtcgccggagccgctggatttcttcatctggactgtgcaggatgtagggttatggttggaggaaataaatcttggaagctaccgccaggcttttgaagaaaatggtgtcaatggagagtatctagaaagcctgtcggtgttcaccactgagcagattcttcgctttataagacgatgccatatgaaatggggagattttatcaccctctgtaaagagttgagacgcatcaaagttgcctgcctgaaaggggagcaggaggtccgcaggccgtggtgggcgccgtcatgcctgtcggtcgtgttcacgcgggtggccaggcacaaccggcagtcccgggtcgtctccttgaagctggaagcttagcaagttagcaggctcgccctcagccagtggaactggcagagtcccgcgtcgtctcctgatgccggaagcttagta

SEQ ID NO: 267080 - DNA, 876 bp, Zea mays
gtccggccacacgtccgcccacgcgtccggagcaccgcagaaaaagaaaaagaaaagccaaaggcaaaggcaaaggaatcccaatcaggcaagcaaaaggaagaaccagctgctgcggccggagatgtcgtcgcagctgatcgaggagcaccggtcgggcgcggaggtgcacgtcgggcacgagctgtgcgagcgcaagtcgcgcgagttcatggtggagctgggcctccccgacgggctcctcccgctgcccagcctggacgaggtgggctacaaccggtcgacggggttcgtgtggctgcggcaggccgccggcctgacccacaccttcggctccatcggcaagcaggtgtggtacgacagggaggtgacggcgttcgtggagcccgggcggatgcacggcctcgccggggtgaagagcaaggagctcctcatctgggtcaccatctccgagatcgtcctcagcccctccggcaccaagatcgtgttccgcacccccgcggggctcggccgcgccttccctgtcaccgccttccagctcgagcccgcggcggcggagggggaccacaaggaggaggccgaggacgccgccgccgccgccgccaactgatctgctctagcttccggcggcggcggccgtgcgtgggctgctcgatccggtagtggcagtggctttgtgagacagtcgagtcgattgtggtttcccctcctccgccatgtgcgtgtagtggatgatgatgcaggaataaacggtgtccctggatccagaactcacggttcgatccatccagtttatctcatgcttgtgtatctctatgtatgcattgcctgtttgttcgctggaatctactacttgcagcggcctcgtctcttcag

SEQ ID NO: 267081 - DNA, 795 bp, Zea mays
aaaggcacaggaatccgaatcgggttagtttaaagaagaaccagctgctgctgccggagatgtcgtcgcagctgatcgaggagcaccggtcgggcgcggaggtgcacgtcgggcacgagctgtgcgagcgcaagtcgcgcgagttcatggtggagctgggcctccccgacgggctcctcccgctgcccagcctggacgaggtgggctacaaccggtcgacggggttcgtgtggctgcggcaggccgccggcctgacccacaccttcggctccatcggcaagcatgggtggtacgacagggaggtgacggcgttcgtggagcccgggcggatgcacggcctcgccggggtgaagagcaaggagctcctcatctgggtcaccatcttcgagatcgttctcagcctctcctgcaccaagatcgtgattcgcacccccgcggggcgtcggacgcgccttccctgtcaccgccttccagctcgagcccgagggggaccacaaggccgacgacgccgccggcgccggcgtccactgatctgctctagcttccggcggcggcggccgtgcgtgggctgctcgatccggtagtggcagtggctttgtgagacagtcgagtcgattgtggtttcccctcctccgccatgtgcgtgtagtggatgatgatgcaggaataaacggtgtccctggatccagaactcacggttcgatccatccagtttatctcatgcttgtgtatctctatgtatgcattgcctgtttgatcgctggaatctactacttgcagcggcctcgtctgttc

SEQ ID NO: 267082 - DNA, 317 bp, Zea mays
gccgccaactgatctgctctagcttccggcgccggcgccggcggccgtgcgtgggctgctcgatccggtagtggcagtggctttgtgagacagtcgagtcgattgtggtttcccctccttcgccccgcagtgtgcgtgtgcgtgtagtggatgatgatgcatgaataaacggtgtccctggatccagaactcacggtttgattttggggtgatttggtaactctggtctctctgatccatccagtttatctcatgcttgtgtatctctatgtatgcatgtatcggtaatcagattgcattgcctgttagttcactgg

SEQ ID NO: 267083 - DNA, 1091 bp, Zea mays
gtagtagctagcgctagccggaatgccaatggccttgtgcctatttatgccaattttggctgcatgtcccctacagatcaatctgttgctaatgttacaacgaccagcacatcttaagatcagtgtgatttgcaacttggatttggtgtacagaagcagcatatatgttctaggcatggacagcttagaacggctacagctcgatcccctctgcctgggagcatcgccaaaagaaattctgtacccactgaatcctcacagtttgagagcatggatgggcctaaatctttccccaatggaacatcgcagttcgggggctttgcaaggcctacctttgtgcctgctgcaccttctcagtttgggagcatggctcaacctaattatgtgcattcttctcaatcctctcaattcacaagcttggttcaaccgaattctgtacctcctgctgagtcctcgcagtttggaagcaaagcccaatctagttctgcaccccttgctaaaacctctcagttcaagggcatggctggaccaaattctgtacctcctgctgagccctctcagtttgggagcatgattagacctaatttggtacctcccgcatcttctcagtttttggggagcatggttcgaccaaattctgtaactccagaatcctcacagtttgggagcatgaccagaccaaactctgtacctcctgtatcgtcacagtttgttaacatgcccagtcaaaattttgtgagcgcatccgagccaactctagttttggggtacgcaccgcagattggaagtgaccctccacatcaagtccagttaggatgggatttgtccttgccaaggatggttactggcggcagcatggtcacttgtttatgtatatggtgcaacagtcagttccatcattttggccctgttgatggacagcaggctagttcttttggcttcatttgccccacctgtaaagataggatgtctggtcatcacagtatgcccagcaatggttcatggcagccttgaggtgcagtgctgcttgttaatcatctgcatttctgcatctgagggatctcgttgttttctgtacactactcatgtct

SEQ ID NO: 267084 - DNA, 920 bp, Zea mays
cagagacagagaagcagagaacccctcctcgacctcggcctctcctcttcctcctccgctcccaaaatcctagggttttgctcgccgcggcgcgatggagcccacctcgtcggcgtcgatcgcgcggcagacgtgggagctggagaacaacattcccgcggcggcctccgacccggacgcgatggacgcgatctaccgctacgacgacgcgtctcatgcgcgggcgcagcaggagaagccttgggccaacgacccgcaccacttccgccgcaccaagatctccgcgctcgcgctgctcaagatggtcgtccacgcccgcgccgggggcaccatcgaggtcatggggctcatgcagggcaagtgcgagggcgacgccatcatcgttatggacgcattcgcgctccccgttgagggcaccgagaccagggtcaatgcccaggccgatgcctacgagtacatggttgactactcaaccatcaacaagcaggctggaaggttggagaatgtggttggctggtatcactcacaccctggctatggatgctggctgtcaggaatcgacgtgtcaactcagatgctcaatcaacaattcacagaaccattcttggctgttgtgatagaccccacaaggaccgtttctgctggtaaagtggagattggagcctttagaacatacccaaaagattacaagccaccagatgagcctgtatctgagtatcagactattccactcaacaagatagaagattttggtgtccattgcaaatcgtactatgctttggatataacttatttcaagtcatccctggattctcacctccttgatctgctctggaacaaatactgggtcaacacgctatcttcatcatcatctctgggcaacagagattatgttgcactgcagatctttgatttagctg

SEQ ID NO: 267085 - DNA, 1374 bp, Zea mays
gcaacgatacctacgacgacctacccccctttccctgctctctccttccaactcttgtttctgcaacgccagggcgcaaccatgggtcagcagcagcaagggccggcggccaggcggatggccacgctcgcctcccacctgcgccatccctccgtctctcaccctcagatggaagatgttcccctcttgaggggatccaattgccgtgcaaaaggtgcggcgccaggcttcaaagtcgcgatcttgggtgcagcaggtgggattgggcagccacttgcgctattgatgaagatgaaccctcttgtttcggtgctccatctatacgatgtcgtcaacgcacctggtgtcacagccgacatcagccacatgaacactggtgctgtggtacgtggcttcttgggccagccacagttggaaaatgccctggctggaatggatcttgtaataattcctgctggtgtccctcggaaacctgggatgacaagggatgatttgttcaacataaatgctggaatagtccgtaccctgtgtgaaggaattgcaaaatgctgccctaatgcaattgtgaatgtgatcagtaattctgtcaactctaccggcccaattgctgatgaagttttcaagaaagctggaacttatgaccctaagcggcttttaggtgtgaccacacttgacgtagtgagagcaaatacgtttgtgggagaggttcttggacttgaccccagagaggtaaatgttccagtcattggtgggcatgcaggaattacgatactaccactcctttcacaggtgaatccttcctgctcattcacctcggaagaggttaaatacctcacttctcgcatacagaatggtgggacagaagtagtcgaggctaaagctggagcaggatcagcaactctttcaatggcctatgcagctgccaaatttgcagatgcttgcctgagaggattgcgtggtgatgctgggataatagagtgctcttatgtggcttctcaggtcacagagttgcctttctttgcatccaaagtgcggctagggcgatgtggcattgaggagatcctaccacttggaccattaaatgagttcgagagatctggtctggagaaggcaaagaaagagctggcggagagtatccagaagggcgtctctttcatcaagtgaggccggcgacggccagcccaacatagaaatagatgtggcgtgtttctgcttcttgagaactcatcttgttatctctctgtaagactgagtgcatgacacgaataatccacgtacacggctgtactaaaaagatgatgaatctgtggtggctaaaaaaagggaaatagaaaagtctggtaataaaagttgtttctgaacaaatgggtttct

SEQ ID NO: 267086 - DNA, 697 bp, Zea mays
gaaggcttaacagatgacaccggtggctctgatgcaccagctaaaaagtcattttcacaccttgatctggataatgatgggctcttatcagcagatgagctaaagcctgtaattggtaatctccatccatcagaatacttctatgccaagcaacaagccgactatgtaatatctcaggctgacacgaacaaagatggacaattgagcatgaatgagatgatcgagaacccctatgtcttttacaatgctttattcacagaagatgattatggctttcatgacgagctccgttagttcccaagtcaacagcacaaagctttatggaatcaccactgtaggaagtcggaagactttgttatgcactgctaagaccatttccgttttctgtctgaaatcatccatcatttgacggtgattccatgtaaaacaagcatgttttttagatgcacctattctagaagctgtgttcttttgtactacccttgagccttttttatagtttgttgtttttaatcatatatgtacggtgaggatgtgagtgagttttgttctttcatcttcttgatacgatacaaaactagcgtcttccagaatcacaatttgtaagccatacaaacccaggaaagcattcctgtaagccatgaaatgacgggatctgtaatcataaagcacccaatgaaatctgtcaaattcatgc

SEQ ID NO: 267087 - DNA, 787 bp, Zea mays
cagcaacatctacagggtacagctgccgttgtcaccatatagcagaccaaagctccttgctggttctccaaaaggtttatctggccatgtggatggaagactgcgagaagcaaggatgaaccatcctaaagggttcactgtggacgataggggcaacatttatgttgcagacggcatgaacatggcaatacgaaaaatcagtgatacaggggttacaaccattgctgggggaaaatcaattagaggagggcacatagatgggcccagtgatgatgcaaaattctcaactgattttgaaatcaagtacatcagcagtagctgctctctcttggtcattgatagaggaaaccaagcaattcgagaaattccactcaacgatgatgactgtgcatatcagtatgaagctggttttccactagggtttgcattgctttgtgctgctggcttctttggttatatgcttgggatgctccaacgccggcttttaggaatgtcatcaacaacagatgatcctcaagcgcctccaagacccagcattgcaagtatccctccatcataccagaagcctttaaatccttatattcgtcatccattcatcccgagagaagaaactgcaaaacaggaaaccggagaggggttcttcaccacagctggcaaactcatgggaggggcaaaatcatctgtgggtgagatatttggtttcaagaagaagcgcctgagcagcccataccatcatcagcagcagcagcagcgaagagctaacccgtggccagtgcaagaaagctat

SEQ ID NO: 267088 - DNA, 924 bp, Zea mays
ctcgctctattcccattccaagtccccgctcttggattcccgacgacgagctcggagcttcttcttccctgctcggtgctcgtcgcaacagctgccgccatgtctgccgcgaaccagctcgccgctctggtcagcaacatgtacgccacgggtttgcttgacgatcagttccagcagctccagctgctccaggaccccagcgcccctgacttcgtctccgaggtcgtcacgctcttctgccaggacggcgagcggatcatcgaagagctggccaaactgctggagaagcccaacgtggattttgacagggttgacgcctttgtgcatcagctcaagggaagcagtgcaaatattggtgctcagaaggttaagaacacttgcattcagttccgcgaattctgtcagcagaagagcagagatgggtgcctcaaggtactggagacaatgaggattaacttctatgagctgcgtggcaagtttcagaccatgcttcagctggagcgtcaggtcaatggctttccccccaacaagtaaaccagatggtggagtggaccttcatgttaggatgatgcttgcacctttcaagtttcagaacattctgaatgagctcctcaattggtttctgggaagtcttgtaatagcttagcagcaagattagcgttgacaccaccgtagcagtagtcattgtcgtcaagtagttgtcctaaatgtctgtgctgggttatggatctcctgcaagcagttgcaggcttgcagctgttctgtttactctagtagtttattttggagtagtcgctctcaataaatctgtcctaggagtctattggtggattattagtcagtcagtttctgggattcctggtggtgaagcaaaacaatgttatggctatcggttaataataatagtttgctgtgtttgccacc

SEQ ID NO: 267089 - DNA, 789 bp, Zea mays
cccacgcgtccggtgcccgtccccgtcgccgtccgcctcgccagggccgacggtggcggagatgcagcagctggacttcagcgaggcgccgtgggacgaggccgccggcttcgcgctcaccaagtacccgtcgtacgagatcgactgggactccctcctcgccaattaatcgtcgccccttgttggctggctggctggctggctcccatcctacccacactgccgtcgtgcagcaagaggagggttaaagaaggttaacggccgtcgcgcagatgggattttagacatcctgcgcgggcactagttggatcattagtgctaatccccgtccgtccgttcgttggttggttctgtgtagatgtccgtccgattcgtttgggccttgtcactggtgagtcagttgtagatctcgggttatttagggtttggttctccggaggaggagagaaccacaaccgacgggaagccggcgtttttgtgtccggcgttctccggtggtggccggtacgtgtcacactggtcagtgaccccacccccccggccgttcaggtgtccgttgtcctggtagctgtttttgttgtgctagatggtgtgctgtgctctacaggttgtaaagagcagcacggtgtgatgtgaggagatgcttgtcaagcagtagtgctccgtatgatgtatgttgtaaaatcagctagctagctgtgtccaggagttgtaatttgatgaactgctactgttggtgctactattgtatggtttattgttgtataaacaatctgtgttcggctgttc

SEQ ID NO: 267090 - DNA, 591 bp, Zea mays
  unsure (1)..(591): unsure at all n locations
tcccagcacggcggcgccctacgctgctcatccgccgcagtacggcggctacgggtacccgccgcagcaggccgcgggtacggctacccgcccccgcagcaggccgggtacgggtacggctacccgccgccgcaggccgccgggtacgggtaccagcagcaggccgtgaggccgcagaagaagaagaacaacttcgggatggggctcggggccgggctgctcggaggcgccgtcgggggcctcctgatcggcgacatgatctcggactcgtcggcgtacgacgccggctacgacgccgggttcgacgacggcggcggcttcgatttctagcgcgctccggtggcatgggtggtgacgccacgccgcgcatcagagacggagaggttcccgttttggatttgccttttgtgatttgtttccttctgtacgcaatctatgtaattgtcggaacgaaatcaatcaagattatgcatacatatatggtattgatgatgaaagcgtgacattatactgtatgaattgcacgcagttttcttctcttcagatctgtgccaactttcggaattttatcaatctggcgatcgtttancc

SEQ ID NO: 267091 - DNA, 452 bp, Zea mays
cacacgcgtccgcccacgcgtccgctcgcttcgcagtcctactcgcactgtcgcacacacccgtccccatcctcttccggtctcgccctcccctcacgccgctcgccgcgtccggccgcggcaacccgacctgcgtcaatcgccatgactacctcaaggcgtcttgccgataggaagatagcacgatttgagaagaatatcacaaagaggggctctgttcctgagacagtcaagaaggcaaatgattatcctgttggacctattcttcttgggttctttgtctttgttgttgttggatcatctctctttcagatcatcaagacagcatcaaacgctggtttattctgaggacaattgccaattgccaattggtcacttacttttagtcactctaaaaaactatacaagtgtatggcgtagctggtactctacaatgtcgcctttctaatgct

SEQ ID NO: 267092 - DNA, 510 bp, Zea mays
gtcaccgtctcgcttcgcagtcctactcgcactgtcgcacacacccgtccccatcctcttccggtctcgccctcccctcacgccgctcgccgcgtccggccgcggcaacccgacctgcgtcaatcgccatgactacctcaaggcgtcttgccgataggaagatagcacgatttgagaagaatatcacaaagaggggctctgttcctgagacagtcaagaaggcaaatgattatcctgttggacctattcttcttgggttctttgtcttcgttgttgttggatcatctctctttcagatcatcaagacagcatcaaacgctggtttattctgaggacaattggtcacttacttttagtcactctaaagtcgaggaaccagggttgacatatgcagttggtcacttaaaaactatacaagtgtatggcgtagctggtactctacaatgtcgcctttctaatgctgtaccatggagagttttaagttataatgtatagtccatatatatatat

SEQ ID NO: 267093 - DNA, 1629 bp, Zea mays
ctgcgaaccgaaaaaggagaagacggacaacgaattgggatcgaaaaacatctccgttccccaccaccaccttcgctccttctgcttcgcccgtccccctccgtcgcgtcgactcccaagatggataagctcagtggttctgcacgtcttatgattgtttcagatcttgaccatacaatggttgatcatcatgacgaggagaacctgtccttgcttaggtttggtgccctgtgggaatctgtttactgtgaggattctctactagtcttctcgactggaagatcaccaactctttacaaggaattaaggaaagagaagcctatgctaactccagacatcactatcatgtctgttggcactgagataacatatggggaggcaatggttcctgatgatggctgggaagaatatctgaacaataagtgggacaggaatattgttgtagcagaaactgtgagcttttctgagctgaagcttcagccagagacagaacagcgcccgcacaaggtcagcttttttgttgataagaagaatgcccaggaagtgataaaatctgttgccgagagattggacaaatgtgggctagatgccaaaataatatatagtggtggccaggaccttgatatattacctcaaggagctggaaagggccaagcacttgcatatttgcttaaaaagctaagttcatgtggaaaaccgcccaacaatactcttgtttgtggtgactctggtaatgatgcagaattattcagcatccctggtgtacatggtgtcatggtcagcaatgcccaagaggaactacttcagtggtacacagaaaatgcgaaggataacccaaagataattcattcaaatgagagatgtgcagctggtattatacaagctattggacacttcaagctaggacctaatatttctcctagagacctgcagtttccttatgcaaaggaagcctctttcaaacctacagatgctgtagtgaagttctacgttctctatgagaagtggcgcagggctgaggttccaaagtctgattcagttataaagtacttcaaaaacatcactcatgcaaatggagttaccatccatcctgctgggcttgaactctcactccatgcatccattgatgcgttgggatcatgttatggtgacaaacaagggagaaagtaccgagcatgggtggacagactttttatcacacagactggttcagatagttgggtggggaggtttgacttgtgggaatcagaaggtgatgtgcgtgcgtgttctctgtcaagtcttgctttgattctgaaggctgaatccccagagggctttgtgctaacccacatccaaaagacatggctgaacggatactcgtcaggggttgagcaggcgtttaagctgtagagcagtataccgtctcggctcgtggttggagttttcttgagaatagaatagaataatgtacctgtttataatattaacttcccaaaaccgcactggaggatcaccagggagaggattcggtgccttctcctatttggcgcgtaagataaatgttttgtctcatggctttcatgagaagatgaaattgactcatcttggtatatatttacaaatcttgaataatgcagcgttatctag

SEQ ID NO: 267094 - DNA, 679 bp, Zea mays
ccgtgactacaaaatgctctgcagcattaaagcaaaaaattaacaaattccttgcatacaaaagggccggaaagagctttaatgctgaagtgcgcaacaggaaggactacagaaatcctgactttttgcagcatgctgtgcgataccaagaaattgatcagatagggacctgtttcagtaaagatgtttttgatccttatgggtacgacaaaggtgactactatgatgagatagaagctgaaatgaagcgtgaagttgagaggaaggaacaggagaagaaaaggagcccaaaagttgaatttattactggagtacaacccccaatcaatgcatcaataccgaagatcccaggtttggctggtgtctgtacactaccggtacctacagaaggtgtacagaaagagactagaccaaacaagaaatcaaaatgggataaggttgatggtgatgttaagaaccatgtggttcctagtggacacgacaacttatcagcaactactgcggcactcttgacttcagctaatgttggtgctggatacgctggttttgcgcaacaaaagagaaaagaggccgaagaaaagaaaaacgatcataagtcagacagaagatcgtagcaccaccttttgtttcattctgagcagtcagcgtatcatttattttttttcagtgacatagtttt

SEQ ID NO: 267095 - DNA, 486 bp, Zea mays
  unsure (1)..(486): unsure at all n locations
gaggaatgggtttcacaagcaagctaaagccctcgaggcctggtgtgtccatgaagctccgagtccgtgatccgaggccaacgcagacagtccaagatggactcagtttcgtggcgagcttgaagcgcgtgttcgcctgcgagcctgacaagtacgacgagatcatcgccaccatgcgccagttcaagtccgggagcattcgtagtgcggttgtggttgagcgtgtgaaggtgcttctggaaggtcaccctggtctcctccgccacttcaaccagttcctgccatggggttacatatgggctcatggaccagtcgggaggatcagcgtctgatgcagccagggcagggaagcgcgtgtggctacctaaacaagcctaaacctactagctggtgctttccatcgcatgaatggcanaatgggacaagagtatctggttggcccgtcatgactgctattctgcatgggcagtaccattaagacatgta

SEQ ID NO: 267096 - DNA, 258 bp, Zea mays
gaaccgaggaatgggtttcacaagcaagctaaagccctcgaggcctggtgtgtccatgaagctccgagtccgtgatccgtgagtagcttctctccttagttaacttcacctacctcctccgttatctgccgcgattcggagtcctggttcaaagaaatttccccccttcattaatttctgtggttttgctcgcttgatttgcatgtgatccaatgttttcccatgcatcctgatcgatgcatttgtctccgccgcatg

SEQ ID NO: 267097 - DNA, 1381 bp, Zea mays
gcctgccctagccgctcgcccggtcccactcccgcataggcgccgccgccgctacccgctacccccgcagccggcactcggcaggttcttcccctggcatccggcactcggcttcttcttgccccggctcccggcgcggcggcgcccgctcctcctccccccgctcgcccgctgcaggtcctcccccgcggcacgcgcccgctgctgcagcctgcagctcccaccccaactggcgattgcagctcctccggtcctccccctgccggcgccgcctgcgagctgcacagctgcagctccccccctggctggcagagctgcagcttcaactctcttgaaggcaaaagaattgaatcgcactctgttgatgggcagcttgcatgctctgcgggcgccgacgccgctcgttgggagcactaggattggcttcagttcggggctccgcttttgctccaacagagtcctcagagggttaactcccattggcgcgatgaagtcgtataggctatcggagctcagcgacaccgaagttagcggcctcaaagctcgtccccgcatcgatttctcgtctatttttggcacggtgaatccaatcgttgaagatgtccgtgtgagaggtgatgcagcagttaagcactacacagaaaagtttgacaaggtcatgcttgatgatgttgtcgtctgtgttagcgatcttccagatgcagagcttgatccagctgtgaaggaagccttcgatgttgcatatgacaatatatatgccttccatgtttcacaaaaaatacctgagaagacagttgaaaatatgaaaggcgtaagatgtaagagaataactagatgcattggttctgttgggctgtatgtcccaggtggcactgcagtcttgccttcaactgcattgatgcttgctgtgcctgcacagattgctggatgcaaaactattgttcttgccacaccacctagccgtgatggcagcatatgcaaggtacacttgatatggaactgcaccgggattcttttttaaacaattggttgatggagcattatatacttgtttcctgcaggaggttctttactgtgcaaagaaagctggtgtgacacacatattgaaagctggaggagctcaggcaatctcagcaatggcatggggaactgcatcgtgcccaaaggctgagaagatttttggacctggtaaccagtatgtaacagctgccaaaatgattcttcagaacagtgaagctatggtatctatagacatgcctgctggcccttctgaagttttagtcattgctgataaatacgcgaacccagttcatgttgctgctgatctgctatcccaggcagaacatggtccagatagtcaggttgttctagttgttgctgg

SEQ ID NO: 267098 - DNA, 1736 bp, Zea mays
agctgggcgcctgcggtgccggaccggaccggcagggccgagcccacgcgaccggtcacgcttacggctcgaccatatcaaggagctgatcaagtggggaacagactacatcctcaaaaccttcaattcatctgctgacacgatagacaggatcgtcgctcaggtgggtgtaggtgacacctctaaaggcagcagtcagcctaatgaccattactgctggatgagaccagaggacatcgactacaaaaggccagtcaccgagtgtcactcttgctcagatctagcgtctgaaatggctgctgccctggctgcagcttccatagtgttcaaggacagcaaaacctactccgacaagctcgtcaaaggcgcaaaagccctgtacaagttcggaaggctgcagcgcgggcgatacagccccaatggatctgaccaggcaatcttctacaattccaccagctactgggacgagtttgtgtggggtggtgcgtggatgtactttgccacagggaacaattcatacctcacggtcgccacagccccaggaatggcgaagcatgctggagcctactggtttggaagtccaaactatggagtatttacctgggatgacaaacttccaggagctcaggttcttctcagcaggttgcgactcttcctaagtccagggtacccttacgaagaaatactgaggacattccacaaccaaaccgacaatgttatgtgctcatatctgcctctattcaattcattcaacttcactaaaggaggactaatacaactcaaccatggaaggcctcagccacttcagtatgctgtcaacgcagctttccttgcttctctatacagcgactatcttgaagctgcagacacgcctgggtggtactgcggacctaacttctacaccacagaagtcctccgcaagtttgccaggtcacagctcgactacatccttggcaagaacccattgaagatgagctacgttgtgggtttcggaaacaagtacccgaagcgccctcatcacagaggcgcgtcgatacctcacaacggcgtcaagtatgggtgcaaaggaggttacaagtggagggacacaaagaaggcaaaccctaacatccttgtcggagcaatggtggctggccccgacaggcgcgatggctacaaagatgtccgcacgaactacaactacacggagcctactctcgcagcgaatgctggtctggttgcagcgctgatctctatatccgatatcaaaaccggacggttcggcatcgataagaacaccatcttctctgcgattcctccgatgttcccaacacccccgccgccgccatcagcatggaaaccatagaggcaatacctctgaatgtttttccaaagcatcgaacagggaagtggagcaaacgtgtgatcatttggtacagcgaaggccagagacaggaaagctgacagcataagtttatagagcttctatttctgtaccaatatgacagatcagtataagatcctctgtcagacatagatcggaagctgtgtgcatcgcgtggagctaatttttgggggtcttgttgctattggcactccagctcatgtgtgaagttctttttgtagaaatggtacctttacaaattgttttataggagtgacttttcattattatagtaaagaatgcgtgtgatctctatgcttgcttcattttgatccaaaaaaaaaaaaaaaaaaaaaaaaaaaaaaaggacggc

SEQ ID NO: 267099 - DNA, 1159 bp, Zea mays
cccacgcgttcgttgacgcgtgcccaaggccgcagctcactcgtgtcgtgcacccgtcccctcccacccgccaagaactagcattgccgccgccggtgccagggggcggaggagaggccgcggcggcgagggagcggcaccaggcgcagggggtcaggagagccgccggcaggatgttcgggcgggacccctggggcgggcctctggagatctccaacgccgactcggcgacagatgacgaccggagccgggacctggaccgggcggcgctgatgcggcagctggacgagacgcagcagagctggctcctggccgggcccggcgaccaggcgggcaagaagaagaagaggtacgtcgacctgggctgcgtcgtcgtcgaccgcaagatcttcatgtggaccgtcggcaccatcctcggcctcggcgtcttcatcggcttcatcatgatgatcgtcaagctcgtcccgcacaagcgcccgccgccgccgccgcccgaccagtacacgcaggcgctgcacaaggcgctcatgttcttcaacgcgcagcgatccggtccgctgccgaagcacaacggcgtcagctggaggggcaattcctgcatgaaggatggcctctccgacagcaccgtccgccggagcttggtcggaggcttctacgatgcgggggacgccatcaagttcaactaccccatggcctggtccatgaccatgctcagctggagtgtgatcgagtacagggcgaagtatgaggccatcggtgagctcgaccatatcaaggagctgatcaagtggggaacagactacatcctcaaaaccttcaattcatctgctgacacgatagacaggattgtcgctcaggtgggtgtaggtgacacctctaaaggcagcagtcagcctaatgaccattactgctggatgagaccagaggacatcgactacaaaaggccagtcaccgagtgtcactcctgctcagatctagcgtcctgaaatggctgctgccctggctgcagctttcatagtgttcaaggacagcaaaacctactccgacaagctggtcaaaggcgcaaaagccctgtacaagttcggaaggctgcagcgcgggcgatacagcctccatgggtctgaccaggcaatcttctacaattccaccagctactggg

SEQ ID NO: 267100 - DNA, 293 bp, Zea mays
agcaaacgtgtgatcatttggtacagcaaaggccagagacaggaaagctgacagcataagtttatagagcttctatttctgggccaatatgcgagcacagtataagatcctctgtcagacatagatcggaaactgtgtgcatcgcgtggacccccccccccccctcctgcttactgagagggctgctgatgttagagagaacgagaacatgtatggattgagttgaacagaacaatcttagtcccgtttggtcaaatttgggctgcgttttgactaatggttgtgtgccccac

SEQ ID NO: 267101 - DNA, 485 bp, Zea mays
tttctaagaaatactgaggacattccacaaccaaaccgacaatgttatgtgctcatatctgcctctattcaattcattcaacttcactaaaggttggtgatgtccctccttgtttctaccttccttgctgcacagaataaagctaagagatgcaacattttgcaggaggactaatacaactcatccatggaaggcctcagccacttcagtatgctgtcaacgcagctttccttgcttctctatacagcgactatcttgaagctgcagacacgcctgggtggtactgcggacctaacttctacaccacagaagtcctccgcaagtttgccaggtcacaggtaaaagcattgttcttaatgctctcaaagtgcccaacgtacggtgaagtgaaattgatagttaaactaaatctcgtaacattgcagctcgactacatccttggcaagaacccattgaagatgagctacgttgtgggtttcggaaac

SEQ ID NO: 267102 - DNA, 189 bp, Zea mays
ggtaaatcgttgttcttagctctccttaggtgcccaacgttacattagcagagatagtggatcggtagttaaaacctgctcaatttgcagcttgactacatccttggaaagaacccattgaagatgagctacgttgtgggtttcggaaacaagtacccgaagcgccctcaccacagaggtgcgtcgata

SEQ ID NO: 267103 - DNA, 1013 bp, Zea mays
cccacgcgtccgcccacgcgtccgcccacgcgtcagcccacgcgtccgcccacgcgtccgcggacgcgtgggcatagccccacgcgatctgcctgtcccccgaggcgaatcagtagcttcgctccggcctccgggggctccgcggctccgctagtccgctccggcgccacggcccggctcggaggggcgtttcggggagggcgaacggacgccagcgtttccgtttggttggcgtggaggcgaactgctgctggagcgctacccgggtttcctccgttcactagcgctcgcgatctgatgatcgttggctagttgctctgccagagtcccagccagcgctcctccgccatgatccaggcggtgatggtgatcagcacccaggccaagccccgccttctcaagttctacagtttccagccacccgagaagcatcaggacctcgtccgctgtgtcttccaattactctctgcaaggcccgagagcgcgagcaattttgtcaaggtggactccatctttggcccgggaacaaaaatggtctacaagcatttggccacactatactttgtttttgtctttgatagctctgagaacgagcttgccatgctcgacctcgtacaagtgtttgttgaaacattggacagatgcttcaagaatgtatgcgagcttgacatcgtatttaacttcaacaagctgcacaccattttggatgagatgatatcggggggacaggtgatcgaaacaagttcagaacagataatgaaatctgtggaagagattgaaaggctggagaaacaatcgagctcaaccagcttcatacccaagtcgattacagagcgtttttcccgttcagcttccactcgtttccagaacaatgtgacctttaaggtgtgatcagaactgagatatactatgcagtctcattgtagttctccgataagaccttgtatgcccccgccccccggctgtattctgtaagcctgtaacctggatatgaatgcggcatctgcagtccg

SEQ ID NO: 267104 - DNA, 388 bp, Zea mays
tcactagccccacgcgatctggggggggattaattagaataagccgggggtatcctacctccgggggctacggggttccggtagtccgctccggcgccacggcccggctcggaggggcgttttggagagggcgaagcggacgccagcgtttccgtttggttggcgtggaggcgaagctgctgctggagcgctacccgggcttcctccctccactagcgctcgcgatctgatgatcgtgggctagttgctctgccagagtcccagccagcgctcctccgccatgatccaggcggtgatggtgatcagcacccacgccaggctctgcctttttaaattttacagttttcaaccacccttgaaactattaatatcttcctttgtttatttt

SEQ ID NO: 267105 - DNA, 457 bp, Zea mays
atcagcttgaatctatggaacttatactgtcaaactttgattgcatttgcgccatctgtagtcctcatggccgcattcctagcactcataatctgcaatcgcgctatacttctaggtgctcaggaacctcatgccgtttcgccacactttgctcagtttctgttctttggccttgtgtcagctgctgccctccttccatggcatttcactcccaaccgagtattgcatctattccacttgtctggaaagaacaaaacctgtggttctctggcacccttaatcggtcttggtttaagctatatcgctgtacatttcttcatcattgcccatccgtatattctcactgacaatacacactataccttctatatttgcaggaacgttatccatgtcaactggatgatgaagcacatgttcattccactctatgagtactcatggcttctaatcatcaaca

SEQ ID NO: 267106 - DNA, 1315 bp, Zea mays
  unsure (1)..(1315): unsure at all n locations
tgtgatgccaagatcaccatcctcttccaagcaactactttaaggggattcttatttttctaggcaagagaatccggcacgcaacatcaacgaccgcccggaaagagagccggaaaaaagggcaggaaatcgccaccgcccgcccctatttgagcagccgcttgttccttccgcgtcctcgctgctcctcaattcgattggctccgtgccgacctccaggttgagaaggaaagcatcgcgagttcgccatacggatgggttccaaagcgcctttctgtctcacgctcctcttgctgctcgctgcggcctgtggacctgcagcacatgcccacgatgctgtcgagctcccgcatcatggcttagccttgaaggaacaaatttcttcaaccaagattcctgcccgtctcaagagtggcagcggactatgctcggcctgtgaaaacttcacgagcgaagccgtcacttatctcggcaaggaacagacacaggacaggatcgtggagttccttcatgatgcttgctcccaatcattctcctttgaacagaagtgtgtcgagctgatggactcttatgcgactctcctgtttgccaagatcacggagatcagaccggaagcgttctgcaaacggtatggcctgtgcagggacacggctcttctctccggtgtgggaagtgacagcacgtgtgtgttctgccaccatctgctcgatgaaatcatgtccaaactgaaagatccagatgcggagtttgagataattcagattcttgtcaaggagtgcaataagatcgaaggtcacgtccagcagtgcaagaggctggttctgcaatacattcccctcatcttggtgaacggtgagaagttcctcgagaagaacgatgtctgcgcgctcgcacaggcttgtccagcgagcagtaggaagacgttcagctcgatgttgaagggagcgttgtggagtgacgcctggcttgaaggttgaagaagaacacacggagcggtttagcagtggtcagaaatagtgtgaacaagtgctgtgctgtacatataataatgtcgtgtataaacgcatgaaggacgtgtgccctgcattcttttcgtcttgtatcataaattcataaacacgtcgtcttaagtaattgtttatggacccctaaaggggatgaaggttaaaatatttgcccttaaggtataatccacccaatcattttgtatccccaaagtttcagccctggcgccttgaacctccaaattttgtggtaaaaaaaaaaaaaaaaaaaaaaacccaaaaaaaaaaaaaaaaaaaaaaaaaaaaaanaa

SEQ ID NO: 267107 - DNA, 1364 bp, Zea mays
acgggcatgtgaatctttcacgcaacagcaacgaccgccctgaatgagagccggaaaaaaagggcaggaaatcgccaccgcccgcacctatttgagcagccgcttgttccttccgcaatccgcgtcctcgctgctcctcaattcgattggctccgtgtcgacctccaggttgagaaggaaagcatcgcgagttcgccatacggatgggttccaaagcgcctttctgtctcacgctcctcttgctgctcgccgcggcctgtggacctgctgcacatgccaacgatgctgtcttgaaggaacatatttcttcaaccaagattcctgcccgtctcaagaggggcagcggactatgctcggcctgtgaaaacttcacgagcgaagccgtcacttatctcggcaaggaacagacacaggacaggatcgtggagttccttcatgatgcttgctcccaatcattctcctttgaacagaagtgtgtcgagctgatggactcttatgcgactctcctgtttgccaagatcacggagatcagaccggaagcgttctgcaaacggtatggcctgtgcagggacacagctcttctctccggtgtgggaagtgacagcacgtgtgtgttctgccaccatctgctcgatgaaatcatgtccaaactgaaagatccagatgcggagtttgagataattcagattcttgtcaaggagtgcaataagatcgaaggtcacgtccagcaggtaggctttttggctcttcctctgtccttgtgattctgtgcaaaaggcgagctcgtcctcttccttaatgaggttcttaagagtgtttcctcagctgtattggttacccttactactttggattttggaaacagtccgagacccttattagttaacaatatcatagttgttgcaaagatactctactttttttcatcatctcttctttaccattcatatctcccagttgttgcacgggaaaattaactccagtaattctttcttgaggggtagaacaggagtgtcgttctcagattcaatgattatcaaacaacatgtactaattatattttagcaagctggcagttgatgtgattctctatgtttacattttgtcaaattaacgacaagagggttaagttttagaagcaactaccctgcactggttaataatatctgtgaggacccaagttggtcccagtcctcttcgattggtgctctgttcctgtgatttgaggaaagtttcagtacatcacattgtattttgattagtgaatgaagcatttagacgatattgttgcatgtgtgcattctctttcttacatttgagttaagctttcttatttgagctctatgatactatgtactcaatac

SEQ ID NO: 267108 - DNA, 393 bp, Zea mays
aaactacacccagcccggaatctgaaacctcaccagcggttgctgggaggatcttccccatattcgatcggttggttgcttgactattggcccgattactttgttcctggttgagaaggaaagcatcgcgagttcgccatacggatgggttccaaagcgcctttctgtctcacgctcctcttgctgctcgccgcggcctgtggacctgctgcacatgcccacgatgctggtaacagattgtgttatgttctcatcagtcatcactctggatttgcaccgttgagttgatttacccacttaggctgtcgatttgcactgtagattacaccgtttgcattgtgagaaataggggatagatatgatagttgctgcagagtggagacagccttgctg

SEQ ID NO: 267109 - DNA, 478 bp, Zea mays
ataagattgaaggccacgtccagcagtgcaagcgactggtcctgcaatacattcccctcatcctggtgaacggcgagaagttcctcgagaagaatgatgtttgcgcgctcgttcaggcttgtccagccacccataagaagactttcagctcagccttgaaggaggccttgttgctgagtaacgcttgaaggttggaggaagaacacgcaaagcgtttagcagtggttggaaatagtgtgcccaagtgccgtgtttgtacatataattgtcatatgaatgcatgaagacgtgtcttgtgccctgcattgtttccatcttgtatcataattcataaacacgttgtcttgagtagatttttatggacatccacagggggtgaaggttaaaatatatttgtatcataattcatataagcacattgtcttgagctacggtgcggtcagtcaatttattgtccaggaaaatttcagcgctggtg

SEQ ID NO: 267110 - DNA, 873 bp, Zea mays
acttggcagactagaagaatatcaatcaatattgtcctagtcccattctcctacccttacccttgtggtgtggttgccggctatcagcgatgtcatgctgctgaggttcagggccatctagaccagagtttatcacaacgatatagttcgctactgtgacacagtttgttttgtagtgtatcgaatcctcctgcaagacccttctcatgtttatccttactgcaggaggcttctggatacttcttctgcctagaggaccgtgcactactttgtagagactgtgatgttgctatacacacagtgaattcctttgtttcagtacatcagagattcctgctaactggagttcaggtgggtcttgatcctgctgatccagttccacctattgctgaaaagcacgttaatgctgctggtggatcagtaaatcaaccagtgagacatcagccaaagagaagcccgacagttcaattttcagttgaagggagtgcttctgttcctactaaaaatgtaacaaatggagattgttcaaggcagaattttgtcccaacagccagggcagaagtggttgattggactatgaataatagtacaattcggtcagtagaatctccgcctaagtacatttcagaggaaagccccacacttcggcaatcttgccagaccacaacagtcttctccaaccaaattaatggcaacagtgatggggcctaccacttgtcattctcaggtggttatgtgacagacagcctaccagattggcccgtggatgagttcttcagtaactcagaatatggtgcaaactttggcttctccgagaatggttcttctaagggtgataacgctaagctggggggcgctggtggatctccacaa

SEQ ID NO: 267111 - DNA, 405 bp, Zea mays
cgagccgtgccactgcgagggaaggagggagagaaaaaggggagcccgatccaatcccaatcccctcccgccgcgtcacatcgccgccgtcctcgtgccccgttacctctaaaaccctagcggggagccgccgagccggggatgaagatccagtgcaacgcgttgcggggccgcggagggcgcgggtgctgtgctgcgcggacgaggccgcgctctgcgtcgcctgcgacgaggaggtgcacgccgccaacaagctcgccgggaagcaccagcgggtgccgctcctgacggacgccgccgtcgctgccgccgcagcggcgccggccgtgcccaagtgcgacatctgtcaggaggcttctggatacttcttctgcctagaggaccgtgcactactttgtagagact

SEQ ID NO: 267112 - DNA, 811 bp, Zea mays
acgcgctggcgcgggacctgggcgacaaggcgcgccgcttcaacgtcttcaaggccaacgcgcgcctcatccacgagttcaaccgccgggacgagccctacaagctccgcctcaaccgcttcggcgacatgaccgccgacgagttccgacgccactacgcgggctccagggtcgcgcaccaccgcatgttccgcggcgacaggcagggctcctcggcgtcggcgtcgttcatgtacgccgacgcgcgcgacgtcccggcctccgtcgactggaggcagaagggcgccgtcaccgacgtcaaggaccagggccagtgcggtagctgctgggcgttctcgacgatcgccgccgtggagggcatcaacgcgatcaagaccaagaacctgacgtcgctgtcggagcagcagctggtggactgcgacaccaaggccaacgccggctgcaacgggggcctcatggactacgcgttccagtacatcgccaagcacggcggggtggcggcggaggacgcgtacccgtacagagcgcgccaggcgtcctgcaagaagtcgccggccccggtcgtcaccatcgacggctacgaggacgtgccggccaacgacgagtcggcgctcaagaaggcggtggcgcaccagcccgtgtccgtcgccatcgaggccagcggctcgcacttccagttctactccgagggggtcttctccggcaggtgcgggacggagctggaccacggcgtcgcggcggtcggctacggtgtcaccgcggacggcaccaagtactggctggtcaagaactcgtggggccccgaatgggg

SEQ ID NO: 267113 - DNA, 539 bp, Zea mays
gaggaaaccttggaatcaaaatacatacatttcagatacccgtaggacgcagcttccttaaatgttgtttccagcataaacctgtggaatactcaaggcacagcgccatctcaattgccaacatggctaaacacatacatgaccgtggggaaaccatcttataaacttatatatgtaacagttcaaatcccccagcataccaaataagcatcaagtacacctgtgacagaaagatagaggttccacatcatgttatggcacgaacaacatgagacttcgacaaaagtgcaactctcatgatcttagccttttaaggtccctttcggcacgatcgtagttccggtactcacgcacatcctttctcttccgattgtcatgctccggagaacggtattcttgactgtccatggacagctcaccctcttcggtattctcacggttggtgctctggtggtgtgcaagatgaggccagctctgctttctctcctgcttgaccttctcatcctcggcagccaactccacgccatgttccagctccc

SEQ ID NO: 267114 - DNA, 624 bp, Zea mays
atgtaaggaccattctatggcatttctctcacaccatgtatgtgtacaatgatagcaataagcttgcatatgtaccatgcttaaagaaaatgcaggctgcgacaaaataggtggtatactgcatgcccacgtagaccgggcaaacgaacagcactgcatgctacacttttttttacttttgtagatatatttttacctatatatgaacgtctaataaaaactgtgtatttaaatggccaaaacaatccataatttagggagagagcatggacattacatggcataaaaaaatcaacaattagtctatgcacgatctcctccccagtaccaagatagacgggcgaataataaaatcgcatgcttccattagggttcaggtaaccttggaatcaaatacacacttcagatagccgtcggatgccgcttccttactgtttgcaatactcaagtcacagcgccatctcaattgccaacatggactaacacaaacatgatccgtggggaaaccatcttaacttgtatgtaacagtccaaatcccccagcacaccaaataagcatatcaacgtcatgttacagcccaaacaacacgagactcccacaggatgtgtgatgctcatgacctt

SEQ ID NO: 267115 - DNA, 947 bp, Zea mays
gaatttcttgttaaggccagagttgcttaccgacaagatcaatgagaaatgggggctcttagttctctgctctgcatctaatccaacagggtcagtatatccaaaggagttgcttgagaaaatagctgatatagtcaagaagcatccgaggcttttggttttatctgatgaaatttatgagcatattatctatcagcctgcaaaacacacaagctttgcttcactacctggaatgtgggaacgaacattaactgtaaatggtttttctaaggcttttgcaatgacgggttggcgtcttggttaccttgcagcccctaaacattttgttgcagcatgtggaaagatccaaagccagttcacctcaggtgccagcagcatatcacagaaggcagggcttgccgctctgaatcttggctatgctggtggtgaagcagtatcaactatggtcaaagcattccaggaacgccgtgactatcttgtgaaaaatttcaaggaactgcctggtgtgaaaatatcagaacctcagggtgccttttatttgttcattgacttcagcgcctactatgggtctgaagtagaggggtttggcactatcaagaattccgagtccctttgcatcttcctattagagaaagcacaggttgcccttgtccctggtgacgcatttggggatgacaagtgcattcgtatttcatatgctgcatccctaactacacttcagactgcgatgtcaaaattaaaggaagctgttgctctgctcaagccctgtgttgctgcgtagcaagatcactaaattgcaataaggagtgaccaaggcacctctaactaacctttcacgttattttaaacacaatgctcgaattgtttgggcagacttggtccgttgtttttatatgtaacattatggatttatgatgtgcacatgcaaataaaaatggtttgtttag

SEQ ID NO: 267116 - DNA, 498 bp, Zea mays
aataaaatcgcatgcttccattagggttcaggtaaccttggaatcaaatacacacttcagatagccgtcggatgctgcttccttactgtttgcaatactcaagtcacagcgccatctcaattgccaacatggactaacacaaacatgatccgtggggaaaccatcttaacttgtatgtaacagtccaaatcccctagcacaccaaataatcatatcaatgtaacagtccaaatcccccagcacaccaaataagcatatcgacgtcatgttacagcccaaacaacacgagactcccacagaatgtgtgacgctcatgaccttagccttttaaggtccctttcatcacgatcatagttccggtgctcatgcgcgtcctttctcttccgattgtcatgctccggagaatggcgttcctgactgtccatggatagctcaccctcttcggtattctcacggtcggtgctccggtggtctacacggtgtgcgggatgaggccag

SEQ ID NO: 267117 - DNA, 451 bp, Zea mays
ttagctacatgaataatccccaaaaccctaaagccagtgctccttgcaccttgccaccggagcttcccaaagaagcagtggcgaccgacgaagcaccgccgccaatgggcaacaacaacaacaacacggaatcggcgacggcgacgatggtccgggagcaggaccggctgatgcccgtggccaacgtgtcccgcatcatgcgccaagtgctgcctccgtacgccaagatctccgacgacgccaaggaggtgatccaggagtgcgtgtcggagttcatcagcttcgtcaccggcgaggcgaacgagcggtgccacaccgagcgccccaagaccgtcacctccgaggacatcgtgggggccatgagccgcctcggcttcgacgactacgtcgcgcccctcggcgccttccttcagcgcatgcgcgacgacagcgaccacggcggtgaagagcg

SEQ ID NO: 267118 - DNA, 669 bp, Zea mays
cccctccctttgtctacaccgcccaccactgatcggatcacgggggggtcccatctcctcctgcacgacacagaacgccgctccctttccgggattctgcgttccaatcgcagctgaaacgcaacgcactggatcggacgtcgccaaaaagatcggtggcgacaccataaagaaagaatccgagaaaaggcgaaaggggaggagagaaaggggaggtacaaaatttctacccgctagaggttagctcgctcggcggcgagggaacgagagacgccctaccgtcgattccatatcgccgctccgatattctgatgccggaatcctgcttttccggctagcttaccgatacctcctaggtgggttccagtcctcacccttccaacctctactatctttttttgtgaatttacctccaccgaattcgggcagctcaccatttcttggagtttggtgtcctttctcgagtgtttccttcctccctcccgggttctactgctgagtggcatctttcttgtgcgacttgtccgttgaccacaggcggagaaatttgttctcggcacacattctctgccacaatggacgatggagctgatcctccctgccaactgctcttctcccacccggagatgcctgacagcttcgacgagttcttcaacagcgccacgacga

SEQ ID NO: 267119 - DNA, 394 bp, Zea mays
atcagtagtaaccactcctcgtcgtctctctcgcggtctcgcctcctgcagctagctctcgccagaaagggaaaccgcatctgcttcagcctcccgtcccgtctcggcgccgccgcctgatcgaccagagcccagcgcggggcgtcgaggccgtccggggcgggtccggcgctcagatctgaggcgagtagcaagcgaagaacatgcagatgcaggtcggaggaggcgcggccgacagcccgggcgctgcggctgcggcgggcgcggattggcgccgcgcccgagccgctacgagtcgcagaagcggcgggactggcacacgttcgggcagtacctgcgcaaccaccggccgtcgctggagctggcgcggtgcatcggcgcgcacgtgctcgag

SEQ ID NO: 267120 - DNA, 474 bp, Zea mays
cggacgcgtggggtaacgctaagttagtttccacaaagcaagaaattagcgaggacacacgcaagaatattggcacttcacctagtccaaatggttctgctgtagtcaagaagcaaatgccaaaggagagcttacaggaagttgctactgagagaagatcaccaccaaagcttcataggagttcgccaacaccagcgaggacttcaccaacaaagctcagtccagcagcaaagcagaatggaaactctggtccagtttcttctgtatctactgttaaaaaaagagttagtgaaactatctcttgggactccctcccaacaagcctaatcaattcaggaaaggctgttgtccggaggaagaacattgctcttattgtagcggctgaggctcaaagggaagctgctgcagctgcgtatcttgtaaaaggccttgggtaagtaggcccatacccagatatttcatatgatatagtaa

SEQ ID NO: 267121 - DNA, 1116 bp, Zea mays
cggatttccttgggtcgtcccacgcgtttgttcacacccccgcgcggagctgcgcgggggcgggcttttttaccgccacgtcgacacggttgcgcactacgccaccgaggcgcccatcggggaggccgccgccgaggccgtgcgcacggggctcggcgcctcccgcgaggacctcttcgtcacgtccaaggtctggtgcgccgacgcgcaccgggacagggtgctcccggccctccgccggacgctcagcaatctccagatggaatacgtggacctgtacatggtgcactggcccgtgaccatgaaggccgggaggttcacggcccccttcacgcccgaggacttcgagccgttcgacatgcgggccgtgtgggaggccatggaggagtgccaccgcctgggcctggccaaggccatcggcgtgtgcaacttctcctgcaagaagctcgagaccctgctctccttcgccaccatccctcccgtggtcaatcaggttgagatcaacccggtgtggcagcagcggaagctgagggagttctgcagggcgaagggcatccagctatgcgcctactcgcccctgggcgccaagggcacgcactggggcagcgactcggtgatggactccggcgtcctgcacgagatcgccaagtccaagggcaagaccgtggcacaggtgtgcctgaggtgggtgtacgagcagggcgactgcctgatcgtgaagagcttcgacgaggggcggatgaaggagaacctggacatcgtggactgggagctgagcgaggaggagaggcagcgcatcagcaagatcccccagcggaagatcaaccagggccgtcgctacgtctccgagcacgggccctacaagtccttcgaggagctatgggacggcgagatatgatatgagtaaacgttacgtcggcgccccgctaggcggctgccttgcgtgacggagcaacgagctccccgtcgtgacagtgagcggctgctttgtgtggttttatgtcgtgccatctgtgcaacaaaaagtgatgcttagtgtcacagtatgtgtgaaataaattaaaaaggattttctggttaaaacggtcaaaaaaaaaaaaaaaaaaagcgcgcccg

SEQ ID NO: 267122 - DNA, 635 bp, Zea mays
  unsure (1)..(635): unsure at all n locations
cggacgcgtgggcggacgcgtggggagccgtgctcgcatgtgtgttaagcccagccaagacaagtcaagtcggagcccgcaggtgtcgacaccgcgcgccgggagccggaagaagtgtggggggtgagctgtggaccatgagcgcgaccgggcgagccccgtgcggcctgccgcgcatcggcctgggcacggcggtgcagggcccgcggccggaccccgtccgcgccgcggtgctgcgcgccatccagctcggctaccgccacttcgacacggccgcgcactacgccaccgaggcgcccatcggggaggccgccgccgaggccgtgcgcacggggctcgtcgcctcccgcgaggacctcttcgtcacgtccaaggtctggtgcgccgacgcgcaccgggacagggtgctcccggccctccgccggacgctcagcaatctccagatggaatacgtggacctgtacatggtgcactggcccgtgaccatgaaggccgggaggttcacggcccccttcacgcccgaggacttcgagccgttcgacatgcgggccgtgtgggaggccatggaggagtgccaccgnctgggcctggccaaggccatcggcgtgtgcaacttcttctgcaagaagctcgag

SEQ ID NO: 267123 - DNA, 671 bp, Zea mays
gcttgccactggggatgtgctattcgatccacatagtgggcgataattttgacagagatgaggatcacctcgcgctgatgatggagctgctaggaatgatgcctcgaaagattgcgttgggtggtcggtattcacgtgatttcttcaatcggtatggggatttgcggcacatccgacgcttgcggttctggcctctcaacaaggtgctgatggagaagtacgagttcactgaaataaatgctaatgggatggcagattttcttgtcccaatacttgattttgttcctgagaagcgccctacagctgctcaattgcttcagcatccatggcttgatgttggtcccctccgacagcaacctaaaacacggccagagtcagcacggagtccaggtgatggtgtttcagagaagcaaaagaaagagaaagaagaaagagaggcaatggccgtagagttagggaacattgccatagatggtgcttcttccaggatggcaaatgacccccaatcaagcacaataaaacaaccgctacctcttctaagaagtgagctgcatttgatttcatgagttaagctgtaaaacttgttttcattcgagaattgctccatgagtgggaaacatatgttttttttaggtttgagatatggtaagatagctaccgagggaaaagaa

SEQ ID NO: 267124 - DNA, 2301 bp, Zea mays
ctgatttctgcggccgagaacttgctttctgaagtaactaaggatgccaaggccgcaggtgatccaaattactgtaaagtcttgagctcaacattaagctcaataatgggctggacagaggaaagacttctggcatatcatgaaaccttcaatacatgtaatatcgagtctatgcaaggcattgtctccattggagtgtcagctgcaagggtccttgttgaagatatatcccatgaataccgccgtagaagaaaagaagagactgatgtagctcgaagcagggtagagacatacataaggtcttcactacggacagcttttgctcaaagaatggaagaagcagattcaaaacgatcatcaagaaaccctactccagttctttctatccttgcgaaggacattagtgacctagctacgaaggagaaaaaattgtacagtccaatactgaagacatggcatcctcttgcttctggtgttgctgttgcaacccttcattcttgttatggaaatgagctgaagcagtttgtagctgggcttacagagctgacccctgatacagttgaagtacttaaatcagcagacaaattagagaaggaccttgttaatatcgctgtagaagattctgtggatagtgatgatggaggcaagtcactaatcagagagatgccgccatatgaagctgaaaatgcaattgctaatctggtgaaagtgtggataaaagaaagagtagacagactaaagggatgggttgaccggaatttgaagcaagagacctggaatccaggtgccaacagggataattttgctccctcttccgtggagatgcttcgagttattggtgaaacgttggatgcatttttccaattgcctataccaatgcatccggctcttcttcctgatctgacagctgggctcgacagaagcctacagctttatgttgctaaagcaaaatctggctgcggagcacgaaattcttttatgccccaactacccccactaacgcgatgcgaggttggctccaagttattattcaagaaaaaggagaagccacaaaatctgcaggttcgtgtatcacaaaatggagcagcaaacggaaatgatcccttgggccttcctcaactctgtgtgcgcctgaatactcttcagtacatccgtggtgagcttgagaacctagagaagaaaattaaaacgagcttacgaaatgttgagtcagctcaggcagatatcactgatggattgaacatcaagtttgagctttgccaggcagcctgtctagagggcattcagcagatttgtgagacgactgcatataaggtgatgttttatgacttgggacatgtcctctgggacaccctttatgttggtgatactgcatcaaacagggtggaggtactgttgagggaacttgaccctgtccttgagacgatatctggtatggtgcacaacaaagtgcggaaccgtgctattactgcactgatgaaagcaacttttgatggtttcttgctggtgcttcttgctggtgggcctttgcgtactttcacccgtcaagactctcagataatagaagatgacttcagggccctcagagatctgtacttagcagatggggatggtttgccagaggaattagttgacaaggcatcctcccaggtcaagaatgtcctgcccctctttcgagcagactctgaaagtctcattgagcgattcaaacgcatgatggttgaatcgaatcggcctgcgtccaagaacaggttaccattgcctccaacaacggggcattggagtccaaatgagcctaacacagtcctgcgagttctgtgctaccggagtgatgagacagctacaaagttcctcaagaaaacttacaacctaccgaagaagatatgacttgtgggatagatcacaaaccacatgtacattttcctgtcagtataaaaaggtttctctatgcctgtcacaatctctggctgaggaccgaggaaatacccactaaactttccacagcaaaggcgcctcctcaagtgattgtcaacaagaaggtttattctgtggtgctggagaaatgtgactgggtgttttcggtggttcgtatcatggataggtttacttacagcttgatttgttcattatattatatatgtttgcctaatctagttcttttgctgaccttgcgctcatgtaatttgattcattctagtttgcgacagctatacccagcgtgtgaataagttgtgtactcgcgtgatactgtctggtgcctttgatgtgacaatatgaggagcatttgtatatttttaaaaa

SEQ ID NO: 267125 - DNA, 370 bp, Zea mays
atttgacttgtgggatagatcacaaaccatatgtacatgttcctgtcactacaaaaaggtttctctatgcctgtcacattctctggctgaggaccccgaggaaataccccctgtaaagtttccacatcaaaggtttcaagtgatcatcagcaagaaggtttattctgtggtgctgtagagatgtgactgggtgttttcggtggttcgtgtcattgataggttttgcggtgaagggtggatttacttacagctcgatttgttcattatattatatgtttgcctaatccagttcttttgctgaccttgcgctcgtgtaatttggttcattctagtctgcaacagctaaatccagcgtgtgaataagttgtgt

SEQ ID NO: 267126 - DNA, 733 bp, Zea mays
cttacgtttccgcccacgcgtccgcccacgcgtccgccgaggcctcagcagatctaatgaaggccaatatggcccgcaaggaggctgcagaagatgaacctgtacagcatgaagagaagcgactagccacttggggaaccgacgtgcctcaggatcttgttcttaatgagaagaagctggaggaatctctaaagaaggagactgcaaggagaaaagaggagaaggatgaaagaaagaggaagtataacgtgaagtggaacgacgaggtgactgcagaagacatggaggcttaccgaatgaagaggattcaccatgacgatcctatgaaagattttctcaactgaaaagtgtggtagataactagatgttcatggcactgtatcacattggttgcaccgtgccttgcatcagtgttgtgttactgtagggtggctacgcctgtcctaaggatatggccagcagaccgtgcatgtggcagtgtgtgttgcacttaaattatgatatgggaggggtaaggctggagatagcttaaccagagtggtggtggtgctgtgatctagtggcgggatgtaagaaactggctacacctttttcaagctgcgtgttggagatgtatggggctgtccgcgttggattgaccccatctttgtgaaccgctgaagttgtgtgtccaaaatactgtaaaagcagtagaagccgatattaattaaacccacactgtttctgatattac

SEQ ID NO: 267127 - DNA, 690 bp, Zea mays
ccaaaatcgtcttagtggtcaagctctggagttcaagcaactcaacatccatgcatgggaagcttttgaaaaggggcaggatatccatatgcaagcagccccatctcaagcagaactgttgtataagagtttcaagatcaagaaagaaatgttgaagtctgaacctaaggataaaattatggagaagtatgggaatgctgcgtccgaagatgcaattcctcgggagctgctgcttgggcaaagtgaaaaagagattgagtatgaccgtactggtcgaataatcaaaggacaggatgtatctcttcccaagagcaaatatgaagaggatgtgttcattaataatcacacgagcgtgtggggttcatggtggaaagatcatcaatggggctacaagtgctgcaagcagactatcaagaatagttactgtactggcttggctggaatagaagctgccgaggcatcagcagatctaatgaaggccaatatggctcgcaaggaggctgcagaagatgagcctgtacagcatgaagagaagcgattagccacttggggaaccgatgtgcctcaggatcttgttcttaacgagaagaagctccaggaatctctaaagaaggaaactgcgaggaggaaagatgacaaagacgaaaggaagacgaagtataacgtgaagtttaacgattaggttactgc

SEQ ID NO: 267128 - DNA, 490 bp, Zea mays
ccagcgtaccctcctgcccgtccaccgagacgtcaagcggatgaatactcgggtgagtgagagggaggagtcagagtacgaaacggatggtgaggatatcgaacattcaccgcctcgtggaagaagggaggacgagctggatgaggaggaagaatacgaggaagatgttgaagaagaagaagaagcgcctctgtcggatgaagaaatggaggcaccgaaacgtaagagagaatcagggggtggtgggcaaaggcgcgaggagctggtgtctgaggaggacgacgaggaccacgacgattctccgccaaggaagcagccggctgtttcgcatcgtagaaaggctgtcgtgtttgatgacagcgacgaggactaaaatttgtaaaaccgtatgacgacctgacatgatacgcttgctttttctccccatttgtttaagagaatgattagttatttttcgtcatgctggtgtaatatggttgcaattctccct

SEQ ID NO: 267129 - DNA, 474 bp, Zea mays
  unsure (1)..(474): unsure at all n locations
cccacgcctacagcaacgtcgccacttcactcacgattggagtttcacctcggcagcccagccagccagtggttcctcggctcggaggaacaggcgaacagcaagagcttctgaagatgaaggcgatccccgtggctctcctgctcctcgtcctggttgctgccgcctcctcgttcaagcatctcgccgaggcagcagacggcggcgcggtgccggacggcgtgtgcgacggcaagtgccgcagccggtgctcgctgaagaaggccgggcggtgcatgggcctgtgcatgatgtgctgcggcaagtgccagggctgcgtgccgtcggggccgtacgccagcaaggacgagtgcccctgctacagggacatgaagtcccccaagaaccagcgccccaagtgcccctaggccctaccgctctaagggagggaggatgacccangatttcgctcgcgatcctgcacagcttctagtc

SEQ ID NO: 267130 - DNA, 927 bp, Zea mays
tttatgacgcgtgggcggacgcgtgggcggacgcgtgggcggacgcgtgggcgaggacgggcgcacgcttgccgactacaacattcagaaggagagcaccctccacttggtgctgcgtctcaggggtggcatgcagatcttcgtgaagacacttactggcaagacgatcacccttgaggtggagtcctcggacaccatcgacaatgtcaaggccaagatccaggacaaggagggcattccaccggaccagcagcggctcatctttgctggcaagcagctggaggatggccgtacccttgcagattacaacatccagaaggagagcaccctccacttggtgctgcgtctcaggggtggcatgcagatcttcgtgaagactcttactggcaagacgatcacccttgaggtggagtcctcagacaccattgacaacgtcaaggccaagatccaggacaaggagggcattccaccggaccagcagcggctgatcttcgccggcaagcagctggaggatggtcgcaccttggctgactacaacatccagaaggagagcaccctccacttggtgctccgcctcaggggtggcatgcagatctttgtgaagacattgactggcaagaccatcaccttggaggtggagtcgtctgacacaatcgataatgtcaaagccaagatccaggacaaggagggcattccaccggaccagcagcgcctgatctttgctggcaagcagctggaggatggccgtaccctcgccgactacaacatccagaaggagagcaccctccacctggtgctccgcttgcgaggtggtatgcagatctttgtgaagaccttgactggcaagaccataaccctggaggttgagagctccgacaccatcgacaacgtgaaggcgaagatccaggacatagagggccatccccc

SEQ ID NO: 267131 - DNA, 758 bp, Zea mays
agaggaagaagatgatgtcggaaggcgacgatctgcgtggtgggactcatccacgtgatatgatcgacgtcctgctaggcaacggcaacgacgagctcaccgacgagctgatatctgacaacatgatcgacttcatgatccctgcagaggactccgtgcccgtgctcatcacgctggccgtcaagtacctcagcgaatgcccactggctctgcagcaactcgaggaggagaacatggagctcaagaggcagaaatcaggcgcgggagaaaccctagaatggacagactacatgtcgctcgccttcacacagcacgtgatcacggagacgctgcggatgggcaacatcatcaacgggatcatgcggaaggcggtgcgagacgtggaggtgagaggccacctggtccccaagggctggcgcgtcctcgtctacttccgcgccgtccacctcgacgccgccgtccacgacgacccgcacgccttcaacccctggaggtggaaggagaggcccgacgtcgtggccatgagcggcttcaccccgttcggcggcggccagatgctgtgccctgggctcgacctggcaaggctcgaggcctccatctttctgcaccatctcgtcaccaatttcaggtgggtggcggaggaggacaccgtcgtcaacttccccacggtgcggctcaagcgagggatgccaatcgcagtgacgcccagaacctgctgaacgcaacgcaagttgccaggcaaaaccatagtatagatt

SEQ ID NO: 267132 - DNA, 1850 bp, Zea mays
acccgatcaagctgtgggagcgctacgtcgagtggctctaccagcacaaggagctcggcatcttcgtcgacgtcagccggatggggttcacggaggagttcctgcggcagatggagccgcggatgcagcaggccttcgtcgacatgcgggagctcgagaagggcgccatcgccaaccccgacgagggtcgcatggtgggccactactggctccgcgacccggccctcgctcccaactccttcctccggaacaagatcgagaccgcactcgacagaatcctcgccttctctcaagatgtcgtctctggaaagattctttccccatctggtcgtttcacttcaattctctctataggaatcggagggtcagctttgggccctcaatttgttgctgaggcacttgcgcctgataaccctccactgaagataagatttattgacaacaccgatcctgctgggattgatcatcaaattgctcaactaggacctgaactggcaactactcttgtaattgtcatttctaagagcggaggcacacctgaaacccgcaatgggttactggaagtacagaaagccttcagagatgcggggctgcaattctcgaaacagggtgttgcaattactcaagaaaattctctgttggataacactgccagaatagagggatggttagctcggtttcctatgtttgactgggttggtggtaggacttcagaaatgtcagctgttggtttacttccagctgcattgcagggtattgatatcaaggaaatgctagctggtgcagctttaatggatgaggaaacccggaacactgtggttaaagaaaatccagcagcattgcttgcattatgttggtattgggcatcagaagggataggcaataaggatatggttgtacttccttacaaggatagtttgttgcttttgagtagatatttgcaacaacttgtcatggaatctcttgggaaagaatttgatctggatggcaaccgggtaaatcaagggctatctgtatatggaaacaaaggaagcactgaccagcacgcttacattcagcagctgagagaaggtgtacacaacttctttgttacttttatcgaggtcttgcgtgacaggcctgctggtcatgattgggagcttgaacctggagtcacatgtggtgactatttgtttgggatgttgcagggaacacgttctgctctttatgcaaatgaccgggagtctatctctgttactgtgcaagaggtaactcctagagctgttggagcactgattgcactttatgaacgtgctgtggggatttatgcttctttggtaaatatcaatgcctatcatcagcctggtgttgaggctgggaaaaaggcagcaggagaagtattggcccttcagaaaagggttctgactgtattaaaggaggccatctgcgagaaccctactgagccattgactctagatgaaattgcagatcgctgccattgtcctgaagatattgagatgatctacaaaataatccagcacatggctgctaacgacagagcacttatagcagaaggcagctgcggctctcctcgcagtgttaaggtgtacctcggtgaatgcagtgtggacgaagatatgcaggccgcatagattctgggtctggatccgtgtaacattgttggaataaatcagaagcaacacaatagcgatgctatgcatgggtgtcgctgatgctgatgtcccattagtttcttgtttggtggtgcttgcacacgattgccggaacgatgtaattttagaatttgattttttttgggccccttaaaatataaaatacaaagatagaaaatggaaaaaaagggcggccgc

SEQ ID NO: 267133 - DNA, 2894 bp, Zea mays
ctgcaggtttctttttcgttctgggtttgcccacgcgtccgctccctccgagtccagggggcaggggcaccattaccgagtagtttaattagtgctagttgtattaccattgttagtgacttaattaccctcacgcgaagcaccctacctttgctagtcctcctacgtctcctcttcgcttaatcttggtgatttgattcttcacttcttgcgcgcattgcagagggtgctcggtctgcagctatcttaggttaaccagtcgtgtgtggtctatcggtttcgatatagtattactactgctctgttataatcagcggggaggaggaagatgacggtgacgccacggatcacggtgagcgacgggcggctgacggtgcgcggccgtacggtgctcaccggcgtgccggacaacgtgtcggcggcgcacgcggccggggcggggctcgtcgacggggccttcgtcggcgcccacgccggcgaggccaagagccaccacgtcttcaccttcggcacgctccgggactgccggttcctgtgcctgttccggttcaagctgtggtggatgacgcagcggatgggcgtctccggccgcgacgtccctctggagacccagttcatgctcgtcgaggtccctgccagtgacggcgacggcgacggcgacgacgcccccgcgtacgtggtgatgcttccgctgctggaggggcagtttcgggcggcgctgcaggggaacgaccgcgacgagctgcagatctgcatcgagagcggggacaaggaggtgcagacggaccaggccgcgcacatggtgtacctccacgccggcgacaaccccttcgacaccgtcaccgccgccgtcaaggcggtggagaagcacctgcagacgttccaccaccgcgacaagaagaagctgccgtcgttcctcgactggttcggctggtgcacctgggacgccttctacaccgacgtcaccgccgacggcgtcaaacacggccttcagagcctgtccaagggcggcgcgccgccgcggttcctcatcatcgacgacggctggcagcagatcgcctccgagaacaagcccgaccccaacgtcgccgtccaggagggcgcgcaattcgccagccggctgaccgggatcaaggagaacaccaagttccagaccaagcccgacggcgacggcgacggagagcaggcggcgggcgggctgaagcgactggtggccgagaccaaggacgcgcacggcgtgaagcaggtgtacgtgtggcacgccatggccgggtactggggcggcgtgacgccgacggcggggacggcgatggagcgctacgagccggcgctggcgtaccccgtgcagtccccgggcgtgacgggcaaccagccggacatcgtcatggactcgctatccgtcctggggctgggcctggtgcacccgcgccgggtgcgagacttctacggcgagctccacgcgtacctcgcctcctgcggcgtcgacggcgtcaaggtggacgtgcagaacatcatcgagacgctgggcgccggccacggcggccgggtcgcgctcacccgcgcctaccaccgcgcgctcgaggcctccgtggcgcgcagcttcccggacaacggctgcatctcctgcatgtgccacaactccgacatgctgtacagcgccaggcagaccgccgtcgtgcgcgcctccgacgacttctacccgcgcgacccggcatcgcacaccgtccacgtcgcctccgttgcgtacaacaccgtcttcctcggcgagttcatgcagcccgattgggacatgttccatagcttgcatccggcggcagagtaccacggcgcggcgagggccatcggtggctgcccgatatacgtcagcgacaagccggggaaccacaacttcgagctgctcaggaagctcgtgctccccgacggctccgtgctacgcgcgcagcttcccggccggcccacacgcgactgcctcttctccgacccggcgcgcgacggcgagagtttgctcaagatttggaacctgaacaagtgcggtggcgtggtgggtgtgttcaactgccagggagccgggtggtgccgcgtgaccaagcggacgcgcgtgcacgacgcgtcgccgggcacgctgaccggcaccgtgcgtgccgacgacgtcgacgccatagcgcgcgtcgctggtgacggcggcgggtgggacggcgagaccgtggtgtatgcgcaccgcacgcgggagctagtgcgactgccccggggcgtcgcgctgcctgtgacgctaggcccgctccagtatgaggtgttccatgtgtgcccgctccgcgccgtcgtgccggggttctcgttcgcgcccgtcgggctgctcgatatgttcaacgctgggggcgccgttgaggagtgcgacgtgatcagcaatgtcggcggcaaggccatggctctcagggttcgcgggtgcggtcggttcggcgcttactgctcgcgggagccggcgaggtgtctattggactcggcggaagtggagttcagctacgatgccgacaccggcctcgtgtccgtcgacctgcccgtgccggagcaggagctatatcggtggacgctggagattatggtctaggccgtgacgctgtgcgctgacgccattctgagccggacgacattgtcatttgctatgtgcacgagagatagatgtattgtggtgttgttgtataattggtatggagagagtatgcttttgttatgtctgtatctgcataccctgcgtgctttgaatgttatataatacttgatagataataaaggatggtgttcctgaatgttatataatacttgataataaaggatggtgctcttttaataaaaaaaaaaaaacaaaaaaaaaaaaaaaaaaaagggcggccggagaa

SEQ ID NO: 267134 - DNA, 413 bp, Zea mays
gatgaaattgcagatcgctgccattgccctgaagatattgagatgatctacaaaatagtccagcacatggctgctaacgacagagcaatcatagcagaaggcagctgtggctctcctcgcagcgttaaggtgtacctcggtgaatgcaatgtagacgaagacttgcaggccgcgtaggttccgagcctggatccgtgtaaaattgttggaataaatcaggcgcaacaagatagcgatgcaatgcatgggtgttggcggatcctgctgtgcagtttgtttcttgtttggtgtttcttgcacgcgaatacgcgattgccgcaacgacgtattttagaatttgaatttttttggaacccttgaaaatacaaaataaagaagataaggtggtgtccgtcgtaaaaaaaaaattaaaa

SEQ ID NO: 267135 - DNA, 386 bp, Zea mays
acccacgcgtccgcggacgcgtgggtgcacgcgggagccggcgaggtgcctaatggactcggccgaaatggcattcagctacgatatcgacactggcctcgtgtccgtcgacttgccggtgccggagcaggagctatacctttggacactggagattatgatctaggtcgtgatgctgtgcgccgacgccaacgcttgccttcgcggctgagccattatgagtcggacgacattgtcatttgctatgtgcacgagagatagatgtattgtggtggtgttgtataattggcatggggagtgttttttttgttatgttcgtatctgtatatcatacgtgctctgaatgttatataatacttgataataaaggatggtgctcctttaat

SEQ ID NO: 267136 - DNA, 617 bp, Zea mays
ctccctccgagtccagggggcaggggcaccattaccgagtagtctaattagtgctagttgtattaccattgttagtgacttaattaccctcacgcgaagaccttacctctgctagtcctcctacgtctcttctcttcgcttaatcttggtcggtgatttgattcttcacttcttgcgcgcattgcagagggtgctcggtctgcagctatcttaggttaaccagtcgtgtgtggtctatcggtggacgctggagattatggtctaggccgtgacgctgtgcgctgacgccattctgtgccggacgacattgtcatttgctatgtgcacgagagatagatgtattgtggtgttgttgtataattggtatggagagagaatgcttttgttatgtatgtgtctgcataccctgtgtgctttgaatgttatataatacttgatagataataaaggatggtgttcctgaatgttatataatacttgataataaaggatggtgctcttttagtgaaagctatgggccctcaatttgttgctgaggcacttgcgcctgataacccttcactgaagataagatttatgggcggcacctttactggtgccattgttcattacattgg

SEQ ID NO: 267137 - DNA, 811 bp, Zea mays
cgcctttcgcctcaaagccatttgaacatttgaaccccccacgtctcctcgcctcgttccccatttgctgcgtctccttgcccgcgccgccgctcgccgtttgcccctcgtctccgcaccgcgcgctgttgtccatccttgtgcagcaaaaatgacggctggctacattgttggctcactggtcggatcctttgccattgcatacctgtgtgacacatttatctctgacaagaaggcatttggaggtagcacccccaagactgtttctgagaaggagtggtggcaagccacagacaccaagttccaggcctggcctcgcactgctgggccaccggttgtcatgaaccccatcagccgccagaacttcatcgtcaagtccactgagtaggtttgggctggagaagctggttctgcgacttggtgccgccatgaagccagagttccttttctaaggtcttaatcaattgtaataaaacgaaatacagtcaggatttttttgtgatttttacttgatctgtgagcgaacactgggtctttcaccttgtcatccaatgggttctgctccttggtgaaatctcccaccagccagtaaagaactgggttgttttcataatatatgcttttgctacgcagcctctgctgttgtaaggaattgcattgttatcttatatcactgtatggtgatgtttaactagtttgttgatgtgccaaaaaaaaaaaaaaaagaataacaaattcaaataaaaaaagggggggccgtattaaagaataaaaatttatttccctgcgtttgcaaattaattgctttttt

SEQ ID NO: 267138 - DNA, 1914 bp, Zea mays
ccgctactctaccccacccacacccttccgcccgccgccactaaaccctagcgggacacccgccttgctcgcgccgcctcatcctctcactcctctcggacccccggtggccggtgcagagctgcgcgaccgagaaccgaatctgtgagccatgtcgaccaacaagggcagcgcggccaagggcggcggagggaagaagaaggaggtgaagaaggagacgaagctcgggatggcctataagaaggacgacaacttcggggagtggtactccgaggttgttgttaacagtgaaatgattgagtactatgacatttctggttgttatatattgaggccatgggcgatggaaatctgggagctactgaaagaattctttgatgcagaaattaaaaagctgaagctcaaaccatattatttccctttgtttgttactgagaatgttctacagaaggaaaaggaccacattgagggctttgcacctgaggtagcttgggttactaaatctgggaaatctgacctggaagcaccgattgcaatccgccccacaagtgagactgtcatgtatccatacttctccaaatggataagaagccaccgagacttacccttgaggtgtaatcaatggtgtaatgttgttagatgggagtttagcaatccaactcctttcataaggagccgtgaatttctgtggcaagaggggcatactgcttttgcgactaaagaagaggcagatgaagaggttctccaaatattggaactgtacagaaggatatacgaagaatttttagcagttccagtttccaaagggagaaaaagtgagatggaaaaatttgcaggtggcctttataccaccagcgttgaggccttcattccaaacactggtcgtggcatacaaggcgcaacctcacactgtcttggtcaaaactttgccaagatgtttgatatcacttttgagaatgagaaaggtgttagggaaatggtttggcaaaactcttgggcctacacaacccgctcgattggagtgatggtgatgacacatggtgatgacaaaggcttagtattaccaccaaaggtggcgccaatccaggtaattgtgattccagtgccttataaggatgctgacacaactgccataaagggagcctgcgaatcaactgtttacacactcgatcaatctggaattagagcggatcaggacacccgtgaaaattactctccaggttggaagtattcccactgggaaatgaaaggtgttccattgagaattgagattggtccaaaagatctggcaaacaaacaggtgcgtgttgtccgccgggacaacggtgcaaaggttgacatccctgtgaccaatttggttgaagaggttaaagtgttactggatgagattcaaaaaaatctgttcaaaacagcccaagaaaagagagatgcctgtgttcatgtcgtgaacacttgggatgaattcacaactgctctgaataacaaaaagttgatcttggctccatggtgtgatgaggaggaaattgagaaagatgtaaaaactcggacaaaaggggaacttggagctgcgaaaacattgtgtactccatttgagcagccagaacttccagaaggtaccctgtgctttgcatctggaaagccagcgaagaagtggtcgttctggggccgcagctactgattgcctgtgctgggattatttccggattcagttctagtgagttatgtagctttgaagtgtcggatacaaatccaaaaatccatttacattgcgttttacatcgacttgcagttctcatgtcatcactactgacaaaagccatcgatttcctgtggaccatgctattcgagtttgaatgttgcaaggatgagaatacgtacattcttttactggcgtgcagtgttataattagaaaa

SEQ ID NO: 267139 - DNA, 675 bp, Zea mays
cggacgcgtgcgcgacccactcgtccttaaagatctgtcaaacaaacatgtactcatggtccgtttggacaactttgcaaaagttgacattccagtgaccaatttgattgaagatgttaaagtgtatattggatgaaattcacaaaaatctgttcaaaacatatcaagaaaggagagattcatgtgttcaggtcgtaaactatttggatgaattcacttctgctctcaataacaaaaggttcatcttggctccttggtgcgatgaggaggaagttgagaaagatgtgaaagctcggacaaaaggggaactcggagctgcgaaaacattgtgtactccatttgagcagccagaacttccagaaggtaccctgtgctttgcatctggaaagccagcaaagaagtggtcgttttggggccgcagctactgattgcctttgctgggagtccttttggattcagtagtgaaccatgtaacttcgagattttggatacaaatcggaaaatccatttacattgtttttacatcgacttgcagttctgatgtcatcacagctgaaaaaaagccattgattccagtggacattacttccgagttttgatgttgcaaggatgagaagacatacattccttttaaaaaaaaaaaaaaaaaaaaaaaaaaaaaaaaaagggcggccg

SEQ ID NO: 267140 - DNA, 647 bp, Zea mays
cggacgcgtgggttcaaggaaagcgccatgtagttgcctatgctgtgcggcgtgtgacaaacttcaatgaaataacctgtcactttctgcactgcattcaggtgcatatggagctcacagggttaaagcagatctattcttcagctgcaacatatggaggagtagcccatgccccatcacagccaaatccggttgatggaaactacatatccaacttggtcttgagtgtttttcatgacccatctgtcatggaccaggagcatggactgcacatcaaagatgtcatagatcgtctcaaactaccagatgatgtagtcagtgcggccatccaaggtcatgttgatgtgggcaacatttacaacacaattgatgacttccactacaaatctgtccggaatggatgaccacgttgcaagtccagcgttcaggctccgtgtaggtatggagccgtttcaaggaagaagaaatgtaaaccctcttcaggatcgactacatcttgcagataggcttcatggtcaacagcttagcatatcggtttaggtgtgtattgctctcatatgtaatgatacataagatgtgagtagactaggactacctgcaggacatcagtccgttcctacggaaatttgttatgaacgttttacatt

SEQ ID NO: 267141 - DNA, 1495 bp, Zea mays
ctcgagccgcataaatcaggaaatattgacgatggaagcaatggcgacgtagctgctgaccattatcatcgatacaaggacgacatagaaatgatgcattcgattggtctcagctcctacagattctcattgtcgtggtcgagaattcttccaaagggtcgcttcggaggtgttaatcaggcaggcgttaaattctacaatagcctcatcaacggactgctagaaaaagggatacaaccatttgtgacgatcaaccactatgacatacctgaagaactccaagaaagatacaattcttggttgaacccagagattcaggaggacttcacctacttcgttgagctttgcttcaagatgtttggtgaccgagtaaagcactgggtcacattcaatgagccaaatcttattgtaaagcttgcatactccattggggcatttccacccaaccgttgttccgagccatatgggaaatgtgattcagggaattcatcaactgagccctacattgcagcgcataacatgatattagctcatgcaaagacggtcaacatctacagaaagaattacaagtccaagcaaggtggctttgtaggaatttcattacatctaagatggtatgaaccactaaggaatatcacagaggaccacttggcagtaagccgagctctgtctttcgatgctccatggatcttggatcccttgttctttggtgactatcctcaccagatgcgccaaatcttaggtccaaacttgccaaaatttacagaaggagagaagaaactactgaagaaccaaattgacttcatcggggtaaatcactaccaaacattctatgtcaaggattgcatatattctctatgtgatatggacgcctacccttctgaagctttagtttctatatcaacagaacgaaatgggatacccattggaaaaccgacacctgttgcaaacacctatgtcgttccaagctccatggagaagttggtcatgtatttaaagcagagatataaaagcatacctttgtacatcacagagaacggttatgcccaaatagccaatattagcactacagcagaagaaataattaatgatattgaaagatcaacttacattcgtgactacctcacttacttgagctttgcaataaggaaaggagcagatgtgagaggttattttgtgtggtctttgatggataacttcgaatggatctctggttacaccgtaaagtatggtctttgtcatgtgaatttcaagtcactaaagcgaacaccaaaattgtctgctaaatggtatagcaagtttatcaagggctatgaacagatagagatggcctctgaagaattgcctaagcatatggtttcctagtacagaaatacagaattctcaaagtccttgtttctacattactcaatgatttgttaaaaatgtttacaccgtaatttttctcatgcccatgtatgccagtgccataataaaatctaagcttatttttttc

SEQ ID NO: 267142 - DNA, 534 bp, Zea mays
ttattggatcaaaagggagtggggactaaccgtgtgcttgctcttaaatactcatgaaagttgtataatttgttttccttgttccccatccttctcagtccaagcaaggtggctttgtaggaatttcattacatctaagatggtatgaaccactaaggaatatcacagaggaccacttggcagtaagccgagctctgtctttcgatgctccatggtatcaattgattcagtaaccttccatcatactatgctaacttttacgattggaactaacttttggtcttcacgattgaatgctcacttgatgatatatgctaaaacaggatcttggatcccttgttctttggtgactatcctcaccagatgcgccaaatcttaggtccaaacttgccaaaatttacagaaggagagaagaaactactgaagaaccaaattgacttcatcggggtaaatcactaccaaacattctacgtcaaggattgcatatattctctatgtgatatgaacgcctacccttctgaagctttagtttct

SEQ ID NO: 267143 - DNA, 541 bp, Zea mays
cccactcgtccgtcgatgtgttataatattggattgctactcttacccacttggatgggagcacaagattcaaaatcagcatcatcaagggaacagcgcaaagcagttctcaacatacaaagataatattactgtttatggaagtgtgaaggatgttacaaaattgatgtcctccactactgaacttggatgaaggttttgaagagagaaggcaaaacatatttttctggggctgttgactcaattagctccatgttaaggcatgcttcagtgtcatcaatttcaggccttcttagtagccttcgaagccatgagcaagtatcatcaatcttttggatgatacattcagacctccatgagcccaaggtaccccgagcatttgaatgtctttgtagtatggttgcttgtgtggagccagcacttgtggatcctgtttgtggagagagtccggtaaacatgtcgatcgcccagcctgatgattttagagccagattgataattcgccttaaacgtcgtcttctacatggagtcacgcgtggct

SEQ ID NO: 267144 - DNA, 351 bp, Zea mays
tctagtccgactttgtgaaatgacttgaaaggtgtaggataagtgggagcctcggggcgcaagtgaaataccactacttttaacgttattttacttattccgtgggtcggaagcggggcaccgcccctccttttggctccaaggacccggcctcgccgggccgatccgggcggaagacattgtcaggtggggagtttggctggggcggcacatctgttaaaagataacgcacgtgtcctaagatgagctcaacgagaacagaaatctcgtgtggaacaaaagggtaaaagctcgtgtgattctgatttccaggtcgaatacgagccgtgaaatcgtggactatcgttcctt

SEQ ID NO: 267145 - DNA, 788 bp, Zea mays
acccacacgtctgcgtgacgcgtgggcctcgccgcctccacccgcaccacaccaccggcgatgtccacagcggcggcgcagggcggcagcgacaagccggcgctccggaggcccgtcttcaccaaggtcgaccagctcaggccgggcaccaacgggcacaccctcaccgtcaaggtcgtcagcgccacccccgtgcctgggcgcgcgcgcccaggcgcacccgccgccgccccatcccgcgcgccgcgcatcgccgagtgcctcgtcggggacgagaccggcgccatcgtcttcaccgcccgcaacgaccaagttgacttgctgaagcccaatgcgacagtgatcttgcgcaatgccaaaatagacatgttcaaaggatcaatgaggcttgcagtggacaagtgggggcggattgaggctgtagagccagccagtttcacggtgaaggaagacaacaacctgtctctaatagagtatgaattggttaatgtggctgagtaactgtccaatccaagcgtttctgccccctttatttcgtgccataagaaggaagtaccatgaatgaacattataaagcctcttgaagcgaagcgagtttatttgctacggtggggtagataaaggtcaaggctgtatggcctgtgttagaactttggataaattaagatgaattgcccttgcatctatgagattgttatccatctttgtactgctcgtgttgctttgatgcaagaaatctgaagcaggaaatgcgtacccagtgctctggacactggcgtctgttgtaa

SEQ ID NO: 267146 - DNA, 270 bp, Zea mays
cctcgagccgaatcggctcgagattccaacccccccaaggcacactcctcctccgcaaccaaaaccgctagggtttccgcaccgctcctctagtcctccacccaccacaccccactaccggcgatggccaccgcggcggcgcagggcggtagcgacaagccggcgctccggaagcccgtcttcaccaaggtcgaccagctcaagccgggcactaacgggcacaccctcaccgtcaaggtcgtcagcgccacacccgtgcccggccgcgcg

SEQ ID NO: 267147 - DNA, 781 bp, Zea mays
ctttccgacaaattggttggagcaaatgttgtttagcttttgtgaggaaagaggcggcggcggccgcggggattgggtagcaggagaagatccccttctgcactcatcgaacggccgccgccacctagatcagttgggaggtacgatcgatttatttaccttcgcagcttagcagctgatttacgatttatctgccttgtcatcgaagagcggtcgtgataccttattggatttgcgtgttgggagtaaatctgtcccattcccgcttcatagccgcatgaaacgaaacattgaaaccattatgtataatccaacaaggacacggtgcaggtgttttgtacgatgcatatgcatccgtccgtcccttatgttttgtgcaccagttgctgtcttgtagattcatgatttggcagcagggtgtaggcacgcttagctgatggcaaaacattcctgggcatttgccaatcccagcaacaattacttgtgacaaaatcgttgttttttatgcttgtgtacagaattacaattagggatagcccgaggagaacactttacttttttaatccactttacccattacagcccctacttatcggaattctcacttatttccttatcttttgttcccccgcccaattttccggggttcccccgtcctccctgtggtttgtaatcctttgtcttgaaaaaccattcgtttcactttccttttttcttttgcaaagagccatttactttaatcttcctctgttataactgatatctcaggtttttttcctct

SEQ ID NO: 267148 - DNA, 856 bp, Zea mays
gcggctcaatccagcaggtgggttaagcttgggagtgacaccgcggcacctccactgcagtagtcttgttgccggcggcggcggcggcggcggcggcgcggagaaattcggcgaacgatggcggactccggaagcctgaggaagcgggaggagaaggaagaggaggacgacattgtctgcctggatccgtccttattcgtggaccgcagctacgagatgacgaccttcaccttcgggtcccacgagttgcgcctcctctgcctccgcgccgcttccactgattttgatcttactggacagttagtgtggccaggggcagtccttatgaacaactacctatctcaacaccctgaaattgtgaagggatgttcagtagttgagctaggatctgggattggcattactggcatattgtgtagccgtttctgcaaggaggttgtcttgactgatcacaatgatgaagttctggagattataaagaaaaatatagagttgcagtcatgttctgagaatgcacatgcagtgttgacagccgagaaactagagtggggaaactcagatcatttaagcggtattattgaaaaacatcctggtggatttgatcttgttcttggagctgatatttgcttccagcaatctagcatttcctgcctctttgatactgtagagaggattgttcgtattcaagctggtaaatgcagattcatattggcttatgtatcccgaactaaagtcatggatgcactagtactcaaggaagctgaaaagcatggaatgcgtgttgaagaaatgaacggaacaagaacaaccatctcgaatcttgaaggagtcatatttgacattaccctgaaatgac

SEQ ID NO: 267149 - DNA, 1093 bp, Zea mays
gccacctcctttcccttcgatatttttttggttggatctagcgtgacggcaaagacggtgtatcgaagggtcgacaatggttacgacgatcggtagtccatagcagcggcgggcgcaacttcgacccggttttcttcccatatatctgtcaaatccttctccggttgccctccatcggcagcaatttccgccatagataccggcgatcgagggcctcggacaacccaatcgacggagcagcgcggcggcaggagagggcaaacccttttcttctcagtactctacttgtctgcgcctggatcccctccgcaggaagataagacatgggtcaagcactcggcttgattcaagtggatcaatcgacagtagccatcaaggaaacttttgggaagtttgacgaggtcctagagcctggatgccacttcttgccatggtgcatagggaagcaaattgctgggtatctgtcactgcgtgtgcagcagcttgatgtccgctgcgaaacaaagacaaaggataatgtcttcgtcaatgttgtggcatctgtgcaatatcgtgcccttgccgataaggcatctgatgcattttacaggcttagtaacaccagggagcaaatccagtcatatgtttttgatgtcatcagggcaagtgttccgaagatgaacttggatgatgcctttgagcagaagaatgaaatcgccaaagctgtagaaaatgaacttgaaaaggcaatgtctatgtatggatacgagattgtgcagactctgattgttgatattgagcctgatgagcatgtgaagagagctatgaatgagatcaatgcagctgctaggctgaggttggctgccagcgagaaagctgaggcagagaagatactgcagatcaagagagccgaagtgatgcagaatccaagtacttggcgggtctgggtatcgcaagacagcgccaggctatagtggatgggctcagtagacactgttcttgctttctctgagaatgtgcctgggacctctgcaaaggatgtcatggacatggttctggttacccagtacttcgacaccatgaatgacattggggcctcgtccaagtcctggtc

SEQ ID NO: 267150 - DNA, 1532 bp, Zea mays
tccaatagtccagagtccttggaaagggagagcttgttgtggatattaagaagattcaacgaagatatataagaactgatttctttgtagacatacttgcagctgtgccacttccacaggttactgtgtggttaattatgcctgcgataaaaagctcagattataacatccggaacactacatttgctctcgtaattgtaattcagtatgtcataagaatgtatctcatcatccctttaagcaatcagattatcaaagctgttggagtagttgcaaagccagcttgggggggagcagcatacaatcttcttctctacatgcttgcaggccatattactggtgcaatatattaccttctctccatcgaacggcagattacatgctgggatcagcagtgcgttgctgagtacaatgatacacattgcaactttagttttataagctgtgagaataatggttctaatgattattctgtgtgggcaaataagacaaaagtatttgccaactgtgatgccacgaatagtagtatatcatttaactacgggatgttttctagtgcactgagtaaaggtgctgtatcatctccattccttgagaagtatttcttttgcctatggtggggcttgctgcagcttagttcaagcggaaatcctctcgtgacaagtgcatttatcacagagaatgcatttgcgatagcaattggtgctatcagtctcatactctttgctcagttgattggcaaaatgcagacatacctgcagtctatcagtaaaaggcttgaagagtggaggctgaggcaaagggacatggatgagtggatgagacaccatcaactcccatctcatcttcaagaacgtgtgcggcggttcgttcaagtcaaatggcttgctacaagaggagtagaagaagaatccatcttgcaagctttgcctgctgatattcgtcgggatgtgcagcgtcatctttgtttggacctcgttagacgtgtaccttttttctctgagatggataaccaacttctcgatgccatctgtgagcggctggtgtctttcctgtgccctgagaacacgtacatctctcgcgagggtgatcctgtgaacgagatgctcttcattatacgcgggaaactagagagctcaacgacaaatggtggccgcagcaacttcttcaactccatcatcctgcgccccggcgatttcgcaggcgaggagctgctcacgtgggccctgctccccaagaccaacgtccacttcccgctctcgacaaggaccgtacggagccacacagaggtggaggccttcgctctgcgggctgaggacctgaagttcgtcgcgaaccagttccgtaggctccacagcaagaagctccagcacacgttccggttctactcccaccactggaggacctgggccgcctgcttcatccaggccgcttggcggcagcaccagaggaggcagctggctgaaagcctcagccgctgggagtcgtactcgtggtggtcggcggaggaccacccaaccggcgataagccc

SEQ ID NO: 267151 - DNA, 450 bp, Zea mays
atccaggcccaggagcgcgagttctgtgcctgtgcctctgctccacctcccctgcccctgcgccccaagtccacgtccaccactcagcactcacgctgctcgctcgctcgctcgtacacgcgcccgcttcgcgcagggaaggaaccgtggtggggggagcggacggacatgatgcacgccaagtcggagtcggacgtgacgagcctggcggcgtcgtcgccgcctcggtcgccgaagcggggcggcggcggcccggcaacggcggctactacgtgcagagcccgtcgcgggagtcgcacgacggcggctacaagtcctcgtcgatgcagcccacgccggtctacaacagccccaacgagtcgccgtcgcacccctcctacggccgtcactctcgctcctcctccgtcagccgcttctccggcaacctccgcaagggcgccgccggggacc

SEQ ID NO: 267152 - DNA, 581 bp, Zea mays
ccaggagcgcgagttctgtgcctgagcctctgctccacctgccctgcccgtgcgccccagcgccacgtccaccactcaggactcacgctgctcgctcgctcgctcgtacacgcgcccgcttcgcgcaggtgcgtgtagaacgacggaggcattccatttccgactcggccgggtgggttcggatcggacaacccctgccaaaaccgcgtgtgccggcgctggtctgcctctgatcgtgtgtgctgctgttggatttggttctggttttggtttggctagggaaggaaccgtggtgggggaagcggacggacatgatgcacgccaagtcggagtcggacgtgacgagcctggcggcgtcgtcgccgcctcggtcgccgaagcggggcggcggcgccgccggcaacggcggctactacgtgcagagcccgtcgcgggagtcgcacgacggcggctacaagtcctcgtcgatgcagcccacgccggtctacaacagccccaacgagtcgccgtcgcacccctcctacggccgccactcccgctcctcctccgtcagccgcttctccggcaaactccgcaagggc

SEQ ID NO: 267153 - DNA, 302 bp, Zea mays
cgtgtccggacgggaataccgccacaaggtgcttaagcagatgaactcgagctgcagcctcagcgggaggctagactgtaaccacaagaagtttgccatgaaattcggtttggtcgcagcagtttaggtactcaacttttctctagtccaatccaagggagtttgttttattctcaggtgaatctttccgtttgtaccgtcaggttgtgttgttcttttgaacatttgggcaatgataactaataattcaaggtcctttacaagtaaaaaaaaaaaaaaaaaaataaaaaaataaataaaaa

SEQ ID NO: 267154 - DNA, 1085 bp, Zea mays
  unsure (1)..(1085): unsure at all n locations
cccacgcgtccgcagacgactaccgagacagcgatggggaacaagtatatgaggcacttgatcgcagcaaccggcggaggaaaagatctcagagatacacacaagactttgttgaggctgtctcagatgttgatcctaactttgacagtgacgacgatatcatgggagaggcagtgtatgatgacgaatacctgagaagtcgcaaacagaataagccatcaagtgcttctgaagaggatgaagagttccggttggaagaagatgccgaagatgatgatgaagaggaatattcattgagtaccagtgaagatctagaggagccacaacggcataaaaagctggaaactcgtggccggcgaggtacgaagctgagatcagttggtgaaatccaagcaggtcttagacgcagcaagcgttcttctcgtcctcgtattaactatcgccaatatgatttttcggactcggataccgggcctggaaaggcaaagaaatctgatgcatcagattctgaagctggctctgatgccgagaatgatatggagctctcgacatcgagtcaagagcaagaggaagaagaggatgatagtcatgatgaagaaaatggtaataatgtgaatgataaaatggatgaggaccacaccgtggcagaaaataaagtagaaccagaggaggaggagcagaaggagcagaaggagcagccgcctatagagaagatggatgctcccagcacggaaagtagacgtgtaggaagaacattcctagatctaaacgagcttgcacctggaggtggctttgatgagagcccaagcttgacagtgaaagatgacatagacaacatttagggaataaagttttttttgatacatttgagtgctgttggtcagttttctgacttcgaagcaagggtggcagatcgatgggtttgagcttatggctgttttcattgatttgcagtaacaggacaagcgaggttccacttgaagtgactntgagcttcttcggtgcttatgtcatactcggaggtgcttattgtatactnggaggccatgaggagggtagtttgcttttgatatgatactacatga

SEQ ID NO: 267155 - DNA, 546 bp, Zea mays
tcttccacgcggccccccacgcgtccggcgaacagagcactgaagcagagcgagcgagctgtccggccaaaccctcacggccgcctccacaatgccgcgccatctcgcgctgctcctgcccctgctcctgctggcctcgccggcggccacgcgcctggcgtccgccgcctgcgcgggcgagaagttcccggcggggcgtgcgtacgcgtcgtgcgaggacctgccgaagctgggcgcgtcgctgcactggacgtacgacgcgtccaagagctccctgtcggtggcgttcgtggcggcgcccgcggcggcgggcggatgggtggcgtggggcctgaaccctacgggcgagggcatggccggcgcgcaggcgctggtggcgctggcgggggccggggccgcggcgcccgccgtgcggacgtacaacatcacggggtacgtcccgctgggcaaggcctccacgccgctggacttcccggcgaccgacctcgccgcggacgccgcgggcggcaagatccgggtgtacggcaagctgcagctgcgcaaggg

SEQ ID NO: 267156 - DNA, 954 bp, Zea mays
gagaagatggatgctcccagcagggaaagtgtaggaagaacattcctagatctaaacgagcttgcacctgggggtggctttgatgatggcccaagcttgacagtgagagatgacatggacaacatctagggaataaagttttgttttgatacttttcgggtgctgttggccagttttctgacttccaggcaagggcagatccatgggcctgatggcctgtgatgaatggtgcaactatggtttggcggtgtgagcttatggttatggctgcttcactgatttgcagcagcaggacaggcgatgttccacttgaagcgactttgagcttctccggtgcttatgttatacgtggagaccatgaggaggtagttttatgtatactacatgaaggtcgcaatcgatcatagctgtattgcggccaggctgctgctgcgttgcggccggtctctaggatataaatttattgcctccatttatttagtcttaggcattgtgatgtcaatgagaacatggagggaaacctgtacaccgagtgcggtccgtcggcattcgcccgaccttttccacttgtagattgtaggttttttaaagtccgggcgggattagttctgtatctatacctgacagtctgtttttttttgtcacacctgtgtagctgacattgagcttgtccctgaatgcacaccggcaatgcctctcgttcgctctatatggagaagatcctgcatgtattcagctgatgttgtagcctatggacatgtccattactcagagtggctggcctggtgattgctaatttgatgtatggtttataaaaccaaattcctgtgtgcgtattggttagttgcagaactttgcaaagataaataatttgggggtgttctgttccattaaacattgcaaaattatgtgaaatgtttggtgaaaaaaaaaaaaaaaaaaaaaaaaaaagaa

SEQ ID NO: 267157 - DNA, 155 bp, Zea mays
tagcgcccttttttttactgaattagtggcctgaaagttccgcttgttgtttgatgaaacattatggtaccccacttgtatgctgcatcccacaatggattttatgatgtggaccccgaatgttttgcttatacaatgtttgctatgcatgaaaa

SEQ ID NO: 267158 - DNA, 888 bp, Zea mays
ttcattcgtccgcccacgcgtccggtgcctgaacttgtgtggatgcgtgaaggctgttactgacagagctttgcaggctattgctcagaactgtgggcagctgcagtctttgaacctaggctggtgtgatgatgttacagataagggagtgaccagcttagcgtcaggatgccctgatctcagagccgtagacttgtgcggttgtgttcttataacagatgagagtgtggttgctcttgccaacggatgtccgcacctgcgctcgctgggcctctacttctgccagaacatcacggaccgcgccatgtactccctcgcaaacagccgcgtgaagagcaagcgtgggaggtgggatgcagtgaaagacgggctcgcgaacctcaacatcagccagtgcaccgccctgacgcccccggcggtgcaggccgtctgcgactccttcccggcgctgcacacctgccccgagaggcactccctcatcatcagtggctgcctcagcctcacgtcagtccactgcgcctgcgccctccacccacaccgtgccgggagagccctgatggccaaccatgcgtactaataaacatgttggtggctttgcgctgatagttctcgcgaatggggacgcatgcctggggggtgatggcgtcgtccaggtgtagaggaagctccctgtgtacataaactcgaaacttggcggtgtgataaggcactgctgtggtaggactttgtgtgataatcatggagtggcgaatttctagagaatggcatgtactccagtgctacctggacattgaccagaaaaaatgtggtatctagttgccttctgtgtaagggcggacgtgttgggatgttcatgcattttcattaatctgataccttaatctgcct

SEQ ID NO: 267159 - DNA, 1087 bp, Zea mays
cccacgcgtccgtccacgcgtccgcccacgcgtccgatggatgacaaagtttgtgggctgatatcggcttatcagactggcactatagaaatgaggtctgggccagatctggctattgtcgctgagacctctttgatgtcattattgcgatggagttacaagacaggcatggaaaaatccacaagctcctcaaatggacaagttactttggtaaatggatctgaatttgcgattatctctcttatggcctcagagaatgacttgaggattccagaatctctgccatgccttcatgacaaagtacttgcagcagctgcggaagcagctatgagtttctcaactgatcagagaagaaagcagaatccagcagcagggattattgggggctccattaaaggaatgaatggcaaggctgaagataatgcataaatgagagaaagtttgacattgcgagctccaagcgaacagttggagtcaattttctcgaaagaaccatttgctgaaccttcaatacccgaccttgatgatccgatggaagaactgtcaatcgatgacatagagattgacgatgaagtagcagtagccctggcacaagcagcatcgtccacatcccaagggaataagagaacagcagtggaggaggagagagcgaactgttttgaagggtcaaacagtgcggataaaccgagaatgagaacgcagcaggagattctaaccaaatataggtttggcggggacgccgccgccgcagctgctcatgcgaaggataagctgatgcagaggcaggagaaactggagagaattagccaacaaaccgcggagcttcagaatggagcggagaattttgcttccctggcgcaggagctcgcgaaaacaatggagaacaagaagtggtggaagctataaactgggtttgtttgtacgtatgtgtgttgttggatgacacccgtcgttgcgaattggggcacataccagcattaccattttttgtgtccgtattaaacactttggatattctttttgtgttttggtcatgcacgtgtaaagatccaacacacagaatgaatggccccctcttctcctggct

SEQ ID NO: 267160 - DNA, 1529 bp, Zea mays
ccattcgtgactcgtggcctcgtggggtggggttgcagaaaccagcccttttggtcctgtcagctactacccactggccactgcactagccgtctgcggaccgagtgttcctttctagccttcacttctcagcacggcagccttcgacccccgactgcagccgccagccgcgccatggagcaagccgccatgccgcaggttccccgcgtcaagctcggcatccaggggcttgaggtgtcgaagctggggttcgggtgcatggggctcacgggcacctacaacgcgccgctcggcgacgaggccgtggccgccgtcgtcgcgcacgccttccgccgcgggatcaccttcttcgacacctccgatgcctacgggccccgcaccaacgagaccctcctggggaaggcgctcaagcagctgccgagggagcaggtgcaggtggccaccaagttcgggataggtcagggcgccgctggcatgaccgtgtgcggcacgcccgagtacgtacgcgcctgctgcgaggccagcctgcgccgcctcgacgccggctacatcgacctctactaccagcaccgcgtcgacaccaccgtccccatcgaggatacgattggtgagctcaagaagttggtggaggaggggaaggtcaagtacatcggcttgtcagaggccagcccagacacaatccgccgtgcgcacgccgtgcatcccatcaccgccgtgcagatggagtggtcgctctggtcccgagacatcgagcccgagatcgtgccactctgcagagaattggggattggaattgtggcttacagtccaattggccgtggattttttggtggaagaggagtgatacagcaagtttcttctgaatctagtctgcaaaggcatccaagatttacaacagaaagcttggagaagaacaagcagatttacctgaaaatagaagatttggcgaagaagtaccagtgcagcccagctcagctagctctagcctgggttctgcatcaaggggatgatgtggttcctataccagggacaaccaaaaccaagaacctagatgccaacgttgactccttgaaggtgaagctcacagctgaggacctgaaggaaattggcagccagatacgtgcagaagatgtggctggtggaagacaattcacttcatttgcacataccacctggaagtacgctgatacgccaaagaagcagagctaaaaaatacttgaaagcaacaatgatgatgcgattggtatggccctctccctgcagatgccctcaggaacattgccgatgcccctttgtgaacagcctcttctagtaaataataatgtatggagaagaacaatgaagggcccagtcttgttggaagtacgaataatgtacagttacaggaatgtgtgctaccatatatttcgtcgcatcagtttgagttgtggttgtgtgaacctaccatatatttcctcgccaaaggattagggggactccccatcttcaaaaaaacccaaaataaaaaaaaaaaaaaaaaaaaaataaat

SEQ ID NO: 267161 - DNA, 760 bp, Zea mays
cccacgcgtccgatccatcgttcgcagttcagttcacacttcacaggcgagcagcgaccatggatacccaagcacgtccggttcctccccgcgtcaagctcggcatccagggattcgaggtgtccaagctggggttcgggtgcatggggctgacgggcgcgtacaactccccgctggacgacgaggccggcatcgccgtcatcgcgcacgctttcagccgcggagtcaccttgttcgacacctccgacgtatacgggcccctcaccaacgaaatcctcctcggcaaggcgctgaagcagctgccgcgggagcaggtgcaggtggccaccaagttcgggatacggcatgacgagagcggcacgcggaccgtgtgcggccggccggagtacgttcgcgcctgctgcgaggccagcctgcgccgcctcggcatcgactgcatcgacctctactaccagcaccgcattgacaccacaactcccatcgaggagacgattggcgagctcaagaagctggtggaggagggtaaggtcaagtacatcggattgtcagaggcgagcccggacaccatcaggcgtgcacatgctgtgcacccgatcaccgcggtgcagatggagtggtctctctggtctcgcgacattgagcccgaaattgtgccgctctgcagagaattgggcattggaattgtaccatacagtcctcttggccgtgggttttttggtggaagaggagtgaaagaacaagtgtctgctgaatctaatct

SEQ ID NO: 267162 - DNA, 438 bp, Zea mays
gatttggccaagaagtaccagtgcagcccagctcagctagctctagcctgggttctgcgtcaaggggatgatgtggttcctataccagggacaacaaaaacgaagaacctagatgccaacgttgactccttgaaggtgaagctcacagctgaggacctgaaggaaattggcagccagatacgtgcagaagatgtggctggtggaagacaatacaattcctatgcacatacctcctggaagtacgcagatacaccaaaaaagtgaagttctggtcctggaaaccttgtagcaatcacaggcgtatgcaaatgttgaactatttccctgcatttgagccggaatcgtacgatgatgcatcttgtgaacatgcggcactaataaatcgagacgaagaataatgtgttttccatcaaaaaaaaaaaaaaaaatcaaggaaaa

SEQ ID NO: 267163 - DNA, 1204 bp, Zea mays
cggacgcgtgggcggacgcgtgggcggacgcgtggcggacggaatatctcgccgttcccatggacatcgacctcttccccgacatcgaccttgacgccctcctcgcctccttctccggcgaccccgccgccgtctccggcctcatcatcccgtccccgcctccgccggcgccggcgacggcgcacgatgcggaggcggggtcgccggagtcggtgacctcccggacgaacccgctcggggaggtggcgctctcggagatcgagaggctcctgatgcaggagggggaggcggaactgggcggggaggtcgatgggatcagcgtggaccagttcttcgacgcgctgtacgacggcgaggaggcgaaaggtgagcgggaggcgggggcaagcgcggatgtggactccggcagggacgatgtgctggaagtcgtgacgccagaggcggggacggtggaggtggatggcgatgatcccatcagcaagaagaagatgaggcaaatgaggaacagagattccgcgatgaaatccagggagaggaagaagtcgtacataaaggacttggagacaaagagcaagcacttggaggcagagtgccgtcgcctcagctacgcacttcagtgctacgcagctgagaacatggcactgcgccagagcttgctgaaggataggcctcttggtgctcccacagccacgcaggagtctgccgtactcacggaaaccctgccgctggtttccctgctttggctggtgagcatcgtctgcctgttcctgatgcccgttctgcccaaccgaagcccagctgctccaagcagcggcggaagagacctcgtgatggcagccggaaagacaagcactgagaccccagagatacgggaactcatcctccatggaaggcgttgcaagagcacgagggcgaagattaagctatgtattttaccatttcatgcaggagctgcttgctagtagttgctaggctttgagcctcttgcaagcttacctctatatgtagtgtacccgcaaatcttaccgtgctcgctatgcgcctgtcttgcagagaagcctgtcgatatccatggagtagtaccttttttttttgtttaatagctcctgtgctacccagaatatgtttaaaatctggattttgtgttattttctatttcttcaccttatctgtagttgctcctgatataaagttccttcgctcg

SEQ ID NO: 267164 - DNA, 812 bp, Zea mays
  unsure (1)..(812): unsure at all n locations
actcgcggatcgatccacgcctctatcccaatccacccgctaggtcgcaaactcaacacacagtcagcctcaaacctctttctcgtccgaatccagaacttccatccatggcagtgtcatcagggatggtcttctccgtccgcccgccggctccggcccggccctgcgcttgctctgccacggcgagggcgcgccccgtcggcgacggcgccaagtggtgggcgccgctgctggggtggtccgggcagccggactacatcgacgcgcggccggcgtccgaggacgagcctctgccgcgggggccggcctcggcctcggcctcggccaggcggttcggcgtgctgacggaggacaaggcgcggcggctgcgcgtgcagatgatggagacggagagcttccacgacgccatgtaccactccgccatcgcgtcccgcctcgcctccgccgcgcccgacgccaggccctagccgccggccagatcgccgtggcagcccgtgtctgtacatacgtgcgtgtgcttgaacctttccagcttccgtccgtccttgttaaaaaaaaatgaatagcgtggcgagtgccggtgttgctgcggaggagatggagatggagatgcagcagggggactagtattaggatggtgtccctccccacccgactcgatcggctgcgacccagtagagatatatgttcatgtagctgtgtaccattagttcttgcgctaaatgttatggactggtgatgttttcggtttgacttggtaaattaatacgaatgccccctcctcttgtactgcaacaaaaaanttagttaaa

SEQ ID NO: 267165 - DNA, 387 bp, Zea mays
ggggggctggctttatccttctagggattttcctgatactaacatcaacatcgtattggcgcatgatgacttcgaaagctatcattcaccttctgttctttgctttggtttttgccacatttacggcgcatggggcttggtgagagaagggttgctactatgaaaaagaaaggttcaagcgtgaatgcagcacaagctatgagcgtccaagtaagtcttgttgcgacactgtgcggtcggtcgacatggcctgtgttcgccgtaccatgacctcctatgaggaaacgggattaagtgttcaaaagatctcttttctttcaatggcttgcaacaactcattgcgagtcgtcgggaaaaaatacggagatattcctaaacgaccaatgt

SEQ ID NO: 267166 - DNA, 785 bp, Zea mays
gtcattcgtgctcgtacatatcctcctctgctgtccccctctggcgtttgcgggcccggtgctttctcttccttccggccgcggcaatggcgtcggggaacaacaacaagcagaggagcgaggaggagtggcgcgtcgtactctcccctgagcagttccgcatcctccgcctcaagggcaccgagttacccgggacaggagagtacaacaaattctacggcgacggggtttataactgcgctggctgcgggactcccctgtacaagtccgccacaaaatttgattctggctgcggctggcctgcattctttgaggggcttccaggagccataaaccgaacaccagatcctgatggtaggagggtagagatcacatgtgcagcctgcggtggccatctgggccatgtgttcaagggtgaaggcttcaagacacctactgatgagcgccactgcgtgaatagcgtctcgatcaagttcagtcctggctcctcctagatcatcttgagattctcgtgtcctggaactgtgggaagtacaccaaagcgacgaataagatttattgagcatgtgtgcgtgcgtgcattctgctactctggctgtgagatgaaactaatcataagcagctgttactctacgtgattcgtcatttacatcagctgttactctggcgtgattacacgaattttttgttcaaacggtgtgggactgtaagctccaagttaaaacgccttttcccaacaaaaaaaaaaaaaaaaaaaaaaaaaaaaaaaaaaaaaaaaaaaagga

SEQ ID NO: 267167 - DNA, 581 bp, Zea mays
  unsure (1)..(581): unsure at all n locations
cattcgtactcgtacatatcctcctctgctgtccccctctggcgtttgcggggccggtgctttctcttccttccggccgcggcaatggcgtcggggaacaacaacaaccagaggagcgaggaggagtggcgcgtcgtactctcccctgagcagttccgcatcctccgcctcaagggcaccgagttagtactctaccttctctcctctcttcccccccctaagcgactgccactgtgagtctgacgattcatatttggctgaggttgctgttgttcctctgatctacttcccgtgtccatggatcgattcaatccgatcggattctcttcgtatgtccgctgtctgatactagtggccgttgacttcgatgtaaggggccatggccactccttggttgaaattactgaaatttgaacccttcctggagctgccgacggaggaattctagctcgtgttcaagttatcgttcgtctagttcatcgaggattgcacaagtccccacctcaaactattccagtttngggtttgttttgcaagaccacttcttcaggctgacttctgatataaaatgcatctagaga

SEQ ID NO: 267168 - DNA, 595 bp, Zea mays
acgtcgcacgcacacgtccgtaatcggctcgagccaaattctacggtgacggggtttataactgcgctggctgcgggactcccctgtacaagtccgccacaaaatttgattctggctgcggctggcctgcattctttgaggggcttccaggagccataaaccgaacaccagatcctgatggtaggagggtagagatcacatgtgcagcctgcggtggccatttgggccatgtgttcaagggtgaaggcttcaagacacctactgatgagcgccactgcgtgaatagcgtctcgatcaagttcagtcctggctccccctagatcatcttgagattctcgtgtcatggaactgcgggaagtacgacgaataagatttattgagcatgtgtgcgtgcctgcattctgctactctggctgtgagatgaatctattatcataagcagctgttactctacgtgattcgtcattcacatcagctgttactctggcgtgattacacgaattttttgttcagacggtgtgggactgttgttgaataattagacaatttccaagaaaaaaaataaaaaagggcggccgctcatgaggagtcaagc

SEQ ID NO: 267169 - DNA, 456 bp, Zea mays
cggacgcgtgggcggacgcgtgggctcaattcacgcatccgatttcgcttgcgccgcacgcgatgcttccttagattttttgtctttagcgtaataataattattaaaattaaaatctcgccaaacgtgcatttgtggagtggagacactagcagatgacctcattccaaatcaaacacttcggagcacaatcagcaatatgttgggaacacagacaagcagtggtggtagtggtacaacaagacacagaagttcgtcaggcagcaaccctcacccaaaaatacagagccacactgcttctgctgcgtcagcaggggaggtgaagcagtctatagaccatcagctaccagcggtatctgcacctgattatgtgctccagggtgccacaggaggtgacctggtgaaccagcctctagagaaattagcagccactgctgaaatcctagcaaatatgaa

SEQ ID NO: 267170 - DNA, 504 bp, Zea mays
cccatgggaaccctctaggctgctgcatggacacccaagggggctctatgcacccgctccacgcggcgttcttccggccgatgaaccctcagcatcctttcctcaacggtgctaacgacgcggcgtttcaggtcgggactttctggcaagacgaccttcaaagcgtggttcacatggacgtcggccaaagccaggagatcgctcccacctcttccaacagctacaacggttcattgcagacagtccacatgaaaatggagctttgaggcatggccggggaaaaagaaagaaagaaaaccccagtccgaagctcgacgccgtcgtcccccctgtacatacggagaagagaggacacagctcgcaccggaagcagcgggctcttggggggtccaatccaacctaacgacgttggcccctagcagtgtttcagcctctaattttccccacccccgcccaatggtgtgacgattctttctttgaacaagatgcggaagaccgccgcgc

SEQ ID NO: 267171 - DNA, 1892 bp, Zea mays
caatgaacctacagcagccgctctgtcttatggaatgaacaacaaggaaggcttgatagcggtatttgatcttgcaggagacagctgaatcttaccttggcaagtctatctcaaaggcagtgattactgggccagcttttttcaatgacgcttcaccgtcaggccacaaaggatgcaggccgcattgctggccttgatgttgaaaggatcatcaatgaacctacagcagccgctctgtcttatggaatgaacaacaaggaaggcttgatagcgggatttgatcttggaggaggaacttttgatatctctattctggagatctcaaatggagtttttgaggtcaaagcaacaaatggtgatactttcttgggtggtgaagattttgataacacactactggagttcttggtgagtgatttcaagaaaaccgagggcattgatctgtcaaaggatagattggccctgcaaaggcttcgtgaagctgctgaaaaggcaaaggttgaactttcgtcgacttctcagacagaaatcaatctgccattcataacagctgatgcttcaggggcaaaacatttgaacatcacactgacaaggtcaaaatttgaatctcttgtacacaatctgattgagagaactagagatccatgcaagaactgtttgaaggatgccggaatatctactaaagaggtggatgaagtacttcttgttggtggaatgactagggttccaaaggtgcaggaggtagtctctgaaatctttggaaagagcccaagcaaaggagtcaacccagatgaagctgtggccatgggtgctgccattcagggtggcattctccgtggagatgttaaggagcttcttcttcttgatgttactcccctgtcactaggtattgagacactcggtggtatcttcaccagattgatcaacagaaacactacaatccccacaaagaaaagtcaggtgttctcaactgctgctgacaaccagacccaagtgggtatccgggtgttgcaaggtgagcgtgaaatggcagcagacaacaagcttcttggtgaatttgacctcgtgggcattccacctgccccaagaggcttgcctcagattgaggttacattcgacatcgatgccaatggaatcgtgactgtctcagccaaagataaggctaccgggaaggagcagaacatcaccatacgatcctcgggtgggctgtcggaggctgacatccagaagatggtgcaagaagctgagctgcatgcccagaaggaccaggagcggaaagccctcattgacatcaggaacaatgccgacaccactatctacagcatcgagaagagtcttggagagtacagggacaagatcccggcagaggttgcatctgagatcgaggcagccatcgctgacctccgccaggagatggcctcggatgacatcgagaagatcaaggccaagcttgaggctgccaacaaggctgtctcgaagattggacagcacatgtctggtggtggctctggcggctcgcagtcaggatctggacctcagggtggcggcgaccaggcgccggaggcagagtatgaggaggttaaaaagtgaggctgcgggagttcaagggaattgtagcggcttgtttagaagtagctcgttttttttgggaacgcagatagtcagatgtctcagatgaggtgtaacctgtgttgcaataatctatgaacttacccctcttgttttctcctgcagtgaaacaggtcacacgacattgtcatggcttttattgcatatgaagccttgttctgcccgatgtactcgcacagcgaaaaccatcggcgagttctgttaatgagttgaagtatatttgttcctgtgttttgcctattggtgatattaagggtggcccc

SEQ ID NO: 267172 - DNA, 741 bp, Zea mays
cggacgcgtgcccgttccgaccttgcccctgcggtctcccgagtcccgaagcatccccttccaaaaccctcgccgcgccgcagccacccttgcttccgcacgctatcgcccgggaccagccatctatggcggcgtccctgctcctccgcgccgtgcgccgaagggagcttgcgtcccctctcggatccctgggtgccagcatacagtcaacatgtgttgccaacatatgctcaaaatggggaaggtttgcaagacctttcagtgcaaaagctgctggaaatgaggttattgggattgatttggggacaacgaactcatgtgtttctgttatggagggaaagaacccaaaagttattgagaatgctgaaggtgcgagaacaacaccatctgttgtcgcatttactcagaagggtgaaagacttgttggtactccagccaagcgccaggcagtaaccaatccccagaatactttctttggaacaaagaggatgattgggcgacgctttgatgatccacagacacagaaagagatgaagatggtgccatacacaatcgtgaaggctccaaatggtgatgcttgggttcaaacaacagatggcaagcagtactcaccgagtcaggtcggtgcatttgtgctgaccaagatgaaggagacagctgaatcttaccttggcaagtctatctcaaaggcagtgattactgtcccagcttatttcaatgacgctcacggtcaggccacaa

SEQ ID NO: 267173 - DNA, 563 bp, Zea mays
ccggtctggaattcccgggccgacgcacgcgtccggcaggaagccgagctccacgcccaggaggctcaggtacgggaagccctcattggggtcagtggacactgcggacaccgcgtatctacagcatcgagaacagtcttggagagtacagggacaagatcccggcagaggttgcatctgagatcgaggcagccatcgctgacctccgccaggagataggcctcggatgacatcgagaagatcaaggccaagcttgaggctgccaacaaggctgtctcgaagattggtcagcacatgtcaggtggtggctctggcgactcacagtcaggatctggacctcagggtggcggtgaccaggcgccggaggcagagtatgaagaggttaaaaagtgaggctgcgggaagttcaagcgaaattgtagcggcctgtttagaagtagctccttttttttttgggaacgcagatagtcagatgtctcagatgaggtgtaacctgtgttgcaataatctatgaacttaccccggggggggggagtttttatatttttttattttttataaaa

SEQ ID NO: 267174 - DNA, 515 bp, Zea mays
  unsure (1)..(515): unsure at all n locations
cgagcagccagcgacgacaacccacgcgcacaccaaccaacaagccacaccggcccacaggccacagctcaccagctaggctagcaaccacctcgatcgcagaggcagaggccgccggaagctcagccgtgaattcggcaggaaggaaaggaaaaagtcttgggtggtttcaacaagagatagaagatggagaaggcagggcagcacgagcatgtgatcggcatccccgtgaacaacagggcgttcggtatcgaggagccggatttccccagcaatggccccgccaagaacgcagccgccggcgccgggggacggcgccgggtgaccggggacagggtcgcccaaggcctgaaagagcacgtgacgctgggcccgaagctgtacgagaccgtgaagggcaagctgtcgctgggggcgaggatcctgcgggcgggcggcgtggggaaggtgttccggcgctggttctcctcccccgtcngccggggcggctagcggctgctcanggcgtcgcaatg

SEQ ID NO: 267175 - DNA, 587 bp, Zea mays
gcgacgacaacccacgcgcacaccaaccaacaagccacaccggcccacaggccacagctcaccaggggggctagcaaccacctcgatcgcagaggcagaggccgccggaagctcagccgtgaattcggcaggaaggaaaggaaaaagtcttgggtggtttcaacgggagggtagaagatggagaaggcagggcagcacgagcatgtgatcggcatccccgtgaacaacagggcgttcggtatcgaggagccagatttccccagcaatggccccgccaagaacgcagccgccggcgccgggggacggcgccgggtgaccggggacagggtcgcccaaggcctgaaagagcacggtaagttcttctatctccgatccaaccaaaacattcgatgcttctaccgtgcatcctttgtctgtcatctttccagctgcccatccatccgtggattggcacctcctgtatctcgagagactgaactgaacgtgctcttaccgtgtttgcagtgacgctgggcccgaagctgtacgagaccgtgaagggcaagctgtcgctgggggcgaggatcctgcgggcgggcggcgtgggg

SEQ ID NO: 267176 - DNA, 894 bp, Zea mays
  unsure (1)..(894): unsure at all n locations
tatctcatccgtggattggcacctcctgtatctcgagagactgaactgaacgtgctcttaccgtgtttgcagtgacgctgggctccggttcggaccggttttcacgcctccgaaggccgggcaggcaggcagcacccgcggagacgcggagcctccactcctcgtatcgcttcctcctctggatctagccgacgccgccctcatcctgtcacccaccgacgtcgccgtcgccgtcgccacctatatcacccaccgcctctgaagaagaagacgcggatccgagggtagttaactgctgaagaagaagatccggtacggagaagacgcggagcagtacttctccgatctggatgttggtaaggttcatcctgatttgaacggcaagctcactgataacgagttcctgggaggaggaagctagacgatttctgttagaggaggaagaagaggatgatgaactcttcttagtacttgtccctgctattctctcggccatgcaagaagagaaaagagccatagtagcatctgctgttgaaccggtgcaacatgtaccaagagcgggcagcgagatcaatgttgctgggccaagtgtgggcagtgagactaatgttgatggactaatgttggatcaagaggcttgtgaagttcagtctccaccttctgttacgtcagtatatagaagtgggaaaaagcggaagaaaagtcaagttgcaagtgttctggatgactatttggagcacaagaagaagcaaacacagaagattatggaggtgttacttgagaagaagagtcgtgaagaggagtactctatcgagaggtgtctcgacacagttgatgttatggaggacttgacggatgangagaaggcccttgcagcanangtgttcaagaatg

SEQ ID NO: 267177 - DNA, 664 bp, Zea mays
  unsure (1)..(664): unsure at all n locations
atttgacagtggtagtacctattctgattttactgctcaaccataccaagctgttgtttctgcgctcaaaggtggtctcagcaaatcacttaaacaggtgtcagatcccactctgcctctgtgctggaaagggcagaaagcattcaaatctgtgtttgacgtcaagaatgaattcaagtcaatgtttctgagctttgccagtgccaagaatgccgccatggagatcccacctgaaaactacctcattgtcacaaaaaatggaaatgtgtgcctgggcattcttgatggaacggctgccaagctgagtttcaacgtaattggagacatcacgatgcaggatcagatggtgatctatgacaacgagaaatcgcagctgggatgggcgcgtggggcatgcactaggagcgccaagtctattctgtcttcctttccctgagctcagttctatgtacttctgatagagtttaagaaaatcactatatcaaacctcctcgcaatgcatgaatttcctaactgaagagggagggagagagagagagagaatgttcctgtttatgtagagatggagtccaaaatttgtgtgcctgatgagttcttccccatatgatattaactgaaatagtatatcaattgaatgtaaaaaaaaaaaaaaagggcggccgcn

SEQ ID NO: 267178 - DNA, 952 bp, Zea mays
gtcttctgtgttgtacctgtaccaccgtgacagttctactaacttgacgagacaaaaggggggaaagttctcctcctacgatcctacctccagtgatgtcagcaccaccgccggccggcggcggcgccgccatcaacgaggtcctcaccgacgacgagctccgcgcagtgctcaggcggctggggcccgaggcggagcgggacgcgttcgggctcgtgtgccgccgctggctccggatccagagctccgagcggcggcgcctgcgcgcgcgcgccggcccggacatgctgcgccgcctcgctgcacgcttccctggtgtcctggatctcgacctctctcagtcgccctcccgctctttctaccccggggtcatcgacgacgacctcaacgttatcgccagcagcttccgcaacctgcgtgtcctcgcgctgcagaactgcaaaggtatctctgatgtcggagttgccaaattgggagatggactggcatctctgcagccccttgatgcttctcgctgcataaagctgagtgacaaaggcttgaaggcggttgcactagggtgcaaaaaattgagtcagctgcaaatcatgggatgcaaattagccacagataatttattgactgctctatcaaagagctgcctgctattggtagaacttggagctgcgggatgtaacagcataacagatgctggtatatctgctctggctgatggctgtcatcacataaaatcactagacataagcaaatgcaacaaagttagtgatcctggagtctgtaagatcgctgaggtttcttcatcatgcttggtgtcaataaagctattggactgcagcaaggtgggagataagtccatctattcgttagctaagttttgcagtaacctagagactcttgtcattggtggatgtcggaacattagcgatggctccatacaagcacttgctcttgc

SEQ ID NO: 267179 - DNA, 1675 bp, Zea mays
  unsure (1)..(1675): unsure at all n locations
gccgtgcccgccctgccctccaccttctcccggcgcaataaacaagtcgagtcgaggcgaggcggcggcggcggcggcggcggcattgccgagatttccgtgattcttgcgcttgttagttgtgctgtgtatagttgggccggccggccggccggccgtggttccgtacagttccttctctgttggagtagtcggcggcgatgggtatcctcgcgctcatcaccggcaaggcgggcgccagcgggttcgggtcggcgtccacggcggagcatgtcaccgacggcgccgacgccagccgcctcaccgtcgctatcacaggaggagctagtggcattggtctggagacatcaagagtcttcgccctgagaggagcccatgtggtcatcgctgctagaaacacagaggctgcatcagaagcaagaaagaccatcatggagaagaacccaacggcacgtattgatgttctgaagctagacctcagctccctcaagtctgtcagggcttttgtggaccagttcaactcgatgaaactccctctgaacatcctgataaataatgcaggcgtcatgttctgcccttttcaactgtctaaagacggggtcgagatgcagttcgcgacaaatcatctaggacactttctgcttaccaatctcctccttgataccatgaaggccactgccaagtctacgggcattgagggccgcattgtgaacttgtcatcagtcgcccaccaccatacgtatccgaagggaattgacttcgataacctcaacgatgagaaaatatacaacgacaaaatggcttatggacagtctaagctggcgaacttgctgcatgcgaaggagctctctagaaggctgaaggaagaaggagcaaacatcacagttaacagtgtccatcctggattgatcatgaccaatttgatgaggcactcctttgttctcatgaaggtgcttcaggttgccacttacatactgtggaagaatgtaccccagggagctgcgactacttgctacgtaggactgagccctcaactcaagggagtgacaggaaagtactttgctgactgcaacgtggagaagacgagcaaactggcgaggagcgaggagttggcgaagcagctctgggacttcagcgaggagctgatcaagtctgcgaagtgagagccgaaagagctggatcagagaaaatgttgtggtcctgcttggcatctagtggtacaagtgatgactgattagtatatagcacggaggaggaacctgggcgatggctggacctcatggtgttcaggaataaaatctgcttgctttcgtacattaattagtccggtgtggcaaacatcaatttgtagtgctgtcaatatctgttcaatatacgtgcagctcagttctgacttgnaaaaaaaaaaaaaaaaaaaaaaaaaaaaaaaaaaaaaaaaaaaaaaaaaaaaaaaaaaaaaaaaaaaaaaaaaaaaaaaaaaaaaaaaaaaaaaaaaaaaaaaaaaaaaaggggggggccgttttaaaaaatcaaagtttacttacgcgtgaatgcaaagaaaaaatttttttataggggcaccaaaattaaattaactggccggggtttaaaaacgtgggaactggaaaaaccttggcgttaccaaaataaatcgctttgaagaaaatcccctttt

SEQ ID NO: 267180 - DNA, 544 bp, Zea mays
cttcaggttgccacttacatactgtggaagaatgtaccccagggagctgcaactacttgctacgtaggactgagccctcaactcaagggagtgacaggaaagtagtttgctgactgcaacgtggagaagacgagcaaactggcgaggtgcgaggtgttggcgaagcacctctgggacttcagcgaggagctgatcaagtctgcgaaatgagagccgaaaatgttgtggtcctgcttggcatctagtggcacacgtgatgactgattagtatatagcacggtggaacctgggcgatggctggacctcatggtgttcaggaataaaatctgcttgctttcggacattcattactccggcgtggcaaacatgaattggtagagctggcactatctgctaatatacacacagctcagatgtgtcttgcatgaagcattgtctttatatataagaaggcatttggtcatatttgagcaacctcagtcgtagaatgataaatgattttcatcagcgaaaagtcgatcaatatattttgaccattaatttt

SEQ ID NO: 267181 - DNA, 362 bp, Zea mays
aaataacctcacccgctctccctccgccctcttcccatgcaccgcccgctgccgtgcccgccctgccgcgcaataaacaagtcgagtcgagtcgaggcggcggcggcggcggcggcggcattgccgagatttccgtgattctatcgcttgttggttgtgctgtgtatagtatatactacgagtctacgacctggttgtctcaactcatcctttcgtttctcttattggctgctgcgcttgggagttcgcttcagttgggccggccgggggtggttccgtacttccgttcagttccttctctgttggagtagtcggcggcgatgggtatcctcgcgctcatcaccggcaaggcgggcgccagc

SEQ ID NO: 267182 - DNA, 597 bp, Zea mays
ggggcttggtgtgtctggccaaggcatgcttgatccaattccagttaaggtactacccccgaagcaatcacttgatcatgcacttgcttcaagcgaggctgacggaggcagtgggaaaaagcgcagtaggggtgggaaaaggaagcgtgagaagaagtttgcagaacaggccatggctgctaaagctgaagaagctgagagatctgtctttaattttatcaacagccatctagtaagccaagaaagttcgaccaccaaagttagaaagggttcatcagttgagaccaatggactcgctaagaaggaagacagaagatccttggttgcatacggtgaggaagtgaaggagctgaggattcgagttgagaaactggaagagatgaagaaccgtaactgcaaagacaaggcattctttgaagcagcttcaaggaaactggaagagactcggaaggcactcgctgatgctgaagctacccacgcttcagcgacgagtgcagttactagaaaggagaaagagaagaaatggttgaaattctgatgtcaatttcatgtgtgccaacgcttctctgtctgtgttctgacaagaacgtggcatga

SEQ ID NO: 267183 - DNA, 1493 bp, Zea mays
catctggaggccaatagaatcgctcgcttgcgttatcttgttcgcctcgtcagttgttgtttcctcccttcccatcccccactgctcagcagtcagtcagcactcgccacccacacgcctccgctccgcccacggttccactccaactctccgatctccaggaatccgcggctgaggcgccggcgatggcggctcccatggtcgacgccgaatacctgcgccaggtcgacagggcgcgccgccacctccgcgccctcatctccaacaagggatgcgccccgatcatgctccgcctcgcatggcatgatgctggaacttatgacctgaagacaaaaactggtggtgcaaatggttcgattagatatgaagaagagtacactcatggttcaaatgctggtttaaagattgctatcgatctccttgagcctatcaaagcaaagaatccaaagataacatatgcagacctgtatcagcttgctggagtggttgcagtcgaagtgactggggggccaactgttgaatttattcctggcagacgtgattcgtcggtgtgcccccgtgaagggcgtctgccagatgctaagaaaggtgcaccacatctgagggacatcttttatcggatgggcttatcggacaaagatattgtagctctatcagggggacatactctgggaagggctcaccctgagaggtctggattcgatggtgcctggacaaaggagcctcttaagtttgataactcatactttcttgagctgttgaatgaggaatctgagggacttttaaagctcccaactgacaaggcactgttatcagatcctgaatttaggcgctatgtggagctctatgcaaaggatgaagatgcgttcttcaaagattatgctgaatcacacaagaaactctctgagcttggcttcacgcctcgcagcacagcaccatccaaatcagatcttccaaccgccgccgtgcttgcacagagtgcctttggggtagcagttgctgcagccgtagttatcgctggctacttgtacgaggcttccaagaaggccaagtagagggcgaagttcttctccacatggctttgctttagtaagtctgaagatcgaataacaggaccatatctgaagatcgaataacggatcatataaatgaggtactcggaaaatgttctgaaatccttacgaacagaacgttgccttcatgtttacactgtactcatgagtcacagtgatatggagatggcatagcctactattggaagtatatgcattctgtgtaatctatgcatcggattgcagctggaacttccgtggaaattgacagtgatgtgtcgacataggaactgcgatttggttcaatgaccacgtagagggaatgtactggcgggatccttttatttatagcagatagtgttggtgagggaggcctcatgtcgcgttttcttgactgagcaagtacagccgactgctggctataaagatgcttccaacgtt

SEQ ID NO: 267184 - DNA, 1214 bp, Zea mays
gcctgccgcggcggcctctgcctccggcggcggggcggccgggtccgcggagtcgtacatcgggagcctcattagcctgacttcgaagagcgagatcaggtacgagggcgtcctttacaaaatcaacaccgaggagtccagcatcggcctgcgcaatgtgcggtcctttggaaccgaaggtcggaagaaagacggagtgcagattcctgctagcgacaaagtttacgagtatatcctcttccggggaactgatatcaaggatttgcaagttaagtcatcaccaccacagccgccaccaccacaagcagcttccctgcacaatgatcctgccataatacagtcacattattctcaacctgcatcaacgtcatcaagtttgccttcagctgggggtgcagttttaccagacttcagctcccaggcagttcaatatgggcttcagaggccaacctttcagagtaaccttcctctctaccaaccagggaatgctccgcggggctcttcagcggcacctccagcaggaaatgctccgtggggctcttcagcagaacctccagcaggaacgacactttcggttccctcaatgtactggcatggatactatgcgccttcaagtgggctgccacctcatttgcagccacctcctttgcttcatccaacaccaggattgtcggttccccagaatctccaatatccaggactaaatccttctttgccatctgggctgcaaaagctgtcagaactccaaccctcattgatgccacctattactagtcaaggttcttcatcaggtatcctgcctgctacaacagctcctgcttctgctacattattagctccagaaagctcaaagcctctgttgccgaacatgggatcgttgtttgctccacgtgcaacatctcttggtgcaacttttcctttaccaagccagccaactgccgtcgctgaaactagtgcaacagtgtcacagaacttaacttcatttggtagcagcaaggttcctgctcttccaggctcaacactggcataccaaaccgtatctcagtctgtttcttctactattgccccatctagctcagcccaagcggagatgcctgtgcctttgctggcaccatcaggtcaactattgcagaacacatcatccatcctttcatcatcgcattccatgcaggcaccattacagctggctagcaaagaagtcaagccaattgagc

SEQ ID NO: 267185 - DNA, 1339 bp, Zea mays
ttctacgcgtccgcccacgcgtccgggacgcagctgcacgcgtccaccaagccccccgacttcccgacccgaggccccgacctgcgcaccgacgggatccctacctatccggccgtcacccctccccctgcccctcccgagttggattgttcgcggaattggcggaggggcagccggatatgtcgtcgtcggttgggggcggcagcgcgggcggcggcggagtggacatggtcagcctgctggagaaggccaaggatttggaccagctaaagaaggaacaggacgaaatcgttgccgatatcaacaagattcacaagaagctcctcgcatccccagagatggttgataaaccagttgacaccattttgctcaagcttcgtggtttatatgcacgtgcaaaggagctctctgagaatgaaatcagtgcctcaaatgctttgattggattattagatggtttgttgcaatctggagcttcaactgcacaaaagaaaaagatagaagttggtgagcagaaaaagaagaggatcaagtctgatacagattctgcacgattttctgctgcatctatgaggaatcaacttgaccaagctgcaagccttaaaggagagcaggttgctgctagggtaaaatcagatgacgaaaaagatgagtggtttgtcgtgaaggtcatacatttcgataaggaaacaaaagagtatgaagtacttgatgaagaaccaggtgatgacgaagagagcactcaaaagaagtacaagttgcctatgtcttacattattccatttccgaagaaaggggatccttcgagtgccccggattttgggcagggtcgacaagttttagctgtttatcctggcacaacagcattatacagagctaccgtagcttctcatcgtaagaggaagtctgatgattatattctggagttcgatgacgatgaggaggacggtgctctgccgcagagagccgtgccgttctacagggtggttgccctgccggagggccacaggcagtagtgacatttgacgcagttctgcattcctagtgtaacatatagcgcaaggtagggtgtcttcagtgtgacaatgtggtggtcatatctacgcgaaacgagagagaaaacaaggacgtgcatgtagcacttacatgtggggtccttgtataaaagacgatgacgtttttttttcaatctgctagagcacgtctatgtaattgcaatccagttttaatctcttatattatactttagagagaaagggcatactgtaagggtctatttggcaacaatatttctcaaaatccacagttttataaaaaaaaaaaaaaaaatttattaaaa

SEQ ID NO: 267186 - DNA, 373 bp, Zea mays
cgaccattcgtgtacccgtgatactgggagttcaagacctccgctcatgtccgccggagcggcgctctcagcccggccgcgaccgccaactcctgccgccatcatccattcactcttcgtctccctatccgacccgtccgcaatccgcctcctgcccgccccgctcctcgtcttctcccaactccgccgcctcctgccgcccgacgccgccacccaactcctcctccacccaatcgcctcgctcctccacctccaccgctccgacatccgcataggcctccagcttcacgggctctccctgtccgccggcctctcctgctactcgcacctactgccccacctcctctccttctactcccaccacccgtcgctc

SEQ ID NO: 267187 - DNA, 544 bp, Zea mays
gaagctagggtcctctagagtctacctacttatctctctagccaacacacacataatactctccattccattccattccatctcaaaggatagaataatgggcggtctctccaccaagcttttcgtggtcctcctcctgctcgtttgttacaccgggacgcaaggcgggccggtgactatggtgtcggcgaggaagtgcgagtcgcagagcttccgcttcaagggaccttgctcgagggacgccaactgcgcaaacgtctgcctgaccgaaggtttcaccggcggcgtgtgcaagggcctacgccaccgctgcttctgcaccagggactgctagtactgcctcgcctcgtgtcctgcgtgtgcatatatagccgcagcggatcagtaaaacatgcatgcatgcgttaccaaatatttggcagtaccagcaagttaatgaattaaaatattaaataatatgtcatggaacaaagcctgttttgaacgttgtataaaaaaacaaaaaaaaaaaaaaaaaaaaaaaaaaaaaaaaaagggcggccgc

SEQ ID NO: 267188 - DNA, 656 bp, Zea mays
cggaattccggtcgaccacgctcgggcgccttttaccagctttcgtggtcactttcctgctccgttgctacaccgagacgcaagcacgtccggtgactatgggcgtcagcgaggaagtgcgagtcgcagagcttccgcttcaagggaccttgctcgagggacgccaactgcacaaacgtatgcctgacctaaggtttcacggacggtgcgtgcataggcctactccaccgctgcttctgcaccagggactgctagtactgcctcgtcgcgcctcgcctcggctcgtgtcctgcgtgtgcatagccgcagcggatcagtaaaacatgcatgcatgcgttaccgaatatttggcagtaccagcaagttaatggattaaataatatgtaatggaacaaagcctgttttgaacgtggaactgctgagtgctagcagcgctcgtgtttattggcataaaaaaaaaacattaaaaaatcaaatagaaataaaaaccaaaccataaaaaaacaaaaaaataaaaaaaaaaacaaaaaaaaaaaaaaaaaaaaagggcaaccaatataaaataatgcaaactaacaatacgggacaatccaacatatggatcttctttttggaggacctaaatttaaatgaaaggccctcattataaaataaaa

SEQ ID NO: 267189 - DNA, 643 bp, Zea mays
ctccattccatctcaaaggatagaataatgggcggtctctccaccaagcttttcgtggtcctcctcctgctcgtttgttacaccggtacgccatgatatataaatatacatgcagaaagagaacattgtgtagattcatactactactgctacgacagaaccattacacatgtttgtttgcgttttgcagggacgcaaggcgggccggtgactatggtgtcggcgaggaagtgcgagtcgcagagcttccgcttcaagggaccttgctcgagggacgccaactgcgcaaacgtctgcctgaccgaaggtttcaccggcggcgtgtgcaagggcctacgccaccgctgcttctgcaccagggactgctagtactgcctcgcctcgtgtcctgcgtgtgcatatatagccgcagcggatcagtaaaacatgcatgcatgcgttaccaaatatttggcagtaccagcaagttaatgaattaaaatattaaataatatgtcatggaacaaagcctgttttgaacgtcgacctgctgagtgcgagcagcgctcgagtttattcgcatatatgaactatatggcgcgtttggagtgcgtaaaaaaaaaaaaaaaaaaaacaagggcggccgccccggtgaattccgggt

SEQ ID NO: 267190 - DNA, 586 bp, Zea mays
cgcctgtacggctcgtcgggatcacctgggacgatttcaagatcgggttctgggagggtgcggtgccgcagctcccgctgtccgtgctcaactcggtgatcgcggtgtgcaagctctcgtcggatctgttccccgaacgggccgagctcttcccggcgcgggtgtcggtgagcgtcggcctcatgaacttcgtcggctgctggttcggcgccatgccgtgctgtcacggcgcgggcggattgtcggggcagtaccggttcggcggccggagcggcgcgtccgtggtgttcctggccatcggcaagctggcgctggggcttgtgttccgaaactcgttcgtgacgatcctcggccagttcccgatcgggatactgggcgtcatgctgctcttctccgggatcgagcttgccatggcgtcgcgcgacatgggtactaaggaggagtccttcgtcatgcttatctgcaccggagtctcgctcacgggctcgagcgtcgcgcttcggttcatctcggggattgttttgtacctgctgctgcgcctcagggacgtggactaccaagcactagccggccgctggggctctga

SEQ ID NO: 267191 - DNA, 1705 bp, Zea mays
attcaagtcatgtacccctgatactaggttccccaagggagtgggtagaggatgctggtggtgcatcatttgccaggctatcatcacctacaccaagacattcaagggcatctttcgattctttagtaccttttacacccagaaggcgcacatttgacagtcccaagagtcctggaaggcaattctccgatagccccagaagacaaactattgctgctgcagtatctttgtttggagctgatgatagatccaatcctagacttgatgaactcaataagaccatgcagtcactttgcatcatggctcataatgtatggataacatgggtgtccaccgaattatctcacattctttcatatgatatcagcaaagatgattcactatcctctgcaactcctttgaggggctgggaagtcactgtaattaaacaagaggaaacaactgagggtcccttggagatgcaaatagctcttccatcgatgccttcattgtacatcatatcctttctttatcaagcatgtttggagattcataaggttggagggcacatcctggacaggattattttgcacaattttgcatgggagctactgcagaaggttgtcaacatttatgaaaaatttctttcatgtgttgaatctgggaattctacggtttcagagaaaggaattctgcaaatactgctagacttgcgtttcgttggtgatgtcctatcaggaggtaaaagttcttccaccaacagtcctgaaatgcagacaaaacaggattttttgccaagcgccgtcaccaagacttccttcaggagaaaacagtcacaattacaggcagactcagctgtcatagagcctataaacaagttagtcaacaggctctcgcaaatactggatcctatagactgggccacgtatgaaccttacctgtgggagaatgagaagcaatcttacaagcgtcatgttgttctttttggttttttggtccaactgaatcacatgtacactggtactatgcaaaaattaccaacaaaatcaaatacagattcaaatatcatgagatgctctcaggttccaagattcaagtacctaccaatcagtgctccagctatatcatcaagatcacacaaaccatcactacagtctctgtctagcgagtccacatctaaaaatccttggaaatcctattcaaatggagatagatctactacaccagagtttgatgataatgcaagtcttgttggtgctgctccattgcttaagtcatttgttactcaggtggggaccaaatttggggagaacacatcgagatggggttccatgctctctgatggacaggttggtaagctaagtgacatccttcctggaccagcagctgggtttttctcttctttcacatctggagctcgatatgattcatagtaattgcaccatgacccttgatctttaacccttactatgcgtcgtatggaaacccacatgtgtcatcaagagaacagaagaactgttggcaggtgtagtatgcctttggaaatctgttgctcacagaatgattccacaatgctggtcccgtgttgcttggcatatcctgccgcgcttcttcacatcttattgtgacttgacagtgtcatggagaaattcaggaaattatgatggaaaagatgaagattattctgtatcggctgcccacaggtgaatgagtgggtagggaaatc

SEQ ID NO: 267192 - DNA, 2539 bp, Zea mays
ctgttgggcaacactttggggaattttacatcattaatcaccttggatctcagcaacaacaatattggagggaccataccagatggtctaccactcacaatgcagagatttttcctttcagctaaccaactaagtggtagccgtccgagtacagggtcttcccttacacttttgacaagcatgtcactcaatagcaatcatttgactggagcgataccagatgtattttcagcactcactggacttgcaaatttagatttttctgataacaatttgaccggtccgttgccaccttcaatgggaaatttgacatcattgactagcctacatattcagaacaatcaaatatctggaactcttaatgtgttgcaagatctccctttccaagatttgaacgttgaaaacaaccttttctctggtcccgtgcctgtgaaattactgaacttgccaaacttcaagaaggatgggaacccattcaatacaagcatagctccatctgcgcagcctcccatcgcgccaacaccattaccgtctatcccaccttcgtcagggcatgtcccctcaaaagaacctgcacattcttctagtgttccaggtggtagtacttcaggatcaggaaaacatactacactcaaattagttggatatattcttattggagcggtattagcagtaccccttgcgctaattgcaatgtactgtttatccaagtacaaagaaaaaaggtcgagagatgatatttatatgaaaaacaagataggaagggtacctcagaagcttggagagcctaaaatcaaggagccaccattaaaactcaagaatgatgctgagaaagctccgaatgttgtttctgatggaagagaggagcataagttaaaagtgccaacatcagaaacttcaaatgtggtttatgatccaagtccaagggatgggcagaacttagattcatcaccgacagctgtacctttggctgttacaatgaataaaaaagagcatgtgattgatatggaaaaggctgataattttgttgaggaccaactgcatcctccgcagccaatggcactgcggactgaaaaagtcactgtcaatcccagtgtacgtacaagaaggggaagagtaccttcagttgaaaaggtggaatcgacgactactgtcaagtccttttccattgcatcccttcaacaatataccaatagtttcagtgaggaaaatatcataagagacagcaggtttggtaaggtgtatctggcaaagcttcctgatggagagctactggaaattttgaagattgactcttctaactcaaaagtgccagtagatgcctttcttgagctagttgtgaggatttctgaactgaggcatcctaacatacttggtcttgttggatactgtgcggagtttgagcagcgattacttgtctatgagtactgtagcaagatgaccctacatgatgaacttcgtcatgtggatgactcaagcaagccattatcgtggaatgctcgcctccaagttgcttcagaggcagcaaaagcattgcaacatcttcatgacggttgccaaccaccagttgtacaccagaattttgaaccctctgttgttctgctcaacagcaccttagttgtgcatatttctgaatgtggccttgcatcactagcatcaaaatcagtttctcagttgtctggacacaccttattccattatgaagcacctgaagtgcatgaatctggatcagtaagcgatcgaagtgatgtttacagcttcggtgtagttatgttggagcttctaacaggacgtaaaccttatgacagttcgtatccacgagctgaacaacatctagtacgatgggccacttctcaactctatgatattgatgccataacgaagatggttgatccttccattcgaggacaatgttctgataaggcattatcccgttttgctgacattattagccgctgcattcagcatgaaccagaattcaggccaccaatgtctgaagttgtccaagacttaactcgcatggtaagtaatgtatcaagggcttccatgtaggctatcccttaaacaatggtaaaatgtggaggtccgtccttatagaaattagaattcgaggacgcacctcgttctggagcttcttgctagattcagttctctctggccatgattcaagatgcctttgacgaccattgatgcggtagtaggatattttggccaatgcaaaatgggtggaacacagtggcaggatgcagagactgcaccacgttttgtccactgccagtaatgctcctctgaatctctggtcaatttatagttcaaagctattgttgtaattctgtagtctgcactctgcacaatatatttcttagtgcccagttccagatcacgtggtgtgattatgcgtggttatctagaccatatgtaaataccaagaagttaaacaaatgtattatagcgtgcttgtttgaggaatgagaaagtacatcttcttactcctcactttattatttgatttgttaaatgaaatgagttggtccatcat

SEQ ID NO: 267193 - DNA, 361 bp, Zea mays
cgcggtgccgcctctcgtccatggcaaagggagcgggagctagctgacggccgcgcgcttgcgtcttgggtcctttaatttcgcagcattccgcgcgcttggtctctcggaggcgtggcggtagcctgtgccggtgtgcctcggagctccggcctccgggaataaacataggggtatcgccatgcaggcggcggccaagacgaggaatggctccttggaacaccccacccggacgtcctccctgggcggtaacaaggccggccggacggcgaggatggccgagtcgcccaccggcctcagccccaaggtcgaccgccgcacggcggtgagcgccgagagagagaaaaggaagccaccgacg

SEQ ID NO: 267194 - DNA, 873 bp, Zea mays
atcgagccgagaagatcaaggaatgaacgactcaaatggagctattctttttattgaaaagcctaaacctagtgatgctttctcaataaaggagagtatgtggacaaactgctttttgccagagatcccgatcagaataccattaatattttggaagccataaggaaaaatgatgtgagagcagcatatcgaattcttgcaatagctgaagtcagtgctaacatgacatatgatgctttgagcaaagatgtccatcatgttcagccagtgacagacaagatgttacttgatccgatttcttgtgagataattcaggactctggaaaaccagaaggctgtctacaaggttgttctttattgcactttgcatgcgaatacggttatcctataatggtggagcttcttctactttttggcgcggatattaatatgcaggatttccatggccgaacaccattgcatcattgtgtccaaaagaaaaatgatgagctcaccaagcatctgctgaagaggggtgcgagaacgacaattaaagatggcggaggtctgactgctctggagagaagaatggaacttggagcgataactgatgaagacttattcatactatttgtgaggtgatgttgcaaacttgcaatacaggcctttggcaacaaactgtttgtacctgatagcattgtattgtacccccctaatttagcttctggaaagaacatgatttctacccctgaagacaaatgccttttactgtaccccgatataacttatgggactgctgcgcttggctgtgttttaaaattccactggtcgacatgaccacatcgttggtttgtgcaccaattataggcaatcccagtattcgattctttgagt

SEQ ID NO: 267195 - DNA, 1539 bp, Zea mays
caacgcagcgtcgttttgcggtgtagtgggattgaagccaacttatggacgagtttctcgttttggtctcatggcctacgcttcatcgctggatgttgtgggatgctttggttcgtcggtttttgacactgcaaccatcttatctgttgttgctggccatgacaagatggacgcaaccagcagttcacaggttgttccagagtacgcatcggagttggtctccctagatttactagaatcgaaaccattaaatggtgtgagaattgggattatacaagaaactcttggagaaggtgttgccagtggagtcgtatcatcaatcaagggtgctgcttcacacctggagcagttgggatctgtggtggaagaggtttcactgccttcattttctcttggcttaccagcatattacatactagcctcatctgaagcttcttctaatctatcacgctatgatggtatcaggtatggaggacaggtctcggcggatgacttgaatgagctttatggagagtcccgggctaatggttttggtcatgaggtcaaaatgagaattttgatgggaacctatgctctttctgctgggtactatgatgcatactacaaacgagcacaacaggtcaggacactggttaagcaaagcttcaaagatgctttggaaagatacgacattctaatctcaccagctgcgccatcagcagcctacaagataggtgaaaagataaatgacccgttagccatgtatgcaggagatatcatgacggtgaatgttaatttggccgggcttcctgcattggttgtgccttgtggatttgttgaaggtggagctgcagggctcccagtgggactccagatgatgggatctccattctgtgaggggaatttgctgagagtaggccacatctttgagcagactctccagaatctcagctttgttccaccgttgttggcagagggccagttgtaacagataatccactcgctgctcaacaagcaattacctgagttacgggttttggggtggctttctgtcattcgcatgcggaggaaattggtagcacgcatgacgcatttagaaaatagaatgttttgctcgtggggtcgctgaataattgtgagagagcaacgacaccacatgtgatgtacaccagcaaccagcacattgcataccacacagcattttacatgccttcagaatgattgatgattttgtatcaatgctggttttctcaagtgtcaaattttgcatagaaaatattagtgtccctggcagaggtgagtattccagcacctataagcagttgtggccttgtggggatccgatgagaaacagaacagaaagcagagaaacaaaacagaaaggacccatttggacatagatattggatgttagaattgaatggatccaatacaaaatctgcatagtattgaaaatgtgttgcaatataaatctgttgtttggatgcaattaatacaaagggaataggctctgaattgtgaaaaaaaaaaaaaaaaggccggccgctcgcgatctagaac

SEQ ID NO: 267196 - DNA, 1814 bp, Zea mays
acgcgtcagagaagagcaacccaagtcgccgagagtgactcccacacgacccacctaccccgccgccgccgccgccgcatccccctcgattccgtctggcgatcgggggctcccagacacatcacagatacaccacgccaagccaaatcgagcaacgcctatcaccatattataatttcccctcattcatctcacagtcccaggcctcccctccctcctcccccgtcgccaactaacctccaacccccagccgatcgcgtcggagatgctgggcgtcgcgcggaggcggctcggatccggatgcgtgctcgcccagctggcgcaggccctccgccccgccgccgctcccgccaggacctactccgccgcggccaaggagataactgtacgggaagcattgaataccgcattagatgaagaaatgtcggcagacccttctgttttcttgatgggagaagaggttggcgagtaccaaggtgcatacaagatatccaagggtttgcttgacaagtatggcccggatagggttctcgatactccgatcactgaggcgggcttcactggcattggtgttggtgccgcttaccatggtcttcgacctattgtagagttcatgacatttaacttttcgatgcaggcaattgatcacataattaattcagctgccaagtcgaactacatgtctgctgggcagatatctgttcctattgtctttaggggtccaaatggtgctgctgctggagttggtgcccaacactcacagtgctatgcagcttggtatgcacatgttcccggattgaaagttctagctccatattctgcagaagatgctcgaggtttgctgaaagcagcaatcagggatccagatcctgttgtgttccttgaaaatgaacttctttatggtgaatcatttcctgtatctgctgaggtacttgattctagcttctgccttccgattggaaaggctaagatagagcgacaagggaaagatgtcactatcactgcattctccaaaatggtgggatatgcccttcaggccgctgatatactggccaaggaaggtatcagtgccgaggtaatcaatcttcgctcaattagaccgctggatagagctactattaatgcatctgtgaggaaaaccaatagattggtaaccgtagaagaaggcttccctcaacatgggattggtgcggaaatatgcatgtctgttgtagaggacagctttgagtatcttgatgcaccagtcgagaggattgctggagctgatgtgcccatgccgtacgctgccaaccttgagaggatggctgttccacaggtcgatgacatcgtccgggcagccaagcgtgcttgctacagggcagcagtaccgatggcagcaaccgcctagtccagcagaaccctgcatgttgcatttctttgtctaattttaatgtccgtgctgcagaaagacgtgtcgcataatggtgtgacgagtacccactgccgctgcaactcaactatagcatgagctgagtttttgtagagccaccgagaggtgttcagtactccagttccagttccgcttatcttcgccgccgcagccggaaggctgcgcgtgactctgcgtctgttttatggttcacgaatgattgcagatttgcagcagagcctctggagatgagaattttacttgtggcgagatgttgtgagtaacttgtattcagaagggggaactctcaagagatcctcaagtcgtgattccagttgcggctttcttgatagtaacgtactccctccgttttttagttgtcgctggatagtttaattttgcatta

SEQ ID NO: 267197 - DNA, 2063 bp, Zea mays
acttgaatttatttggtcaactgatggagaatatgccatcagaaaaagcacctcgaggataaagatttacagtaaaaatttccaggagaggatatgtataagaccatccttttcggttgaacggatatttggtggtgtgttacttgctatgtgtacaaatgacttcatttgcttctatgattgggcagaatgcagattgatacgtcgaatcgatgtcaatgtgaagaatctttactgggctgacagtggtgatttagtaacaattgcaagtgatacgtcattctacattttgaaatataatagggatgtagtttcatctcatttagacggagggggttcagctgctgaggaaggtgtggaagatgcctttgaactgcttcatgagatcaatgaacgtgtccggactgggctatgggttggcgattgttttatctacaacaattcttcgtggcggcttaattactgcgtaggaggagaggttacaaccttatttcacttggatcggccaatgtatttactaggatatcttgcaaaccaaagccgtgtctatcttattgataagcaatttaatgttgtggggtatactttactccttagtttgatcgagtataaaacacttgtaatgcgtggggattttgatcgtgcaaatgatgttttatcatctataccaaaggaacaatatgacagtgtggcacgtttcttggaatcacgtggaatgttggaggaagccctcgagatagcaactgacactaattacagatttgacctggctgtgcagcttggtcgacttgaaatagcgaaggtgattgctactgaggtgcaaagtgaatccaagtggaagcaattaggggagttagctatgtcaagtggaaagcttgagatggcagaggagtgtcttctacatgctatggacctcagtggtttgttgcttttgtattcttcccttggggatgctgaaggcattaacaaattggcatctgtagccaaagaacaaggaaagaacaatgttgctttcctttgtttcttcatgctaggaaagctggaagagtgtcttcaattgctaatagaaagcaatcgtattccggaagcagcattgatggcaagatcttatcttcctagcaaagtccctgagattgtagcattgtggaaaaaggatctccagaaggtaaactcaaaagcagcagagtcgctggctgatcctaatgagtacccaaacttatttgaagactggcagattgctctcaacgtagaagctgctgttgcctctaaaaggagtatctatccaccggccgaggagtacatgattcatgctgaaaggtcaaatgagagtttagtggaagcttttaaaaatatgcatgtacatgaagagatggtaccagatgataatgaagatactgttcacgaggttattgaggatggtggagtagaagagagtcaagaagatgctgttgaggttgatgcagaggatgacggagtagaagaaagtcaggatgaagctgttgaggttgaggctgaggattcaactgatggtgctgtccttgtgaatggaaacaatagtgaggaacagtgggtgctgactcctgagcaatagtggatcaacgggacagcaactttgcaagtggttaagtttgtaaaggttgctgactgctttctagagtacgaagtccattttctccagcagtattaagcatgagacgtgctctaggattggcttatccacatacgaagttggaccacaattaatcaaaacttcatcattgtgctcgataggaaattttgtgctttcttttttacatatagatcaggtctttaggtcccagaaaacttcatcaaaggtactcttgtttcaccgagatggaaatatgggatgtgattggtgatcggagtggtatttttacaaggtacatagagtagtagcttgtggaactgaggatgttttacatgtgatgtacatcggacttgggagctttgtatcaacagcatacgttttcaacagtctgtgtttagtttagtgactcatttgtgttgagctaaaaaaaaaaaaaaaaaaaaaaaaaggacga

SEQ ID NO: 267198 - DNA, 707 bp, Zea mays
  unsure (1)..(707): unsure at all n locations
actagttctagatcgcgatctagaactagtataagaaagatttgtggatgttgacccaacaggaaattgctactgaggtgcaaagtgaatccaagtgaaagtaattaggggagttagctatgtcaaatggaaagagagtggttgctaaaggataggaagctgaagctggatgaaggaagcaactacatgcaaccgatggcaataatgcattgcagggttgaggctcgttagaaatgtcaagttggtcccggacgtgggtatggtgcccgcaaggccgacagagctgagatcaagcactgagatcgtgccctcgtgcctacggctgcatgtcacacctggccagaggcataggctaccactactgttctaagaggacaacctgctcgatagctagcctaggatggccttcagttccagcaaggcttgtcggctcgtctcactgcagaacgctattgttggcgcctaattgaacgaagttgataccggtaggatcccatgaagcaacataagcagcagaagtctgacgaggaatgacatagatgcagtgctttcgtttgttgctactgaaaaaagatctgaaccaagtatttctgtaagtataccaacaagttagttgctactactttgtatattgatcttcgttggccgaatgtttgagtttatttcaaggcacaaactctttttttgaaaaaattnaaaaaagggca

SEQ ID NO: 267199 - DNA, 339 bp, Zea mays
caactgatggtgctgtccttgtgaatggagacaatagtgaggaacagtggggtatgataaatgaagtaccatcagcatacaagctgtagttgagcaagtgtacagtcctaaataccttatttgtcctggtcttacctcccagtgcacgatattaggatagctgggtgatatccttaagttgcccttgtctgtagcggtatggcagttcagggaggttggaccaacctaggattcataaattttatgtaaagcttagtgaaacgtttttaaaagtatcccttaagatttttttggtttaaaacgatcctgttcctgttactgagtgcctgctctcttgct

SEQ ID NO: 267200 - DNA, 530 bp, Zea mays
agatgctgttgaggtcgatgcagaggatgacttgtttttagaaagtcaagatgaagctgttgaggttgaggctgagggttcaagtgatggtgctgtccttgtgaatggaaacagtagcgaggaacagtgggtgctgactgagcaatagtggattaacggatcagcaacttcgcttcagcggtgtagtttgtaaaggttgctgactgctatagagtacatgatatccattttttccccagcggtattaatcaacacttccatctttgtgcccgataggaaattttgtgcttccctttctacatgtagatcaggccttaggcgtcgaagacattttatagcctaccatgaggtactcgtttcacggagatggtatatgatataggtgatcggagtgatattttacatggtgcatatagtagcttgtcgaactgagaatgttttacctgtgatgtacatcggacttggaagctttgtatcattgttacaccttttcaatggtggcgaataaatttacagcagatgttttcaat

SEQ ID NO: 267201 - DNA, 369 bp, Zea mays
cagcaatcgtattccggaagcagcattgatggcaagatcttatcttccaagcaaagtccctgagattgtagcattgtggaaaatgggccgccgcgtgggaaactcaaaagcagcagagtcgctggctgatcctcaatgagtacccacaacttatttgaagactggcagattgctctcaacgtagaagctgctgttgcctctaaaaggttttttggtccttttgtcttcatctataactgtatccttttgtattgtctctgattacctcttgcatcagatgatggcgctttaattgcgttcatctgttgtaaatcggaagtggtgtcaatattcgattatttccagactatcatcatcttttgttgatac

SEQ ID NO: 267202 - DNA, 708 bp, Zea mays
gcgccggctcgccttccaacgcctgcaaggcgaaacccctcaagggaaaggctagcagcaacgagcgcgcgtcgcccagccctactcagaggcagcatcagcaggagacggaggagctggagctggaaccggtgccgatggtcgtcgagcttgagcacggcgaggagtccgccggcagccacgaccaccaccaccaccacttgcagccgcaggggtcggaggaggacaccgacgtggaggccgcctcccacgtgagccaggccgaggccgagccgccggtcagcagccagagccaggcgctggtggcggaccaggagggagaggaggtcaggctggaactcacgctcggcttcgagccagtcgtcaggcagcagccgaggctgtcgtgctgcgactcgagcggcttgagcgccgcgtcgagcctcatcggcctgcggctgcagctgccagccgcctgagcagaggaggtcatctcatttcacaaggcacagtggcacaccaagtgcagttttgcaaccaatgcggtgtttgcttaaagaaaaggttttggacgccgagcagccgactatttcctaggttttgttttttcattttcttttctgggctgtaattgtaaaggctgatgaactgcacagttttagcgtcgtcataataggagttttgcaattccatatgagattataagctgttaaaaagtttgatcaaaaa

SEQ ID NO: 267203 - DNA, 939 bp, Zea mays
  unsure (1)..(939): unsure at all n locations
aaagataggaacactaaacgggacatcaggaaagagctcaaaacgcttgcaaaagaggagagaaaacgacagcagcttgcagtcactgatgtactgaaaaatgcagatgttgtgctgaccactctgactggtgcatcttcgaaaaagttaaacggaattacatttgatttggttgttattgatgaagctgcccaggcacttgaggtggcatgctggatagccttgttgaaagggccgagatgtattcttgctggagaccatcttcaacttcctccaacaattcaaagtgttgaggctgaaaagaaggggatgggaaagacactctttgtacgccttactgaagcttatggagaggaaatcacatccatgctcactgtgcagtacagaatgcacgagcacattatgagctggtcatctaaagaactttacaataataagatcaaagcacattctagtgttgctgggcatatgctctatgatctagaagaagtcactagatcttcttcaacagaaccaactattgtactcattgacactacagggtgtgatatggaagaaggtaaagatgaagaggagagcaccatgaatgagggcgaggcagcagtatccattgctcatgccaagttgcttgttgagagtggcgttaatgcttctgatattggaataattacgccttacgctgcacaggtaacctgcttgaagatgatgagaaacaaagatgccaagttgaaagatttagagatatctacagttgatgggtttcaaggccgggagaaagaagccatcatcatttctatggtccggtctaactcaaagaaagaggtggggttcttgagcgatcacaggcggatgaacgtggcggtgacgcgagccangangcagtgctgcctggtgtgcgacgtggagaccgtgagcagcgacaggttcctgaaacgcttg

SEQ ID NO: 267204 - DNA, 416 bp, Zea mays
agaaatgggtctatgtgggatatctcagagctcacactcatgatataagggcattaaccggggctgtgcctatctgtagagaagatgcattacctgaggaaaaggtggtgaagattcgccggcgtgaaaaacatgaattcagctaccacagatgggctcatcttggggttccgatgcttatatctggtggtgatgacgccaagctgtttgcatattcagcaagagagtttactcagttcgcacctcataacttctgccctgcacctcaacgccctttgataaagctggctagggatagcacagtcaatggagattctgtaatgcttgtccagtctccgaactgcttggatgttttacttgtgacagttcagaacaagctgacgactccaagtacatcatcatctagaggagatgct

SEQ ID NO: 267205 - DNA, 854 bp, Zea mays
caaagccgaacaccaccaacaaggcagcagccgaacaccaaacaaggcagcagccgccaccacttcattgcgcgaatcggagcccgtggccgtcgcctccgccttcgcgattcgccgccgttgcccacgagcgaggcttcctcctcttcgtcgccgccgtcgcaggaggggaaagaggataaactgccatggcgggcaggcttctcgcgaatctaatcgtcatgggcggaaccgtggttggcagggccatgctccaggcctaccgccaggccatcgtcaatgcaaacaaaactggagctgcccaagaagctataaatggtattagacgggctagcaaggccatgactgagcaagaagcccggcaaattcttggtatcagtgaaaattcgacgtgggaagagattgtccagaagtacgacacaatgtttgagaggaataacaaaaacggcagcttctatctccagtcaaaggttcatagagcgaaagaatgcctggaacctttatatcaaaagcctgatgtactgaactgagattttgcagacgccctagcttctgtttgaagcggtatgcctaattgatcgatttattagtgtgctcagagatcaacgttcagtttattgatcggtttgccaatgcgcccagagatcaacgttcagttttgagttatgtgttgggcgcatcaggttggttccttgtaatgccagaataatgtttaacaaacataccgaattttggctgattctcattggcaacgtctcagtcactggttttaattcatagtatgttatttcacactttgtcaaccaagcaacactttgaaactttttgtcgataataaatggttcggttcgttc

SEQ ID NO: 267206 - DNA, 612 bp, Zea mays
tgaaaatctcgtctgcatctgccagcgccgccacggtgaccaagacgctgctcgacaaggcgcggctctccgtctacctcatcgacgcggtgctcctgccaaggcagcagtctaacgacgaccagggacacactgcgcccgcccctgcgccggcctcctcgcctgcacatgcacctacacctgcccttgcgccggtctcgccgtcgcctgcccctgtaccggtctcgccgtcgccgtcgccgtcgcctgcacatgcacccacacccccgcttgcccctgctccggtgactgcacctgcgcccaggcgtcgcccagcgccttcgccagagcacactaccccagctccttcgccagacgcggacggccaaccgcctgcagatcagaagaacaacgcagcaagggacacggcatcttggactatcggcgcggcgctggcgatcgtgtgcctcttgtcgtgaagggtttaagctcttagatagattgacgccgattgggatccgtcatctcgccgccaataccagtgtacactgaagacaatgtttatgggcatgcattggccaaaataatattattctgcttccgccatgccccacgcgtccgcgcacgcgtggg

SEQ ID NO: 267207 - DNA, 354 bp, Zea mays
cccacgcgtccgcccacgcgtccgatcgtcgatgatgagcatcacgagtaggaagtcgggcttggtcctcatactcatcgtcgtcctcgtcgcctcgaaggatgaggcgagcattggggcggacgctgaatgcaacaaccggccagtcagctgctatataaagtgcctgcggccgggcgcctgcaacagctgctgcaagcagaatcacttcgtccgtggagagtgcattgggtgggactgctggtgctgcagagcctagctagccctgctctcatctgaccaatgcaaaggagatttacttgtaataataatcatcataataatcaatggtaccagcatgcatcgatcgatgga

SEQ ID NO: 267208 - DNA, 568 bp, Zea mays
cagtggggcatgtcgccggagatgatcgccgaccagcagtggcgcgcctccgccaaccgccgctgctgggccgaggagtgctcctccttcatcgacaccttcttcgaggagccctacggctcgtcggagacctcctcctcggacgaagacgaagcagaggacaaggaggaggagaccaagctgctggagcaactataactggtttcatccacatccaatccacccattcgcctcgtcctttgaaattctctccattggattggatcttataccatgtgggaagagcggagcagtgatgctgcattcagtcatcgctgatccctctcttattcgaaaacagtctgtagcatgttcataatagctattagctagaactagaaatgattcgagggcaatttcagaaaatgctaaagaaacatatgctgtatctcaaggttttagctctgacatgattctgtatgttcctagatataagaacgcatacattctctattcaaaataaaatgctcagaggagataaatttgtctccccaaccaaaaaggtataaaaaaatgtattttttttaat

SEQ ID NO: 267209 - DNA, 430 bp, Zea mays
gcgacagctgcggcggctgcaccaggtcgcggccacggctgtgccggtgcctggacgcggcgccccgcgggtgccacccggcctgcagggactgcgtcaagtccagcctcagcgccgacccgccggtgtaccagtgcatggaccgcgtccccgacttctgcctgcgccgctgcaccgcgcccgccgccgccgcgcggtgaccaggcgactggtttctgcttgctcttgagtcttgacccacccacccaccaccaaccgctccagcctttcgcccaccccaccgccggcgaatcgtgtcgtctgaactctgagccagctgtggattaggtttttttttggtgttgttgcgtggaaagagaggctgtgagagacgagggatgtgtaatctgatgagcgaacaaccgaccaaaccaaccttggacgcttgtct

SEQ ID NO: 267210 - DNA, 1061 bp, Zea mays
ctgattatctgtctgactcccagtcccagacccagagaagactataagaaggggaagccagctcgtgcttcgacaggcctcagccctagcgcagcttcccggcgacggcgatgagcctgggagccgaggtgatcgagctctccagcgacgaagacgaggagcctgtgcccagcactaccgctctcgtccgccacgccccctcctcccctcccgacgtcaagccgcacctgctcgccgacgtcgatgtgaagccgctgcttcttctcccgccgccgctccaccccccgggctacggcgcgctcgtgcccgtgaagaccgaggagcccgtgcccgtggccaccgtctcgtctccgcccagggcgctcccgccgccgcgcctctgccgccagttctggaagtccggcgactacgtcgtcgcgcgccgcaaccccgatgcggccggccccggtgggcggaaccggttgcggataaaccccaagtttctgcactcgaatgcgacttcccacaagtgggcttttggcgccattgccgagctccttgacaatgcaatcgatgaggtgaacaatggggcaacatttgtccgtgttaataaatttaaaaacccacgagatgggaacccctcattgttggttcaagatgatggaggggggatggatcctgaggcactgagacgttgcatgagcttcggattttcagataaacagtctgatgctttcattgggcaatatggcaatggtttcaagactagtacgatgcggcttggagcagatgtgattgtttttacacaaaaccaaaataactgggtgccaactagaagtatcggccttctttcttacacatttttgatggaaacaggttgcgatgatgtgctggtgccaacggtagactatcagtatgatctaacaacaacttcatatgttcagatgttgcgtcatgatcagaagctcttctcttctaatttggcaatccttctcaaatggtcccctttttctactgaagctgagttgcttaaacaatttgatgatatgggagatcatggaacaaaaataattgtattcaac

SEQ ID NO: 267211 - DNA, 564 bp, Zea mays
cccacgcgtccggcaatcagcagaaaaacatctccttggccttccatccatatgatccatccctccaggctccagctaactccaaactaccctctggttcgactcgcgttcgcatcgcaagcagcagcgtaccatcgaggcaatggcggtgatggccgaagtagtgtcgaccaccggcgcggcgctccggagcccggccacgcagcagccggcggcggcgggcgcggcgaagggcaccgacgctgagaagctccagttcatcgaggacatgacctccaacgtggacgccgtgcaggagcgcgtgctgggggagatcctcgcccgcaacgcggacaccgagtacctctccagcaggtgcggcctcgccggcgctacggaccgcgccaccttccgcgccaaggtgccgatggcgacgtacgaggacctgcagccgtacatccggcgcatcgccgacggcgaccgctcgcccatcctgtcggggcacccggtctccgagttcctcaccagctccggcacgtccggcggcgagcggaagctcatgcccaccatcgaggacgagctcaa

SEQ ID NO: 267212 - DNA, 810 bp, Zea mays
cccacgcgtccgcccacgcgtccgcccacgcgtccgcagtcgacaggccacaaatcccaattccaaaaccttttctccgtcccatcgccggcgatcttctccttcgccgccaatggatctctccgctgtccaggctgccctctccgacaagtcctactccaccctcgcctccctctgcgacgaacttctcctccaggccgcgtcccagggattcaccaccgacgaatggccctactctgtccacctgcttgcccacctctacatcaatgacctgaacagcgcgcggttcttctggaagtcgttgccgcaggaggtcaaggacacgcggccggagctcgccgctgtctggaggattggtcagtgcctctggaaaagagattatgctggcgtcaacacggctgcacaggggttcgagtggggtcctgacctcgctgacttcatcactgccttcctagagagctacagacagaggatattcaagctgttgacttctgcatattccacaattagagttgctgatgtggctcatttcatggggatgagtgaggaggatgcgacaaactatgctgcgcaaaacggttggagtttggatgcagcggccaagatgcttactgtcaaaaagccaaagtctcagaccaaccagaagcttgatgctagcaaactgcagcgtttgactgagtgtgttttccaccttgagaactgatgttcactgtcaatcgtgttgtgtccctgtttcttctctgctccacattgtaagaagcatgtttaccatgtgacagctatatgcctgagcgacttggcccctttcgg

SEQ ID NO: 267213 - DNA, 745 bp, Zea mays
gtttttacagacttaatggttatgcactagatgatgtaacgttctcggttctccccttccgtaccgccagtcggtacttcagttattagtcagcagattgtgaagaaacagctgtctccaaagcgagaagacgaagaaaggggaaatcgagagatgagctaccagagagtccctcccgaggaaccctaccctcctccaggacatcctcgatctcaggcgcacccttacccaccgccaccagatgtgtacccgcctccccctcggggccatggacatccaccaccaccccatggcgtgtacccgccgccgccgcagggtccttaccccccaccacagcagcctccaccggggtaccagggctacttcaacgaccagcagcgtccttactacccgccgccgcatggagagcatcaacacaaccaccaccagggaaaccagggtagctcctctgggttcctcaaaggatgtttggctgctctctgctgctgctgcgtgctggaggaatgctgcggctgcttctgagacgtgagatgtccgggaatccgatcgcaagttatcgtcgctagcattcgggagcaccccagttattatcatataatagtaactgtgcttgtaaataatctggagcagcagtgttcatgagctcccagccccgcatttatattctcataatttgtagtacgttctatgatttatccgaaaataaaggactctatatatgggattctaaataaggtatttgcat

SEQ ID NO: 267214 - DNA, 458 bp, Zea mays
cgaacagcaaggtcagctcccccacagcctgcatgatgtctccatcttcagtgaaagaggctgacgaggagtcgtcgatggatcttggtctgagctttgatctctgtcttggtcatgacactgcacatcgtcacaggaagccatcggcaggtgctccgaagttggaccttcagttgagcctgtccacctgttcgcctgaatcagccttgaccaatgtaagtgccaatgatggcttagagacagtggcagatactactactactctggaaaagctagagccctggatcttcaggaattacatggcttcatcatcatcatatgcatatgcttctgaagcaacctacggcctttctttgccaaagatacctgaagatgtcgtggtcgtgccttcaacaacagacgtgtcatcagccgttacggtgagcgtgaaaaagcccgctccgaaacggagcaatatt

SEQ ID NO: 267215 - DNA, 1195 bp, Zea mays
cccacgcgtccgcccacgcgtccgcgagaggagaggaggccaggcaaaacccaaatcaaatttcgccttcgtcgtcgtcttctcgtctcagatttgactccatgtcggcggcgctcgcggtgacggacgaggtggccctgccgatccgggcggtgggggatctggcggccgccgccgaggtctcgcgggaggaggtcgccgtcatcacccagtgcgcggcgctcggtgggaagttgccttttgaagatgcatcagttggtgcggttcttgcagtcattaaaaacgtggaaagcttgagggagcaattggttgctgaaatcaggcgggtgctgaaagctggtggaagagtattggtgcagagccctgcaccctcatccagtcagaagccgaacactgatattgagcgcaagttactgatgggtggatttgctgaagtgcaatcttctgctgcaaactcgcaggatagcgtgcaatctgttacagttaaggcaaagaaggctagctggagcatgggctcttcttttccccttaagaaaacaacgaaagcccttcccaagattcaaattgacgacgactctgatctgattgatgaagacagtctcttgactgaggaggacctgaagaaaccacaacttccagttgttggggactgtgaggtgggggcagcaaagaaagcatgcaagaactgtacttgtggcagggctgaggccgaggagaaggttgggaagctggagctcactgcggagcagatcaataaccctcagtcagcttgtggcagttgtgggttgggtgatgccttccgctgtggaacctgtccctacagaggtcttccaccattcaagcctggcgagaaggtttccttgtctggcaacttccttgctgctgacatatgatggcatcgccaacatcggcaaaacaaggagacgggggttacctacgttgttagtcgagtgcactgcattccaaatagcttctgttagccaatgcgaatgtgcgtgtgagtgacttgtctttcggatgctatataaagctggccaatcgcgcctctacacaaacacaagtgtgcatcagtgcatgtgttttcagattgactttgtgagcctggatgtgaagaatatcgctcaaccacattgtaaagctttacatacagactgcagagctactcgccgctgaatttctaagcttaagaatcaat

SEQ ID NO: 267216 - DNA, 596 bp, Zea mays
cccattcgtccggctgtgtatctgatagacgtcttgaagagcatgagctcaattcttggtttgatccccagtttgggggagtgaacaaagaagcgagaaccgtgaatttagcaattcaggaagccctggctggcacggaaatccagttgctcaacctcacttacatgagcgagttccgtgctgacgcccatccagctatctggctcggcaagaaggacgcggtggctgtctatggacaggactgcatgcattggtgcctgcctggcgtgccggacacttgggtcgacatcttggctgcacagatcatgcatcacttcaagcaggagaaaggctgatcacaatttctttaaatctgtagttttgcgataactacagcaactgtgctagaactttttagatttgtattttagggataacataacaaacattaaatagttttgcaaatattcattaggttaggtctcccataatgctatagtgatgcacaaaactaatgggcaccacaccgaacatcggaacatcccagtgctggagttttcaaataaggtcctctttaaatctgtagtgtttaaataaaggtttggtagagtttctct

SEQ ID NO: 267217 - DNA, 550 bp, Zea mays
  unsure (1)..(550): unsure at all n locations
caccagtccaccgccaccccatccaatcccatccccacaaccgggtgcctccgccttctatggcggacttcggcgacgagctctttctcgacgtcggggacgatggtttcggagacctctcctacgtctccttctccgagtccatcgagttggatctcgcctgcccacgcgacgtctggtccgcggggtttgatcccgaaaccctaacccacatcccggggtccccaatctccttcgactccgaccccgacctccgccacctctctccctcgctgacctgctccccgcccttctggggctgcctcgatgacgccgctagcttcgagtgggaggagatcgcggacgctgccctcggcgtcggcggtggcgctggcggcgccggagggggaggacaaggactagaaggagacgccgatgccgacgccgacgtgttcgggttcctcgacgagcgggagatgctgggcgtgatggagggcatcgacagcggtgacgacgactcgatcttctncgatgagcctccgtttgacttcggcgatggcgacacggagct

SEQ ID NO: 267218 - DNA, 451 bp, Zea mays
cccacgcgtccgctgttatcgaagaaagtgtgcaagaatctgcaaaaaagcttctctcagagcttactgaatttagtgacacaacaatcgatccatctcttccgaaacctgcatttcaagttgctaggaaggctcagggctcagtggggaaggggagagaaacgactgcagttgaaatgaagaagggtgactggttgtgcactaactgtaacttcttaaattttgctcgcaatcgtcactgtctcgaatgcaaagcagatggaccaaagaagatagaagcggccgtggatgcaatgaaaatgggcgattggatctgcacacagtgtcagtttatgaacttctctcgcaacaagatatgttttaaatgtgaagaacctcacccgaagaggcaactcaatcctggagagtgggagtgcccctcatgcgactttgttaacttccgacgcaacgc

SEQ ID NO: 267219 - DNA, 1592 bp, Zea mays
ttccatgcgttcgcccacgcgtccgcccacgcgtccgccgtcgcgccgcccaaatcacagccaccgccgccatggccgcctccagccgccctctcgtctccgtgaaagccctggagggcgacatggtcacggacgcccccggcatcgccttaccgcccgtcttcggggcgccgatccgcccggacgtggtccgcttcacccacaagctgctgtcctgcaacaagcgccagccttacgcagtctcccgccgcgctggccaccagacgtcggccgagtcctggggtacgggccgcgctgtgtcccgtatcccccgcgtccccggcggcggcacccaccgcgccggccagggagcattcggcaacatgtgccgcggcggacgcatgttcgcgcccaccaagatctggcgcaagtggcaccgccgcgtcaacgtcaacctccgccgcgtcgccgtcgcctcggcgctcgccgccaccgccgtcccggccctcgtccaggcgcgcggccaccgcatcgagaccgtccccgagatgcccctggtcatctccgactcggcggagtccatcgagaagacctcccaggcgctcaagatcctcaagcaggtcggcgcctacgccgacgccgagaaggccaaggactccgtcggcatccgccccggcaagggtaagatgcgcaaccgccgctacatcaaccgcaagggcccgctcgtcgtctacggcacagagggctccaaggtcgtcaaggccttccgcaacctccccggtgtggatgtcgccaacgtcgagcgcctcaacctactagaccttgcccccggtggccaccttgggcgctttgtgatctggacccagagcgcgttcaataagctcgaggaggtgtatgggagctatgacgccccgtcgcagaagaagaagggctttgtgctgccgaggcctaagatgtccaacgctgacctgggcaggattatcaactctgacgaggtgcagtctgtggttaagccactcaacaaggaggtgaagcgcagggagaagaggaagaacccgctcaagaacatggctgctgtgctcaaactcaacccctacctcggcactgcccggaagatggccacccttgctgaggctgctcgtgtgaaggccaggaaggagaagctcgactccaagaggaccaagcttaccccggagactgccaaggttaaggctgctggcaaggcatggtacaagaccatggtctcggacagcgactacaccgagtttgagaacttctcaaagtggctcggcgtgactcagtgagcggcaagggtagttaagttttgagtagctcagcttatgttgagaggaaagaggatccatcaaatctgttttatcctgcatcatcataacaagttgctacaagtcttgcatgttcgtgttgtttgtgcatttccgcgagaacatagtatttttatattcgaaccagttgtctgaactgtgcttggatttgtgcactgatgcttggctcaacctttctgtatcacgaatgagctggtccttgctgaaaatggtttacagaaaaagaaaacatgaatacttcgttcatgaaaagatgaaatttagaaagat

SEQ ID NO: 267220 - DNA, 822 bp, Zea mays
tcggaatcggtcgattgtgtcggacggatgcttcagagtcgagagtgatggggcttgacgcgcgtcgcagatgaagcagggctttgttctgccgaggcactagatggccaacgctgacctgggcaggattatcaactctgacgaggtgcagtctgtggttaagccactcaacaaggaggtgaagcgcatggggaagaggcagaacccgctcacgaacatggctgctgtgctcaagctcaacccctacctcggcactgcccggaagatggccacccttgctgaggctgcccgagtcaaggcccggaaggagaagcttgattccaagaggaccaagcttacctcggaggagactgccaaggtcaaggctgccggcaaggcgtggtacaagaccatgatctcggacagtgactacaccgagtttgagaacttcaccaagtggctcggagtgacgcagtgaagcggcctttgaggcctagttaagttttgagtagttgtgtcgctgaactttgtattgagacgaaatagtatttttatcaatctgtcttatcctgcgtcttcacaacaagttgcctatctgtggactttaagcctgcatgttcgttttgtttgtccattgccgtgggagcatagtatttgcatgttcgaaccaattatctgaattatggtatggttttgtgcacataatgtctgttcatgatgcttgtggcgtggtgacgtttggccttgtagtagtagtacttccgtatccgtctcaaagataagtgatgttttaggtttgttgttgaacaatcgactaaatttataagaaagaatattcatatt

SEQ ID NO: 267221 - DNA, 635 bp, Zea mays
cccacgcgtccgaataaagggagggtgactgtgaaccttggaggtcgccccaatagcggggtccatgcccagcccacccgatttttctcaaatgccaccgcttgttccaatccaacggaccagatcgctccaactaacccccacacacaaaccctactcagctccacctatatagcctattgccctttcggcgcgcctccattcgccgcgcggacgcgccgtccaaaccctagccgccgccgccgccgccgccgtcatggtcgccgtcaaccgccccctcgtctccgtgaaggccctagagggcgacatggtaaccgacgcccccggcatcgccttaccgcccgtcttcggggcgccgatccgccccgacgtggtcaggttcacccacaagctgctgtcctgcaacaagcgccagccctacgcagtctcccgccgcgccggccaccagacgtcggccgagtcctggggtaccggccgcgccgtgtctcgtatcccccgcgtccccggcggcggcacccaccgcgccggccagggagcgttcggcaacatgtgccgcggcgggcgcatgttcgcgcccaccaagatctggcgcaagtggcaccgccgagtcaacattaacctccgccgcgttgtcg

SEQ ID NO: 267222 - DNA, 412 bp, Zea mays
  unsure (1)..(412): unsure at all n locations
cccacgcgtccgcccacgcgtccgcccacgcgtccgcccacgcgtccgagaccatggggtcggacagtgactacaccgagtttgagaacttcaccaagtggctcggagtgacgcagtgaagcggcctttgaggcctagttaagttttgagtagttgtgcccctgaccttgtattgagacgaaatagtatttttatcaatctgtcttatcctgcgtcttcacaacaagttgcctatctgtggcctttaagcctgcatgttcgttttatttctccattgccgtgggagcatagtatttgcatgttcgaaccaattatctggattatggtatggatttgtgcccaaaaaaaaaaaaaaaaaaaataaaaaaaaaaaaaaaaaaaaaaanaaaaaaaaaaaaaaaagggcggccgc

SEQ ID NO: 267223 - DNA, 272 bp, Zea mays
cttcccggtgtggatgttgccaacgtcgagcgcctcaacctactagaccttgcccccggtggccaccttgggcgctttgtgatctggacccagagcgcgttcaataagctcgaggaggtgtatgggagctatgacgccccgtcgcagaagaagaagggcttcgtgctgcccaggtacagcattggacatcttaggcctcggcagcacgaagcctaagatgtccaacgctgactgggaggatcatcaactctgacgaggtgcagtctgtggtg

SEQ ID NO: 267224 - DNA, 1374 bp, Zea mays
cttacgcgtgggcggacgcgtgggttcctggctgttggaagagttgggtcaagtactgatttgattgcccagcgagttgagtttgtgcaggaggcagataaaagaagccacctgatggatcttcttcatgcacaaagagatacaggaaagcaaactctcacgcttgtctttgtggaaaccaagaggggcgctgattcattggaaagctggttgtgcatgaatgggtttccagctacttctattcatggagatagaaaccagcaggaaagagaatatgctctgaggtccttcaagagtgggcaaactcctattttagttgcaactgatgtggcagctcggggcctcgacattcctcatgttgctcatgttgtcaactttgatctccccaatgatattgatgactacgtacacaggattggaagaactggaagagctgggaagagcggacttgccactgccttcttcaatgataataactcatcactggcaagatctcttgctgacctaatgcaagaatctaaccaagaggtacctgcatggctattgcgctatgcagctcgtccttcttatggtggtggtggtggtgggaggaaccggcgatcagggggagggagccgctttggtggccgtgacttccgcaatgattcttcgtcatttggcaaggggggatcccgtggtggtggtgactactatggtggaggcagcagtggtggttatggtggtggcggacacggtggagctggggctccgagtgcctgggattgatgttacagttgctcccaagtagaggggtctgccaagtttaggtcactttttactctagttctatttaggtatacatttttggtaggagctgttatacagcaacaagtacaaggtgaatgtggtcatcccctttcttcttctggttgctactggctgcagtcttaatcttgcagatgttcattacgaagagggtcttgaggacattcaagcacacgagattcctagttaggtgaaattccttggtagggatagtagctaggctctgacaagtagtgcttggtgccctttgctctttttccctttgtcagcgtcgaattttggtggtcggttgtaaagcttgtgttgagggggcttttgcggcttgatttttgtcctggattcgagttttgaccccggaggttgaacaaccggtaggatgatggtagtcctttagatcctgttgtaatgtatttaactgtgaggtgaggctggacccaataaattctgtaggcgtgtttagaggaagaagggggaagttgtgtgtgatggtttcttcagagaagattcctgctactgtgtacttcgaatctgtttttggatggagttcccttgccattatcgccgtcgtcc

SEQ ID NO: 267225 - DNA, 465 bp, Zea mays
gttgctgcaaaagttgatgctaaggataatgagcctgagaatatacctgacaatgtcagtgatgatgacacctctgatgataatcttgttggagaagctagctttgaacttgatcaggagacttctaaccgtccatctgaggatgattttgaaactgaagcagatatttctaaaaaagttcttgagaatttgatcaagtcatcagagaagtccgaaccatctggcattgaaggttcggacattggtaccgacactgaaacagaagatgatacatcagaaaaggagaaatctgattcacctgtagctgacaagctggttaagtcgaaacgtgtaacagatgcagaaatcagtaatcctgcttccaaacccaagaaaaatgatactggcctggataggactatatttattagcaaccttccttttgatataagtaatgaggaggtaacagcgcgcttctcagtcttt

SEQ ID NO: 267226 - DNA, 1933 bp, Zea mays
cccacgcgtccgaaaaagaaaaaaaataaaaaaaagagaggaaaaggggacaaaccaccaacaacaaccagaatatcgcatcgccgtcgcgtcgtcgtcgatctccccgccccgccccgcccgcgccgcggaatctgacacatctccctaatctctcctaggaccgggtgcccttacatccacgccgcaacgcaaatcgccgtccgagccctcgcggtctctcgtctccccgtgcgagaggacgccggcagcagcggcgtgccagtgcggtggcttggtgggggaagaccggaggcgtcggcagagctcgcgtccagaggtgcacggcaggcctgttctcggcgtcggctgggggaaggcgagtagccgcgggaaggacgagtgaataatcatgagctcgatctgccctttcgcgggagccaccactggtggtggtgtatgccctgtgaaatctgataagagcaacactggggtgtgccctgcaaaatctgacaagagcatcagtggtgtatgccctgtcactggcaaggatcatggtagcaagctcaaggaaagtggtgatcatggtgaagaaaagggcaccgatcctcgtgtcgtaccagcaaaatgcccattcggctatgactccaacactttcaagctgggtccgcttagctgcattgtctgccaggcactactccatgaaagtagcaaatgcaagccgtgtgcccataaattctgcaaggcatgtatatcacgctttaaagactgcccactatgtggtgctgatatagagggtattgagcctgatgcggaacttcaagctcttgttgaccgcttcattgatggtcatgccagaatcaagcgatcacatgctgcaggggatgtggaagcagcagatggcaagaacaaagtcatatatgaggatgtttccatggagagaggggcttttctggtgcagcaagctatgagggcttttcgtgcccgaaacattgaaagtgcaaagtcaaggctcactatgtgtgcagacgacatcagggaggagttaaaatcttcagaagataacttagacctatgttcacagcttggagctgtgttaggaatgcttggggactgctgtcggaccttgggagatgttcctgcagcaatcacctactatgaagaaagtgctgagttcctctcaaagccccctgcaaaagatcttgagctggttcatactctctctgtttcactaaataaaatcggtgaccttcgctactatgatggcgacctccaatctgcaagaaactattatgcccgttcattggatgttcgcagaaatgcagtaaaagaacactctgctgtggcttcccaggtcattgatctggcaacttctcttgcaaaagttgcggatgtggatagaaatcttggtaacgaaagtaccgcagttgagggttttgaggaagcaattcgatgccttgagaagttgaagctggattctgaacaaactagcctcgaacaacggcgcctctcggttctcgacttcctgcacaaccagttggccgataagtaagacatagtcttctcctaagaatgcacaaccagcagatgtctcctcatggtaatgttcaactctactacataaggttccctttggaaggagttggtctagaagcagcgatgagtgtgtgtttaccatcgtttgaaactttgtcacggcacaaaataagagctcctgcactgtaaatgtaatcatatatatgctcatcgagtattcttgatgattgccgatatggtttagtagtctaagcactctggtttgtcaatgtcatagcctggagcagcgcataagatgttagttaacttgtggcaagttccatctcgctttgaagtgtcatgtgtgaagacctatcctgttgtatatttgacaataagacagggaggtagtaatcaaaaccgtggccgtcgtttctcc

SEQ ID NO: 267227 - DNA, 671 bp, Zea mays
gacaaggtccgcgaccgtggggccgaggtcatcgagcgcgacgtcccgggctgcaacagggacctcatccacatcgcgtaacagcctctccaaggacttcggcctcccgggcttccgcgtcggcatcgtctactcgtacaacgacgacgtcgtggcctgcgcgcgcaagatgtccagcttcggcctcgtctcctcgcagacgcagcacttcctggcgaagatgctgtcggacgcggagttcatggcccgcttcctcgcggagagcgcgcggcggctggcggcgcgccacgaccgcttcgtcgcgggactccgcgaggtcggcatcgcgtgcctgcccggcaacgcgggcctcttctcgtggatggacctgcggggcatgctccgggacaggacgcacgacgcggagctcgagctgtggcgggtcatcgtacacagggtgaagctcaacgtgtcgcccggcacgtcgttccactgcaacgagcccggctggttccgcgtctgctacgccaacatggacgacgacaccatggaggtcgcgctcgaccggatccgccgcttcgtgcgccagcaccagcacagcaaggccaatgccgagcgctgggcggccacgcggccccttcgtctcagcttgccgcgccggggagcaaccagcggtttccatctcgccatct

SEQ ID NO: 267228 - DNA, 1330 bp, Zea mays
attcagatttttctggggctattgagctaccatctgatgctgaaggagattcacaagaagtaaacagcaaagcaaaggtgagggatgatcatgccaattgcaaactcaatgaggtacaccaaagctctgaatcagagaaagataagcaacttgtaccagataacgcagcaacaaccaatatgtcagatgtacaacgtgaaaattctcatgtacagaacaatcagaagtacgaaattatcaatgtgccttctgattctaggccacttctagttttcattaacaagagaagtggggcacagagtggtgattcactgagacagcgtctgcaaattcttcttaatcctgtgcaggttttcgagttgagcaaacagcaaggtccagatgttggtttagctttatttcggaaggtaacccatttcagagttcttgtatgtggtggagatggcactgctggttgggttttggatgccattgagaaacagaagtttgaaaccccgcctcctgtagccatccttccagctggtactggtaatgatcttgcgagggttttatgttggggtggtggccttggtgttattgagaagcggggaggtctattctcagttttgcaagatgtagagcatgctgcagtcactgttcttgacagatggaagatcacaataaaggacaaccaagggaaacttatgagaccaccaaaatttatgaacaactactttggggttggctgtgatgcaaaggttgccttagatatacacaacctgagggaagagaaccctgaacggttttatagccagtttatgaacaaggtgctgtatgcaagagagggagcaaagaacataatggataacacatttgattgttttccttgggatgtcaagcttgagatagatggatccaaaattgatattcctcaggactccgaaggtatccttgttgccaatatcaggagttacatgggaggggttgacctttggaagaacgaggatgatgtctctgacacttacctccctcagtccatgcatgacaagaaagctggaagttgttagcttcacaggaatgctgcatctcgggaaactgcaggttgggctttctcgtgcaaaaagattagcccaaggccatcatataaaggttgaagtcagtactacaatgccgatccaagttgatggagagccatggtcccaggagccgggaaccatagaggtttctcatcatagccaggccttcatgcttaagagagtctccgaagaacggctgggtcatgccgcttcggtaatggccgacatcttgaaaaacgctgagagcagtggcattatctcagccttgcagaaga

SEQ ID NO: 267229 - DNA, 531 bp, Zea mays
  unsure (1)..(531): unsure at all n locations
atttacacacacagtatctcgcccgctcctccaagtctccctctctcaatataagcctatttctgaattctatttgtggtcgctttctttgatttgctgattgtcaccactggtttttagggctcaatatgactttgtttcacattgtaacatcctcaacaatgattttacttcttacaacaaacactactacggatgtcctgatgataagacattccagcacatggcatctgtgtatagtcggtctcactataacatgtctttgagcaaagaatttgaaggagggataacaaatggagcattctggtacccaatatatggtggtatgcaagactggaactatatacatggaggctgctttgagttaactctggagattagtgacacaaagtggccaaaagcagatgagcttnctatcatctgggaacacagtaggatgagtatgctcaatcttctagcaagcctaataaaggccattgagcgacgaggaacgccgtgtcacttgcaatgaccagagacgggaggtcttcg

SEQ ID NO: 267230 - DNA, 447 bp, Zea mays
gagttaactctggagattagtgacacagagtggcctaaagcagatgagcttcctatcatctgggaacacaataggatgagtatgctcaatcttctagcaagcctaataaagtcaggggttcatggaaggatatttgcagcagatacgggcaggcctgtacccggctcagtgatgataaagggcattgattccaaggtaagcgcgagcagcacttttggagattaccatcgaattgttgcgcctggtgagacatatgaagtggtggcatcgatgcgaggcttccggcaaaaatctacacgcatcaggctggagcaggaagccgtcagcctggatttcatcctggacccggatggagccgatgggcagacgaagctgctgccccgtagtaacgaccggggctgccgctgcgacaacgacaacgccgccaagccgtaccatgtccacgaa

SEQ ID NO: 267231 - DNA, 663 bp, Zea mays
cacaaaactctcgctccctctcgcagacgcgcctaggtctagctagggtctggtctcgctgccccgccgcgcgcgcattcacaagcttctagacgttccgaggaggaggggaggtacccgccgccgcagccatggcgtcgaccaaggtccagcgtattatgacccagcccatcaacctcatcttccggttcctacagagcaaagcgcgcatccagatctggctcttcgagcagaaggacctccggattgagggtcgcattatcggattcgatgagtacatgaacttggtcctcgaagacgctgaggaaatcaacgtcaagaaaaacactaggaaatcactgggccggatactcctcaaaggtgacaatataactttgatgatgaacagtggcaagtgaagattcttatggcaggaacgatgtttggtgctcgcttcgattatctgtgacacaatgtactccatccatccgtccagacttaaatgatgtatcatgtcattgtggtttagtgagagttgtataactacctgaggaaactcacgtgttactatatgctaagatgctgtgacggtgagctattcagtgctcacttgtgttccaaagattagcccgacttgtgtgtgccatgctgacatcttttctggtttcatactcatctttacgt

SEQ ID NO: 267232 - DNA, 618 bp, Zea mays
  unsure (1)..(618): unsure at all n locations
cccacgcgtccgcccacgcgtccgcagggcgcaacaaaaccctcctccctaactgccccctcgcagacgagacgcgtggtagctagggttttggcctcgccgcgcacgcctcctgaagcttctagacgttcgaggaggaggagggaggctcccgccgccgccgccgcagccatggcgtccaccaaggtgcagcgtatcatgacccagcccatcaacctcatcttccgtttcctccagagcaaagcgcgcatccagatctggctcttcgagcagaaggacctccggattgagggtcgcatcatcggattcgatgagtacatgaacttggtcctcgaagatgctgaggaaatcaacgtcaagaaaaacactaggaagacactgggccggatactcctcaaaggtgacaacataactttgatgatgaacagtggcaagtgaaagttcttatggcaggaacgatgtttggtgctcgcgttgagtatttctggcacgttgtactccatccattcagacttaccatgtacctgctgttaatgaccctgagtaaattattcttgaagcctgccactttggggggccatattggcatcttttcttgtttccccgnnaagnnnnnna

SEQ ID NO: 267233 - DNA, 1028 bp, Zea mays
ggaccgtggctttgttgagccacgtgttagcaaggaacttctaacagaggattcttactataacttcattcaaacatgggataatgaacaggagataaagatgctgcgcacgaaggttgatttaattataactcttggtggtgatgggaactgttctgtgggctgcatcattgttcaaaggacctgttcctccggttgttgcatttgccctgggatcactgggcttcatgacgcctttcccaagcgagcaataccgtgagttgttggacaatgtgctgaatgggccatttagcatcacgctgagaaaccgcatacagtgtcatgtaatacgtgacgaggcaaaggatgaaatcgtgtctgaggagccattcttagtgttgaacgaagttacaatcgaccgaggaatatcatcctaccttaccaacctggaagtctactgcgacagctcttttgttacttgtgtgcaaggagacggactgatcatatcaaccacatctggaagtacggcatattccctagcagctggagggtccatggtccatcctcaggtccctgggatccttttcaccccaatctgcccgcattccttgtcgttcagacctttgatcctgcccgagtacgtgactctccgcgtccaggtgccgtacaacagcagggggcacgcctgggcgtccttcgacggcaaggaccggaagcagctgtcacccggtgacgccctgatctgcagcatttctccctggcccgtgcccacagcctgcctagtggattcgaccaccgacttcttccgcagcatccatgagggtctccactggaacttgaggaaatcccagtcgtttgacggcccgcgtgattgattcaacagtttctttaccgttccatacttatatacaaaggttgcgtgcgtttaaatgtgaggtagtatagacgtatagttgagaatccaaatatatagccatgaccatgcgtgtgtgtacatgattctgtgcttcagtgctccccagatctgaatggaataattggccccccat

SEQ ID NO: 267234 - DNA, 359 bp, Zea mays
gcagcatttctccctggcccgtgcccacagcctgcctggtggactcgacgaccgatttcctccgcagcatccatgagggtctccactggaacttgaggaaatcccagtcatttgtcggcccgcgtgattgatgcagcagctgttcagttatatttcagcccggtgccagaattcaagctgggaattctcaacaggaataactgtagctactccagggtgctctcacctttaccgttccatacttgcctatatacaaaggttgcgtgcgttagatgtgaggtatagatagatgtatagaatatggatggatgataacgactggacatgttgaataatacaacgccaacgtatgcacgtat

SEQ ID NO: 267235 - DNA, 1176 bp, Zea mays
gccagtttgcgttcgccacccgtccaaaacccccccgccagcccccgccccaccatcgcgtcaatggcggcgccgcctgtccagcctgtgccaaccgcggcggcggcggcggcggctgtgaacggggacgcgttccgtctgggcttcgtcggcgcgggcaacctggccgagagcatcgcccgcggcgtggcggcgtcgggcgtcctcccggcctccgccatccgcaccgcgccccaccgccgccccgagcgcggcgaggccttcgcgtccttcggcgcgtgcttgctccaaaccaatgcccatgttgtggacgacagcgatgtgatcgtcatctccgtgaagcctcagatcgtgaagcaagttctacttcagctgaggccacggctgtcagaaaaaaagcttctcgtgtccattgctgccggcatcaagatgcaagatttgcaggattggtctggtcaacgacgtattattagagtaatgcccaacaccccttcagctgttggacaagctgcatcagtcatgtgtttgggagagatggctactgaggatgatgaaaaccgtgtaagaaaactgttcagtgccattggaaaagtctggacagctgaagagaaatattttgatgctgtaactggtctgagtggtagtggcccggcctatatcttcctagcaatagaggccatggctgatggtggagttgctgctgggcttcctcgggaccttgcccttggtcttgcatctcaaacagttcttggtgctgcaactatggtgagccagacaggcaaacatccagggcaactgaaagatcaggttacttctccagcaggtactaccattgccgggattcaggagctcgagaagggcgcattccgtggaacgctgattagtgctgttgttgctgccccaaaccgctgccgcgaactgtcatagagtccgaaacaaggctgcattttgttgatatacatgcgttggtatgcaaggtgcaaatcttctggaatagtagactaataatgtactggtggcttcagaatcatgtgatacgataagtacatgctcccttccaaagcttggtgtcaccattatatggtcgaacggcaagccttaacaataaatccaaaaattggggcacaaaaaaagaaacaaaacacaaggaaagacacggctgaggggggacaatgt

SEQ ID NO: 267236 - DNA, 829 bp, Zea mays
gtcaaattgagtctgtggcagaagtgtgggatcttgcgaccgaaccagcattcctgtgctgggcagctgttgtgcttgcagcagcttttgtgctcatattccattttgtccctgagtatggtcagacacatatcatggtatatgttggcatatgttctcttgtgggatctttatcggtcatgagtgtcaaagctcttgggatagccttgaagctgacattggctgggatgaaccagctagtctatccacaaacatggctgttctcatccgttgtaaccttatgcattgtaacacagatgaactatctgaacaaggccctcgacacattcaacactgcagttgtttcacccatatattacacaatgtttacatccttgaccatcttggctagtgtaataatgttcaaggattgggatcgtcaaaatccaacacaaattgtaacggagatgtgcggcttcgttacaatcctttctggaacttttcttcttcacaagacaaaggatatggtggatggtctcccaccaaatttaccaattcggcttcctaaacatgcggatgaggatggctatgcagacgacgtaattcctctcagatctgctgctgacggtattccactcaggtcgccaagggctacagattcatttcgctcctcgtgatgtcctgagatttgcaagtgcactgaatcatgtagattccaggctcatacccagcagccgtcagtctatatacatgggaagcggaaaatagccccccattcactcggttggataccacaacgtaggtttaactgtaggattcaacaggtaacaactcggctaaccccctaacc

SEQ ID NO: 267237 - DNA, 849 bp, Zea mays
cccccgcgcccgcccaatcagaacagacttggtcgcttcaccactccactcgccgcaggccgccgggcgccgccgaggggatcggagcaagatgttcttccacatcgtgctggagcggaacatgcagctgcacccacgacacttcgggccgcacctccgcgacaagctcgtttccaagctcatcaaggacgtcgagggcacctgcagcgggcggcacgggttcgttgtggcgatcacgggtgtggaggacatcggcaaggggctcatccgggaaggcacgggatacgtcaccttccccgtcaagtaccagtgcgttgtctttagacccttcaagggcgagatcctcgaagctgtcgtcaccatggtgaacaagatgggcttctttgcggaggctgggccggtgcagatcttcgtgtccaaccatttgattccagacgatatggagttccaatcaggagatgtgccgaactacacaacttctgatggatcggtgaaaattcaaaaagagagtgaggtgcggctgaagattattggtactcgtgtcgatgctacagaaattttttgcattggcacaataaaggatgattttctgggtgttatcagcgatcctggtgcggcagtgtaaatggtctaagaagcgagattgtactccattgttctgacttctgagtactatcgcagacgtgtgtaatcgctggtccgttaaaactgcaatggctgtactgactgcggaacttgttgagaatgatgtgactaggaccttgtttagggcctgtttggttctttagtatggccctgattggcacaactgctgtttattgaaaaaacagcttatctgataagctggtg

SEQ ID NO: 267238 - DNA, 850 bp, Zea mays
gaacatcatgttggtgagccccgcgccgtgcacgcccaccatcgcgtcgcacgaggtgaggagtcccccgacctgcgagatgtcgttcgccacgtccgactcgttgacgacggcctcgaaccccacctcctccgcggcccggaccacggcgtcgaggctgacgagcacgcgagtgcggcggcgcgagatgaccagcagccggggcttcctccccgtgccgtcgccgaggcgcgtgggcgcgtcccggtgcagcgagagcgcgcgccggaggaaccgcgtgaagtccggcgtggcgagcccgtccaggctgcgctcgcgctcgatgatgagctccttgtgcgcgcgcaggctgaccacggcgcgcgggaagcagtgcacctcccgcgccgcgcctgccctggccaggtccagcggcgcgtggcgcgacagcgcccggaggagcctgtcgtacttgaccagccaccagggcgccgcgttggccatcaccagctgcacgtcgccgcggtaccgccgcgccgtgttgtacagcggcacgagcacgtcggagaagtcgtggaagatgttgcccgtgtacccgccgatggagaacaccaccgccggcgcgccgtgcgtcgccgtgcaccgcggcgcccccgccgcgtcgcccgtcgcgcgcaccgtgacctccgtgatgcgccccatgcacgtctcgtcgcccttccgcgggtaaggccggaccttgtgctcctcctgatcggaaccgctcgtcgccgggtcgacgacgacgacgaacgccgacacgttggcgtccatccggacatcgccggccaagtcgcagatgtcgctgcggaagtcggagaagtcgcacagc

SEQ ID NO: 267239 - DNA, 447 bp, Zea mays
cggacgcgtgggcggacgcgtggtcggactttttgggcggacgcgtgggctcgacaccgagaaaagcgcacaaagcaacgcaaagcccacgccgctacagtgctacagcgagcgagcctcttgcctgccgctacgagccaacgactcgaacgcatacactccaatggcagcgacggtgatggcctccatgagccccctcgcctccgccacccccggcgcgcgtcgcgctttccctgtacggctgctgctccaggcatctgcgctcgcgccgcgccggcgcgccttggccgtgaccgtgagggcccagagcgacgacgccgaggccgagccaaaggaggaggcggcggcggccaccaccccggcgccaaagtccaaggcggcggctacggccagccccgggctgtgggacgcgctggcgttcagcggaccggctcccgagcgcatcaa

SEQ ID NO: 267240 - DNA, 383 bp, Zea mays
ctcgtcacggagaagagcgcggcgaagcaacgcaaagcccacgccgcggcagtgctctcttgcctgccgctacgagccaacgactcgaacgcatacactccaatggcagcgacggtgatggcctccatgagccccctcgcctccgccacccccggcgcgcgtcgcgctttccctgtacggctgctccaggcttctacactcgcgccgcgccggcgcgccttggccgtgagggcccagagcgacgacgccgagccaaaagaggaggtggcctcctcctcgccttctccgtccgccaccccggcgccaaagtccaaggcggcggagactgcgagccccgggctgggggacgcgctggcattcagcggcccggctcccgagcgcat

SEQ ID NO: 267241 - DNA, 737 bp, Zea mays
taattatgaagtctgaacttcacaggtttatacatggggcaaaggatactgtggagccttaggccatggtgatgagaacgataaaactagcccagaattgatcggcagcttgaagggccaagttgctgtgcaggtatgtgcaaggaagaggaagacgtttgtcctcacggacgagggctcagttgttgcgtttggatggatgggttttgggagtctagggtttcttgaccgaggaacatcagacaaagtaatgaggccccgcgttcttgagagcctgcaggatcactacgtctcccaaataagcaccggactgtatcacactgtcgcagtgacaaataagggcattgtattcgggttcggggacaacgagcgagcacaacttgggcaggagtacattcgtgggtgcttaaaacctaccgagataatgttccaaaagagtatcgaagacataccaattgcggcgcctagtggttgacctcaaggccaagaggccaagacccccattttggacactgttgcctgcatatatgttgtacttatattgaaattcttctcggtaagtgtattttatactttgtgatttgtgatgaacgggggaggacggaagagcaaagttggaggacagtgttgtgttgtgtagccaaagaagcatgtagtttagtaacgtgtgatgtaccgaataattcaacccaccatttttattctgtataaaatttattggtgtgtttgtattcttt

SEQ ID NO: 267242 - DNA, 721 bp, Zea mays
cccacgcgtccgcccacgcgtccgcccacgcgtccgaccgtggtggcgacgagctccgtctcctgcaccccctccgcctcctcgccccttccgctgaggcccgacgtcggcgcgttctctgccacagtcggcaaccaataggagcgtaaaactggagctagggattgaagctgttgcaggtacatgtcatatataaatcgacatgggcaggcactcccgctgagggtgcttcttggcttcgtctgtagaggcttgctgatatttggcataggatattgctaatttgtgggtatgatgcatggattatttgagatctttgagcagataaagcaatcattatcatctcaaagggagggtattgatttcatggccgtgattccccctctcccagtcaaagccatccaagccgcaattacttcagggacagggtgttcactggggctagaaggattctgttcttattgcacgacacatgacaacatatccaagtagtccttgattgatttagcagcagggagtaagcgtcttgctaaaagtggctccacaggtgaacttagcgtccggctggctaaaagtggttgtaaaggtgatcgctttgaaggaaactcaggttcaggaaggacacatgaatatccgagaaaaaactccaaagaatctttccaaaacctgatggtggccttctaccttaaccacctttggaagtcttaggtggttaattttg

SEQ ID NO: 267243 - DNA, 372 bp, Zea mays
catctaccgaggtgtaaccagacatcaccagcatggacggtggcaggcgaggatcggaggggtggccggtaacaaggacctctaccttgggacgttcagcaccgaggaggaagctgcagaggcctacgacatagcggccatcaagttcagaggcctgaacgccgtcacaaacttcgagatcagccggtacaacgtggagaccataatgagcagcaaccttccagtcgcgagcatgtcgtcatcggcggccgcggctgcgggttggccggagcagcaaggcgctggagtcccctccgtccggctcgcttgacggcagcagcggcatgccagtcgtcgaagccagcacggtaccgccgctggtcattccggtga

SEQ ID NO: 267244 - DNA, 901 bp, Zea mays
gaaaaagctcgttctgcccccttccttcgcatcgaaacaaaccctccgtctccaaaagagagcccaatcctaaattcccaatccctcaaaggaaggaggattcttcagcgtctcgcttgccggccccgaatcgcagtcgccgcccggatccgaggaaacaagtcgtcgtcttgctccaccgtccgcccgccgccatgagcttcatcttcggcaagaagaagactcctgctgagctgctgcgggagaataagcggatgctggacaagtccatccgggagattgagagggagaggcagggcctgcaggcccaggagaagaagctcatcaacgagatcaagaaggtggccaagcagggtcagatgggagctgtaaaaattatggcaaaggatcttatccgcacaagacaccaaatcacaaaattctatgcactcaagtcccagctacaaggtgtatctctacgtattcagactctgaaatcaacacaagccatgggtgaagccatgaagggtgtgacaaaagccatggggcagatgaaccgacagatgaatctgcctgccctgcagaagatcatgcgggagtttgagatgcaaaacgagaagatggagatggttagtgaagtgatgaacgacgccatcgatgatgccttggagggcgatgaggaggaggaagagacagaggagctggttagtcaagtccttgacgaaattggcatcgatatcaactcagagcttgtcaaggctcctgcaactgcagttgcgaaccccgtcgcagcggggacagttcctgctcaggctgatagcgcaggtggagcagatggcggcatagatgatgacctgcatgcgcggctcgataacctcaggtagatgtgatcactagctggagccctacagatatcacacgc

SEQ ID NO: 267245 - DNA, 1353 bp, Zea mays
actggatttggcaatttctcttattattatgtgaggaaggatttcagtcttggaagatttgctcagatgatgtggcgcctcaatttctttgttatattctgctgcattgtcctgaacaatgattatacactctattatatttgtcctatgcacacccttttcaccctcatggtttatggtgctcttggaattctaaacaaatacaacgagattagatcagtgatggcaatgaacatttgttgcttgcttcttgggagttgtcctggtttgggaagttccaggtgtctttgacatagtatggagcccattcacattccttctaggctataccgatccttctaaaccagatcttccccggttgcatgaatggcaattccgatctggactggatcgctacatttggatcgtggggatgatatatgcatattaccatccaactgttgagaagtggttggagaagctggaagaaactgaaatgagaaccaaactctatattaagacctcaatagttacagtgtcaatgatggctggttatttgtggtatgaatacatttataagctggataagattacttacaacaagttgcatccatatacatcctggatccccataactgtctacatatgcctacgcaacttcactcaagaattcaggggcttctccctcacactatttgcctggcttggaaagattacactagaaacatacatatctcagttccatatctggctcagatcaagtgtgcccaatggccaaccaaaatggctattgtcaataatcccaaattatccactgctcaatttcatgctgactactgctatatatgttgcggtttcccataggctcttcgaattgactaataccttgaagatggtatttgtaccaaatcgtgacaacaagcgcctctcatacaattttgtggcaggaacagccatttctgctgccctgtactttgtatcgtttgttctaattggcattgcaggatactaggaagtctagttattgcctttttcttttgttcgattagttacaacaaggcctgatctactgatcaaatttaaggcgacacagcacgcagccacgcactgctaaggaacctgcaatttcattcactggagtcaggttttatctgggtttcatggtgaagaaaaaaaattgctgtgcaaggcagaagatctcgaagagtgtaacatatgagtgaaccccaatcccaagaggggatatgataaaaatatctctgtataggcgttggaacacataccgacttaccgagtggccacgtcgtctgtgaaaatcagatttggttcctggtttggtttaaaagcttgaaatagacagaattgtcccttttt

SEQ ID NO: 267246 - DNA, 451 bp, Zea mays
cccacgcgtccggccagcatgaaatacctatctacatgggctcgaatgaaaaacttgaccgctcctataatgtcaccgttcacatattgatttggattccattttggtgttacacagatccgaattgcaacctgtattgcatttattggtagctcggtgtggaaaatgtgcatattctggaggaagcaaaattatttcttgccaaattgagattcagtacaggtgcttattctgttctttgcagagagatgtatgaatgcaagatctgtacttccatggcaaatgaactgtgcaatatgagatggtacgagaatgttgcacatcatcaacgaaagtaaagagctttatatagcatacagctatgaggatttatgtttattggacattcgttgcttggtactgttataaaatttcgtgatggtacagtgtatgggtgtaccgaattgtttgg

SEQ ID NO: 267247 - DNA, 1101 bp, Zea mays
ctcgtcctctgctcctctactcccctctccatccatcgcactcacacggtcacactcacacccccgccgtctagccgtttcagctgcagagcctctcgagcggcgcccgcggcaggagctggctacccctcgaccaggtctgggagcggcgccgccgcgcccgcacgagacggcggagctggacgcggaggcggcgctgggcggggagtcggcggaggagcgcaaccgcttcctggtgctgcggctgtacgaggcgctcaacgcccgcgacgcgcgccgggcgcaggagctgctggcgccggacctcgagtggtggttccatggccctcccgcgcgccagcacatgatgcgcctgctcaccggcgctctggaccaccgcggcttcgtcttctccccgcgctccgtcgacgccttcggctccaccgtcgtcgccgacggcgccgacgacgcgcgccagctctactgggtgcacgcctggaccgtggggccccatggtgtgatcacgcagctcagggagtacttcagcaccgacctcacgctcctctccggccagcctgacgtcggtgccgcaggcgctgctccgcctaagcagaaggacgctgcctcctctcctcgtcgccctcggtggcggcaccggcagcagggcccaagtgcctgtggcagagccgccgcgccgacagcgcgcacaagtcgctgccgggcctcgtcctcgccatctgactgagactgagactagctagagacaccaagctcgatctgccgccctccattatattatattataaccgtataaaaatcctaaaattccaaaccctctactacttgcataaataatctggaactgccctcagtcagtgaaaacgtgaagacggacgtatgcctatgccctgaactgaactagtccgtgttgtgattcctgtaccagttaattactttagctcgtgccgtgccgtgccgtgtgtgtggaatagtagtgtttgttaagccatgggttgttatgctgtgcgccgccattgctgctactgtaatgctctgctgttatggtctggttctatattgcggttgaataaaagttgcatgagttggagggataagcaattt

SEQ ID NO: 267248 - DNA, 1214 bp, Zea mays
gtcggaatcctaaggatcaacagtatatgaagatgaccttgaaccagctgctcgttgagttggatggctttaagcagaatgaggggataattgtcattgctgcaacgaactttcctgagtcgctagataaagccctagtcagacctgggcgttttgaccgtcatattgttgttcccaacccagatgttgaaggtcgacgccaaattctagaatcccatatgtcaaagatcttgaaaggtgatgatgtggacttaatgatcattgctagaggaacaccgggattctctggtgcagaccttgctaacttggtaaatgttgctgctcttaaggctgccatggatggtgcaaaagctgtcacaatggatgatcttgagtatgcaaaggaccgaatcatgatgggtagtgagcggaagtcggcagttatctctgacgaatgcaggaagctgacagcataccatgagggagggcatgcccttgttgcaatccacacagaaggagctcaccctgtccacaaggctaccatcgtacctagggggatggccctaggaatggtggcccaactccccgacaaagaccagacaagtgtgtcaaggaaacagatgctagcaaaactggatgtctgcatgggaggccgtgtggcagaagagcttatctttggggatactgaggtgacatccggtgcgtcgtcagatttccagcaagcgaccgcaatggcgagagcaatggttactaagtatggcatgagcaagcaggtcggccttgtctcttataactacgaggacgatggaaagagcatgagctcagaaacgagacttgcgatcgagcaggaggtgaagaacttcttggagaatgcgtacaacaatgcgaagaccattcttacaaaacacaacaaagagctccatgctctagccaacgcacttcttgagcatgagaccctcacaggagcccagataaagaacatattagcccaggttcataacaaacagcaacatgagcatactatcgaagcaccacagaaggcctcagtcgcaccagcttcccccgcatcaccagctgcatcagctgctgcagcagcagcagccgccgccgcggcagcacagcaggcggcagccaaagctaagggggtggctggtatgggatcttagcacattagagcacccccactggtttgcattgtgtatatttcaccaaacaagcaaagctgttccagcaat

SEQ ID NO: 267249 - DNA, 752 bp, Zea mays
aggaggtgaagaatttcctagagaacgcgtataataatgcgaagaccatccttacgaaacacggtaaagagctacatgctctggccaacgcacttcttgagcacgagaccctcacaggagcccagataacgaacatattggcccaggtacgtaacaaacagcaacaagaacatactgtcgaagcaccacagagggccccagcttccccggcatcaccagctgcggcggcagcagctgcagccgccgcggcagcacagcaggcggcagccaaagctaagggagtggctggtatgggatcttagcacatggagcgccccaccggatgtatatttaaccaaacaagcaaagctgttccagcgattgacagttgatgaaggtcatcggatgtattgtatgctaaactgctgcagcaatagaacacactgattgcgtggaagttactcttccatgtgcctcgagtgcaaagcagagacaaaaaaactgtacgtgttgtagacttgtagctggtgcttgaatcagttttgtacccacatcgaaaacaattcctgttgtttacaccccgaaaaattgttagatttcgatctggctgccttgtgtaccctaacagagcgtaaattgtaacacatcctgaataagatgtgtcccgtgtgcttgaatacaatgtggggttagctgccgaggcgattcatcaacccctctgctcttttgttgtatgccatgcgtcgccaagctaccaagatctatcttttttt

SEQ ID NO: 267250 - DNA, 1784 bp, Zea mays
gtggatgtggatgatgcagagcaggatgatatggttaaagagcaccgcaagcggaaagagtttgaagtttttgttgtggtctggataaagatgcaacagaaaatgaccttaagaaggtttttggtgaagttggtgagatcactgaagttcgtctgatgatgaaccctgccacaaagaagaataaaggctttgccttcctgcgatatgcaactgtagagcaagcaaggcgtgctgtttcagagctaaagaatccactggtgcggggtaaacaatgtggtgttgctccaagtcatgacaatgatacactctttgtcggcaatatctgcaaaacatggacaaaagaacatttgaaggataaactgaagagttatggtgttgaaagttttgacgacttactactggttgaggatacaaacaatcctgggatgaatcgtggctatgccttgcttgagttttctactcgacctgaggcaatggatgctttcaggacattgcagaagagggatgtagtctttggagttgatcgtagtgcaaaggtttcctttgctgattcctaccctcaagttgatgacgaaataatggcacaggtcagaacagtatttcttgatggccttcctccctcatgggatgaagaccgtgttaagaaatatctcaaaaagtatggagctattgagaaagtcgaacttgcacgaaacatgccagctgccaagagaaaggattttgggtttgttacatttgatacacatgataatgctgttgcatgtactgaagggatgagtaactctgagatcggtgaaggtgaacacaaggcaaaagtaagggctagactgtcgagaccattgcagagaccacctagaatgaaacatggattgagaggaaattttagagttgggcatggtgccccgcgaggtggccgtttaccatattctcgtgctcctccacctcgcaggcctccgccacgtcttattcggcctgctgttagccgcttaccatccatcaggagtcatccgttgaagcggcccatagatattagagataggcgtcctgctatgtcaatgccagatagagctaggcgtttccctccagagagatcttatgacaggaggcccccagctccagtttacctgaagagaagtccaaggagagaatacgggaggcgtgatgaacttcctcctccaaggagcagagctacaactgattacattaccagagttccggttgatagacgtccctctttgagggatgattattcaccccggggatcaggttattcagacctcggtcctcgtagtgctccccgtctttctgataggcgagcttatgctgatgatagttatggggagaagtttgaccggcctttagtggcctatagggagggtcgcggccgtgattatgacaccatttctggatcaaagcgtccgtatgcagatatggatgatgtgcctcggtaccaagaaatcggtgtccgtcagtctaaggcacgtttagactacgacattggtggcagcagtgctcggtatggagatacatatagtgagaggtctggacgaccacatgcgggatatagtagcagccgatctatccctgttcatgattcagcatatggcagcagccgtcatggaatgagttatggaggttctgctagcagtgctgatgctggtggtatgtacccaccgagttacagtggtagctatgggtctcgtggatctgatgttggtgggagttcatattcttcactttactcgggtcgcaatttgggtacgcagcagtggtgctactatgga

SEQ ID NO: 267251 - DNA, 481 bp, Zea mays
  unsure (1)..(481): unsure at all n locations
ggaattcccggctcgacgcacgcgtccgtggcccgaccccgacctctgctctctggttgccggttgtgctaaacttctccatctagtctgtactggatttgcagtcaatgctactgggatggccaaccaactacaactaggaaataggttgccctgggcaaactattcaactaaactaatcgcgactcaccactagtcggctagttgttgctcaggtgactagacttgatttatgatttggaaacactagtagctgcttatcttttatttacgctagttatcctcaaaagaccaccaaatgttattatacacattcgtagcaatcgtataaggttatattatgctacagtgaacgatgtgccaaaaaatggataagcgtgttcatttaaattctaagagagccattttatgtccttgctggatacaacaacattttgatttactgtctngcatncgaagggtgcattccaagcctatatct

SEQ ID NO: 267252 - DNA, 1317 bp, Zea mays
tgtccatttcagattgcttgagaaaccaaaagaagaaggcttctctcttgagctttcaaaatgctccacatatgatgatgttgttgagaaggttgctaagcaactacgtatggatgacccttctaaaatccggcttactcaacacaatccatcgtctcagcaacccaaacctcacttcatcaaatacaggagtcttaattatctttcggacatgctacataatcacaatcagatgtgtgacatattatggtatgacatcctggatattcctttgcctgaactagaatctatgagatctctgaaggtcgctttccaaaatgccgcaaaccatgagatgtcgtttcacattatgcggttaccaaaaagtaactctctccttgatttgattgaacacttaaagtcaaaggttgaaatttcttgtaatgatgctgaatttcggttttttggagtctaccttcacaagatatgcaaggtgtatcaacctggagataagatagattcagttaatgaccatggacccttgtatattgaagaggttcccgaggatgaaaaaaatgccgggcctcatgaccgtttggttcatgtctatcattttgaatataatcatcatattcagtattttggtgaacctttcttcttcctaattcgtgatggtgaagctttgtcggatatgaaagtacggattcagaagagacttcaagttcctgatgagcagtttctaaagtggaaatttgctcatgttacattcagtaagccagaatacctccaagattcagatattgtaatgaacagattccataaacagagacctgtttatggaggttgggaacaacaccttggattggagcatacagccaccaccccaaaaaggtcctacttaggcaacaaccagaaccgccattcttttgagaagcctgtgaagatttacaactaaagctgggaatactttttacaagtgatgaatggatatgaaggcagccttgttccaaaagcagtcttttggtgatgtacatagagcttttgcatagagtagtttatgtggcagttatctcaagaattttcatctggtggatgtacagggttcgtatagcaacatttccttgtagaaagttgaagttgtatatcgagggtggatttacctgtgtttatcttttcgaccctaagcctctgggaagctgtgaaccatagcctcatgaaatatgcctgttgttgattcagtgtttgtgtttttcttgtttgtcattattttgtactcgcttttaatataacacaccttttggaccgagcaggaaaatgatgtttaccttatagtggtct

SEQ ID NO: 267253 - DNA, 416 bp, Zea mays
aagaaaccgctgcacgttgaagacgcgcccaggccccgggaggactcagatttggtgtgactgcgacaagcaacacgttttggaatagttcgccaattgtctgtgcgcatgttttccataaggttttctcggcttttgggtatgttcataaaatagccacctttgaaaaggctgcaggttttcaggcattgatccagtacactgatgcggctactgcttcagctgctagagaatccttagatggaaggagcatcccaagttacttgcttccggagcatgtaacatcctgctgcctgcgaatttctttttctgcacataaggatttgaacatcaagttttagtcaaaccacaacagagagtagagacatctctaattcacttgagttggtcaaatttgttaacggtatagagcaact

SEQ ID NO: 267254 - DNA, 1856 bp, Zea mays
  unsure (1)..(1856): unsure at all n locations
ttctcttcacgcgtccgcccacgcgtgcggttgaaatccacgatttctattatgaaaaaatacagccaaatttgagggatagttacacatcgaggctttttgaacgctactcttctggcttcctcctggtatgcccctatccacttcctccattccgcctttcataggaaagcattcgccttttggccctttgattattgtggggtttcaacttaatttactcattcatagcttcctaggccgaagggaaatcgaaagtcgttggttgttgttaaacctggactgctatggctatcgatgctacttggacctctggtactaggctgctcatattccgctcactagatttctgatgttgattcaatttccttccattcaataaaatccatgtgtgtgattgttgccctatgttaatttgaggccaaggaagtgaatgggtgaaaatgattttgtctattatcacatgatttggttttttacagcatactcttatagcccacctgtgattcatcagcatggattgattatgtgcctctctattttgttgtatcagttatgaagtttaaataaacattgaatccatgttcttgcacactttttgtaatgttcaaccaaaaaatctgcttcaaatatgttcagcaagacagaagttaataggttacattcagctttttcagttggtaatgttcacaacaacaaaaaggatgtattcagttttttcagtccttttctgttcagttcttaaccacttgtagttgcctatttggtaatgtttaagttcccatgaccgatctggcagtgccagttaaatttatgggttcctttagagccatggattagattaatgtacgttgtccacaaactcttaacacccccaaactatccttcaagaggcgctaggcaaggaggtgagtaatacctattacctcgtgctccatccaaatcccaaaagtgtaactcctctacagctagcaccaacacatgattgttttgtgcaaatgtttaggtgtgttaaatgattatgagcaatagtctgatttgatggttgagttattttcagatattaagatagtttaccttttaacgttatcaacacattgatatgctacatgatctctgtccgtgcaatcttttgatatgttacagaatgcactattcctaattgcttagttgaagcatcctgcagatcaaggtagaggatatggatgcgtatgcccctaaagatcttttggttgtcactacaggttcacaaggagagccacgtgcagctttgaatcttgcatcttatgggggaagtcacactcttaaactatcaaaagaggatgtccttctttattcagctaaggttattcctggaaatgagacacgggtaatgaagatgatgaatcgtctcactgatcttggcccaaaaattatcatgggtaaagattctggcctgcatacctctgggcatgcctaccgagaggagctggaggaagttcttcggattgttaaaccacaacatttcttgcctgttcatggagaactcctatttctcaaagaacatgaatcacttggaagatcaactggcatacggcacacaactgtaataaaaaatggagaaatgcttggtgtatcgcatctaagaaacagaagagttttgtccaatgggtttgtttcattagggaaggaggatctttagcatggagatcttccgacctcagaaggaacatggtttagcgcagactggtttgaaaggaaaatttaagattactacaagatgtctatggcttgataatggaagattgttggacgcactctacaaagcagctcatgctgcattngtagttgtcctatgaattgtncacttagtcaca

SEQ ID NO: 267255 - DNA, 633 bp, Zea mays
atgatccatactggtgactggaaaattgatgaatcaccagtggatggaaaaaaatttgaccgacaagcattggaggagctctccaaagaaggtgttactcttatgatgagtgactcaacaaatgttctatcccctggaagatcaatcagcgaatctgttgttgctggttcattgttgcgacatatttcggaagcaaaaggaagagtaattacgacacagtttgcctcaaacatacatcgaattgggagcatcaaagctgctgcagatttaactggtcgaaaaatggtatttgttggaatgtcactcaggacataccttgaagctgctttcaaggatggaaaggcaccactggatccatcaaccttgatcaaggtagaggatatggatgcgtatgcccctaaagatcttttggttgtcactacaggttcacaaggagagccacgtgcagctctgaatcttgcatcttatgggggaagtcacgctcttaaactatcaaaagaggatgtccttctttattcagctaaggttattcctggaaatgagacacgggtaatgaagatgatgaatcgtctcactgatcttggcccaaaaatatcatgggtaaagattctggcctgcatacctctgggcatg

SEQ ID NO: 267256 - DNA, 418 bp, Zea mays
gaactctcatgtttcatctggaggatgcaactttctaagtatcctccatcaacgcgcttatctccggtgtaggacacctcctgtttatccaagttactgatgaaaggttttctcggcttttgggtatgttcataaaatagccacctttgaaaaggctgcaggttttcaggcattgatccagtacactgatgcggctactgcttcagctgctaaagaatccttagatggaaggagcatcccaagttacttgcttccggagcatgtaacatcctgctgcctgcgaatttctttttctgcacataaggatttgaacatcaagtttcagtcgaaccgcagcagggattataataatccgtatcttccaatcaattattctgccatggatggtacattacagcctgctgttggagctgacgga

SEQ ID NO: 267257 - DNA, 738 bp, Zea mays
ctatttctcaaagaactttaatcacttggttgatcaactggcatacggcacacaactgtagtaaaaaatggagaaatgcttggtgtatcgcatctaagaaacagaagagttttgtccaatgggtttgtttcattagggaaggaggatcttcagctcatgtatagtgatggtgataaggcttttggtacatccactgatctctgcattgatgagagactaagaatcgcatctgatggcattatttttgtcaggtcaggttaaagttacttgcttcagatacttagtaattttgaaaggaacatcaagagccttatcttattctttctggcgggcattgatccagtacactgatgcggctactgcttcagctgctagagaatccttagatggaaggagcatcccaagttacttgcttccggagcatgtaacatcctgctgcctgcgaatttctttttctgcacataaggatttgaacatcaagtttcagtcgaaccgcagcagtggaaatttgcgcatgttacattcagtaagccagaatacctccaagattcagatattgtaatgaacagattccatagacctgtttatggaggttgggaacaacaccttggattggagcatacaaccactaccccaaaaaggtcctacttaggcaacaaccagaaccgccattcttttgagaaacctgtgaggatttacaactaaagctgggaatactttttacatgtgatgaaatga

SEQ ID NO: 267258 - DNA, 1788 bp, Zea mays
  unsure (1)..(1788): unsure at all n locations
cttccgcggccgttttttacggccggtgcaggggacgtgtgtagtaccctttctttctcttcgaagaaagatgcggcggcgtgtgggggaaaccccgcccgtcacgccgggccgtccgtgcgtttccttttgtcttcgcttgcttcctttcgaaagtccttgcgtcacactcgccgatcgatcgagtctctccggattccagagaggcccaactgccgaagccatcgatcgccgccacctcttcgagcagaatagttgagaatggctgacgaggatatccagcctatcgtatgtgacaatggcactggaatggtcaaggccggtttcgctggtgatgatgcgccaagagctgtcttccccagcattgtgggaagaccacgccacaccggtgtcatggtcggcatgggccaaaaggatgcctacgtaggtgatgaggctcaggccaagagaggcatcctgacactgaagtacccgattgagcatggcattgtcaacaactgggatgacatggagaaaatctggcatcacaccttctacaacgagctccgtgtttcgcctgaagatcaccctgtgctgctgaccgaggcccctctcaaccccaaggccaacagagagaagatgacccagattatgtttgaaaccttcgaatgcccagcaatgtatgttgctatccaggctgttctttcgttgtacgctagtgggcgaacaactggtattgtgatggattccggtgatggtgtgagccacacggttccaatctatgaaggatacacacttcctcatgctattctccgtttggatcttgcggggcgtgacctcaccgaccacctaatgaagatcctcacagagagagggtactccctcactacgagcgctgagcgggagattgtcagggacataaaggagaagcttgcctacgttgcccttgattatgaacaggagctggagactgccaggagcagctcctctgtcgagaagagctacgagatgcctgatggtcaggtcatcaccattgggtcagaaaggtttaggtgccccgaggtgctgttccaaccatcccttgttggcatggaatcgcctggcgtccatgaggccacgtacaactccatcatgaagtgtgatgttgatatcaggaaggatttgtatggtaacgttgtcctcagtgggggatctaccatgttccctgggattgccgatcgtatgagcaaggagatcacgtccctggctcctagcagcatgaaggttaaagtgattgcgccacctgaaaggaagtacagtgtctggatcggtggctctattttggcttctctcagcacttttcagcagatgtggatctccaagggagagtatgacgaaactggtccgggcattgtccacatgaagtgcttctaagtttttttgggaaatttttccaaaaaaaaaaagaagtttctggggaagttcgacatggtacgtcaggcgttaccggctcattgtgaaccaatacatgaactgccatgataaggttataagcagaaataacagtagcactggctccaattcctgaagatgagtctggtgcgccctgctgtatgaaatggatcccactcgtatattcgtcaccgcgccgcactggtgtaacgtgttgcctcagagtttgcttttagctggttccttttttaaaaataagtactgtttttggttggctaccagtcattttgaacttcagtagcaaattatcttattaaaaacttgcttttttaannnnnnaaaaaaaaaaaaaaaaaaagggcggccgcccgggaatcg

SEQ ID NO: 267259 - DNA, 876 bp, Zea mays
cccacgcgtccggatatcagaaaggatctgtacggtaatgttgtcctcagtggtggctccactatgttccctggtattggtgaccgcatgagcaaggagattactgcacttgcccccagcagcatgaaggtgaaggtggttgctccgccggagaggaagtacagtgtttggattggtggttccattctggcctccctcagtacctttcagcagatgtggatctccaaggaagagtatgacgaatctggtccgggcatagtccacatgaaatgcttctgaatttctggagcagtatatctgttgcttgcattttcagttagttgggatgcaagtttgtcccgtggtctcgctagcattcttcgttctttctggatattgaagagctgttggccatggagcattgtgcaaggtggtaaagtcgattgatggtactacatgaagaaacatgtgcagtacttcagcagtatagatcgtcaggtcagtttagttttttttttcaacaacagtgccatattaggatgttcctgatgtgcgcagttggtctgggtttttacacaacgcaagggtgtcggctgtcgcccgtgcagtttgcgtctttgtgagatctgggtccgtttctgcactccagtacgtggaacaggtttcgcatttggtggccagtgccccagcgtggcgtgagtgttgatgatttgaacttggagctgtttgttctattcctttcatgaaacagatattatcgtttgtacagggataaataataaattgtttatccttcaaatgttttagatactgttggaacaaacttcgtttaattataatctcttggatttaattcgagtaaaaaaaaaaaaaaagggcggccgctcgcgatctaga

SEQ ID NO: 267260 - DNA, 545 bp, Zea mays
ttcacgcgtccgcccacgcgtccggcgctgcgctctcacgctcgcgtcaccggagctctccagaaccgaaccccaactgcccaagggcgagcgatccgaacccctcggcggcttcgtcaacgacgccgagaacactttgaggaatggctgaagaggatgtccagccccttgtgtgtgacaatggcactggaatggtcaaggcgggtttcgctggtgacgacgcaccgagagctgtctttcctagcattgtaggcaggccacgccacactggtgtgatggtgggcatgggccaaaaggatgcatatgtgggcgatgaagctcagtccaaaagaggtattctgacactgaagtacccaattgagcacggcattgtcggcaactgggatgacatggagaagatctggcaccacaccttctacaatgagcttcgtgtggcacctgaggagcaccctatactgctgaccgaggctcctctgaacccccaggcatacagggagaagatgacccagattatgttcgagacattcaactgcccagcaatgtat

SEQ ID NO: 267261 - DNA, 553 bp, Zea mays
cagaactgccgggacgacaccacgccttctagcagtggagataaacgttctacattgagggaccttacacacctgaggagcaccctagactgctgaccgaggctcctgtgaaccccaaggcaaacagggagaagatgacccagattatgttcgagacattcaactgcccagcaatgtatgtggacatccaggccgttctttccctgtacgccagtggtcgaacaacgggtattgtgctcgactctggtgatggtgtgagccacaccgtccctatctacgaagggtacacgcttcctcatgctattctccgtttggaccttgcggggcgtgacctcaccgaccacctgatgaaagatcctcactgagagggggtactccctcactacgaccgccgagcgggagattgtcaggacataaggagaagcttgcctacgttcctgatatgacaggagctggaatgcagagagtctctgcgagagacacgaatgctgatgcagtatacatggtcaaagttagtgccgagtgtgtccacatcctgtgcatgacgctgcgc

SEQ ID NO: 267262 - DNA, 516 bp, Zea mays
  unsure (1)..(516): unsure at all n locations
ccaaaaaaaaaaagaagtttctggggaagttcgacatggtacgtcaagcgttaccggctcattgtgaaccaatnacatgaactgccatataaggttataagcagaaataacagtagcactggctccaattcctgaagatgagtctggtgcgccctgctgtatgaaatggatcccactcgtatattcgtcaccgcgccgcactggtgtaacgtgttgcctcagagtttgcttttagctggttccttttttaaaaataagtactgtttttggttggctaccagtcattttgaacttcagtagcaaattatcttatttaatgcttgctttttcatatttgatgtttgatccgtcatagcaacccgcataaagaaactcttcagcacatcaccctgctctgctcccctatttttcctcgctacaatgtctatagcaaagatgacaatgggattttttctgggaaattctgggacagaaaaaattcttccatagggatgtaaatgaaaaaaatagggatgt

SEQ ID NO: 267263 - DNA, 1990 bp, Zea mays
  unsure (1)..(1990): unsure at all n locations
atcctaaaaccctaacccctagccagcgctccgccgccatccgccggcgagatggcgttgtacctgctgttcgagtcggcctccggctacggcctattccatgcgtacggtatcgatgagatcgggcagagcgttgaggccgtgcgctcctccgtgctggacctcgaccgcttcggcaaggccgtcaagctcactgccttcaatcctttctcctctgccgtcgacgcgctcaaccagtgcaacgctatctctgaaggaatcatgaccgatgagttgaggagcttcctggagctgaacctgccgaagcctaaggaggggaagaaggccaaatacagcctcggcgttgtcgagcccaaggtcggttcccacatctccgaggtcaccggcattccctgccagagcaacgaattcgtccaggagctgctccgcggtgtccgcctccacttcgaccgtttcatcaacgagcttaaggattctgacttggagaaggcccagcttggcctggggcatagctacagcagggccaaggtgaagttcaatgtgaatcgtgttgacaacatggtgatccaggcaatctttctattggatacgcttgacaaggacatcaattccttctccatgagagtcagggaatggttctcatggcacttccctgagcttgtcaagattgtgaacgacaattacctatatgccaagcttgctaagtttatcgtgaacaaatctgatttgacggaaaaagatattcctgctttggctgatatagttggcgacgaggacaaggctaaagaaattgttgaagcagcaaaggcttcaatgggccaggatctgtcaccagttgatttgatcaatgtccagcaatttgcccaaagggttatgaatctctctgagtatcgcaaaaacctttatgagtatcttgtgactaagatgaatgatattgcacccaacctgacatcattgattggtgaagtagttggagctcgcctaatctctcatgctggcagtctttcaaaccttgccaagtgtgcagcttccacccttcaaatacttggtgctgagaaggccctattcagagcactgaaaactcgagggaatactccaaagtatgggcttatattccactcctcctttattggccgtgcttcaaccaagaacaagggcagaatggctcgttacctggcaaacaaatgctcgattgcttcacgcattgactgctactcggaggctagtacctctgtctttgggcaaaagttgcgcgagcaagtcgaggagagactggaattctatgacaagggtgttgcgcctcgtaaaaatcttgatgtgatgaaagctgctattgacagtatggtcaatgacaccttaatggatgatgatggtaaggcagataatgagaaggcggacacatctgccaagaaaagcaagaaaaagaagaccaaaaccaaggctgatggtgatgcaatggacgtggataaaccctccaacgttgctggtggagaagctgagcctggaactgagaagaagaagaagaaaaagaagcataagctggaggaggaggcacaggaggagaacggtgcagcagatactacccctaagaaaaagaaaaagaagagccgtgaagcttccgaagaagctgaacctaagaccgccaccgatggtaagaagaagaagaaaaagaaggctaaggccgaggatgatgagtagccaagttatttgttgtatggcgtatgaatccgagagtatttgttgaaaaacagagatgaacgcctgcctagctcaactagcttgtagttcatgaggcgtttgatgcaaacccaactcaaagtacgaagttttcctatcgtctttagcttgtatttttattttttggttggatatgctagtgaactctagtgacttcgtatgctaacgatgcagaatagcagatccaatcagcaaaaatgaaaattcgtttgtttnnannnanaaaaaaaaaaaaaaaaaaaagggcggccgc

SEQ ID NO: 267264 - DNA, 754 bp, Zea mays
cctacgcgtacgccctcgcgtctttccatgcgtccgcccacgcgtccgattgactgctactcggaggctagcacctctgtctttgggcaaaagttgcgtgagcaagtcgaggagagactggaattctatgacaagggtgttgcgcctcgtaaaaaccttgatgtgatgaaagccgctattgacagcatggtcaatggcacctcaatggatgatgatgatatcgagaagaccgatgcatctcccaagaaaagcaagaaaaagaagaccaaaaccaaggctgatggtgatgcaatggacgtggataaaccctccaacgttgctggtggagaagctgagcctggaactgagaagaagaagaagaaaaagaagcataagctggaggaggaggcacaggaggagaacggtgcagcagatactacccctaagaaaaagaaaaagaagagccgtgaagcttccgaagaagctgaacctaagaccgccaccgatggtaagaagaagaagaaaaagaaggctaaggccgaggatgatgagtagccaagttatttgttgtatggcgtatgaatccgagagtatttgttgaaaaacagagatgaacgcctgcctagctcaactagcttgtagttcatgaggcgtttgatgcaaacccaactcaaagtacgaagttttcctaaaaaaaaaaaaagagaaaacagaaaaaaaaacagaaagagaaaaacgagaagagaaacaaacaaaaagggcggccgccctaaag

SEQ ID NO: 267265 - DNA, 450 bp, Zea mays
tgatgcaatggacgtggataaaccctccaacgttgctggtggaggaggcacaggaggagaacggtgcagcagatactacccctaagaaaaagaaaaagaagagccgtgaagcttccgaagaagctgaacctaagaccgccaccgatggtaagaagaagaagagaaagaaggctaaggccgaggatgatgagtagccaagttatttgttgtatggcgtatgaatccgagagtatttgttgaaaaacagagatgaacgcctgcctagctcaactagcttgtagttcatgaggcgtttgatgcaaacccaactcaaagtacgaagttttcctatcgtctttagcttgtatttttattttttggttggatatgctagtgaactctagtgattcgtatgctaaaaaaaaaaaacaaaaaaaaaaaaaaaagggcgggctgctcgcgatctagaac

SEQ ID NO: 267266 - DNA, 322 bp, Zea mays
agaacaaatcagatttgttcacaataaacttagcaagcttggcatagaggtaattgtcgttcacaatctgatttggcggaaaaagatgtcccagctttggctgatatacttggtgatgaggacaaggctaaagaaattgttgaagcagcaaaggcttcaatgggccaggatctgtcaccagttgatttgatcaatgtccagcaatttgcccaaagggttatgaatctctctgagtatcgcaaaaacctttatgaatatctcgtgactaagatgaatgatattgcgcccaacctgacatcgttgattggtgaagtagttggag

SEQ ID NO: 267267 - DNA, 482 bp, Zea mays
cccacgcgtccgcccacgcgtccgcccacgcgtccgcccacgcgtccgtgtccggctaaaaccctaaccctccgccgcccctcggacccccaaccagcagctgccgcggccatccgccggcgagatggcgctgtacctgctgttcgagtcggcgtccggctacggtctattccacgcgtacggcatcgatgagatcgggcagagcgtggaggccgttcgctcctccgtgctggacctcgatcgcttcggcaaggccgtcaagctcaccgccttcaaccctttctcctctgccgtcgatgcactcaatcagtgcaacgctatatccgaagggatcatgaccgatgaactgaggagtttcctggagctgaacctgccgaagcccaaggaggggaagaaggccaaatacagcctcggggtcgtcgagcccaaggtcggttctcacatctccgaggtcaccggcattccctgccagagcaacgaat

SEQ ID NO: 267268 - DNA, 558 bp, Zea mays
cccacgcgtccgcaaattatctgcactgaccagaagaggctcatctatgacacgaggacgatgaaggagtgcaacattcagatatttttagatattttacgggcggttcagatcagacaagaaagggtcatctagcaaaggttatcgggatgtcgatctttttgtcaaacaagtagatgggaaaaatgttactgattcagagaaattgagattctgacttggagaaggcccagcttggcctggggcatggctacagcagggctgaggtgaagttcaatgtgaatcgtgttgataacatggtgatccaagcaatatttctgctggatacacttgacaaggacatcaattccttctccatgagagtcagggaatggttctcatggcacttccctgagcttgtcaagattgtgaatgacaatgtggaaccaccttttttgaaattggggggcccactgtatgactatattgtgaacaaatctgatttggaggaaaaagatatcccagctttggctgatatagttggtgatgaggacaaggctacagagattgttgaagcag

SEQ ID NO: 267269 - DNA, 451 bp, Zea mays
ccgtgcttcaactaagaacaagggcagaatggctcgttacctggcaaacaaatgctcgattgcttcacgcattgactgctactcggaggctagcacctctgtctttgggcaaaagttgcgtgacaagtcgaggagagactggaattctatgacaagggtgttgcgcctcgtaaaaaccttgatgtgatgaaagccgctattgacagcatggtcaatggcacctcaatggatgatgatgatatcgagaagaccgatgcatctcccaagaaaagcaagaaaaagaagaccaaaaccaaggctgatggtgatgcaatggacgtggataaaccctccaacgttgctggtggagaagctgagcctggaactgagaaaaaaaaaaaaaaaaaaaaaaaaaaaaaggggggccccccaataagggaccccttcccccgggaattaattccgggccggg

SEQ ID NO: 267270 - DNA, 914 bp, Zea mays
gcactgctactcggtccgtgtaattcccgggttcgactccacgtccgtctcgtgcttaatttcacctgtgaatccttccatgctgatgtacatgctggaaacctatggttgctccgtgatgggcgaattggttttattgattttgggattgttggtcgaatatctccaagaacttgggcagctatggaggtctttttggcttcttttgcaactgaggattatgatgctatggcctctgccctctctgaaatgggtgctacagggaatgatataaatactaatgaatttgcaaaggacctgcgaaagatattctcatcgatacaggacttggatactgaaatcatagtggcaacagcaaggacccctgatgctacagcagtatctgctaatgttgtccttgatgagaggcagatgaatgctctatttcttgatctggtcagggtgagcgagtcttacgggctgaagtttcctcgggagtttgctcttctcatgaagcagctgctgtattttgatcgctacacaagactgctggctcccagcatgaacatgctgcgagacgagaggatcaacatctccaccaatcgacaaccaagaagaactgatagatttcagtgaagccacgtcgttagtcaccggccacgtactagaggagtcgtgatgggcgataatagcaagctcatgtgacccaatactgtatatagttttgccagaccagcatagaaatgaaccacacgctagaaattgtacactccgtcgtattctgggattgagcgttatatcgtactagtaggtaacatgtaaaggctgtatcccacggccaaagtaaatttcagatgaactgcttttgtctcaaaaacaaaaaaaaaaaaaaaaaaaaaaaaaaaaaagggcggctgctcgcgatctagaactag

SEQ ID NO: 267271 - DNA, 478 bp, Zea mays
gctctcagaaagatgtggtgattaaagttctaaagcctggtattgaagatactttgggtgctgatctgaattttatctatgttgttgcacgtgttttagagttcttgaaccctgaactacaaaggacatcactggtaggcattgtcaaggatataaaggaatcaatgcttgaggaagttgactttagaaaagaggctgcaaatattcaggcatttcagggatacattgatgcaatggggtttgacaggcaggcaaaagccccatttgtgtatcagcactgtagtacaaaacgtgtattgactatggaaagattgtatggagttccgcttactgatcttgattctataagatctcttgttcctgatcctgagttgactttagtcactgcccttaatgtctggtttggcagcttaatttcatgtgaatccttccatgctgatgtacatgctgggaatctatggttgctccgtgatgggcg

SEQ ID NO: 267272 - DNA, 1461 bp, Zea mays
cccccccgcccgccgccccgccgcgcgcgcgcggccgccgttttgcctcgccgttctgccgcgccatcgcatcgtccgcgctccctctcatcgttcttcccccggtacggctcgacggcgggcgtgggcgctggagttgcggctcggaggccgaggcgccgggtggtgcgttgggtgcgctcggttcgggagatcccggactttgctgctcgcgcggtcagacagggagcgccggaggaggaggaggctgtgcaagtgcaagctgtgctgaactaagggttctggcttcggactctgtgtacgcgccgcggcaggagggagctggagatgtacgggccgccgtcccgaggcggcgggggagccggcgctgccggagagcagccgagggtttaccaagtttggcatggaagcaacgagtttttcttgcaaggccggttcatatttggacctgatgtgagatccttgtttctcaccatattccttattcttgcaccagtggtggtcttctgcatatttgtggccagacatcttatcaatgactttcctgatcattggggagtttcagtcatggtcatagtgattgtcttcactgtatacgatttaacattgctgcttcttacctctggtagagatcctggtatagtgcctcgtaacacccatcctcctgaaactgacgctattgatatgaacaatgatgctggaaatggtcagacaccacaacaattgcggttgccacggacaaaggatgttattgtaaatggggtcattgtgaaggtcaagtactgtgacacctgcatgctgtacagaccacctcgatgctcacactgctctatctgtaataactgtgtggagcgctttgaccaccactgcccttgggttggccaatgcataggattgcgcaattatcggttcttctatatgtttgtattctctacaacattactgtgcctttatgtatttggtttctgctgggtgtacattgtcaagattagagacgcagaacagtcgtcgatctggaaagcaatgttgaagactccagcatcaattgttctgatcatatactgcttcatctgtgtgtggcttgtgggtggtctgtctgttttccatttctatctcatgagcaccaaccagacaacctatgagaacttcagatatcgctatgatcggcgggccaacccgtacaacatagggatcttgaacaacttcatggagatattctgcaccgcagtccctccttccaagaacaacttccgagccagggtcccagtagagcaaggtttacagcaatcgcgtgcgccagcaaggggtttcatgagtctaaacatggataaacctgttggggacttcgaattgagtaggaagccagtatcatgggatgaacctcggtcagcagctgatatcagggacttggaggttggtctagggggtctactggacgagaaagaaggcaggatagcccat

SEQ ID NO: 267273 - DNA, 524 bp, Zea mays
  unsure (1)..(524): unsure at all n locations
gtcgcgttggtcgttgcaactccctatagtgtgtcgcacccacacggtgtctccttctctgattgcagttgtggagcagcagctcgtcgttgtcttccctggcttctcccatggccgcctatcccccatcccctccaccgtgccctctcatctcctagcccctctgctcgccaccatcccctatacccttgctagcagcatggcgctcatcccttcctgatgtgagctgcacatgacgtctccagctctccattgatggcagctagctgcgccctcacttcctcccatggtgagatcgcccatggtggctcctcctgctcggcgtactcccctctgcaggagctcgcccagcccctctctgctaggaacagcagcacctncctccatggatgcctagttgttgacttgtgcaattcatagtcatcggtgaggtccctttgtcttatgctacttatctccttaatcgatatatgtgggtttgtggctgattgtgagtatgtgtgtgcttatgtgtgagatgtgag

SEQ ID NO: 267274 - DNA, 487 bp, Zea mays
cgcagctgggcggcaagcgcgtgggcatcatcggcctgggcaacatcggcacgctgatcgcgaagaggctggcagccttcggctgcgtcatctgctacagctccagaaagcccaaggaatccgtctcctacaggtacttccctagcgtccacgacctcgcgtcggaatcggacgtgctcgtcgtcgcgtgcgcgctgaccagggagacgcgccacatcgtgaacaaggacgtgctggcggcgctcgggaaggacggggtcgtggtaaacatcggccggggcccgaacatcgacgaggcggagctggtcgcggcgctcaaggaggggaggatcgccggagccggcctggatgtctttgataaggagcctaaggtgccggcagagctcttctccatggacaatgtggtgctgacgcatcacgtcgcggtcttcacgacagagtccaggtccgacctccgtgacgtcaccatctaaccttgaagctttct

SEQ ID NO: 267275 - DNA, 670 bp, Zea mays
caggcccaggtcaccaatcttcagcctcttacgaaagcggcgccaaaaaaaaaaggtctttaatccgcaaaagactaataagatcaccaccactctcctcctcgagtcgacgaccgaaaacagcacgcagatcccgcaaaggtgacagaacgaaaaggaaagaaaagaagaagaagaagaaagaaagaaagaaagaaatctcgtctcggtgccggtggttggttgttcaggatcgtcctcatggcttctcttctcctccactaacaacgccctcctccttttcctccatcgcctagcgcaaattctccgtccaccgcttcgtccaaaagcgtctcctggtaccggcactcgctgctgcagaacgctttatggcctcgatagatcaagatgtcattgccatgtccaagttgcttgttgcatgcatggcaagagctgaagaagccacaggcagcagctgctgcgccgccggccgcgggcttgtcggctagcaaatccccgcagctctcaacgatgcagtcgtcgaagatgtgcgtggtcctcgggttggggccgcgcgagatgacgcaggtgtagtcctccgacatggccatctcgccggggggcacgacggccacgccgccggcggcgaacacccgggcggacggcgagctcacgacctccggcaggagcc

SEQ ID NO: 267276 - DNA, 2019 bp, Zea mays
gaacatgccaagaagcattactggatcctcaagaattggccaactatcttcttcaccacaagcaaaggatttatcattttccaacagtgatgtctcagacgaaactaactttggcatttttaatctggcgaagttctccaagaaaagtgctcttccctgtgatatatgcatgcgatgtgatacaatattgaaccgtatttttgtttgctcgagctgtaaggctactgtacacttagattgctaccagagtctggtgtatcccactggcccatggaaatgtgaactttgccatgagatgccctcagattctgttacctctggtgaacaatcagaccaaaatggtccgaaagcttgtttggtgcaatgtggtttatgccatggaacatctggtgcttttagaaagactgtgaagggtcaatgggttcatgctttctgtgctgagtggctgttggagacaacattcagaagagggcaacataatccagtcgacggaatggagaggcttcatcacaaggataaagatacatgctctatatgccaccgctgtgttggtgcatgcttgaagtgctgtacattagattgtcaagttacttttcatccttcatgtgctagagatgctggtctttacatgaatacaaaaagattgggtaatatgttacaacatagagcatactgttgtagacacagtattgaacagagaaaggcctatagtcaacaatatggtcctgatgaaatcaagggcatgaaacaaatgagggttgaactggaactattacgtttcctttgtgagaggattgttaagagagaaaaagtgaagaaagatttggttggatgtgcacatgacatacttgctgcaaggaggataactgccgtctcttctttgtggacttcatgttatacttctggacctggagcaagttcagaatctgccactacttctgttaataacaaatcatatggtggaacaattcaaaggtctgatgatgtcacagtgagattggaagatgtcacagtggacagtacagttaccaaaaaacatactgtcaggttttctctgcataacagggacactgataggaacactgctgacagttccacatcaacaatatcatacaaacggaagttggatgatggggaatcacttgcattcaagagtcatcccggaacaccagctactgccttgttggagtcacgggatgcagaaaagccaatagataaaaagctcagggatatgtatcaaaaggagcttgtcatggttacttctcaccaagctttgttgaagaacaagacccctccagagagatatgtttacactcgccgcagctccatgtccaaaaggaagcaatgtagtcagcatgtagttcaaagacctggtggatgacagcaggcgaagtcgcttcttgggatatctggataataatattcttggaagctcgatgcagaaaaggacaaagtaaatacagcaagcggggctggccattaatcatgacagccgcaggggctggcgcgtggccgcactggaatcggaaatttggtgcaaattgggctcttcgaagatttgaccaattgagcccatgtcaccttggagtccaacatgcgctgaattcattcactaatttagtcaagggcaggttttgtgaaatacgcccaattgccagtatggcgtcttcacattatgtcgaagaaggaaatcgattgagttatgtgtggtgaaagaaagtgggtagacaaatattactgactggtgaaagctaccaataggccatccgcacattaatgaccatgtttaggagttgttgctatgtactaacagaactgcatgttttgttgtgtggctccattctgacttgtgaaatgaactctcggtaagtcatagggcatttcatgtttgtacaggcatgtaggtttagctttctggtatgtagctaaattcaaagcatcatcttgtagccttatgtggttaaccagatctttgatctattagttaatttagtaaaccaaaagctacagtgtgttagt

SEQ ID NO: 267277 - DNA, 1005 bp, Zea mays
cccacgcgttctaccgcgcccgaggagaccacaccacaccgcctcctccgcccgccgattcgtcgagctcgccctcccgctcgcctagctcccctgccttttcccttcctccccacctcctgccccgcgaacgtgctcccgcatgccaccgcgctgacgcgcgcggcggacgacggggtcgggatcatggacaagtacgaggctgttcgggacatcgggtcgggcaacttcggggtggcgcggttgatgcgcaaccgcgagacccgagaactcgtcgccgtcaagctcatcgaacgaggccaccggatcgacgagaatgtgtaccgcgagatcgtcaaccaccggtcgctgcggcaccctaacatcatccagttcatagaggtgatcctaactccaactcatcttgcaattgtgatggagtatgcggctggtggtgaactatttgatcgaatcgtagatcgtgggcgatttagcgaggatgagaccaggtatttctttcagcagttgatctgtggagtgagctattgccattacatgcaaatatgccatagagatctgaagctggagaatgttctcttggatggcagcccagctccacggcttaagatctgcgattttggctattccaagtcatcagtgttgcattcaagacccaaatcagcagtaggaacgccagcatatattgcacctgaggtgctatcccgtcgcgagtatgatggaaagcttgcagacgtatggtcctgtggggtgactctttacgtcatgcttgtgggagcatacccatttgaagacccagatgaccccaagaatatacgcaagaccattcagcaaataatgcaagtgcaatacaagataccagatcatgtccacatatctacggaatgccagcaacttattgcccgtatctttgttgccaatccaatgaggagaatcacattgaaggaaataaagagccatccatggtttttgaagaacctaccacgggaactcacggagactgcacaa

SEQ ID NO: 267278 - DNA, 938 bp, Zea mays
acggacttatccaaactagaagcatttatcaagaggtgctggaacatattacctcaataaaccaacagaaaataatgcaagtgcaatacaagataccagatcatgtccacatatctacggaatgccagcaacttattgcccgtatctttgttgccaatccaatgaggagaatcacaatgaaggaaataaagagccatccatggtttttgaagaacctaccacgggatctccccgagactgcacaaggcatgtactacaggagggataacacggtcccttcttattcagaccaaacgtcggaagaaatcatgaagatagttcaagatgcaaggaccatgccgaaatcatccagatcaggctatgggtggagcagtgagtattcggatgaagaagaagagaaggaagaggaacacagaccagaggagcatgaggaagaggaagatgaatacgataggagggtgaaggaggtccatgcaagcggagaactccgtatggacgctcttcacatatgaaagctagtggaagagaaagttgcatgtagataactgggttgttgcggatctgaaggatccagtgggatgtatgcagttttggcttgagaacatggtagtctggtgtctcggtgtattaaattatgttacatgaaaattgaccgacacaagcaaattctcaagccaaaactgcatacatcccactggatccttcagatccgcaacaacccagttatctacatgcaactttctcttccactagctttcatatgtgaagagcgtccatacggagttctccgcttgcatggacctccttcaccctcctatcgtattcatcttcctcttcctcatgctcctctggtctgtgttcctcttccttctcttcttcttcatccgaatactcactgctccacccatagcctgatctggatgatttcggcatggtcc

SEQ ID NO: 267279 - DNA, 718 bp, Zea mays
cacttatgctggtctaagtgatgttgggctacccctttccgaagcagaaactgcaggtgaagcatatgcaaagaggcttgttgactatgatagaaatgctgcaccaaggactaaagtttatgatgaccaaagtgactactatgaaatggaacgaaacagttggctctcttcaaaggagaggtcagtcctgaagcagcagcaagaggaagctgaggaagcagctaaaatccaaaagggtaaagtgactgttacatttgatttggcgggccgcaaggtgattttgaacaaggatggaagtactgaggtggaaacagagcacccgatcatgcgaccgcccgaagagaaggaccagagccaccgcatacagcccaaccccacaatcagagagcaacctgtgttcgtcgaaacaagtccagtcaaaccaaaaactgaccgagcaaaacagagcaagaggcttgccaagaatggtctgtgcctggaggtaaccggacggctgcagcatgatgaccagggcatggagagcattctgagtggcaaggtgaagaagggtgatcacttggcttacagctcctttggtcaggcacgcgaaggggatgatgttgaatgctccccggattttgactgagcctttactttgaggtaaaaaacatgaaacagcctgtgaagttgctatgttccccatccaactacacatgaaagagcaccttttttccggcct

SEQ ID NO: 267280 - DNA, 836 bp, Zea mays
accacatcagatcccttctcctcaccgtgtcgctgtctcaccatcaccacccacctcccgtcccacatttcgccaacgacgggagagagtggccatggcgtcatccgccgccgccgcctcctcggcttccgcgctcttccgcctcccggggtcgggctcacctgcgtgcaccgccacgaagcgggtggcgagaccacaggcggtcccgtcgcgcgaccgtgcggtgctcgttcgcgccggtggagacggcccggataaaggtggtgggcgttggcggaggcggcaacaacgccgtcaaccgcatgatcggcagcggcctccagggcatcgaattttatgctataaacaccgattcccaagcccttattaattcacaagcgcaatatcctctgcaaattggagagcagttgacccgcggcttaggtgccggtggaaatccgaatttgggagagcaggctgctgaggaatcaagagaaaccatagccactgccctgagggattcagatcttgtcttcataacagctgggatgggagggggtactggatctggtgctgctccagttgttgcccagatatcaaaggaagctggttatcttactgttggtgttgtcacctatccattcagtttcgagggccgtaagcgctctgtacaggcattggaagcactagagaagctggaaaagagtgtagacacacttattgtgattccaaatgataagttattagatgttgcggatgaaaacatgcccttgcaagatgcatttctccttgcagatgatgtccttcgtcagggtgttcaaggaatatcagacatcatcacaataccgggacttgtc

SEQ ID NO: 267281 - DNA, 542 bp, Zea mays
attgacccacgacttaggtaccggtggaaatccaaatttgggagagcaggctgctgatgaatcaagataaaccatagccactgccctgagggattcagatcttgttttcataacagctgggatgggagggggtgctgctccaattgttgcccagatatcaaaggaagctggttatcttactgttggtgttgtcacctatccattcaatttcgagggccgtaagcgctctttacaggcaagtatctgagccccccttcactcctgaattagaattcaaactgtcatatctcgttctgcgactttcttttgctccatggaagcattagtttgtagtcataacaatgacatccaaccacatttattgttgatcatgtatacaatggtcggtcaaataaaggtagcatattgcgagggcggtcctcgtcgctcccatgtgcaggatctcccatgtgacagatggcttggcaagattatactagagacttgtatttctcagatccatattttgcttaggtatgattcttgtgtcaatgctacatata

SEQ ID NO: 267282 - DNA, 348 bp, Zea mays
gccatggccacggccggcgccgtcatcgcggcatgcatcctggcgctgctggccccgccgccggcgcgcgcggcgggcggcgggcggtgcgcgggtgagtccttctccgcgaaccgcgcctacgcggcgtgcaacgacctgccccgcctcggcgcgtccatgcactggacctacgaccgcgcgtcgggcgacctccacgtcgcgttcgtcgccgcgccggccgcgccgggcggctgggtggcgtgggcgctcaacccgtcgggcgacggcatggcgggcgcgcaagcgctcgtggcggggccctttcccgacggccgcggcacgtgggccgtgcggacgtacaacgtg

SEQ ID NO: 267283 - DNA, 699 bp, Zea mays
gcgagcggcgcccttttttagtgtttttacatgagtcgggtcaaactgaggtcaacatatatgctggacaaagacaactttgccttgtactatgtggtattgccttgtgctgtgctagcgctacttgttcatccttcaacatcgcacaacatagtgaacagaatctgctgggccttctgtgtttatttggaagcagtttcagtgctgccccagttgcgcttgatgcaaaataccaagattgttgagccgttcacagctcattatgtgtttgcgctgggtgttgcaaggtttcttagctgtgcacattgggtccttcaggttttggatacccgaggccgtttgttgactgctctgggctatggtttgtggccttcaatggtgcttctctccgaaattgttcagacattcatccttgcagatttctgctactactatgtgaagagtgtttttggtggccaactggtgctgcggcttccgtccggggtggtgtgaacactgcagcgcgatagaagaagcataccgtccatttcttctgtgttaaatcacacaaagcaacagtcatgctcctagtgcccaaactttttcactctctcaaagtggattagcagagccccgttaatcttttttacttgtaaactgtttacgtgaatactgtaccatcaccgtggaacgtaggccgtccatctgactttttaatcc

SEQ ID NO: 267284 - DNA, 735 bp, Zea mays
  unsure (1)..(735): unsure at all n locations
ggacgcgtgggcggacgcgtgggctttcatggtgctaccatgtgctggactggcactactggttcatccttcagcatctcataacattgagaaccggatctcctgggcgttctgtggttacttggaagctgtttcagtgctgccgcagttacgcttgatgcagaatactaagattgttgaaccctttacagctcactatgtatttgcattgggagttgcaaggtttcttagctgcgcccactgggttctacaggttttggacacgcgtggtcgtctgctgacagctcttggctatggtttgtggccgtctatggtgcttttatcagaaatcgtgcagacattcatccttgcagatttctgctactactatgtgaagagtcttgttggtgggcaactggtgctacggcttccctcaggggtggtgtaagaagtgcagaagagatactctgaataacagttatgctctagtgcccaacctgggacccttcttttagctgatgatgttgcaagtaatgactatgtatgacaaaattgctgcaagggttctcttaaaacctagtttgtcattgagacttcatagctgcgccgtttcttgatgcccaatctccgagtactagcttcctgtgactgtcgtggtggtcttagaatcaggtggttagtgatctcattggattatataattctataatgctttcatatggncccaaaaaaaaaaaaaaaaaaaagggcggccgc

SEQ ID NO: 267285 - DNA, 490 bp, Zea mays
tcgggccttctgggcggtgtcaccggcatgggcgcgcctcgtttcattcggttcatcggccacgaccacgacaacctttttgtcgctggcgaggctgcgcacgcgctcggcataggcggtcttatctacaggctaaccagggagaagacctgcgccggactatccctcaagtctcaggatttaactgcgttatttctagctgttagactgtactgcagctttgtcatggagtatgacatccatacaattctggacactgctacacttgtagccacactgtttgttatttatatgatacggttcaaactgaggtcaacttatatggtggataaggataactttgcgttgtattatgtggtgttaccgtgtgctggactggcactacttattcatccgtcaacatctcataacattgtgaaccggatctcctgggggttctgtgtttacttggaagctgtttcagtgcttccgcagttacacttgatgcaaa

SEQ ID NO: 267286 - DNA, 603 bp, Zea mays
tgtcggcttttatccccagtagggataatagccgcctataccataatttgattgctgggatcgccatctcagtgtgcttgtatctctgctcgcttattcttctgaagattcctggtgtatagggatgaagatcttgatagaaggtttcttgtaaaatgtttgcttgataggatgtttcagctcgggcctcgatccccttttgctgttgtggagatagttgggatgcgcggagaagcggctaaagttggacatacggggaattgaattgccagaggctgcagatacagaagtccgaatcttgatctttttgttcattcaaaacacggatggatacaacaagtaggcaatccttccattcttttggaagttgtagcaactgttccctagactatgttgatgcaacctcgttgtatgagttatcctgtagaactgcacccgtgttgtgccataggtattctgaagccgttaaaaaaacgacgggcatttcttcttccttaaaaagtagaaatataaaggcagaggcgccctttcttctcataattgtaatgtcgtgtttgctttggagtttgaaaaaaaaaaaaaaagggcagcggttcgcgatct

SEQ ID NO: 267287 - DNA, 472 bp, Zea mays
  unsure (1)..(472): unsure at all n locations
gcaaggaagagtgttgctccaggtccaagtttcaatgtctccagaaattttgattgggggtgcaatggaagtcgcgaagcaagccnaacaggagatactcagggctgatgccagcataagccaaatcagcttgcagctaagattgggccaacaaatcaagcaacttcagctagcatcgcaagaacgtcgctgatctacatgcaggagatcactgatccatttgctggctgcttcatgagtctactcgggagtatttccttttgctaatttttctgacatacatgagcttggtctgctcgatgaggcagtaggctataggattctaggaaccgactgtgtacattgtaatcagagtgttcggagacgtgaagctgagtttgtaataatacacaagcagccttgctcagaaatgtactgggcaacaaattgtttgccacatactgtcaatgtaaaatgtatgaacaagttcctc

SEQ ID NO: 267288 - DNA, 628 bp, Zea mays
gcgggttcgaggcggccgtcggagctgagaatggcgggtgcaagtgcggcgccaactgcacctgcgacccctgcacctgcaagtgagacgacggcggcggcgatgacgctgcagggtctgcaggccctgatggggtcggaaggactctttatctctctagctaattaataagctctagctagtatataatattctagcagtgtcgtttgctgtgttttgttcgagtcagtcagacagtcagccgcgtgccatgggccatggcatagcatgcctcgctctatctgctccatcgccttgttctagtggtggtactgatgggggaacgaataattgtaccgagatgttggcgccgtgtcgtgtcgtgtcctgtcctgtcctgtccttcctggggctcatctagcagtcagactgtgttgtgttgtgttgtgctgtgtgggccgagtgtgcagtacagcatcgggccatgcccctgttcgatctgtctgcgactttaatttgtttgtgctgtgtcatctatctatctaatccatctatgctatcctctatagtctttaaaaaaaaaaaaaaaaaaaaaaaaaaaaaaaaaaaaaaaaaaaaaaaaaaccggacgcgtgggcggacgcgtggg

SEQ ID NO: 267289 - DNA, 412 bp, Zea mays
gttctagatcgcgagcggccgcccttttttttttttttgttcgagtcagtcagacagtcaggcgcattgcatgggccatggcatagcatgccttgctctatctgctccatcttcttctacgcatgccttgttctagtggtggtactgatgggggaacgaataattgtaccgagatgttggcgccgtgtcgtgtcgtgtcctgtcctgtccttcctggggctcatctagctagcagtcagactgtgttgtgttgtgttgtgctgtgtgggccgagtgtgcagtacagcatcaggccatgccccctgttccatctgtgtgcgactttgtttgtgctgtgtcatctatctatctaactaatccatctatgctataaaaaaaaaaaaagggcggccgctcgcgatctagaacctag

SEQ ID NO: 267290 - DNA, 461 bp, Zea mays
gagacgacggcgatgacgctgcagggcgtcatgggatcggaaggactcttttatcttaagctctagtataatattctagcagtgtcgtttgtgttttgtacgagtcagtcagacagtcagccgcgtgccatgggccatggcatagcatgccattgcctcgctctatctgctccatcgcctttttctagtggtggtactgatgggggaacgaataattgtaccgagatgttggcgccgtgtcgtgtcgtctcctagtcctgtccttcctgggactcatctagctagcagtcagactgtgttgtgttgtgttgtgctgtgtgggccgagtgtgcagtacagcatcaggccatgccccctgttccatctgtgtgcgactttgtttgtgctgtgtcatctatctatctaactaatccatctatgctaaaaaaaataaaaaaaaaaaaaaaaaaaaaaaaaataaa

SEQ ID NO: 267291 - DNA, 902 bp, Zea mays
ctttgatcaacgagcatgggatacccgtactcatggagtcaatatgccgatcttgcaaatggtctgttaggacatgtggaagggtcatgggaatgaccattggtgcaatgcttgaagaaatccaaactctctaccaacaacacaaacagtcttgttttctttacttgtccagtgaagttatcaagatttttggatctgatccatcttgtgcgggctatcttactagcttgatacaaatacttttcagccatacagtgcagcttctcagaacgattcaagattttacagccagaccagatatagctgatgattgctatttgttagcatcaagatgtattcgttactgtcctgatctgtttatacctacagaaacgtttcaaagattggttgactgcgcaatggctggtataactatacatcacagggaagcctgtaaatcgatcttgtcttttctatctgatgtcattgatcttccaaactcatctgacgggggacagtaccgtaaagttattaacacaatcatacttcaccgtggcgcaacccttactagaataatgattgctgccttaacaggggcgctaccatctggtcgtctggaggaggtttcttatgttctgctgtcacttagcagagtctttggtgagaacatgctgaactgggcaagggaaagcattaatcttataccgccacaagccctaacagatgcagaacgtttgcgcttcttcaacaccatatctgatgctgcttctgggtccagtctccataccataacagatagatttggtgaaatctcagatgtctgtagacgaaacaaaacagtgcaagacctagttcagagtgccttgcggcctcacgatttgaccttcacagtggttccacaacagatgtgacaactggatgtc

SEQ ID NO: 267292 - DNA, 638 bp, Zea mays
ctcgcgccctccccgtccggccgtcccacccacgcttcctccccctccgcgccgctcctacaggctccaaccatggcggtcgccaccgagtcgcgcggcagcgaggacagggcttcagcccatgcgaaccaggagaagcggtgggtgctgtctgatttcgaggttgggaaacctcttgggaggggcaagtttggccatgtttatcttgccagagaaaaaaggagtagtcagattgtggctttgaaagttcttttcaagagccagctcaagcaatcacaggtcgagcatcagctgcgacgcgaagtggagattcagagtcatcttcgtcatcctaatattcttcgcctgtatgggtacttctatgatcagacccgggtttacctaatcctggaatatgctgccaagggtgagctgtataaggaactgacaaggtgtaaacatttttctgagagacgttcagcaacttatattgcatcattggctagagctctgatctacctgcatgggaagcatgttatccatcgggacattaaaccagaaaatcttttggttggagcccagggcgagatcaaaatcgccgactttggctggtctgtgcataccttcaacagaagaaggactatgtgcggaactctgga

SEQ ID NO: 267293 - DNA, 772 bp, Zea mays
cccacgcgtccgcacataggctctggttctctggcgctaatgttcgagcaaggcgctgctcctgttgctgtagaagggattttttgaccaaccctccaaccggtgcggcttcgatctttcctctcctatcacctgaatccctcgagtattcatcgccggcgcagcgcggtctcttcccttcgctggagaagggggaaggggacacgaacggagcagaaggccatggacacgatgcggggcgcgctggagcgggccaagatgctggtgggcatggaggtcgacgaggagtccgcgttgccaccgcccgaggagcagtccttcttcgacgacatcaatcggcactgcaccctcaacaccactcagaggctctatggtttcgcgatatgcttggctgccggactgacgtgcacattcttgtcaatgcttgtcttcttcaatccagtgaaatttggggtagcattcacccttggcaatttgatggcccttggaagtacagcatttctcataggccccaaaagacagtttgatatgatgcttgattctgtgcgaatatatgccactgctatatatattgcaagcatcataattgctctattctgtgctatctacgttcgcagcaagctgctgactctagtggccatcattttggaatttggtgcccttatttggtacagccttagctacatacctttcgcaaggtcgattgtctcgaacgtgatgacatcgtgcttcgacactgatttctagaccaatcttcattgcctatgtcttt

SEQ ID NO: 267294 - DNA, 508 bp, Zea mays
atttcttttactattatttcttaagttggaagaacaatgtgaagctcgagttgcctgcttgagcatgcttcgttttgccagaaagcgtgcaagctacgtgactcaagttttatagaatttagttgattttatgggcatggagagacttggtaatgacggcagctgttgcaggtgatgccaaacccttgatcttgtctgcgaaaattggcatttgtgtttcccatggccaagacgatacgattccaaagctaacagatgctgctgcacagaagtaggctagttcctttttgtacctcaatacttttgatatggaaaatcatatacagttcagttggtctgcttaacattcgatttcactcgctccaaacgaaaaatgcgatccaatggtcgtgcgatttctgtgtaaaactggtacacgtttgactgtcctcaactatccatttttttttaaattttaatcacttttatatttctctttgtttttttattatcttttctttaataaaaa

SEQ ID NO: 267295 - DNA, 456 bp, Zea mays
aacaatgtgaagctcgagttgcctgcttgagcatgcttcgttttgccagaaagcgtgcaagctacgtgactcaagttttctagaatttagctgcttatatggtcatggaaagacttggttatgacgtgaacaggtgcagctgatgccaaacccttgatcttgtctgcgaaaatcggcatggccaagaccattcgatcccaaagctaacagatgctgctgcgcagaagtgggggcgtccctttgtgtacctctatactttcgatatggaaaatcatatacagctcacttagtctgtctaacattcgagttcacttgctccaaacgaaaaatgcgatccaatgttcgtgcgatttctgtgtaaaactgttatacttttaactgtcctcaactatccatttttttatatataatgtcttggtgttaaaaaaaaaaaagggcagaagatataaaggaacc

SEQ ID NO: 267296 - DNA, 1711 bp, Zea mays
gtccggaattccttgtcgtctccacgcgtccgttcttctactgcccacgcgtccgcaaaagcaaagggttctgcatcaaatcagaggctgtgtgcaagattgcatcgctgcaggagttcattcctcatgatttcgacgccagtgaccatgggacctcaagcttccctgtatctgcagtgcataggattggcatccttgacattagaatcttcaacactgacaggcatgctggaaatcttctggtcaagaagcttggtcctggcgccgacaattttggagagcagacagaactcattcctattgaccatggtctctgtcttccagaatgcctagaagacccatacttcgagtggatccactggccgcaggcatctgttccttctccgaggaggagcttgagtacattgcaagacttgatcctgtaaaagatgcagaaatgctacgcatggagctacccatgatacgagacgcatgtctcagggtgctggtgctatcaacagtatttctcaaggaagctgcagcgtctggcctctgcctctcggagattggagacatgatgagcaggcagttcactgcgaaggaggaggaaccgagtcagcttgagctgctctgcatggaggcaaggaagtgggttgaggaaagagagtcctttcttcccaacgaagccggagttgaagatgacgatgatgacttcacccagttccttatcgacggcgaggatgattatccggatgccttggaaccatcagctttctgcaagtttggtagcatgaaggcaagttctaggaatccactgtccaagctagatgagcgtgacgaggaagacggagacgggaccgaggaggacgacgacgacgacatcttgaccggtgcattgcctcagaggatctcgtctatctccaagctgtcgtcatccatgaaggggcttggcttcattgggaaacccaagccctaccgcacgtgccttccgaagggtaaagcgacaggtagaactaactacaccggcaaagccagcgagcatcagtccgggagcaggagcgccaacgagctgctcccgcccagcgccagtttcgtgaagctgtcggacatgagccctaaacagtggagcgcattcctcgacaagttccaggagctgctcccaggtgccctgagcgcccggaagcacgctgccggtgtcgtcggccagcgcccgatgccgaggctgggcacgtcttgccagttttgagagtagcagaagagaagccaccgaacccaaggtatgacgaacgcgcttctgttcgagctctggtgtgcagcagccaagcaggtacggagtattatatatgcttgtagtaggtgtctggagccggtggtggtagagagggtccgagaataagatcatccatggcatgtgagatgaggttgcgggagaaggaagggggttgtgtgtgtttgtgcatagtgtttcgcataagaggtccgttgttcttttttcttcttctctgtatatagttaagtactcctactgctactgcatcgcagcaccgggcacgggctgggatctcggccgttgttatctgaacgatggtggtgagtgtgctggcgtcgcctgctctctgctctgtctttgccgctgtaccattttggaggcgcttaccatattatgaactttgaactatgatatgatgttcgctacagattatattgaataaatatcacatgttctctgtat

SEQ ID NO: 267297 - DNA, 581 bp, Zea mays
ctcctgagcgccttccgcacccggaagcacggcgccggcgtcggccagcgcccgatgccgaggctgggcacgtcttgccagttttgaaggtgtagaggagaagccaccaaggtaaaaaaaaaatggatgtatacctccgttttagctctggtgtcgtgcaggtgcagcagtcagcaggtattatataaaaatgcttgtaggtgtatggatccagtagaagaggttgtccgagaataagatcgtggatggcacagatgagatgagcttggcttgcaggagagtggtgtgtttgtgcatagtgttttgacatatgagatgcgttgttcttttcttttttttctttttcttttttgtatatagtgagtactcctgccgcctcgcaacaccgggctcgatctcggccgttacctgatggtggtgagtgtgcttggcatcgcctgtgttctgtctttgccgctgtaccattttggagacgcttaccataatatgaacagctgtgatatgatatcgctacagatatatgcattaataacataaaaaaataataaataaaaaaataaaaaataatattaaattataaa

SEQ ID NO: 267298 - DNA, 648 bp, Zea mays
cagttccctctcgacagcgacgccttcgaaccgccagctttctgcaagtttggcagcgtgaagacaagttccaggaatccactatccaagctggacgagtgtgacgaggaagacggagacttgtcggaagaggagggcgagcacggtgacgtcctgaccagtggtgcattgccccagaaggttcctcccatctccaagctgtcgtcgtccatgaaggggcttggcttcatcgggaaatccaaaccctaccgtacaggtggcgtccccaagggtaaggtgacaggtagaactaactacagtggcaaagccagcgagcatcagtccgggagccggagcgccaacgagctgctcccgcccagcgccagtttcgtgaagctgtcggacatgagccctaaacagtggagcgcattcctcgacaagttccaggagctgctcccaggtgccctgagcgcccggaagcacgctgccggtgtcgtcggccagcgctcgatgccgaggctgggcacgtcttgccagttttgagagtagcagaagagaagcgcctgctctctgctctgtctttgccgctgtaccattttggaggcgcttaccatattatgaactttgaactatgatatgatgttcgcataaatatcacatgttctctgt

SEQ ID NO: 267299 - DNA, 1771 bp, Zea mays
tttgttttgcaatgacagaactaggccatggaagcagggtgcgatgaatagaaacaatcgcatcttatgattcagaaacaagagagttcatcataaatactccatgtgaatcggctcagaagtactggattggtggagctgccaatcatgcaacacatacaatagtcttttgtcaacttcatataaatgggagaaatgaaggagtccatgcttttgtagctcaaattagggatgaagatggaactgtgttgcctaatatccatatagctgactgtggccataagattggactgaatggcgttgataatgggcggatttggtttcagaatatacgtgttcctcgtgagaacttgcttaatttggttgctgacgttttgccagatgggcgatatgttagcatgatagataatccagatcagaggtttgcagctttcctatctccgcttacacttggtcgagtaaacattgcagttaactcagtctacatttcaaaggtcagcctagcaattgctgtgagatacagtttgtcaaggagagccttttcaattgcaccagatgcccctgaaatgttgttgcttgactatcccagtcaccagcgacgccttctaccacttctagcaaaagtatgtctgatgagcagtgctggcaattttatgaaaaatatgtatgtaaagagaactcctgaaatgagcaaagacatacacatttactctagtgctctgaaggcgacactaacttggcagaatatgattacgattcaggagtgtcgcgaggcctgtggaggtcaaggtctgaagactgagaaccgcataggaattttcaaatctgaatttgatgtccagtctacatttgagggtgataacaatgtgctaatgcagcaggtaagcaaagcgctttatgctgaatttttgggtgcacaaaagaagcagcagccattcaagggattgggtttggaacacttaaatggctcgagccctgttattcctgataagctgacaagtagcatattaaggagctccaagttccagatggacctgttctgcttaagggagagagatttactgaagcagtttgtagaggaggtttctctccatcttgcgcaaggcgaaagcagagaaaaggctttgatgctgagttatcaagttgctgaagacttggctagagcgtttactgagcgtacgatcctccaaatatttttggaggatgagatgaatgttccttctggttccctaaaggaggtactgggcttgctgagatctctatatgtcatggtgaacatagatgaatccacatcttttctaagatacgggcatttatcacgtgacaatgtagcccttgtgcggaaagaagtcctgaaactgtgcagtgaactcaggccccatgcgcttgctgttgtcagttctttcggaatccctgatgccttccttagtccacttgcttttgactggattgaggcaaatgcactgtcaaccgggagccactgatctcaggtttccacatacgagccaggttatcctgtgaaagtactgaatattgatggcggagcatagatccataccgtataactacaggagcacttgttgcctcggaacaaattgttgtgaatcctgttttgtataatagttttcttgaatataagcgaacgtagcctaacaggccaaagtccatgtaatggggtttacaacagtaataacttgcagagtgatgttaagcgagttgttgagcagtaaataaaatactcttgtcccaaaatatagttctttttcccccc

SEQ ID NO: 267300 - DNA, 770 bp, Zea mays
aatattcgggatcaactagatgggcttatggaaagagttgagattgagatttgctctaacaccagtgatttagatgctattaagaaggctataacatcaggtttcttccatcactctgcacggttgcagagggatggtacatataagactgtcaagaaccctcagaccgtgcatatccatcctagttcaggattagcggaggtacgtccgcggtgggtagtgtaccacgaattagttctcacgacgaaagagtttatgcgccaggtgacggaactgaagcctgaatggctggtagagatagcaccacattattaccaactaaaggatgtggaagactccggaacaaataagttaccgaagggccaaggacgagctgcattgtagctatgatacatgaagtttcgatggatgtattgtgttggactcatcgtaggagcatcataggatgtatataactccttatatcacgaacaggatacaagatgtcacttttcattgccctgcttaggtttcagagtaagctgattgtgaatgtaaattgtgacacgaagacatgcatgtgaaccgctataattgtcacactggagggagcgccggcatgcaactttcgtgtcttccagccgctacgcttgacgatcgttcgcatcctgccgccgtcgcgactattatccaagaaaatgcatatgtgcctttcctcgccggcctcttggatatgtatgtatgttgaacaaacgcctatcaagggaaggataaatgagggatgagtatgg

SEQ ID NO: 267301 - DNA, 1268 bp, Zea mays
gccgtttacggtttagccgcgtgctctctctgtctccctcggggacaattcggctaccgctgccgccctacgccaggttcccagctcttcgccaggcccttctccggcgacgagcacccaccaggccaccagttgacacttaatactacctgaatctaatgcttatcaatatgcctaatatttgctggcggagctttactttgtgcaacacatattctccatctaatcaactacaaggaggttgtactcaaagaatggatttatggattacttcttgctcacaagcagcgagacatcatgcaaggataggttcagttgattttcctgttaagaagaacgtgaagtcatcccaagtgcaaaacgcgacatgttttgttggtttagtgcggcagttgcagtgcagacggtcagcaaaaagccatatcctgaatgtaaagtctgatacagtagcccaccaaaaggtttctggtgtaagctggagtttggaaaatatgccacgaagaataggatgtgtagtctctggactaggttttgcagcgtatgggctggcgagtgctgagggtcctgtcaacaacaacatagatagcactgaatctgccatgtcttcaacaaatttatctcatgggaaagaagttcacacagactattctgttactggcattcctggtgatggaagatgcctgtttcgttctgtggttcacggtgcctacattaggtcaaggaagcccatacctaatgaggatcatcaaagaaggctagctgatgagttgagaacaaaggtcgcagatgaatttatcaagaggcgggcagagactgaatggtttgttgagggggacttcgacacgtacgtatctcagattaggaagccacatgtctggggaggcgagccagagctgttgatggcttcacatgttcttcagatgccaatcaccgtctacatgcacgataaagccgctggtggtctaatagcgatcgcggaatacggccaagagcacgggacggaagctcccgtccaagttctttaccatggctatggccattatgatgcgctgcagataccaggagagggtggtccgaggtcaagactgtaacgttagtggctctgaatctaaatggcaagttccggttcgatactttcttcctttgtacatgtacgtgcatacatacatactagtcactaacgcgcgcctagcgcgcgataggttgtataattttattaaaatgtgtgtatagcatgtattcgtaagagaaaaaaagattaagttatc

SEQ ID NO: 267302 - DNA, 550 bp, Zea mays
ggcgctcatagctgagccgtatgacccgcaggcattcctggtgatggaagatgcctgtttcgttctgtggttcacggtgcctacattaggtcaaggaagcccatacctaatgaggatcatcaaagaaggctagctgatgagttgagaacaaaggtttgttgagggggacttcgatacgtacgtatctcagattaggaagccacaagtctggggaggcgagccagagctgttgatggcttcacatgttcttcagatgccaatcaccgtctacatgcatgataaagccgctggtggtctaatagcgatcgcgaaatacggccaagagcacgggacggaagctcccgtccaagttctttaccatggctatggccattatgatgcgctgcagataccaggagagggtggtccgaggtcaagactgtaacgttagtggctctgaatctaaatgaaccgaatgtaagtaaaatacaaaagaagaaggaaggccgaattgaaagaatcgaaagtggaagaactggacgtgccttcaaacaattagaagacaatccta

SEQ ID NO: 267303 - DNA, 493 bp, Zea mays
aatagaaatgctacgtatcaccagtagcaagttgagatgtataactggcgaattggattattccaaaattgtgataaaagagtactctctacgtgttgtatatttggactggggatatctcggactcatgagaaaccaccgagactgctactgcaccgcggtgccctgacgtgttgctaacacgtgctaggtgactgagaatagttgggtattgcgttttttttaatatgttctgaacatgagaatgccctagtatttcattaggatgtgtacattttacaatgttttatggacaattactgttgtatttttacttttgaactccagagccctgttttggtcacgcactatagtgttcacctaaactctttttcgaacgtttactaattaatttttttttcattttttttttttttatgtttttttttttctttttttatttttattttttttattgtttatttttttttttttttttttttattttattttt

SEQ ID NO: 267304 - DNA, 354 bp, Zea mays
ggagatcccgcctggccccaggctcctcatacttgatcacattaaaagagatccatggtggacaaaagcaaattaagtgatcggcactgcggcactgcctcacggtgccagttcttttccccctcgagttgcagaaattggaccaggagaaccgtttaatttagctattcagtgacgacctctttggagcagtatttggttgtgcgtactagtatatggtttctagtcatcattcacgcttttttttttgagccgaagtgtttgcaaatcactctgatcttggaatgacagaattttgtattcccaaaggtttatgctgatcaatccagattttactactagtttagggatgtc

SEQ ID NO: 267305 - DNA, 701 bp, Zea mays
ttcgtttccagactcgtccaccctataaattgtctcgccagaccattccaatccggcaactcctgctctgcctgagcctgagcgtaggcggctaccagagagaagggtaggcggcgccggcggcgggagcaatagaagagcggtaaatccaagagagatcagagcctcggagggaaacagaagcgcacagagcatggagagcccgatctcgaggactaacctgaattgcatcagcctggcggacccgaacgtccagaaatcagtggcgctcctcaagcaggcatgcctggattcaggcttcttctatgttgtggatcatgggataagccaagagttcatggatgaaggtttttgcccagagcaagaagttctttgaccttcctcatagtgagaaaatgaagcttctccgagacgagaagaatagagggtacacacccatgctagatgaaattcttgatcctgaaaatcaagtttatggtgactactattgttgatattatattggagttgatgtaccttgctaattattcataatcatatcttctatttttatggtctcatttcattgctcttttatataagtttctactctaatttgtttgtaatttattgttcttttttttatggtatggttttttttattttttatattttattttttatatttattttttttttttttttatttattttttattttt

SEQ ID NO: 267306 - DNA, 541 bp, Zea mays
ggatcatgggataagccaagagttcatggatgaagtttttgcccagagcaagaagttctttgaccttcctcatagtgagaaaatgaagcttctccgagacgagaagaatagagggtacacacccatgctagatgaaattcttgatcctgaaaatcaagtgaatggtgactacaaggaaggatattatattggagttgaggtacctgcagatgatccagaagcaaacaggccattttatggtccaaatcagtggccttctaaagaagtattaccaaaatggagagaagtgatggagcaatatcacagggaggcgttgagagtagcaaaatcagtcgcaaggatcatcgctctcgctctagatctagacgtggacttcttcgatagacctgaaatgcttggcgagtccatagccacgctaaggctcctgcactacgaaggtaaggtgtcagatcctgcaaagggtgtttacggagcgggcgcccattcagactacggcctgataactctcctggcaaccgatgatgtagttgggctccaaata

SEQ ID NO: 267307 - DNA, 1303 bp, Zea mays
  unsure (1)..(1303): unsure at all n locations
ggcgcgtgtctgctgaggcagggggagaacgaagcagcagcagcagcgccatccgctcgcttccttccccccaccgccagcgtcgcctctccgtgtgcgcgccccgccgggggtggcgtcactgcacccttgggcagcgggcgcatacctacctacgtgcggggggagccacacgcctccctctcgcctcttggcatggacgccggcggagagaagtgcggcgacgcggcggcggagggcggggagggtggcggagacctctacgcggttctcgggctcaagaaggagtgctccgacgccgagcttaaggtcgcttaccggaagctcgccaagaaatggcacccggacaaatgctcgtcctccagcagcgtgaagcacatggaggaagccaaggagaagttccaagagatccagggcgcctattccgtactctccgacgccaataaacggctcctctacgatgtgggagtatatgatgacgaggacgacgaggatagcatgcaggggatgggggacttcattggtgagatgacccagatgatgagccaggtgcggccgatgaggcaggaaagctttgaggagctgcagcagctttttgtcgacatgttccagtctgatattgattcaggattctgcaatgggactgctaagggccatcaggttcaggggcaagccaaaagtagaacatgctcaccacggtcccctcctactactatagtaaaggaggcagaggtgtcatcatgtaatggcttcaataagcggggttcatcagcaatggactcaggaaagcctccaaggcctgttgaatgtggtgcaggtcagagccaggctggattttgttttgggcttgcttctgacgaacggtcatgcaattgaccaaacatgtaccataagcgaatgtgatgtaggagattgttatgtaaagagacttttgtggccactttgatgttttgttttatgcgtaccttttttgagaaaaaaaatgattgtggtgctatgtgagtgcctttttctcatcataattttaggcgtctgtagattcacttgagaagtatgaagtccctaggtggttattaaaagaagttagcagctatgtaaaagttagctacagtggcgagtctttaagtgctgatattccttgatagtatgctcatgtgttcacgtcatttttctgttactctctattactgcttcctgtgttgtgaaatatattattttgccctggtgtatttggtatttataaggtttatgaagaaacagaaattcagcatggcttgtacaaattntaaatatatatttttta

SEQ ID NO: 267308 - DNA, 1013 bp, Zea mays
gctgtgtggagagacgggagaacgaagcagcagcagcagcaggcgccatccgctcgcttccttccccccaccgccagcgtcgcctctccgtgtgcgcgccccgccgggggtggcgtcactgcacccttgggcagcgggcgcatacctacctacgtgcggggggagccacacgcctccctctcgcctcttggcatggacgccggcggagagaagtgcggcgacgcggcggcggagggcggggagggtggcggagacctctacgcggttctcgggctcaagaaggagtgctccgacgccgagcttaaggtcgcttaccggaagctcgccaagaaatggcacccggacaaatgctcgtcctccagcagcgtgaagcacatggaggaagccaaggagaagttccaagagatccagggcgcctattccggtctcaatcttccttctctcagcacccttacacaatacacccgcctcactgctctgttccatccatattcgcaaaccaccccttcacctgtggcaactactgaccaacgacaactgataaactgaacagcagcaaacggaaccgatctagcctgttggtaaactcattgcgtggagcccttgtgctcccatcccattgttcttgtgcagtactctccgacgccaataaacggctcctctacgatgtgggagtatatgacgatgaggacgacgaggaaagcatgcaggggatgggggacttcatcggtgagatggcccagatgatgagccaggcgcagccgacggtaagagcggatagcaccattggtcctagttccagatgcttctctgtactatcaaggccatgattagctagagagccatatatacgatttgattgtcacatgcacgctgctttagaccgtgtccatcagttcactcatatgatcacacaaaatactgttttgcgctgtaaactacaatgtttacaagtgaaatttgaatcaggggcggatccaccatgtgggcaaagtgggccatggtcccacctc

SEQ ID NO: 267309 - DNA, 1544 bp, Zea mays
cgccatccgctcgcttccttccccccaccgccagcgtcgcctctccgtgtgcgcgccccgccgggggtggcgtcactgcacccttgggcagcgggcgcatacctacctacgtgcggggggagccacacgcctccctctcgcctcttggcatggacgccggcggagagaagtgcggcgacgcggcggcggagggcggggagggtggcggagacctctacgcggttctcgggctcaagaaggagtgctccgacgccgagcttaaggtcgcttaccggaagctcgccaagaaatggcacccggacaaatgctcgtcctccagcagcgtgaagcacatggaggaagccaaggagaagttccaagagatccagggcgcctattccgcagcaaacggaaccgatctagcctgttggtaaactcattgcgtggagcccttgtgctcccatcccattgttcttgggcagtactctccgacgccaataaacggctcctctacgatgtgggagtatatgacgatgaggacgacgaggaaagcatgcaggggatgggggacttcatcggtgagatggcccagatgatgagccaggcgcagccgacgaggcaagaaagctttgaggagctgcagcagctttttgtggacatgttccagtccgatattgattcaggattctgcaataggactgccaaggcccatcagtttcaggggccagccaaaagtagaacatgctcgacctcaccttcatcatcaccgtcccctcctcctaccacagcaaaggatgcagaggtgccatcatgtaatggcttcaataagcggggttcatcagctctggactcagggaagcctccaaagcctgttgaaggtggtgcaggtcagaaccaggctggattctgttttggggtgagcgacacgaagcaagcgccgaagttgccaggtcagaacgccagccggaggaggaacggccggaaacagaagctgtcatccaagcacgatgtttcatctgaagatgaaacggcggccggttcgtaacaccagcagtttgacccattggcttcggtgatatatcattcgttggcccttggctgtgcctaggggccctagtagctagcagcagcagcagggacggcacatcatgccagctgctgtgatctgaagaggcgtttagctcatcatatgcctcaccttaggcctgtgggggattttccattgaaactcgtcgatgatactacatctttctttctccatctgtgtcgtttgtgttgtaagacagtgacttctgaagtctgatcgtctcggttctttttattaacatctgatatacgttactgcctgtctatagtcgccaaaaaaaaaaaaaaaaaaaaaaaaaaaaaaaaaaaaaaaaaaaaaaaaaggaaaaaaaaaaaaaaaataaaaaaaaaaaatgggggtgcctttagaacaagcacgatattagttgtgccagatagaaaaaaaaaaatgccaatcgttccacatccaaatatatgcaaaaaccctgaaataccaaaatttattcaggaaaaatcac

SEQ ID NO: 267310 - DNA, 1082 bp, Zea mays
cttcttgtgcagtactctccgacgccaataaacggctcctctacgatgtgggagtatatgatgacgaggacgacgaggatagcatgcaggggatgggggacttcattggtgagatgacccagatgatgagccaggtgcggccgatggcttaaaaaagacggaattgttatgaaagctccttatcctccatggttttttgtggatactaaaagctgaacttttagaggcaggaaagctttgaggagctgcagcagctttttgtcgacatgttccagtctgatattgattcaggattctgcaatgggactgctaagggccatcaggttcaggggcaagccaaaagtagaacatgctcaccacggtcccctcctactactatagtaaaggaggcagaggtgtcatcatgtaatggcttcaataagcggggttcatcagcaatggactcaggaaagcctccaaggcctgttgaatgtggtgcaggtcagagccaggctggattttgttttggggtgagcgacacgccaaagccgcgaggtccgaacgccaaccggaagaggaacggccggaaacagaagctgttccccaagcactacgttacatccgaagatgatacggccggttcctagcatcagcagcacggtagcagtttgaccgttggctttggtgatgtcagcagtagggagggcacatcatgtcgcctctgccagctgctgtgatctgaagaggcgtttagctcatcatatgcctttagtcttttgagaggtctttagggttgaaaggtacttcgaaaaccgaaccagcgtctacaggcctaagagggatttccattgaaactcgtcgatgatactacagttttctttccccatctgtgccggttgtgttgtactaccactaccagtgacagtgagtgacttctaagctattcatttttttaactggagaagttgataccatgataattaaaaaaaattgggtgtgtattgaactattaccaaaaaaatagtacttggattgtgatgttctgaacaaaaaaaaaaaaaaaaaaaaaaaaagggcggccgttcgcgatcaagaactagtct

SEQ ID NO: 267311 - DNA, 425 bp, Zea mays
gatgtagatagcagtacatggcgccaggtatttcaagttattcgtaccattgaaaccatgctctccaaaattcacatgaattagattggtcaccaaataaaaaaaggcagagctcattccagaattctaatgtgaggaaggtgtacgtttgatcatttgttcatccattgtatatgaatcatgcactaaattaatcaaagttttaacatatatattcaaaggctagaaatctgaacctaagtatgagcacccgatagggcatgttgtcgtagggtgtgtttgactatggtacatctggatgaacggatgtatgctaagttgaattgtattttaataaaaggtgtttgatgcggatgtatgagtggatgtaaaaaaatacagagattatttggttgtatgagtcaatgccatttgttgggcttgtg

SEQ ID NO: 267312 - DNA, 1117 bp, Zea mays
ggaaatcaatatccttcacaacagtaatgttcctgtggctgagatgtcatcacaactgtctccgtgggcagctgctctgttccagttcttgccacccttcatcaggagagagctgctgctccaccaagaatcagataactctgcgcagttgtcccaaattgacacggagcaactgctggcccatctagtagaaacagaaatgataaagagaacgaaagaaggaaggtacaagggaaggaagttcagttcagtatgtcatttctttggatatcaggctcgaggatctacaccatcaaatttcgactgtgactatgcttatgctcttggacgtatctccctgcatatgattgcagttggattgactggctacatggcaactgtggctaatctgaaagaccctgttgacaaatggagatgtgctgctgctcctttaactgcgatgatgagtgtgaagaggcatttacgtggccctggagcaatccctatagggaggccttccattcacccttctccaattgacctgaaagggaaggcttatgagttgctgcgagagaaggcttcaagcttcctccttgacgacttctacaggactccaggaggcattcagttcgaagggcctggttcagatgcaaagcccatcacgctgaccattgagaaccaggactacatgggtgacattgagatactgaaagagtaccttggcaaggttaggaccatggtgaagccagggtgctcccgggagatcctgaaggcggcgatcagttccatggtgtcggtgacggatgtgctgactgtgatgtcccaccccctcaacgccgagctgcccctctaccatttcaagtgagcgagggcatcagtctggttgttattcctagagtgtttttgaaacagcagaagattctgcttcatggctgccggtcttctttttttttaatttgggtgagaattaagcaatgggttgtactaataaacactgaaacagtacttgatactgaactgagtcgcgtgctagttgtattattggtggcagtattccagttttcaagaggtctctagaatatccaagattgataacactcatctttcagcctagcaatatagtagtagttctttcttt

SEQ ID NO: 267313 - DNA, 673 bp, Zea mays
  unsure (1)..(673): unsure at all n locations
cggtactgcagctgctgctccaccaagaatcaaataactctgcgcagttgtcccaaatttgtgattctaaatgcccaacaacaactcaatcaaaacaatgtaattattggtgttatagtgtcctattgttttcagattgacacggagcaactgctggcccatctagtagaaacagaaatgataaagagaacgataatttccattgttgttgttatttcttgttttttttcttctctgaacctctgtccatagtgattggggatgtttgatatttcagaaagaaggaaggtacaagggaaggaagttcagttcagtatgtcatttctttggatatcaggcttgaggatctacaccatcaaatttcgactctgaccatgcttcgcctcttggacgtatcgtccctgcatatgcattgcaagttggattgacgtggctacatggcaanctgtggcttaatctgtagaaccctgtctgagaaataggagatttgcttgctgctcctttaacctgtaatatagatgtcanctgaccattgccttcaagaatcatgacgctgaaaggttactctatctatttatgttgacctagttgcacaatctgttgtgtctaccaggcgatgatgagtgtgaagaggcatttacgtggccctggagcaatccctatagggaggcct

SEQ ID NO: 267314 - DNA, 1647 bp, Zea mays
aaaataatgaaacaattctagtgtttgatttgggaggcggaacctttgatgtatctgtattggaagttggtgatggtgtgtttgaggtgctttccacatctggtgacacacaccttggtggtgatgacttcgataagagaatagtagattggcttgctagcaacttcaagaaagatgaaggtattgatcttctgaaggataaacaagcccttcagaggcttactgaggcagcagagaaagctaagatggaactgtcaacgctgacacaggcaaatattagcctaccattcattactgctactgctgatgggccaaaacacattgaggcaaccctctcgagagccaaattcgaggaactatgttcagaccttatagacaggcttaaaactcctgttaataatgccttaagagatgccaagttgtctgtcagtgatctagatgaagttattcttgtgggtggatccacccgaatccctgcagttcaagaacttgtgaggaagcttactgacaaagatcccaatgttacggtcaaccctgatgaggttgtttctcttggggcagctgtgcagggtggggttttggcaggagacgtgaaagatgtagttcttctggatgttactccattatctcttggtttggagacattgggaggagtgatgacaaagattatccccaggaataccacactgccaacctcaaaatcggaggtattctcaacagctgcagatggacagacgagcgttgagattaatgttctccagggagaaagagagtttgtcagggacaacaagtccgttggaagcttccggttggatgggatccctcctgcacctcgtggtgtcccacaaattgaagtgaagtttgatattgatgcaaatgggatactctcagttgctgccattgataagggcactggaaagaaacaggacatcaccatcactggtgctagtacgttacctaaggatgaggttgagagaatggtagaagaagccgataagtttgccaaggaggacaaagagaagagagatgcaattgacacaaaaaatcaggccgattctgtggtctaccagactgagaagcaactgaaggagcttggcgataaagtccccgctcccgtgaaagagaaggtggatgtgaagctccaggagctcaaagaggcaatatctggtggatcaacacagagtatgaaggatgccatgtctgctttgaaccaggaggtgatgcagattggccaggcaatgtataaccagtctggtgccagtgctgctgggcctactcctggtgctgaggctgggcctacccctggtaccggaccagcgcagaatgatggggatgtcattgatgcggacttcacagatagcaattgaggggtgatcgatgcatgaccatgtgttgagcatggttggcataaaggagagtgagcaaatagttccttttttgtgttgggatttttactgtaggctatctagtatggagttgatagcggtagtgtttcgcgaacttttctcgtgattttgactcaacaattggctgaatgctatataaagttcaaagaagggcacaaggtttttattcaaattgtagctgattaattgaattgttgcaacagaagtattgaacaaaaaaaaaaaaaaaaagggcggccgc

SEQ ID NO: 267315 - DNA, 342 bp, Zea mays
tcgtttacgcgtgggcggacgcgtgggcgttggggccggaccagcgcagaatgatggggatgtcattgagccaggacttcacagatagcaatggaggggcgatcgatgcatgaccatgtgttgagcatgggtggcgtaaaggagagtgagcaaacagatccttttctgcgtcgggatgggcactgtaggctatctagtatggagttgatagcggtagggcgctgcgaacttcaatcgtgaggatgactcaaccattgggtgggtgctgtataaagactaaagaagggcacacggtttctatttgaaaaacacaaacaaaggggagaacattgtagacgatcc

SEQ ID NO: 267316 - DNA, 414 bp, Zea mays
gtgctgaatatgctgaaagatatttaaatgaaactgcagaagaagaggtggttgtgcttgtttcggaaagcagcgatgaatctgaagtttgggactgtgagaccacggtttccacattctctaaccttgataatcatcctgggacaattgaaactccaggtatctccagagcgcggttccctagggttttccctggagaaacaactacaacaaatggcatcatcaagcttcatgggaaagagaaactgccagtagaatacctcccagaggagaaggaaaggtgaaaaggaaaaaagtaaagcctgtaaagctttgtcactgataaattaaaaaggagctgagaaggaaacaaaaagagaagaagcaagaaaggcacattaaagaaaaaagagagaacccggaagcaaaaaagag

SEQ ID NO: 267317 - DNA, 432 bp, Zea mays
gcggggagatggtggcgccccccgcgccgctgcccggggtggcacagggccgcggcgccgacgtggcgctgtcgccgcatttcggccttggcggcgcggtgcccgtgccggtgtcggcagacgcggcgcaagcgctggagggcgactgcgcggcgggccgcgtggagctacgcctcgtcgtcatgggccgggtcaagtacatgagcgggccattcaggaccggatggcgcgggctatacctgcgctgcgatgtcaccgtcggcctctgggtggacgccaccgcgggcgacgacggagccggggacgtgccactgctcgagtaccccaagtgctccgtcgacgcttgagttgatccttgatcggcgcaatgcatgagcgctcagatgatcagattttcagaattctggtggagaataaggaaattgggaaaaa

SEQ ID NO: 267318 - DNA, 1729 bp, Zea mays
tcctcgcgtccgcaaaaggaggcagccaggattgctgaagaacgaagagtaatagatgagcatctcaagagcgaatttgatattatcaaacaagaaaaggaagatctccgtgttcagttaaaaattagtacagaatcccttgctcatgaacatgctgaattcatgaataagatgcagcaagagcatgctagttggcttagcaggatacaattagaaagagaagatctgaagaaagatattgatatccagagaaccgagttactgaattctgcaaaggctaggcagatggaaatagattcatatttgagggaaaaagaagaggagtttgaacagaaaaaatccaaggaacttgaatacatcaattctgaaaaggaaactatcagctcaaaactagaacatgtcaggcttgaattgcaaaaacttgaggaggagaggaaaaggtctatgctggagcgagagagaagagaggaagagctgtctgaaacaaagaaaactatagacgcgcttaatgagcaacgcgagaagtttccagaagcaaagaaaactggcttcattcagaccgaaaatcaattacacagcaaatgtagctgcttaatgagttagaagagctgaagattgaatctgagaacaggcaactgtctttgagacagtgtgggaaatcaaagcatgctggtgtggaaaacctggaagacaacggtgttcacctgtctcctgatgaggatcaaaatgttagtccaaaacaaactactgtaaagaaattggaagtgtccccttcagtctccacaccaatttcttgggttaaaaaatgtgctcaggtgatattcaaacgctctccagagaagagtgctgatccaaacaatgacatacgtccaaagttgggaaatgtcaatgactgtacctccttagctactgcctattcacatggattgtttgcttgtcacctgcaaaatggtgctcaaaaagtaccacaagctatcgatggtctgaaagttgggaaaaagaggcttaataatgcactttctcatggtgactccgaaatttcacagccaaaacgcatgcagcaaaggagcactactcagactttgagagtggttggaggagaaattgattccaactgcagcccatcagttctagaagaaaaatgttcaaagaatgaacatgatgcagtcccagttggtttgtgtggcaagggaccacaaaatccccaagcagagcattcagaggatatttcagtgtctgcatctgaaccgtcgaacggacctggtgttgtggactctgaggacaaggatggggcagatgaggagtctgacgatgaaggcgaggacgaggaggaagagaagacgtcatcggcgaagaagctgtggcgtttcctcatcacatgatttatttatctttgtcgtacgataaaaaaaatagcacggctaactgtaggttctatatgatggtaggaggccacttaggcatccaaagctctgctagtttcattggctttgtcatggcgtgtcctctggtgtgtagtagaggtggaagaaggtactggtttggttgtgtgcttcaggtgttgtgagtagcgcggtggctttggaaggcgctgtggactgtctgtcccccacctactaccacccatggctttttttttcttcctgtttatcttgtccgcaggaagacgtgtgtaaagtgattgacagtttccgggttggtgtgaaaatgagcctgcgtggttgctccc

SEQ ID NO: 267319 - DNA, 1402 bp, Zea mays
cccacgcgtccgcccacgcgtccggtaacagccaggcagagtatcatcagcatccaattgatttcctgcttttctttggcgcgatcgaagtaatctacttctcagcttcccttgtcaagtttcatgaaggtgcttgggttcctattactctctccttcatatttatggtggtcatgtgtgtctggcactatggcacgataaagaagtacgagttcgatgtgcaaaacaaggtttcagtaaactggctcttaaaccttggcccttcactgggcattgtacgcgttcgaggcattggactaatacatacagaactaatgtctggaatcccagctatcttctcccactttgtcaccaatctgcctgcgtttcaccaggtactggtattcctatgtgtcaaatcagttcctgtgccacatgtgcaaccggaggaacgatttctggtgggtcgcattggtccaaaagagtataggctatacagggtcattgtcagatatggttatcgcgatgtgcagaaggatgacctggagttcgagaaggagctagtcagcaacattgcagagttcatccgcagcagtggggaatatgacaagaatggcttcgtggaggacacagataagcccttcttcgagaagctgtccaccatcagtactggaattaatatgttggaagaggatggagaagttgatgcatatgtatcccctcataaggagatagacccacacaatgcagcacccaagcgaaagaaagccaggttcatgataccaaagagtgctcaggtggacagtgaggtgcgccgcgagctgcaggagctcatggacgctagggaggcaggcatgtccttcatcctggggcactcgtacatgaaggcgaagagcgggtcgagtttcataaagcggattgtgataaacttcttctacgagttcttgaggaagaacagccgtggccctgcatacgccgcaaacataccccatgcctccactctggaggtaggaatggtctaccaggtctgacaacagttagcagctgtgtaaaggtagagagagatgagacgacgcctgtcagccccacctgtatatatccacttgttgctgccgataccgttaacacaatcacaggatgacacgagtagtgagtgacccttgagcacagccaatgctgaggaagcagctgaagatgagatcatctgtggagagcccagccagaagtatgcatttctgtttgtagagccttttgttgtgccggtagttgttaagtttcgtatgtttgctgctgttgtttagtttcgtacttgtgagctgtaattgtctgtaagagtgactagcaaaatactgtagcatttttgacgttcaacggcctctgtagttatgtcgcttgtttgtctataattgaggttaaggcctgc

SEQ ID NO: 267320 - DNA, 693 bp, Zea mays
cacaacatcacagctttgagagcgggtatcatattggattttatgtgtcagtaccagaaacactcagatggcctgttctggtgattgctatactagcagctgtagttgggagtcaggcaattattactggaaccttttcaatcatcaagcagtgctcttcattaagttgtttccctggagtgaagattgtgcacacatcctcaacactgcatggtcagatatacattccagaaatcaattggatgctgatgatactctgcctggctgttactattggcttcagagacacaaaacacttggcaaatgcacaagggttggcagtaataactgtcatgcttgttaccacttgcttaatgtcactcgttattgttctttgctggaacaagagtatcttccttgcccttggtttcctgcttttctttggcacgatcgaagtaatctacttctcagcttcccttgtcaagtttcatgaaggtgcttgggttcctattagtctctccttcatatttatggtgatcatgagtgtctggcactatggcacaataaagaagtacgagttcgatgtgcaaaacaaggtttcagtaaactggctcttaaaccttggcccttcactgggcattgtacgcgttcgaggcattggactaatacatacagaactaatgtctggaatcccaactatcttctcccactttg

SEQ ID NO: 267321 - DNA, 1039 bp, Zea mays
gccatggcgcctccaccgcaccgccacctgctgctcctcctccttctcctccctctggtcctcctcgccggcacacccgccagcgccgatgaccttgtatcggagctccaatctctccgcgcgcggtccccgtccggcgtgatccacctcaccgacacctccgtcacccgtttcctctccgccccctccgcgcgccgcccctactccgtgctcgtattcttcgacgccgcttcgctccactcaaagcctgacctccacctgccccagctccgcaccgagttcgcgctcctctccgcctccttcctcgctcacaaccccgattccggcgacctcttcttcgccgacatcgagttcgccgagtcgcagcactcctttcaccagtttggtgtcaactcgctgccccatatccgcctcatccgttccgatcacgccaccctgtcgggatccgagcagatggaccagtcccacttcgcgcgcctcgccgactccatggccgagtttatcgagtcccgcacgggcctcgaggtcgggcccatcgtacgcccgccgctcctctcccgcaaccagatcatcctgctcggcatcctcttccttatctccatccccttcatgatcaagaggattatcgatggggagaccctgctgcatgacccccgggtctggatggctggggcgctcttcgtctatttcttcagcgtctcggggggcatgtatgggattatcaggcacacgcccatgttcctcaccgaccgcgcggatcccaacaagctcgtgttcttctaccaggggtcagggatgcagttgggggctgaggggtttactgtcgggttcttgtacacactcgtgggtctcatgatcgctgtggtgacacacttgttggtgaaggtggagagcctgcagacacagcgccttgcgatgctcgctgtcatggtggtcgggtggtgggctgttaggaaggtgatctacttagataactggaagactggctatagcattcatacctttttccgagcagctggaggtgaaattcttgctgggt

SEQ ID NO: 267322 - DNA, 673 bp, Zea mays
aggctagctgctcgctagctcacatcaccatggatgatgcctcaggtttgcaattgcaggctaactgcttgacccccaggagcgccacttcaattgtgagctcccatggtaggagtatatgccttatggatgataatggaggacaactcttgaagtcactggcaccaactcttaatttcttgatgtcccaagcagccccctccaatgctgccactgagtgcaggccatctgaatgcaagttgattgacagatatgaagctccaccatttgctcagtcggtctaccctttacttgctgatctttatcatatatttgctgatattccatcgattggtagggctatggtttctgctcagaagttgcttacacaaggtcacatgggggagccaatcagcagtgatatgttgtctgatgtgtatgtatttagaattgcaatagaagccctcaggatgggcttaaacagtgcagccaggtcccaaattgataccggagattaacatggctcaaatgatctggatttttcaaaactccaatctgatgagaagtgccacattcttcttgtgcaagctctcaggagtcaactaagagagtttggttctgtggtggctatagttgacgcgagctgcttagctggaataaggagacattggaacacccctgttccttcagaaat

SEQ ID NO: 267323 - DNA, 517 bp, Zea mays
cgttcttctgccccagcatcttcagctttctgcgcaagtggaggcgctacgacgacgacatggccgactgggacggcgggtacgcgcgcaaggtgcgctccagcgacgaggactacggcggctggtgggtcagcgagcccgacgtcgaccgcaaggcctccgacttcatcaacaacttccaccagaagaattgaagggtcgcgttctctgctagctgcgactgctaccgcttccccacgccagcatagcatgcaatatgcatatatatggtcgacgacgacgatggcacacggccggcagcaccaccgcccgccgccgcgccggtccacgctatgcatgcatgcagctacgtttcatttattaccaggttctttgatattcttatatatatgttgacgactatacatattagctgatctcgtttgtcatgttattatgtcgtgctcatttaatcagagagtgagagagaggatgaataattcaatctgctcgacagacatatatcgctgtcattgga

SEQ ID NO: 267324 - DNA, 706 bp, Zea mays
gccaggctctcagcgacgactagaaggggtcgccgaggagcactctggtgggggttggtcacaccgatgccgcggagagcccgcccgcgacgacggagaaggcgaagggcaggaggccgccgccggctcgtggccatggtggctcagcagctccccacttcatgtcctccacggtgtgcagccggcagagacggtgcgcgggaggctaccattctgtcggtaacggtaagccgaggctgacggcggtgtcggtgaacaggtacccgccgccggctgctgagctgtgtgggagccagaacgcggcggccagggctagcaggtcggcgtcagtggcactctcgtccggtgtgcacaagttgaggtgcttgcgtgtcaacaagtccgatcaggtcaacgtaataagcaacagcagcgtcgactcgaccgctgcgtcggcaccgccgccgcggcggagaggaaagctgcttcggctccaggccggcagcgcccctgcatctgcacaggaggaggatgtctagcctgacatgaacaccgattgcacagttatgattttttcttaacttaattgttgttttattagtggtgaaagggttctgaaagatgtttgtgtatgtattatggttgctagcttcgtagttcttgactgctgccgttattggttggaaatagcccccttcggcttttgattttaaaaaaaaaaggaaaa

SEQ ID NO: 267325 - DNA, 393 bp, Zea mays
  unsure (1)..(393): unsure at all n locations
gggaaagctgcttcggctccaggccggttctacaaagagcggcagcgcccttgcatctgcacaggaggaggatgtctagcctgacatgaacaccgattgcacagttatgattttttcttaacttaattgttgttttattagtggtgaaagggttctgaaagatgtttgtgtatgtattatggttgctagcttcgtagttcttgactgctgtaactattggttggttataggccccttcggcttttgtttttttttgggggtttggcttggaaggggcaaaatgatgcgaggaataattgttgatacatggaataatggaatttacctgtggttctgaaccccatggattttaaatggacttccgaggtagcaaaccaaaaaaaaantgattaa

SEQ ID NO: 267326 - DNA, 439 bp, Zea mays
tttcacgctttcgcaggcttctagcctctgtccaagccggcagcccgccacccgcgaggccgcgaccggcgaccgcccgcccctgacgtggtgactgcgtcctcctccgctctccgtgcgccaccctgaagcggtgaggcgaggacctccaggcaccgccctccctggttcggcggctccctcgaggccttccttcccaccggttcagcagctcccgatccgcacggccaaaggccgattcgcgctcctccagccttcctccgcgtccaacagcaagtgaaaaacttcaacccaagaatggcgatgtcttggacaagagggttaaagcatggtgttgttccgaggcatgccgctcaattggtagagagcagaagccttgcaattgcaagcaaggcgaagaagggtggaaaggctgatgctggcaaaactcctgctctca

SEQ ID NO: 267327 - DNA, 446 bp, Zea mays
cataatgacaaagattgtgattggtggtttgcagatgttgtcgtgcctgaaagaacatatgtgttggattgggtttttgctgacggccacccaggtctgcaaggaattatgacaacaatggaggacatgattttcatgctacccttccaaattccatgactgaggaagggtatgggatggaagaagaacaaaggatctatacaaggcttcaacaagagaggagggaaagggaggaggctattaaaaggaaggctgagagaaatgcaaaaatgaaagctgagatgaaggaaaagactatgagaatgttcctggtttctcagaaacacattgtttacaccgaaccacttgaaatacatgctggaactactattgatgtgctttataatccttctaatacagttctaactggaaagccagaggtttggtttcgatgttcatttaatcgt

SEQ ID NO: 267328 - DNA, 1615 bp, Zea mays
acgctccactctctgcggcgcgtatatcccgtcctttctctgtgcccccggtgccgcgaggagccactgccaggcgccgccctttttgcaactgggcatggaggcggccgcggcgtcgagcggccgcggtcgggggttcgggcgctggactgaccaggtggcaggcggcggcgcttgcggcgctggccggctgggtgtgggcggcctccttctacgacctcacgcgccgggcgcgcgcgctcgtccagccgtgggtcacgcgccgggtgcacgccgagacgccggccatcctcaggttccagaagttggagcacaagttgctggacaatttcttctccgtgctgtcatgcgttgtctccgtgcccttctacacgggattcctccctctcctgttctggagtggacacggcaggctggctaggcagatgaccctcctcatggctttctgtgactacctcggcaactctgtcagggatatggtgtcagcccctcggccatgctctccacccattagaagagcgacggctacagaagacgagaaggaaaatgccatggaatatgggctaccgtcatcgcatgctctcaacactgtttgtttgacgggatatttgctacattatgtcctcacatacggagaacatggcagtcttacagttgctgcgggtttatctctagctctcttacttgttatgctagttggcattgcgaggatatatctgggtatgcacagcttgaccgacgttgtcgctggaattggtttcggcatcggcatcctcgcattctggctggctgttcatgaccatgtcgacgcctttgttgtctccgggcaaaacgttgcaaccttctgggcaggccttgctctactgatgtgctttgcgtatcccaagccagaattccctaccccgagctttgaattccacacagcattcaacggggtcgctttcggaatcgtgtacggcatccagcaaacctacttccccttccacgcccccgacgccccgctcgtcttcagcgccgagctgcccctcctcgcgttcgccgggcgcgtcctcgtcgggatcccgaccatcctggccgtgaaatcctgcagcaaggcgctctccaggtggctgctgcccgtgggctgcagcaccctgggcatccccaccgtgtcgtcctgctacgtccccgccctgaaaatcgacggcggcagcagcaagagcaggcaggccgccggcgggcaccttcagcgccttctctctcactttccccagaaggcgtacgacgtggacaccggcatcaggttcgtccagtacgccagcctcgcgtggtccgtggttgacttggtgccggccatcttcgcccatttggatttgtagccagctacttaaaatttcagtttcgttttttttttctggaggtctcaataaggccctcctactcgtaagacatgtgtcatcttatgaggctgtaaatccgatgatctggccctttcttctttttttgtattgtattgtgtgtatgaatggacgaatggttccctagctgttttcatcagggtgttcagtaagtagaaatcagtggtacatttcttattctttaaattagatatggttattgtcttatatactaggtt

SEQ ID NO: 267329 - DNA, 854 bp, Zea mays
tctagcgaggcgaaggggaaagcgaaatcgaagcagcatacggcggagatggaggagaggcagcccgtggacgccagagtgactgtggagtacgaccaccgaggcgtcggtgggggctacgtgagccgcatgccgccgccggcagtcatgagctacaaccaggtgcgcccgagcgtgagcgcgtcctactacgcccccgccccggctccggcgccggcgccgatgccgatggggaggcccgggccgtcgcagggctacatcgacgagcactacacgccgtcttacagcagcagtagcaacaactactactcctccaaccggtcgccggcgtacgagccgtactactacagcgctccgcagccggcgccgtatagctaccagtaccagtaccagccggcttcttcgtccgaggattactactacagcgcgccgccgcagaggagcgccttctcgccgccgcgggagggctacggcgacatgttcaacgacgagaacgccaattcttgcaccgtcatgtgaagggaggatgcatgcaaacatggaagtagctagtttacttacagttccttattaatcaagcgactctctctatatatatatatatatatttgtgtgtgttagtatattttagaaccagtaattaagtacgagtaaggagatgtattaaaagcactgttcagtcttgatggcgctgaataagttgagagctctgagcttgaatgcttgatgcatgtaccacccgtgatagataggggagaatgtggggatctgaatgaacagctctggtgttcatcacagcaaattttgtaatgtttgacatggtcaaaatggggacttccaatctcttcaacttc

SEQ ID NO: 267330 - DNA, 512 bp, Zea mays
gaccaaaacttcggccaagccttcggccaacgcttcgattaaaatacatactggcccacccgtgattccttcacccagcagttcgtaaccacctgctaaatcatcaaaaagatgcccccctgcaaagtagcagcagccttactcctgttgatcatcacaacaatttctgtcaacaccgtaactgggtcgcgatgtaacgctcaggagaagaaccagattgtgagcttgtgccaaatgtacatccagagaggaaccctcgttcagctcccatcccaaactgggccatgctgtgcggcagtgagagagctggagagggtacacaggggtatgcagatgaagtgcatcgccgatctactgaacgctggagatctacagaaatacgatccaacttagatcaagcatcttgacattttctgctacacttagcatcgttagtttcattcctttcctcccatgcatcgttggaaggtcatgctgtgaaaggcgcgatggcgtggaatggatgctggtag

SEQ ID NO: 267331 - DNA, 564 bp, Zea mays
  unsure (1)..(564): unsure at all n locations
gctcccccgcagcatggtccagctacaagatccaagatggtgtgaagaggctcccggtgcgtattgcctgttgttggacgacgtgtgcaatttgtaagatagagccaagattcgttagccgcctccttgcagaaggtttgtggaacccctaccctgatcatgtcattgaacttggaggctccccccaaataattaatcatacctaggttaaccaaaatgtaaatagacaccgcgtttcgggttgtcggtggtcagcattcctccttttgaagatgcttgtgatgatatgagaaatcaggtttggtaggggctgctgcctgggcaagtggggtttgtgcatatgggcccaggtagtatggttgcacatgtctgctcacagatgctgttgaatggaaggaatgttgtctagtcgcttgcattgtaaccattggagattgtccatttgtatgtatggatcttgtctgtacatctgtaatccgtgcgatgatgtgttttatggaacagtccccggcttccggtaaaaaaacaaaaaaaaaaaaaaaaaaaaaagaaaattaanaaaaa

SEQ ID NO: 267332 - DNA, 814 bp, Zea mays
  unsure (1)..(814): unsure at all n locations
tgngtagacacggtcagaagcaatgttcgcggatcttggacacttctcctacagcgccattcagcttgctttcacttctctagtgtacccttcactgatcctgggttacatgggccaagctgcttatctgtcccagcaccataaccttgacgcaagctaccagatcgggttctacattgcagttcctgagtgtgtacggtggcctgtgctggtgctggccatcttggcgtccgtggtgggcagccaggccatcatcagcgggaccttctccatcatcaaccagagccagtctctgagctgcttccctagggtgaaagtcgtgcacacgtctgacaaacgtcatggccagatatacatccctgaggtcaactggatcctcatgatcctctgcgttgctgtcactgttggtttccgtaacaccaagcacatggggaacgcgtctggcttggccgtgatcacggtgatgctggtgaccacgtgcctcatgcccctggtgatcatgctgtgctgggaccgctccccctggctggcactcgccttcttcctcttcttcggctccatcgaggcgctctacttctcggcgtcgctgatcaagttcctggacggcgcgtgggtgcccatcctcctggccctcatcctgctcgccgtcatgttcgtgtggcaccacaccaccatcaggaagtacgagtacgacatgcacaaccaggtgaccctggagtggctgctggcgctgggcgacaagctgggcatggtgcgcgtcccgggcatcggcctcgtctacaccgacctcacctccggcgtgcccgccaacttc

SEQ ID NO: 267333 - DNA, 400 bp, Zea mays
ccgtcccccatggacgatccctcctccgggtccaacaagcacaagcgcaagcgggggcgcaagcccaaggcgtcgccgccctcccccgaccgctcctccccctctccctcggccgcgcccgctccggctgggcgccgtggccgcaagccgcgacgtcatgagtcccccgccgacgcggtacgccacgcgtccgccgtccccgccccgccgcggggtgccgaagccggtggcaaacggaggcgatgtggtggcagtggcggagtcaggccccgcgagctgggatgaggtggcgaggctagtgccgtgcatggaccctgtggtcaaggtgttctgcgtgcacaccggagcccaacttctcgctgtcgtggcaacggaagctccagtacagctccagtaacag

SEQ ID NO: 267334 - DNA, 942 bp, Zea mays
cgctgtcctatttcaatttcgaatctccccttcccctcagtctctcacacgcacgctcctcccctacgcagcaaaaccctaaccctagctgcggacgccgtcgccgcctccgcgcccaaccgatgtctgattctgaggcgtccccaccgcccactccggccgccgcaacgcccgcagcgctggtggagacctccccgtcctcggcgaggaaggaagaactgctgcctgtggaggaaaagatctcggaattaagtgaatcacaatcagagcttctagggaggctccgtgggcttaaggaggatttgctgagttggaggagtaatttagactcccaagtgacgaaatacaaagtggaactctctgacatcaagagtgcactcaataatgaaatagagcagcttcgctcagatttccaagagctgaggaccacccttaagaagcagcaggaagatgtgtcacttagcttgaagaatttggggcttcaagatgctaccgaaaatgatgggaacaaaggaaatggagacggcacaaatgaggtcttgtcagctaacttggggaacttgaaactggatggttcttctgaaaactatgatgaaagcagagactcaaaggaggacaaggaaaacaccgacactgctggtgatggcatcgtcgacaaagctactaaggagacgagctcaactgatgaacaattctaacgcaggaaactgaactacattgttcgtgtctcagctgtagaaattctaggaacagcgatacattagttcctgtaagagagcgagtccatgctttgctattgctcagtcgggttggttatggaactctattgggacctgtgagtcgtgaggatccaaatctcctctaggattgtgtggcgattgaaagttccaatatggccccatggccatttgctcccaaaaaagaagaaaaatccccccggcc

SEQ ID NO: 267335 - DNA, 376 bp, Zea mays
aaaaaaaatatccctcctaggaattggtgaggcatgaaaaacttttttcacaggaacgaggaccaacggaaaagtttccgtttccctgctcgagccgctcccccgtcctcttccttcctctcgagtagcctgccctcgcaaaaccctggccctagctgcggacgccggcgccgcctccgcgcccaaccgaggcctgattctgaggcgtccccaccgcccactcccgccgccgcaacgcccgcagcgccgggggagacctccccgtcctcggcgaggaagggagaactgctgcctgtggaggaaaagatctcggaattaagtgaatcacaatcagagcttctagcgaggctccgtgggcttaaggaggatttgctga

SEQ ID NO: 267336 - DNA, 784 bp, Zea mays
  unsure (1)..(784): unsure at all n locations
tccttgtcgttctacgccgcccgttactnttttgaaaaccggcggcaggcggaagcgggggaagttttttagttgtgctgcccaattgattggcacattgtctcagtacatggaggagacagagatttcagatttggtgcaaatcctattgaacatgagcacttcatcagactggtgtaccaggcatggtgctttgttatcgttctcatacatatcaatgcattctccatcaaaattgtgtcatttggcatcctttccatctctggtcgatcttttgaaaggttctctcaaagatgacaagttccctgttcgtgaagttgctacaagaactctgggaaagatactctgttttgagctgcagccagaagctggcaccttgcaacttgttcagctgcttatcttggccttgcgtgatgattcaagtgaagttaggagaagatctttgtcgtgtatcaaagctgctgcaaagacaaatcattcagctcttgctacacatcactctatattgggcccggcaattgctgaagctttgaaggactctagcatgcctgtacgtctagctgcggaacgctgcgcccttcatgttttccagttaacgaaagggccagataatgttacagcagcacaaaagtacctcgggatgactggcttggaagtgaagaaaatcgcaaagcttgacgtggacagtgatggtagtgagagcagcgatgatgacaagaggacatagactctactcaacagcaatcttttttcggttcagttgttatgatctttacatatagtt

SEQ ID NO: 267337 - DNA, 2343 bp, Zea mays
tccacgcgttggtttattcattctcttatttggaacgttatgacaacaagaagccactagaaagaataaaggaacatagcgccccccctccggggttgccgccggcgatcgccggagtacgacggcgaggacgatagatccggcggagggagggccaagcgccgacgcctgtcgccggaggaggctgcggcgtcgccggcggacccgggcgcggcgacggggactagccacggctggctctccggcttcgtctccggagcgaagagggccatttcttccgttttgctgttctcttcgcccgaggagaccggctcgggggaggacggggaggtggaggaagaggaggacgactaatacgaagagggcatcgacttgaatgaaaatgaagatattcatgatattcacggggaaatagttccttatagcgagtcaaaacttgctattgagcaaatggttatgaaggaaacattctcaaggcatgaatgtgataggatggtagagctaataaaatcaagagttagagattctactcctgaaacccatgagtatggaaagcaagaagaaatcccaagtaggaatgcaggcattgcacatgacttcacaggaacatgccgctccttgagccgtgataggaatttcactgaatcggtcccattctctagtatgagaatgagacctggtcattcttctccaggctttccactccaagcatcacctcagctatgcactgcagcagttagggaagcaaaaaaatggttggaagagaaaaggcagggactgggcgtaaaacctgaagacaatggatcatgcacattaaatacagatatatttagttctcgtgatgactctctctgacaagggttctccagttgatttggcgaaatcatacatgcggtcattacctccttggcaatccccattcttaggccatcaaaagtttgacacatcaccctccaaatactctatctcgtcaacaaaggtaactacaaaggaggactacctttccagcttttggacaaaattggaggaatcacgaatagctcgcattggatcatctggagattctgctgatgcttctaaattatggaattatggttccaattccagattatttgagaatgacacttccatattctcattgggcaccgatgagaaagttggagatcctaccaaaactcataatggctctgagaaagttgcagcaacagaaccactcggtagatgctccttacttattacaccaactgaagatagaactgatggtattactgagcctgtggaccttgcaaagaacaatgagaatgcaccccaagaataccaagctgcatttgaaattatccctgataaagttgcagagggtaatgatgtgtcttccacaggaattactaaggatactactggccatagtgcagatggtaaagctctcacttcagaaccgcatataggggaaacacatgtcaactcagcttcagaatccataccaaatgacgcagctcccccaacccagagcaaaatgaatgggtcgaccaagaaatcattagtcaatggtgttttggatcaaccaaatgccaactcagggctagaatcttcgggaaatgattatcctagctacactaactcgagcagtgctatgccacccgcgagtaccgagttaattgggtctgcagctgctgttatagatgttgattctgctgagaatggcccaggtacgaaaccagaacaaccggctaagggagcctcgagagcatcgaaatccaaggttgttccacgaggacagaagagggtgttgcgaagcgcaacaagaggaagagcgacgtaggggcattgctgcgctacattgttgtgtactaatatatgttgacggcccagaagggcaacatgatccctaggttaactagagctagcgccgactggtcgtttccacgtacgatgcactgcgcatcagcctgtatccatgttgtattatcgtagggcttgtaatgaccacatgccctggttagagttgatcattaggaccagtagctgcttgatttgtgtctcggtgatctagctttgggtagtttgtgcagttggaaggagacagtttgttggttgtattgtattgcagcgcacagctagcaagtgttgttgtagccatcaggtacgtgttgtgtagtgaatccaggtccagggacagagctgttcctctgtatggtggaccctgaccctttgttttgtgccatggggcctttctgtgttgtgcttacatgagctggagctgctttatttttctttttttatacgattaatccgctgctgatgagtctttttttttgtgcttgtcttaaaaaaaaaaacaacaaa

SEQ ID NO: 267338 - DNA, 687 bp, Zea mays
tcctgaattcccgtttcgtaccgacggacgtcgtgcgggatggtatagctaataaaatcaagagttattatattctactcctgaaacccattattgtggaattcttgaagaaatccctagtaggaatgcaggcattgcacatgacttcacaggaacatgccgctccttgagccgtgatcggaatgtccctgaatcagttccactctctagtatgagaacaagacctggtagtttttctcaaggctctccactccaagcatcacctgagctaagcactgcagcagttacggaagcaaaaaaatggttggaagagaaaaggcagggactgggcttcaagcctgaagacaatggaccatgcacactaaatactgatatacttagttctgtaaccacaaaggaggactacctttccagcttttggacaaaattggaggaatcacgaagagctcgtattggatcatctggaggttctgctgatgctcctaaattctggaattatggttctaattccaggttatttgagaatgacacctctatattttcattgggcactgatgaaaaagttggagatcctaccaaaatctataatgggtctgggaaatttgcagcaacagaaccagttggtggatgctgcttacctattacacccactgaagatagaactgatggtattactgagcctgtgga

SEQ ID NO: 267339 - DNA, 435 bp, Zea mays
gctcacgctgcttgctcctcctcccccccatccctccgcccctcccatggcgtccctcttcggggctcgccgccggcgatcgccggagtacgacggcgaggacgatagatccggcggagggagggccaagccccggcgcctgtcgccggaggaggcgccggcgtcgccggcggagccgggcgtcggcgacggggactagccacggctggctctccggcttcgtctccggagcgaagagggccatttcttccgttttgctgtcctcttcgcccgaggagaccggctcgggggaggacggggagggaagaattgaatgactatctacttatacgaagagggcatcgacttggatgaaaatgaagatttcatgatattcacggggaaatagttccttatagcgagtcaaaacttgcttttgagcacaatggttttgaa

SEQ ID NO: 267340 - DNA, 826 bp, Zea mays
aattcttgctccgtctctacaggtcctccggtgatacctgtcaacctccggcgatctgggttgtgacaacgagaaacgaggaagacgaccccacctcgcctggaaaacgcatcccaagacttcaaccttcctttccggccggagatccgcttcgcatctccgcgacagatccgggcaaacgggccgatgcagttcttcggcggctcgtcgctgacgtcggtcgcgccggaggcgaccccagccccggcggcgccccctggcacgggcacgggcgccagcgcgcaggtcctatacgtcttcaaccgaacggcgtctgcctgctctaccgcgagtggcaccgccccctccgcacgctcgaccccacccaggaccacaagctcatgttcgggctcctcttctcccttcgctccttcaccgccaagatcgacccaaccacggcagaaaagggaaatcttggtgtgccactactgccaggccaaggttgttcgttttatagcttcaagacaaacacatacaaactgaactttatggagagcccttctggtataaagcttatactaattacacatccaaggactggtgatcagcgagactcgctaaagcatatctacaacctatatgtggaatacgttgtaaaaaatcctctgtatgctcctggaacaccaatcaagtgcgaacctttcaactaaacatctcgatcaatacgtgagaacaataatttgatgtcattgaggtaatttctatccttggtgttttgcgcagcacctgaaatactagttctttgaatgcttaacaatcgatcattggtgtgatgtacagtgctgca

SEQ ID NO: 267341 - DNA, 528 bp, Zea mays
ggaacaccaatcaagtgcgaacttttcaacaaacatctcgttcaatacgtgagaacaataatttgatgtcattgagacaatgggttggtgaggcaaaaaaaggtccatttcatgttctttagcgtgatatcaccatttcgtggatggtagacttttctggtggaaaatttgcacagccgcaccatgggagctgcagtattcttgtgtaccgacctcaatttgacagctctactgtgacaacactcctgtagcctgtttgtttgatcgttacggatgcattcgacagggaagctgcattgtgcattgtcgcttctagtgtgacgtgtacatgattaatccatgggttattgcgtcaccgttcaagggggttcatggtcaagtagtaattatttcatatttgaaccggtcgccttgtcagatgactagactgaaacatcatgttttccgcttgagacattgtatgatttgtatggttggctgctaggataaagtcatatcaggaaacctgatactaaaggtcttcatgct

SEQ ID NO: 267342 - DNA, 860 bp, Zea mays
ctcacgcgtccgcatcagtgtttgacaatctttttatgtgattatatactttgggctctttattgctcattcccatttgcttcgtatgaaccttttgtaaagttctatcgagttgacaaaaaatcctgactaaaaaaatttcagatgcttttcttgtgtttccttctatcatctggaaaccgacatttaaaattatgtatcataagaatctcgacagctttacttgctcttaaggatctgtcaataatttaggccgtgcttatgtgagcttctggccatttttgaactgctagcttttggaaggcgcaggcttctggcttctgggagctcctatcttttggacctcttataagttagcagtccaaaagtggctagcagctcaaactaacatgttctcggtgtttatggcagagagccattgactcaccttcgtccttgttcagctgagcattgtgttccagtttcacacaatgcggtcttactgtttatctagaactggcacaaccgagaaggcaggcaggcatagctgctaatatacatgtctttctcatacttatcaccagtgaaatgtttatttgcagacaatgggttggtgaggcaaaaaaaggtccatttcatgttctttagcgtgatatcaccatttcgtggatggtagacttttctggtggaaaatttgcacagccgccccatgggagctgcagtattcttgtgtaccgacctcaatttgacagctctactgtgacaacactcctgtagcctgtttgtttgatcgttacggatgcattcgccagggaagctgcattgtgcattgtcgcttttagtgtgacggggacatgattaatccatgggttattgggtcc

SEQ ID NO: 267343 - DNA, 1746 bp, Zea mays
ctcgacgaatcggctcagattttaaggtccagtggacaggatacggccctagacgaggatacatgggaaccgattgataacttgagtgactgcccgcagaaaattagagattttgtacaagaagggcacaaaagaaagattctcccactgcctggtgatgttgatgtcatttgtggaggcccaccatgccaaggtatcagtgggtttaatcggtacagaaaccgtgatgagccactcaaagatgagaaaaacaagcaaatggtgactttcatggatattgtggcgtacttgaagcccaagtatgttctcatggaaaatgtggtggacatactcaaatttgcggatggttacctaggaaaatatgctttgagctgccttgttgctatgaagtaccaagcgcggcttggaatgatggtggctggttgctatggtctgccacagttcaggatgcgtgtgttcctctggggtgctctttcttccatggtgctccctaagtatcctctgcccacctatgatgttgtagtacgtggaggagcccctaatgccttttcgcaatgtatggttgcatatgacgagacacaaaaaccatccctgaagaaagccttgcttcttggtgatgcaatttcagatttaccaaaggttcaaaatcaccagcctaacgatgtgatggagtatggtggttcccccaagaccgaattccagcgctacattcgactcagtcgtaaagacatgttggattggtccttcggtgagggggctggtccagatgaaggcaagctcttggatcaccagcctttacggcttaacaatgatgattatgagcgggttcaacagattcctgtcaagaagggagccaacttccgcgacctaaagggcgtgagggttggagcaaacaatattgttgagtgggatccagaaatcgagcgtgtgaaactttcatctgggaaaccactggttcctgactatgcaatgtcattcatcaagggcaaatcactcaagccattcgggcgcctgtggtgggacgagacggttcctacagttgtgaccagagcagagcctcacaaccaggttataattcatccgactcaagcaagggtcctcactatccgggagaacgcaaggttacagggcttccccgattactaccgattgtttggcccgatcaaggagaagtacattcaagtcgggaacgcagtggctgtccctgttgcccgggcactgggctactgtctggggcaagcctacctgggtgaatctgaggggagtgaccctctgtaccagctgcctccaagtttcacctctgttggaggacgcactgcggggcaggcgagggcctctcctgttggcacccctgcaggggaggtagttgagcagtaaaaggatgacagatctgagctgagctgggcaacatccagcggcaggagcatttctggttcggttcgattcgggctcacgagcgcattgtgctgattcgcagggtgcactcgagctcgagtgcggagttgttgtaatgtaggttgaggtttcaaaacatccatccatccatcggccccgcctatttgtggatggtgtttctcgtgccattttagttcagctgtattgatgcttcgtcatgtatgtgtattgtaccattcgttcttgttacctactagtaaggcaacatttgatccatgttcaacgcgagcaaaattccatcctccacctagacaagaccaccggcacgggctttcaaacacagaagctttg

SEQ ID NO: 267344 - DNA, 925 bp, Zea mays
cgcaagctttgtccacggttctgacggcctgggaaaccaggatttccctccaccggctggcaagcctatagatcagtccgctgctgccttcctggttgagcaggcaaatctgtaccctggtcaagttaccgttgtcgccctcggcccacttaccaaccttgctctggcagtcgagcttgaccctgcgttcccggagaagatagggcagattattattcttggcggtgcgtattcagttaatggaaacgtgaaccctgcagctgaggcgaatatctttggggatcctgacgcggcagatattgtgttcacctgcggtgctgatattttggccgtgggactaaatgtaacccaccaagtggttctaaccgatgctgaccgggagaagcttgagcagtgtgacagcaaatacgcccgctacttgtgcaagctaatgggcgtttattttgattaccacagggacggttacttcataaaaggagcgtatcttcacgatccaacgacggttattgctgcggtgaacccatcgctgctgacttacacagaaggcgttgtgagggtacagacagtcgggatcaccaagggccttactgttttcgacaacaccaagaaaaggtacggagagatcacagcctggagtggcatgcccaccgtgaaggtcgctgtcaccgtcgatgcccctgccgtggtagagctgatagtgcagaggctgatgaccgatgactagcaacaacgccaccagctgatccggccgcgttgtcattagaacacgagaatgcattgcgttgcattgcatgtggttatgtgcgtgcttggtgtttacgtacagtttatatatatatgcttgatacgtttgctgatgcttctgagagaacatgattaaattaaattaaacttgattaaatgaaattgccccctgatgatgccc

SEQ ID NO: 267345 - DNA, 830 bp, Zea mays
cattgcgagtcccgagtcgactctctcccgtatcccggccgtacccttcaccaatccaatccaactccaattcgtcctccggtcctccccctcgaggcctacgcacaatagattcgatctcgagtcctcgaatcctgccttttcctctggtcaggaaagcatgagcttgatttccggcgcttctcgccgtcgagctcgaaccagaagataagaagaatccgctaggggcgagccccatagaagatggccccgcacccgcaggaggacaaatcagatcggcacagcagcggcgccggtgcgtcgagggagcaggaacggcggccgtccaaggcatggggaatcctcatcttcggcctcatcggcgtcaccaccgccagtttcgctattactcaagttcgcaaaagcatggactggttctacactcagttgaataaagtgcagtcaacatcatcttggacttggaggtatacaagtaataactcaagtcgtggaagcttcagtgaggaagctaagaaaagatattatcagcgaatgcagcaggaatatgaagaggaacaagagagagttcaaagaataaggcatatgcagagtgtcttcaacagagagaggaataaatttggacgaggttatgaaagctggagggagaatggccctcctcgtggctacaattacatccctcgggatgattggtattggcagaccgatacttctcactcagaacataaaaataggcggacgtacacgccggcaggacctagggttaatcctaggtcgcatcactatgcatttcagggtctgagatatcgcgggcgacaccatatacaggtgca

SEQ ID NO: 267346 - DNA, 389 bp, Zea mays
gcaggaagctgctgctgctgctgctgcgggtgcggcggcgggaggcgaggcgtccgagcctcacggcaccgccgccgatggtgccgccgtggcgcggcgcgcgggcacgtacacggtgcagatcaagacgagctgcgcgtccccgcggagctccgcggacgcggtgagcctcgcgttcggggacgcgtaccgcaacgaggtgtacgcggcgacggtgacgccgcggcgcgggttcgagcgctgcgccacggacacgttccgcgtcgccgggccctgcggctacggcgtctgctacctctacctgcgccggtcgggccgcgcggccgggtggacgcccgagtgggtcagggtgttcgagccggcgttcggtgcgtctctcaccttttact

SEQ ID NO: 267347 - DNA, 602 bp, Zea mays
cccacgcgtccgcggacgcgtgggggcaggggagtggaggggaggggaagcatcgcaattccgaacccccacctcgccgctcccaccaccgcggccgggttgcgtccgtttcgattgcccaggatgagcaccgagtccggggagctgctcgggatcgaccccgtcgagctccggttcccattcgaattaaataagcagatctcctgcacgctgcagctgacgaacaagacagacaagcaggtcgcgttcaaggtgaagacgacaagcccgaaaaagtactgcgttcgcccaaacaacggcatggtggcgccccggtccaaggctgacgttgttgttacgatgcaagcgcagcgggacgtgccaccggacatgcaatgcaaggacaagttccttgtgcagagcgccaccgtcgccaaggaggtcgtgccaaaggaggtcactggagacatgtttaccaaagattcaagcaatgtagtggaagaagtgaagttgaggtagtttatgtagcaccatcctcctctcaaagcctagggatttgaggctggtaatctcggcagtttgagttatcaagaggaaacaaaagaacccaaagaatcagaaaa

SEQ ID NO: 267348 - DNA, 794 bp, Zea mays
cccactcgtccgctccactgcttcaggaataggtgcctcaggaatataggtagtcggagaaaaaaacgcacacatagagagagagagaggagaaggggaggggaggcatcgaaactccgaatccctacctcgccgctcccaccaccatcgcggattgcgtcccgttcgattgcgcaggagtttctgttccaggatgagcaccgagtcaggggagctgctcgggatcgaccccgtcgagctccggttcccattcgagttaaataagcagatctcctgcacgctgcagctgacgaacaagacagacaagcaggtcgcgttcaaggtaaaacgaatcctttcctgcgcgttcccgggcaggagaagccagccacgcgaaacaaaatggtaccgtacccgtagtggactgagcttgtgcgacaccgcccgactgtaggtcaagacaacgagccccaaaaagtactgtgttcggccaaacaacggcatggtggcgccccggtccaaagctgacgttgttgtcacaatgcatgcgcagcgggacgcgccaccggacatgcattgcaaggacaaattccttgtgcagagcgccatcgtggccaaggagaccatgccgaaggaagtcactggagacatgtttaccaaagattcaggcaatatagtggatgaagtgaagttgaaggtagtttatacagcgccatcgtcctctcaaagcgagggatttgaggatggtaatctcggcagtttgagttatcaagaggaaacaaaagaacccaaagaatcaggaaaaataatctctg

SEQ ID NO: 267349 - DNA, 628 bp, Zea mays
  unsure (1)..(628): unsure at all n locations
gtanaggtgcctcaggaatataggtagtcggagaaaaaaacgcacacatagagagagagagaggagaaggggaggggaggcatcgaaactccgaatccctacctcgccgctcccaccaccatcgcggattgcgtcccgttcgattgcgcaggagtttctgttccaggatgagcaccgagtcaggggagctgctcgggatcgaccccgtcgagctccggttcccattcgagttaaataagcagatctcctgcacgctgcagctgacgaacaagacagacaagcaggtcgcgttcaaggtcaagacatcgagccccaaaaagttctgtgttccgtccaacaacggtatggtggcgccccggtccaaagctgacctttttgtctcaacgctagctcttcggcacgcgcctccgttcatgcattgcaaggacaaattccttgtgcagagcgccatcgtggccaaggagaccatgccgacttaagtcactggagacatgtttaccaaagattcaggcaatatagtggatgaagtgaagttgaaggtagtttatacagcgccatcgtcctctcaaatccctcgctttgagagacgtatggaggagaagaattcttgtcgaagcttgttgttcag

SEQ ID NO: 267350 - DNA, 457 bp, Zea mays
  unsure (1)..(457): unsure at all n locations
gctgnttgagcacaatcacgtgggcctgctcgggatctcttgcaactcaggatgccagcaccgcctgcaatggttcacagagatggacagcatccacccagtatcatgaatcccgggtgttataccgtcgagacagtctgtccatggtgatggtgaaagctctgcttctggcaatgcactggcaggtatctcatttgcatccatggcaccaagttcaggtcaccaggcgatgtcgtccacatcagactcacatccagttttcccagcatcctcgcttctaccaggttcaggtccagggtcgatggcaaactttgtgcggtcaagtaccagaatccctgttgtcatggcgagcgatacaagcaccacgcctgaatccatatgttcaccacatcggaggtggtccactgaacgctgcaccagcaggaattcaacaagctagagctcatattggacgcac

SEQ ID NO: 267351 - DNA, 571 bp, Zea mays
tcatagtaattattagacactttctagttcatcacccatggcaaagttcttcagctacaccatcatccaaggactcttgatgctttccatggtacttctggcatcgtgtgctattcatgcacacataataagtggggaaactgaagaggttagcaacacagggagcccgacagtgatggtcacgatgggggcaaaccgaaagataattgaagataataaaaatttattgtgctatctaagggctctagagtactgttgtgcaaggaccagacaatgctatgatgacataaagaagtgcttggagcattgccgtggttgaaaggtgtaataaaggatatgctttctttggatcttagttggtgatcagaaaaatgttctaccaattcatgcatgtaccaaaggataatataagctgctcaaaaaatcgtggttaattagagttttttgttggaaaaatgataacttccttacaaacatataccaaattaaagagaccctcttaatgcatgatctatcttttaataaagaacatattccatagtaaaaaaaaaaaatttaatatattttttaa

SEQ ID NO: 267352 - DNA, 492 bp, Zea mays
tcgctgtgcctcggtagccggggcgagctgacaccgggtttctaccgcggcacttgccctcagctgtactacaccgtgcagcgccacgtgttcgacgccatgcgagctgagacgaggatgggcgcctccctcctcaggctgcacttccacgactgcttcgtcaatgggtgtgacgcttccatcctcttggacggcgacgacggcgagaagttcgcactgcccaaccggaactcggtcagagggttcgaggtcatcgacgccataaaggcggatctcgagagcgtctgcccggaggtggtgtcgtgcgctgacatcgtagcccttgccgccagctatggagtcctctttagtggagggccttactacgatgtgcttctggggagaagggacgggctggtggccaaccagtcaggagccaacagtggtctgccttcgccgttcgagcccatcgactccatcattcacaagttcgccggcgtcgaccttaacacg

SEQ ID NO: 267353 - DNA, 500 bp, Zea mays
cccacgcgtccgcccacgcgtccggttccccctaaacctgccttgggacctaacagctacactcctgaagctaccaagggcgcctcgcccaatggcacccaagtcaatgtcttgcagccttctgcaagtttttcgccgaagctgcgttgcaacagaaacgtcctcgtcgccgctgctctgctgttcctcgtgatcctttgatcacctcaactccccatgacaatcttttcagaaaccaaatcgacagatatgatagattttagttaaacttggtttacgttgtatgtattgagttacgtatagtgtgatagtatcacattcttttggcctgtgtccacagttccagtaggagttaggatagaacacgggatgagtccatagccctttttttttgcacgttcataatgtacctggtggatgtactgtgtacatattagatatgacttcaggatgtattgattttatagaataattgaataacgatgctcgcatactcagat

SEQ ID NO: 267354 - DNA, 413 bp, Zea mays
cccacgcgtccgctcggcccaggtttaggtaagttccccttcttttttattattttttgctgttttcaggggcaagttttgatttcaaattttaaatctgtgtttaagctctcaaattcaaacaaatgcagcaaacaaaaatataccagcatgagatgcaaatacctaatgttattagttaatttactatcctattttaagcaaatgcctttacacatgcaactcctacactaaaaaataggcatttttgagaaaaatgatctctagtatattaaaatccctaagagagagcttataaacatataattcaacaaacggatgactggactttatgtagagatcattttattttaatctgtattaggaacatgtttattttgggaaatgtaacttcagaagtatggagattcttt

SEQ ID NO: 267355 - DNA, 614 bp, Zea mays
cccaagtgcgcttcacgcaaatgtcgatctgggttcttgaggactatgatacagaagcatggatcctaaggcacaatgtgagctcttcgcagttctttgaattactgagtcacccaatcaaagacttccatattgtggccattcatccagatcacaattcgttcatccttgttcagcactggaaccagaaactggtatcatataacatggatactcaggaactgcatggtctctgcactcttggaaagggctatgtgattattaccccatatgttccctgtttcttggagtcatcggttcttgccaccaaacactgaggttgttgtttctcggggacttctctgcatgttcaacaagagcctgatcatccaagtgtggggcaaggtgatctagtatgatggtgctttaatgtccttttgtaatgctttgagaaagctgtttacagggcaacatggttagttccatgatatatcagtgagaaagctgtttacaggaacagcatggttagttctatgatatatcaaattagatcacacttaattgctggtcagtataggtattagcttcgatattttgttgtgattattcaatattgaatgcgcacctatggtatt

SEQ ID NO: 267356 - DNA, 648 bp, Zea mays
  unsure (1)..(648): unsure at all n locations
aaacacgcgtccgcggacgcgtggcgacgtggtctggatcgcgtggggggtccgcacaaatcccgtgctcccccgtctgaaaaccctccccacctccggcggcggcggcggcgctggcgaccgggtgtcttctccggcgagtctcccccctagtaacaagaaaatatggatgtacctgttgatgaccctgtggagaacctcactggaagtcctagtacccttggcaatgaggaagaagccactacttatgctaatgtgcaagatcagtccaaggaagaaccagaaaagctttacgaggaacccaaagacccaatgcaagacgagttgggtaaccaagggcatgtgagcatgaacaatgaagatgtgggaggccagaacaaagtggaccaagctacccccacagagcacggcgaggaagctggggtgaagcagcatgatgctacagttcctgatgacaagaaatggcctgggtggcctggagagagtgtgttccgtatactggttcctaccacaaaggtgggtgccgtcattgggcgcaaaggggatttcatcaagaaaatgttgaggaatcaagagcccgcatcaaggttcttgagggaccaccagctgtgccagaaagagctgtaatgatttcagcanaggatgaac

SEQ ID NO: 267357 - DNA, 1868 bp, Zea mays
tcttccatgcgtccgcccactcgtccgcccacgcgtccgctcaaagtggtgcagttggtggtgggagtccatattcagaaggtggtgccctctacgcactaggtttgattcatgccaatcatggtgaaggaatcaaacaattcctccgtgaaagtcttcgcaacaccagtgcagaggtcatccagcatggtgcatgtttggggcttgggcttgcagctttgggcacatcagatgaggaaatatatgaggacataaagaatgtcctttacacagacagtgctgttgctggtgaggcagctggtattggcatgggcttgctcatggttgggaccgctagtgaaaaggctagtgagatgcttgcttatgcacatgatacacagcatgaaaagattataaggggtttgtcactgggaattgcactgacagtatatggcagagaagaggaagcagacaccttgattgaacaaatgactagagatcaagatcccatattacgttatggtggtatgtatgcattggctctagcctacaggggaactgccaacaacaaagccatccaccagctgctgcattttgctgtatcagatgtcagtgatgatgttcggaggactgcagttatggctcttggttttgttctgtacaatgagcccgagcagactccaagaattgtatccctgctctctgaatcatacaacccacatgttcgctatggtgcagccttagctgttgggatatcatgtgcagggtctggattaagtgatgcaatttccttgttggagcctcttacatcagatgttgttgactttgtgcgtcagggagctctcattgccatggcaatggtaatgatccaaactaatgaatcctttgattctcgtgttggagcatttaggcgtcagttggagaagatcattcttgacaaacatgaggacaccatgagcaagatgggtgccatattagcatctggtatcctcgatgctggtggtaggaatgttacaatcaagctcctctcaagaaacaagcatgacaaactcacggctgtgattggtcttgccgttttcagtcagttctggtactggtatcctctcttgtatttcatcagcctggccttctcgccaacagccttcattgggctcaactctgatttgaaagtgccaaagtttgagttcctgtcacatgctaaaccgtctctcttcgagtatcccaaaccgacaactcagcagactactacttcgacagtgaaactgccagcagccattctgtcaacttatgcgaaggcaaaatctagggcaaagaaggacgcagaaagcaaagctaaccaggagaaagcaacagaggaggcttctggttctacctcaagcaaggcggctaaagctcaagagaaggatgctgatgcaatgcaggttgacaatgccagtgagaagaaagctcctgaaccagaagcgacttatcagctccttacgaatccagctcgcgtgatccctgcccaggagaagttcatcaagctccttgaaaacagccgatatgtacctgtgaaaccagcgccttctggattcatcctcctccgagacctgcagccgactgaggctgaggatcttgcgctgaccgatgcccccacaacagtcgcaggaagcaccggcaacactgcccctgctgcaggccaacaggggtcaggatcatcagccatggccgtggacgatgagccacagccgccacaaccctttgagtacacctcgtgagcgaccgagcgtcaccttttcttattcgttttttttttttgactttttgagtatgtagtgtgcggaaatttgttgttggcaggaagaccttttgtagaaccatgagtagagaattttacttgaattgaagct

SEQ ID NO: 267358 - DNA, 546 bp, Zea mays
cggacgcgtgttttcgtccctgtgaaaccagcgccttctggattcatcctcctccgagaccttcagcccactgaggccgaggaccttgcactgaccgatgctcccacagcagttggaggaagcaccggcaacactgccacagctgcaagccaacaggggtccggatcatctgccatggccgttgacgacgagccacaaccgccgcaaccctttgagtactcctcataagcgtagatacctgggtccgtagagagttggtggtctgaacttgcgattcccctcgtcctttctataccttttgttatctttttttttaactttctgagtatgtagtgtgcggaaatttgttgttggttggaagactttttgtaggctcgagaattatacttgagtcggctctataggatcatcgttgagaatctgggtgctcttatagctaagccccaacaaccctgattttatcctagccgtgaagtcatacatagagcctgggttattcatctgggttattcattgctgcggttttaatccaactaccgcttctat

SEQ ID NO: 267359 - DNA, 552 bp, Zea mays
gaaatggttttagtgagaacattgtggctgttcctgttaccaaagtggtttctgaacttttgccaatgttcgaagcagtgccagtgcgaagcgctgtccaggcttgattccatactgagctgactgaaggaaactccccgcgctgaggtctcaattctgtctgggatgacaagaaatggttttagcgagcacattgtggatgttcctattaccgaagtagtttctgaacttttgcctacgttcgaagcagtgccagacgaagggctgtccaggcttgattccatactgaatagttgatggttgtattcattttgtcattcacatagattcttattttacctccacgattacacgctgttttctggtgatgagtggtagttgggggctagcctccaggtaaagatactttctgaacagaatatggttgctgaagctattgatagctgtacagttatggccgcttgggatggtgtgccatctggagttttgtgctaacatgcatgtgatttgacgctgcaatgtgtactagcaacagacttggttttcttggtt

SEQ ID NO: 267360 - DNA, 511 bp, Zea mays
cccgggtcgaccgacgcgtccggtttggagggagttgatcgagagaaaaccagaagcaaagaaatggatgatgaagacgattgaccattatgagggcttaatggatctatttggtaagaatagggagaaacgtcaagacgttgagaactcaaaaggtacctcgaagaaaaaggcgcgaacagaaccgccaaaggagatacttcaacgtactccattaaatcggaaggggtcagctcttgccgaaagttcagataagacggtggacaaatgtgagatccatgatgagataaaaacaaatgtggaacttgatttgtcagaatcgtgcagaactgataatggcattgttgccatacctgttcgtgcctattcatacggtaaaggtttgccctatgctcctgaaaattggccacgtcatggagacatatggcactggaaagttggaagcagggcttctggagcaggccattgggctgacaggtatattatgccgccatcccgttttcgtggcgct

SEQ ID NO: 267361 - DNA, 1282 bp, Zea mays
aggcagagcaccaccaccatacgccgccaccgcaagcagacgtccccatggccacatggcttccaccgccaccgctgctgcttctctccgcctcgccttccctctcctctccgcgccggcttcctcctcctcgtcctccaatacccttcgcttccctctccgccgccgcagcgccggccgccccctcgccgtcgccgccttcaagaagctctccgaggcgtcccccgtgcccatccctcaggagcccacccaacccctcctggtcgacgaggacgccctgcctcctaaggccggggtctacggcgtctacgaccccgccggcgagctgcagttcgtcgggatttcgcgcaacgtgagggccagcgtcgagggccaccgccggaaggtccccgccaacctctgcgcctccgtcaaggtcgcagtatcagatgaggaggcaccagatcgatctgcccttaacaacgcctggaaatcatggatgcaagaacacatagcggccaccggcaaggcgccaccagggaacgttgcaggaaaccacacctgggttggtggccccccagcggcccccggacctgcgtctgacgcctggacgccacgtccagctgacggttccgctggagcagctgatagaccggctggtgaaggagaacagggtggtggccttcatcaaaggatcaaggagcgctccccagtgcgggttctcgcagagggtggtgggtatcctggaagcgcacgccgcggatttcgtgaccgtggatgtgctcgacgaggagcacaaccacgggctgagagaaaccctcaaggcttacagcagctggccgacgttccctcaggtcttcgtcggaggggagctcgtgggaggctgcgatatcgtttcgtccatggctgaaaagggggagcttgctgccctactaattcagaaatgaatgctttaccctacagtgacttgaattgcttcgatggttgtctgatccacacgtagtagcacggagatccaagttgttgtacctgctgtgcatgttggatgtggtacgtcccgagtttgaaaagcgtgtgatgtggtatggacgtgtggtttgcctgctgtttataggtagaagttgcctgaggacgacacacatattttttgttttatttatttgtggggatcggagagcgatcgagcctctgtttggttggttggatgtacgtagatggatgaaagagtcggccacagtttatataatgttcggatgaaaggtaacttgaaaaagcttcaacataaggctttaggtattccggt

SEQ ID NO: 267362 - DNA, 488 bp, Zea mays
cccacgcgtccgcccacgcgtccgagcaggaataccccaagttccgctcgccgaagtcgggcgtgcgcctgctggtgttgacactggaggtggccgtggcgtgcatgtcccggtccgtggaccagctcgtcctcctcttcgatgcaagctttttccgatcggcgtcggctttcctcaacctgctcatgggcacgctcaagatcgtcgccgactactaccccggccgcctgcaccgcgccttcgtcatcgacgcgccctccctcttctccgtcctctggaagggagtgaggccgttcgtggagctggcgccggcgacggcggtggtgtgctccctggacttcgaggactcactggaggacgcctccttcacggcgtacccgcggaccgcgtccctgcggttcgagccgccgccggcggcggtcacggggaaggccggcgtggggtcagcctcgtcgcggttctccgtcacccccaccgacaaccccgtc

SEQ ID NO: 267363 - DNA, 422 bp, Zea mays
gtggcctgctttccttttgatgatcataactgccccccgatacaacttgtcatatcattctgccagagtgcgctactcatggttgaaggaggatatagaaaatgtggtggttgtccattgcaaagctggtaaggcaaggacaggattgatgatctcgagtcttctactatttctaaagttctttcctactgctgaggagtccattgaatactataaccagaaaagatgtgtagatggaaaagggctgattctaccaagtcagattagatatgtgaagtattttgagcgcatcttaacttacttcaatggtgaaaatcagccacccaggaggtgtatgcttagggggtttcgtcttcatagatgcccctattggattaggccatcaattacagtctctaaccacaatggtgttcttttttcta

SEQ ID NO: 267364 - DNA, 604 bp, Zea mays
cccacgcgtccgggcaagcacaaagatggtggactgaaaattacgagaaggtcatggagctggacaacgttcagaagtctaacagtcaagttgatcctctgccaagcattccaaggtctgacagtgagatctccaaagacgataccccagctacagcaccgcttaacaaggggcaagtgctacgtacttcacccagaccactaaaaggcagtgaagccataggctattcatcttcggattgtcctcagcaccaatccagtcattttcgcaacgtttaccgcaaagaccgctaccttgggcaccagttctgtgatccagttgaactggcatcgacgcctgagttatcaagcatcagtggtgcgaagacagagacgtctattggtgcatcagtgaggacaagctcatctcctgaagaggtcgatggatcgggcgaactttcagcctctgtcagcaacgcaagtgacgaagagagggaatgggtagaagaggacgagcctggcgtgtatattactattcgagctttgcctggtagcatcagagaactacgccgcgtcagattcagccgggagagattcagtgagatgcatgccaggttatggtggga

SEQ ID NO: 267365 - DNA, 349 bp, Zea mays
tctgtatgcattttgcccatagacttggcttgctgcactggggaagacgacaatggtgaccgacagggaggaaattaaaaaaaaaaaaaaaaaaaaaaaaaaaaaaaaaaaaaaaaaaaaaaaaaaaaaaaaaaaaaaaaaaaaaaaaaaaaaaaaaaaaaaaaaagggggggcccgtttaaaaaaaccaaacttaactaacccttgattccaagtaaaaacttttttaaaagggcaactaaaataaaattaatggcccgcgtttaaaaaactccgaaactggaaaaacccggcgttaaccaaattaaatcgcttttaaagaaaatcccttttttccaacttggttaat

SEQ ID NO: 267366 - DNA, 486 bp, Zea mays
  unsure (1)..(486): unsure at all n locations
cgcacgcgtccgcccacgcgtccggctccaggtggtacaggttcaagggggctcagcaactgatgcgccgaggtaaccgtcgtctcacgatcacgacgagtgcgggcatgaatgggactcagctctatgcggtcctgatggcagtttgcttggtggcttgggtaattatgttatggccttggcagagcaacaggaaaaaaaaggggccttaaaataaggtcatgataattattttgtatctaccatagtagttgtttgatatcgacgcctctctctctctctctctctctctctgttattattttatatttttgttactgtcctttcatttgaatctataggatggtcaaagtggctgatgaaagaggagaaagaaacaaaacagttggtttcttgttacttgtaagtggttaaactgaaatacaaatggatgtaagattgaatgaaagcaaaacaactacaacaaatacaaaanaatataattaa

SEQ ID NO: 267367 - DNA, 2211 bp, Zea mays
cccacgcgtccgcccacgcgtccgcccacgcgtccggagagatagaacacacaatgcgagacgggtggggaagggaaggcgaagggaggcgcactcgtcccgtctggtgctctggtatcgtctccccccggcagggaaggagtagaaggaaggagagtacgtaggaggaggaggggagaatgcgtgtcggcggcgggcgggacgacgacgacgaggtgtcccggaagctcaagagcatggacgtggacaagctggagaacggcggcagggaggagagcccgcggcccgccgtcaagtaccacggctggaaggccatgccgttcatcatcgggaacgagacgttcgagaagctggggacgctaggcacgtcggcgaacctgctggtgtacctgacgcaggtgttccacatgcggagcgtggacgcggcgacgctgctcaacgggctcaacggcaccaccagcctcgcccccatcatcggcgccttcctctccgacgcctacctcggccgctacctcgcgctcgccatcgcctccgtcgcctccctcatcggcatgttcctgctgacgatgacggccggcgcgaacagcctgcacccgccggagtgcagcgtgggcgagacctgcgagaaggcgacgtcgtaccagttcgcggtgctcttcgtggccttcgcgttcctggtgctgggctcggcggggatccgcccctgcagcatgcccttcggcgccgaccagttcgaccccaacacggagtctggcaagcgcggcatcaacagcttcttcaactggtactacttcaccttcacggccgccatgatgatctccgccaccgtcatcatctacgtgcagagcaacgtgagctggcccatcgggctgggcatccccacggcactcatgttcctggcatgcgtgctcttcttcatgggcacgcgcctatacgtgcgggtgacgcccgaggggagccccttcaccagcgtcgtgcaggtgctatcggccgcgctcaagaagcggtcgctgaagcagcccaaggacccgaagcaggacctcttcgacccgccgcacaccagcgccatcgtcacccagctcgcgcacacggaccagttccgctgcctcgacaaggcggccatcgtggcgtcccaggacgagttgcgccccggcggcgccgcgcccgcggacccctggaggctctgcagcgtgcagcaggtggaggaggtcaagtgcctcatccgcatcgtgcccgtctggtccacggggatcatctactacgtcgccgtggtgcagcagtccacgtacgtggtgctctcggcgctgcagtccgaccgccacctcggccgcgccggcttccagatccccgccgcgtccttcaccgtcttcgccatgctcgcgcagacgctgtggatccccttctacgaccgcctcctgctgcccaagctccggaagataaccggcaaggaggaggggttcacgctgctccagcgccagggcatcggcatcgcgctctccactgtcgccatggtcatctcggccatcgtcgaggaccggcgccgtgccatcgcgctcagccagccgacgctcggcaccaccatcactggcggggcgatctcggccatgtccagcctgtggatggtgccacagctcatgatcctggggctgtcggaggccttcaacctcatcagccagatcgagttctactacaaggagatcccggagcacatgcggagcgtggcgggggcgctcgcattctgcaacctggcactcggcaactacctcagtggcttcctggtgaccatcgtgcaccggaccacggggtccgggcagaactggctggcgcaggacctcaacaagggccgcctcgacctcttctactggaccatcgcaggcatcggcgtctttaatctcatctacttcgtcatctgcgccaggtggtacaggttcaagggaaccagcaactgatccgccgaggtgaccatatatcgtctctctcatggttggacaggttggtggggttggataattatgttatggcctctctcttttttgtttattactttatacctttgttactggtcctttcatttgaatctataggatgatcaagtggctgatgaaagaggagaaagaaacaaaatagttggttttttgtaatttgtaagtggttaaactgaaatacaaatggatgtaagcttgaatgaaagtttagcacagttaccgaccc

SEQ ID NO: 267368 - DNA, 1512 bp, Zea mays
gtttctttaccctaacggcctaacctttctgctctagcgaaggcacagccgccgctgtttcttcatcttcctcgcagcgccggcgctccatcttactctccctcccttactagcgcttgacacgcaggtgacggcggcagcgacggcgctcagactcgggcttttagtgacggcatcagcggtttcccctcccgcctcttgccagtcccatcgcgccctcgcctcgggtcctctgcacaccgtccagtgaccttgcgtgatggactggataaagttttgcagcgattttaccgcaagtgatgggaaacagcatgcattgcttgataatcttaatcaggaattgtcccagaagtctgtactattgggtgatggttttaaactgtcagctgctgataatgatgtgtttgcaactgttcatccttttgtgatccgtgttagtgacagcgagttgcagaaatatccacatgtactgcggtggatggactacattcagaacactgttggtgctggtacaactttgcaaaagataaatgtgaccaagtctgactttgatccaccttctcatccaaggaaagctgataaaaaagatgctgaatcaagttcaaagaaagccatttccgtacagaagactgctgacaagtcaaatggaagtgctgactcaaagaaatccacaagagagcctcctgaaaataaggagaatcctactgctgcggggaacagcaaaacctctggggagaaaaagaaagtgcaagagaagtcagcaggaaaaacaacagagaaagctccagagaaaattgcagacaaggaatcagagtgcgatatcagtatcctgaatatacaggttggccttatccgtaaagcatggaagcatccatctgctgacagccttttagttgaggagatagatttgggagatggtaatgtgcgtcaagttgttagtggtcttgcaaagtattgcagcccagatgatcttactaatcggcatgttgtcttgatcacgaatgtgaagcctggaaagctgcgagatgtaatgtctgctggattggtcctttgtgcttcaactgaagatcatgctgctgtggagcctttgattcctccagaaggagccaagattggagaacgcatttcatttgctgggtttgatgggaagcctgaagatgttctaaatccaaagaaaaagcagctggacaagattaccccgcatcttcgtaccgacgagaatggaattgcaatgttcaaaggtgttccctttactacatcagctggcccatgtagatcttcgattcgcaacggaaatgttaagtgagcagctcattagacatggttgcatagattgacattaaacttatgcagggtgtctgtgtaccattttgtcatacgtcatgttttgcccatatttagcgttgcaaaatttgaacagagttacactatctgtaagcaattttctactaatggttggcccagagtttgctttaaaaaaaaaaaaaaaaaaaaaaaaaaaaaaaaaaagaa

SEQ ID NO: 267369 - DNA, 570 bp, Zea mays
tccgcttccttgctcgccttttctttaaggcctccaacggtggagccggaataaactccggccacttcggcatccgccgggaatttgattcttctcccctaaatactcacgctaccttccacctccccctacttctctcccgcgtcggcttcgctaccagccagacagggcagctcacgtgtgcaggcagcggccaagatgatggcggaggcgtggacgccggtgccgttcccgccgacggcgccctgcttctggctgcacgacacgcactcggttttctggcggggaggagacgcgtggacggcggcggagaacaaactgttcgagaaggcgctggcgcagatcgaccgtaacgcgcccgacaggtgggagaaggtggcggaggtggtgcgcacgaagacggtcgacgacgtgaggaaccactaccacgacctggagaacgacgtcggcttcatcgaggccgggctcgtgccgttcccgcactacagcggctcggttccgtcgttcgggttcacccacgaggattgggacggagggttcaagcgcggctactgccttaagcgcgcgcgc

SEQ ID NO: 267370 - DNA, 374 bp, Zea mays
ttcttatgagccttcattctaggccagaataaactgcagccacttcggcatgcgccgggaatttgactctcctgcctaaaatagtcacgctaccttccacctccccctactactctgactctccctcgtgttcttcgctgccaagatgatggcggaggcgcggacgccggtgctgttgccggcgacggcgccctgcttctggcagcaggacacgcactcggctttgtggcggagaggagacgcgtggactgcggatgagaacaagctgttcgagacggcgctggcgcatatcgaccgtcacgcgccggacaggtgggagaaggtggcagctgtgctgccctggatgactgtcgactacgtgaggagccactacc

SEQ ID NO: 267371 - DNA, 1170 bp, Zea mays
  unsure (1)..(1170): unsure at all n locations
cggacggtgggtgtgaatatatccttttccaacaacattggggcctatgagtttcaaggcgatgatggtggccccagttggaaacccaggcctctgatccacgtaagtttagccaagaccttctctcagatggatcttaggggtcttttgctggaaaaaacgaaaactgagcttaaaaacaagctaacagtaataaaaagtaaaacatcccaagttgctagtgaaaaagcgagcaagaaaattgcggtcaaggaaaatggtggggataatgaagctcttggaccagaagatcctacagctattaaagattctcatgattcagaacagattggttctaatactagcacagatgctgaaaatgaagatgatgaccacttatcttataatgttcctgatccagatttccatgattttgacaagaatcgcactgaggaatgtttccaaagtgatcaaatttgggctacatatgatgatgaagatggaatgcctcgttattatgcatttattcagaaagttctttccttgaaaccattcaagctcagaataagctatctcacatcaagagcaaatagtgaatttgggcctttgaattgggtttcttctggcttcataaagacttgtggtgatttcaggattggtaaatatgaaagctgtgatatagtcaacatgttctctcaccagatgaaatgggataaagggccgcgcgggcttatcaaaatttatccacagaaaggtgatatctgggctgtttatcggaattggtcctctgactgggaggaagatgctccagataatgtgctccatgcctacaatgtggttgaggtactggatgcctatgatgaagtccatggcatctccataattcccttagtcaaggttactggatttcgaacagtatttcagcgccatcaggatccaaatgctaccatgaagattcctaaagaagagatgtttcggttttcacacctagtgcctttttacaggatgtcaggcgaagaagctgcaaatgtccccaaagatagttatgagcttgatccagctgctatttctaaagaactgcttcaggggatcacggaagcagtggagccaaatggaacctaaggcagttgatgatgcctgcctttggtaacctgccatttttgaagtaatcgagcanaaagatattaacac

SEQ ID NO: 267372 - DNA, 541 bp, Zea mays
gtagtctagcaacatagacgtgcaacatgcttggaaggtgtgagggtactatattcggagctactgaattccaagttctgttccccctgtcaattatggtattcaacaaagatggatagctgaaggtggtggctcagagattggtttttctttaattttggaggtaaatcatacgcattattgaggtcccagtaggttaaaagaatgaagttcctcgtctggggttgttccaaggccaacccaggtagaactgcaccccggcagcatcggtctcatcgattgaagttctctgttttgttaattaacccctgttaagaaaaaaagaaggcgtgttcgccgtgtcgggattctttccttcctcccctagtgtttatttcaatatgatatcgatacctgatgtctggtggtgtaagaggttactagcgatcctatagcagttctgtcgagttccaaaagttgtttcttggctccaccctctaccattcgtcttgaattatcttgtggccttgtttttttgctagaccttgaggcctgcgtaatc

SEQ ID NO: 267373 - DNA, 731 bp, Zea mays
tccctcgcgtccggtgccgacagaggcacgagcgcctccctcgtcttcgttccgtctctccccacagggaaccgccgcccgtcgcctccagatacgtgcctccggcggaaaatcggtatcgagctcgctttgttcgaatcttctgtatagccagcaaggaggcctctccatctcctccgggaaggctgtgcagcaatggagaagtataacagcaagactcagttagcacccttgagagataccccatttgctctccgtggtgctcttggtagttcaagctcataccttgagcaagccaggggctacacgtcttcccctctagcagctctgcgaccaaagatgtcttctactactggaaatcgactcctgcactcgagttgccccctgtcatctcctgtagcaaaccgcccgctgtcgccccaccttcctctgaagaagccacagttcagcgcgactttctcaatctcgcatcgtatattcggtgtcgcgttgggagttgccatcgtatctgtccctctcgccaccaagttcagcctaatgtttggtgtctgagagcgatttgctgcgtctcatgagaaacatcattttccgtttctgtgtctgtttttcatcgtctcggttaccttgcgacacaactgtaggtgccgttggaataatatctttgccatgcttgcagacttgtgtaataagtaaataaacctataaaatatcagtttaaggaggtttgcccc

SEQ ID NO: 267374 - DNA, 454 bp, Zea mays
caggttttggactcgtgggtcgacgcaagcctctagggagactcctcacatcgcctccagatacgtgcctccggcggaaaatcggtatcgagctcgctttgttcgagtgagtaacgcgcagcgacgcctcgcccaaccagattttgatggatttcgggcacgcgtggcacagatcttctgtatagccagcaaggaggcctctccatctcctccgggaaggctgtgcagcaatggagaagtataacagcaagactcagttagcacccttgagagataccccatttgctctccgtggtgctcttggtagttcaagctcataccttgagcaagccaggggctacacgtcttcccctctagcagctctgcgaccaaagatgtcttctactactggaaatcgactcctgcactcgagttgccccctgtcatctcctgtagcaaagcgcgcgctgtcgcc

SEQ ID NO: 267375 - DNA, 343 bp, Zea mays
  unsure (1)..(343): unsure at all n locations
cccacgcgtccgaccgcaccaccgaccactgcctccgtacgcgtccctctggcggaaaatcggtcctagtgccgagctcgttttgtttggatcttctgtatatctattaaggaggcttctccatctcctcggagcagcaaggctgtgcagcaatggagaagtataacagcggcactcaatttgcaccattgagagagactccgtttgccctcccgggggctcttggtagttcaagctcatatcttgagcaagccaggggctacacatcttcccctgtagcagctctgcgcccaaagatgtctacacctgganatcgactcctgcatacgagctgcnccctgtc

SEQ ID NO: 267376 - DNA, 487 bp, Zea mays
ccatgacaggattatcatgcagagtttctttgataggaaaaaaccaaaaatgaatctcaagaaaaaggtgagggaacttagtcagtcacgtgcagtgaaggctattcaaggcagatttcaaacaccacgtagcaaagtcatttggcagacagctattgcttttgtcttgcttggagtgcttacccttgctttccctaccgaagaagggccaaccctccaggtggccatctcttgtgcagcaaatatctatttcatttatcagagggtcaaaagtggatggcgagcattcttttatgggtttggttctttctttgcttcctggttccttggcaccttcttgatggtatctgtaattccccctatactccccggtccaagaaacttggaagtgagcaccgcttgtgttacttatgtgctccttttcatatcgtcgaccttcttgaagtaagagatctttgtgtttccatgttagcgcaaagtcttgcag

SEQ ID NO: 267377 - DNA, 1715 bp, Zea mays
ataaggaaagccggcacgcctgcacggtaccggtaacggaattgctggacccacgcgtgcttagtattcactgccaagagagtgagcgagcgagcagaggcagcgcagcaatggcggcggcaatagtactctccggccaggtgcggccgcttccctcgtcgctgcccctgtccctgctgctgctcctcctcctgtgctgctccggcacctcgtggggatggagcacgtcccggggaggagccgccagggagtgcggcttcgatggcaagctggaggccctggagccgcgccacaaggtgcagtctgaggccggctccgtccagtacttcagccggttcaacgaagccgaccgggagctcacctgcgccggcatcttcgccgtccgcgtcgtcgtcgacgccatgggcctcctgctccctcgatactccaacgtccattcgcttgtctacatcgtccaagggagagggatcattgggttctcgtttccgggatgccaagaggagacccagcagcagcagtatggatacggatatggatatggacaccatcaccatcagcatgaccaccacaagatccaccgattcgagcagggcgacgtggtggccatgccggccggcgcccagcactggctgtacaacgacggcgacgcgccgcttgtggcggtctacgtcttcgacgagaacaacaacatcaaccagctcgagccttccatgaggaaattcttgctggctgggggcttcagcaaggggcagccccacttcgccgagaacatcttcaaagggatcgacgcccggttcctgagcgaagccctgggcgtcagcatgcacgtcgccgagaagctgcagagccggcgtgaccagcgaggcgagatcgtccgcgtggagccggagcacggctttcaccagctgaatccgtcgccgtcgtcgtcgtcgttttcgttcccatcgtcacaagtccagtaccaaacgtgccagcgcgacgtcgacaggcacaacgtctgcgccatggaggtgaggcacagcgtcgaacggctggaccaggccgacgtctacagccctggggctgggaggatcacacgcctcaccagccacaagttccccgtcctcaacctcgtacagatgagcgcggtgcgggtagacctgtaccaggacgccatcatgtcgccgttctggaacttcaacgcccacagcgccatgtacggcatcaggggcagtgcaagggtccaggtcgccagcgacaacgggaccacggtgttcgacgacgtgctccgtgcggggcagctgctcatcgtaccccagggctacctcgtcgccaccaaggcgcagggagaaggcttccagtacatcgccttcgagacgaaccctgacaccatggtcagccacgtcgccgggaagaactccgtcctgagcgacttgccggccgccgtcatcgccagctcgtatgccatctccatggaggaagctgcagagctcaagaacggtaggaagcatgagctggctgtgcttactcctgctggcagtggcagctaccaacaaggtcaagctggcagcgcccaacagtaggcacaacctcagagtgatctgcctgaataagtactcgtagactgtaataattaaacaaagcttgctcatggttaaactaaaaaaaaaaaaaaaaaaagggcccagaaggaaatacaatgcagcatgttagctgtataaccctagtacgtccaa

SEQ ID NO: 267378 - DNA, 470 bp, Zea mays
catggtcagccacgtcgccgggaagaactccgtcctgagcgacttgccggccgccgtcatcgccagctcgtatgccatctccatggaggaagctgcagagctcaagaacggtaggaagcatgagctggctgtgcttactcctgctggcagtggcagctaccaacaaggtcaagctggcagcgcccaacagtaggcacaacctcagagtgatctgcctgaataagtactcgtagactgtaataattaaacaaagcttgctcatggttaaactgcgtgttgattagtctttcaactacatagctctaaagtttttgatacaccgagtgatttgccaggaaaaaaatgagcagattgttgtaagcaaaacatgtttgttatggctaaactgcatgtctacctggatttgtattttttttcaaaaaaaaaaaaaaaagggcggccgcccgggaattcggacggtactgcaggcg

SEQ ID NO: 267379 - DNA, 543 bp, Zea mays
  unsure (1)..(543): unsure at all n locations
cggaattcccgggtcgaccgacgcgtccgagtgaatcacatgcggcagactgtgaatcttgtatccaatgaacgccaaaagctgttggatagagcagcggctgcagagaaaagattccaaaaaggatggaatacactcagggaagaagggcgttccattcaacacgagttgcgtgagattagtgatattgaaaaccaagcagtaggtctgaagggaattcttgatcagcttcccagagcacatgcatctgaatttcggtcgaagatgtctggcctagcttctcaggttaagaaggagaagcgagtgctcaacgccgccctcacgaagattgtgaactacggtgtccccatctgactgccactccagccagttgttctgagggtccattgtattgtatcagatttttgtgaaggaagacatgttcgatgtgtagggtgaacgctatactgcccacttggtttcgagaaaaggaaaagagaataagttgtgacccgtgcagatttctaatgtcgcanaagcaacatctttgaaacctgagtaaca

SEQ ID NO: 267380 - DNA, 1475 bp, Zea mays
tcccgggtcgacccgcgcgtccgcccacgcgtccggtcgctgtcgtggagcacagccgcaccgcactcacaccatttcaccatctctccgcgggagcagatcctctccgctcgccagcctccccctcctgctgctgcctcctcgcttcaagcaacacccgaagcggcaacaaccaccaccaccaccaccaccggacctgcctgagcgaccccttggcttcccactccactgaagcagggcgagagagagtaaggaggaggaggagaagccatggcgagcgacggcgacgggaagggccgcgtcgcgacggcgccgggggcagggtacgggtacgcggcgtacggcggctaccagggggcggaggagcggaagtggtggccgtggctcgtgcccaccgtcatcgtcgcctgcatcgccgtgttcgtcgtcgagatgtacgagaacaactgccccaagcacgggagccagctcggcgactgcgtcgccggcttcctccgccgcttctccttccagccgctccgcgagaacccgctgctcggcccgtcctcctccactttggagaaaatgggagctcttgactggaataaaattgtccatcaaaaccaagggtggcgccttattagctgcatctggctccatgctggcctaatccatttggttgtgaacatgctaagtttgctgtttattggaatccgccttgagcagcaatttggatttgttcgcattggtgccatatacctactgtctggttttggtggcagcgtgttgtctgcactcttcctacggaacagctacatctccgttggtgcttctggagctctatttggcctgctgggatccatgctttctgaactactcatgaactggactatatactccaacaaggcagcagctataataacactgttgtttattattgcactcaatttggctattgggatactacctcacgttgacaactttgctcacattggtggattcgcgacgggtttcctcttgggttttgttctgttggcaaggcctcaatttagctggatggaaagtcatgagttgccacacactaaccaacctcccaagtacaaagcgtaccagtatattttgtgggttgtggcactagtcttgctgttagttgggtttgtgatttcacttgtgatgcttttcaaagggaagaacgggaacgatggctgccattggtgccactacctgaactgcgtgccaacatccaagtggaagtgcaacacctagacacctcagttttctgttacactcgggggcaaaaatgtagtatccagatttacaagaccattctctatgtttgtttgtctgtagatatgaacaagttctttgttctttactgggttggagtttccttgcctatgtaaactgctttgttgagctttgtatgtttataactcgagtttgatgcctattcaaaatcgttgtttaggaaaaaaaaaaaaaaaaaaaaaacccaa

SEQ ID NO: 267381 - DNA, 783 bp, Zea mays
ctactgtctggttttggtggcagtgttctgtctgcactcttcctacggaacaactacgtctgtgttggtgcttctggagctttatttggcctgcttggatccatgctttctgagctactcatgaactggactatatactccaacaaggccagtacaattaacagataaatatatactttattttatccagctgcttgatagtcatttagctcgtatacttaatttgctcttgcaggcagcagctataataacactcctgtttataattgcactcaacttggctattgggatactacctcatgctgacaactttgctcacattggtggattcgcaacgggtttcctcttgggttttggtctgttggcaaggcctcaatttggctggatggaaagtcatgagttgccacacactaaccaacctcccaagtacaaaatatactggtatgctttgtgggttgtggcactcgtcttgctgttagttgggtaagtaaatccatatggctggttcagtatatttgttgtagacatgtctttatgcgtttattaaacatatattgcagaaaacgtgctacaaagattcgtgattctggactaatgctaaattttggacgagctataaagatattacttgtttttgtgaaagcttgaaatagcactaatgtcaaattcttggggcacaggtttgtgatttcactagtgatgcttttcaaagggaagaacgggaacgatggctgccattggtgccactacctgaactgcgtgccaacatccaagtgggagtgt

SEQ ID NO: 267382 - DNA, 734 bp, Zea mays
cggacgcgtgggtaaattctgattctgagggtgctggcactcgatcatacagctaccgcgtatgttgagctagttattgctagggtaaaattattttattgaattttaatttcttagccctgcgcaatctttaggttgttatgcaaactggtgatgctgagctggaaatgcgagggcgctgcagtgctggtcagaagtttcttgcttctcttataatcagactagcacttgcggaaactttctgcctgaactgcggtatattggctttggatgagccaactacgaatctagatgggccaaatgcagagagtcttgctgctgcgctgttgagaataatggaagccaggaaagggcaggagaacttccagttgattgtaatcactcatgatgagagatttgcccatcttatcggtcaaaggcagcttgctgagaagtactatcgagtctccaaggatgagaaccagcacagcataattgaatcccaagagatatttgactaagggtgttctaggaggctgtagcacgcactcgtttgctagtcgaatccagttaatttatgccaagtactggtgccagagcaatgttaacaagctttaggaggctctgttacgccgttacgtcagttgcgtgaaacctatccttcgttgttgtatacttatttaatctggccagaggatggaatgtgtgccctgggtgatggatgtttccccccatcaatgaatgtttcacaatct

SEQ ID NO: 267383 - DNA, 397 bp, Zea mays
gttctatatctgctggagttggtctactacatttttgtcccaccatttcaaattttaagatgattggcttttctagatacattgcttcaactattgtatgtcgaagtgcatagcaaaatcaatgtatctagaaaaactaaaacgtcttaaaatggagggagtattattattcagagggtgccgtgggggagtgggactatcctaaacgagtgaaataacaatattacatttgatgccttgttatagcagtatgcaatacattagtatactcatagttggagtagcgaaccatcttagagtgagaaaactgtagccagcagaacagcattgtctacaaagatgacaattttgtttagctgtgctccttttttgtaccttttaagttgagacctgatgc

SEQ ID NO: 267384 - DNA, 691 bp, Zea mays
cggttcggagtttccgcgtgcacgggtttgagcggcgaaaagagggaaaagaaagccagcgagagagacggaaagggggagatgagccggagcctggggatcccggtgaagttgctccatgaggcagcgggtcatgtggtgacggtggagctcaagaccggcgaagtgtaccgggggtccatggtcgagtgcgaggataactggaattgccagctcgagaacattaccttcaccgccaaggatgggaaggtttcgcagctggagcacgtcttcatcagaggaagcagagtgagatttatgattatacctgatatgctcaagaacgctcccatgttcaagcgcttggaagcgagaattaggggcaaaggatcagctattggagttgggcgtggacgtgcagttgcaatgcgtgctcgggctgcttctggtcgtggtggtggtcctgttgggcgaggcagcgcgcctcctgtgaggaggtagattttatggtgtcatgcggcttttcttgtctggctgaggatgttgcagtctgatgttaggacgctgtcttggtagtcaaaactgccgtaatgtataattcaacggcttaaggagtatgagtgtgcaacctcttattgttgaatgtaatgtgttgacggtggttgttttccttgctctattcggatggctggtcccggggaaggagggattt

SEQ ID NO: 267385 - DNA, 1172 bp, Zea mays
gtacgtcggaatccgggtcgaccacggtcgggacggtggtaggagctgacattcaaaaggattatttgaccaacatctcttctaacggagatatattatatgatgctcaaaatgatttcttaacacctgaatgggatagtgagaatttaccaagtgatagtgatgattctagccatgttcaaatcatcagagagtcatcaggtttcacagactcatcttacactacacctccttgctctggaccttacaagagaagaaaaataacaaaatcagatgatggaagtagttcgactgaagaatcatacacagaaattgtggcctcgccaaaacattcgtcatcttcgtgttcatcatgtgacagtgataatgagaatgctaagccgctattggagcctagcacgtataaggatgtactgatctgcttccgctttgatgatcatgaccttccattcggactgaaagaagtcatactatctgacgtcagactgttgacgctacttgagtatggccttccatcgtgggttatatttcttcagtcatatccggtgttttgcaagatatatcggccatggatgtgccctcttgccagagcattgtatgtcttgatgtcattaatcactgttcttataggattttatgacctctacaagaacgtgcccatgctgaaggcaactgcctcaagattgtttggccctttatttgattggatagaaacatgggaaatgatatcaagacttaagtatcttggaactatgcttttcctgcataattttcagcaggcttttacatggtcccttaagattgtgggtgctgctaagtctgctcttagtgttttgacaaagccaattgcgggaccaattctggaggtttttgaacttacgatgccaatttggaacctttgtgctgagacagtaggatatctgagttcagttgtcatgttatctctagaagcgtcttggagtgtagttattgatacagtggagatgattgtctggccattttggttcggcttcagtactatggttagcattgtgaattcaattctgtaccctataatttggctcctcggagagatactagctgcacctttccgactagtcattgggctatcaagttttgtagtggacccttcctgtgatattgtcactttctaaggcagagctggtcaacac

SEQ ID NO: 267386 - DNA, 607 bp, Zea mays
  unsure (1)..(607): unsure at all n locations
cggnccggaattcccgggncgacccgggcgtccgcccacgcgtccgcgggaagcttccgactccataccccgcacacgagcgctccctgcagatgacctcggctgtggtggagcgcgtaaccaacgacgaccggagcgtagcctcgttgcttgatccaacgctgggtggagaccacagggaagacgagctagcggtcatcggcgaggtgatccgggcctgcatgcagagcgacccgaggcgaaggccgagcatgagggaggtcgccgccaggctgagggaggccgtgggtatctcgccggtcgctgcgacgccgaggctgtctccgctctggtgggccgagctggaggtcctttccgccgcggaagcaagctaataatagtgggcgagaggacagggcaggaacaggaacagggcaggatgatgtcgcgcaatctgaccagtttgttctcaagaaaagaaagccttgcagccctttgtgcatgctgtaaatgtgaatgtgaagctgtagggaaggaatagtaatccgtcaatgtaaatctgaaactctgaaggtgctagatgtccgtagctagtgtcttggcacaggtatcaatcagtaattcaagc

SEQ ID NO: 267387 - DNA, 622 bp, Zea mays
cccacgcgtccgctctccacaagtccagatctcccattcacacacactcgcgcgcgcacagagacctccacgcgcagcaaagcatccacccatggcgcctctcctcctgctcttcctcctcggcggcctctgcgccctcttgtcgctggccacttcctcacgcgccagcgccaagaagtgcgatgacgtcaagagcaacggcaattgcggggactccggcgaggaggcaagatgcagggacggctgcgcctgcgcgccagaggagacgcagcagcaggggaagatgcaggcgcggcccgacccggagaaggacctgggcatcgtattctccacgttcgaccacgacggcgacgggttcatcacggcggtcgagctcgaggagtcgctgcgccgcctcggcatcgcagtgtccgccgacgaggccgcggccatggtcgcgcgcgtcgacgctaacagcgacgggctcatcgacatccacgagttccgcgagctctacgactccatacccaagaagaggaagcaccagcaccccgtagccgacggtttcagcggggcagcaagggaggtgccggtggagggcgacgacgaagaggccgaggaggagagggacctgcgggaggcg

SEQ ID NO: 267388 - DNA, 841 bp, Zea mays
cttgagctctcccctcagctcatctccctccctatatataggaggctctgccggctgcaaggttcccaagcgcccaaggcagcggagagctagctccctcctcctcctcaggtagcgagcgagcgagcgagctcctctgcccctctgcacctggcctcccttctccgctgcagcaccgccgttttctccgttgacgactgctcgaccagtgcgcgcgctcgcgctgcctataccttacctagccagagcgcggcgcgcgagagggagaacgaccaggagggggaggagatcgatcgatcgatcgatcgagatggccttcctcaacatggagcagcagacctgggccttcaccttcggtatcctaggtaacataatctcgctgatggtgttcctttcgccgctgccgacgttctaccgcgtgtaccgcaagaagtcgacggaggggttccagtcgaccccgtacgtggtgacgctgttcagctgcatgctgtggatcttctacgcgctgctcaagtccggcgccgagctgctggtgaccatcaacggcgtcgggtgcgtgatcgaggcggcgtacctggccgcgtacctggtgtacgcgcccaaggccgccagggcgctgacggccaagatgctgctggggctcaacgtcggcgtctttggactcgccgcgctcgccaccatggtggtctccagcgccggcctccgcgtgcgcgtgctcggatggatctgcgtcagcgtcgcgctcagcgtattcgccgcgccgctcagcatcatgcggcaggtggtccggaccaagagcgtggagttcaatgccccatctacgttcttccttaattacctg

SEQ ID NO: 267389 - DNA, 448 bp, Zea mays
ttcttgctccctcctcctcctcaggtagcgagcgagcgagctcctctgcccctctgcacacctggcctccccttctccgctgcaggaccgtcgttgacgactgctccaccagtactgcgcgcgcccgcgctgcctacccttacctagccagagcgcggcgcgcgagagggagaacgaccaggaggggaggagatcgatcgatcgatcgatcgagatagatggctttcctcaacatggagcagcagacctgggccttcaccttcggtatcctaggtaacataatctcgctgatggtgttcctttcgccgctgccgacgttctaccgcgtgtaccgcaagaagtcgacggaggggttccagtcgaccccgtacgtggtgacgctgttcagctgcatgctgtggatcttctacgcgctgctcaagtccggcgccgagctgctggtgaccat

SEQ ID NO: 267390 - DNA, 547 bp, Zea mays
  unsure (1)..(547): unsure at all n locations
gcagcggcctacgccgtcgtgctttcggattacctcggcacggccagcctgcgcgtctgggagttcgccgggggcgcgtggcggcaggtggccgccatgccgcccgccatgtcgcacggattccacggcacgcgccccgacatcaactgcgtcagccacggcgaccgcctcatggtctgcgtcacctacgccgaggccaacgcctgcttcatgtgcgacgtggccagcaaccagtgggaggagctgcccaagtacgtcaatgccgacggcgaggccagcgagttcctggccgccttctccttcgagcccagagtggaggtcaccgtataagcgcttatggttatagtgttactacaattaattgctttcttcattaaggcgccttagttttggttcggctcctactccgtgtgattgatttcttcgtgtgtgtgtgcatgtacttacggtaccgaattgtaatgtcatttttcattgacattatttgtcgtccataaaattgcagatttcgcccgccaaaaaaaaaaaaaaaaaaaaaaantgatga

SEQ ID NO: 267391 - DNA, 1181 bp, Zea mays
ctatggtattaaattcatggagtatgtcacatgttgggccgctgagcagggacctcactctgactttgctgggccaacatgtgggagtacagcgtgtgtagcactaataagaaacacccaacttgttgtggcaaatgctggtgattcccgatgtgttatttcaaggggtgggaaggcatacaatttatcgagggaccacaaaccagagcttgcagctgagagagaaaggataatgaaagcagggggcttcatccatatgggacgagtaaatggaagtttaaacttgtcaagggcaattggagacgtggaattgaaacagaacaaattcctgcctcccgagaagcaaattgtgacggccaatcctgatatcaacgtcgtggagctctgcgatgatgacgactttgttgttgtagcatgtgatggcatttgggactgcatgtcaagccaacagctggtggattttatccacgagcgtataaacacggagagcagcctgtctgccgtgtgcgagagagtgctggacagatgcctggctccatcaacgatcgctggagacgggtgcgacaacatgaccatgatcctggtgcagttcaaaaaacctgtcgatcggaacaagaaggccgaagcagcagggcaatctgccagcaatgtggacgaagccaagagtcgtgttgctgaggagtgaagcatggctggcactcaccagggcgcaaccatttgctttcataaggcaggtgaaaaaaaggaacgaagaaacctgcagtgtacgtatctcaactgtacgtggcatgccatgcaaatcctgcctaagttaccccggacaatggcattgcctagtgcagtggtggatcttcagatcacaacctttcttgtgccagctttcggtcatctccactctccagccctcggaaccatggctgagtctgtctattctttgtgtggtgtgtagcattcctcgtgttttcgttgtccaaaatggtgtcaaatccagttttttgttgcgagaatgaaccgtgacgttagtgtgttttgctggcggttaggtgcaaaatactcgaaacctgaattgcccgctcgctatttcgggttgtaagtatatgatgaatctgattttagttgcatggtgtacccatcttatctgaaaataatgaaagatctgtttgtggttgtctagatcgcga

SEQ ID NO: 267392 - DNA, 765 bp, Zea mays
ccctttcgttcgcccacgcgtccggctatccttgtcatgatgtgtccgcgttggtcctagttcctgcaatgcgaatttgtcatgttcgtgtggcttccgtggatatacatatactggtctgagttgtcaagtccttgacctgatcatatcagttttgcttataaggatgggggtttacctcagtactccaaaaactgacaagctatctgaaaatggagaaaatgatagacttaagtttggtctttcatctatgcaaggatggcgagcaaccatgggagaggctcattcagcattgctagatcttgatagcgagacagcattctttggtgtttttgatggtcatggaggaagagtcgttgccaaattctgtgcaaaatatctgcatggtcaagtcctcaaaagcgaagcctattcaactggtgacctaggcactgctgtccatagagctttcttcagaatggatgaaatgatgcaagggcagagagggtggcgagaactatctgcacttggagacaaaataaacaagtttagtggtatgatagaaggattgatttgggctccaaggggcagtgattcaaataatcaacaagatgattgggcttcataggagggacctcactctgactttgctgggccaacatgtgggagtacagcgtgtgtagcattaataagaaacacccaacttgttgtggcaaatgctggtgattcccgatgtgttatttcaaggggtgggaaggcatacaatttatcgagggaccacaaacc

SEQ ID NO: 267393 - DNA, 587 bp, Zea mays
gtcactcactcgtaggtggcttccacccatctccctcagcagtcagtcagcaggactcagcagcactatctcccacccccatccttcgctactctttcgttccttctgatcgccgctatcctcttcagccccgactgaggaggcggccggcgctccccaggcacgcacgagttgacgggtccagcagcggcctcgggatcttgccgccagctgcagcggcaatccggtccgtccgcccaggctcgaaaccagtgctgtcttaggtattgctgattcatgattcttgattccgggaggcggcttcgtgctgtgacagcccgatcttgcggttcagcagagagccaatccgctgggcttccgtggatatacatatactggtctgagttgtcaagtccttgacctgatcatatcagttttgcttataaggatgggggtttacctcagtactccaaaaactgacaagctatctgaaaatggagaaaatgatagacttaagtttggtctttcatctatgcaaggatggcgagcaaccatggaagatgctcattcagcattgctagatcttgatagcgagacagcattctttg

SEQ ID NO: 267394 - DNA, 772 bp, Zea mays
cctgtgtcctggcgtggagctcgcgcagccgtctcgtctcgcctggagctcgcgcagccgcctcgcctggatctcgcgctagggttggagccagggtcctcacagccgcctctatcgctcgcctggagctcgcgctagggttcctctcgcagccgccgctgttgaggtgctacttgcaaaagcgtgtactgaacagctcaaaaggccctgttgtacgtgcactgcgtgctcagactgataagagagagtatgcaatagagatgaagaacagtgtggaaaggtccatatggtaaaggaaatcagtggcgaagtctatctttttctcctcctgccgtacgtccgttccagcttgcaaagcgctcgcgagctgctgccatggcaggcgccggtgcgcccgcagttccccaggccggtcgcccagcccccaacttcgacgtcatcgtggtgggcgccggcatcatgggcagctgcacggcgcacgcggcggcgtctcgcggcgcccgcgtcctgctgctggagcgcttcgacctgctccacccgctgggctcctcgcacggcgactcccgcatcatccgggacgcctacgcgcagccgcggtacctccgcatggtgcgcctcgcccgccgcctctgggccgccgccgaggccgaggccggctaccgcgtgctcaccccgacgccgcacctctccatgggcccgcggagcagcgcctcgctcgccgccgccatcgctaacatcggtgccgaggaggtggacgtggacgaccttcacc

SEQ ID NO: 267395 - DNA, 724 bp, Zea mays
agcagctcagagcacgcgcagccgcctcgcctcgcctggagctcacgcagccgcctcgcctggagctcgcgcagccgcctctatcctcgcctggagctcgcgctagggttcctctcgcagccgccgctgttgaggtgctacttgcaaaagcgtgtactgaacagctcaaaaggccctgctatatgtgcactgcgtgctcagcctgataagagagagtatgcaatagagatgaagaacccggtggaaagcacagaaaatcttttcattagagaagcaatggctacagaggttttaattggaaaaaatgacaccattgagggtgtttgcactttcttcagcatggactttatgcaccatctgttgtacttagcaccagaacattcatgagtgtttctggggccaagctgctcggctcctggggcgtggacctccccatcaggccgctgcacacgctccacctctactggcgcgtgaagcccggccaggagcagactgtctcgacgagcgccgggttcccgaccttctccagctacggcgacccgcccgtgtacggcgcgccgtcgctggagctcccggggctcatcaagatcagctgcattagatcttagagtacactgttttacacaatttggagttgttactactatcaagctttagactttagactttggagtacactgtttttacactgtagtaagctttagccttttatgctacagtgtgt

SEQ ID NO: 267396 - DNA, 471 bp, Zea mays
gggctcctcgcacggcgactcccgcatcatccgggacgcctacgcgcagccgcggtacctccgccgtggggaagatcctggcggagatggccattgatggcggctccgagacggcggcggaggccggcctggacctcggcttcttccggatcgggcgcttcgatggcaaccccatgggaaatgccaagtagtgagctatgctgctgctgccatgcatgtagtactaaatatggatcgatggtggtcaataatgaaagtaataaaacattcatattctagcatcataggctgagaatactttcttcatgtatggcacctgagaaactatcctcttccagattttgtatggtcagtcactctaataaacgatttgctgtattttaaacattaacgtattcccaagtgatacttcttcgtttcttcgaatcgaagaacgactttgaagcaaaaaaaaaaaaaaagggcggccgc

SEQ ID NO: 267397 - DNA, 528 bp, Zea mays
actagttctagatcgcgagctgccgcccgcgtagaacgcctcgcctggagctcgcgcagcgcctctatcctcgcctggagctcgcgctagggttcctctcgcagccgccgctgttgaggtgctacttgcaaaagcgtgtactgaacagctcaaaaggccctgctgtacgtgcactgcgtgctcagcctgataagagagagtatgcaatagagatgaagaacagtgtggaaagcacagaaaaccttttcattagagaagcaatggctacagaggttttaattggaaaaaatgacagcattgagggtgttcgcactttcttcggcatggacttttatgcaccatctgttgtacttaccaccggaacattcatgagtggtaagatttgggttggtaggacatcaatgcctgctgggcgagctggagagtcagcttctcatggactaactgaaaacttgcagtttctgggttttgaaactgaccgtttgaaaaccggtacaccaccacgaattgatcgcagaacagttgatt

SEQ ID NO: 267398 - DNA, 671 bp, Zea mays
gtcgccgacccactccccgatggggatcagggatacatcgttctcaataggccatgggcatttgttcagtggctccagaaagcagacataaaggaagactatattttgatggcagagccagatcacataattgtcaagcctatcccaaacttgtcgagagatggtcaggcagcagctttccctttcttttacattgagcctaaaaaatatgagaatgtgttgcgtaagttcttccctgaagacaaggggccaatcactaagattgatcctataggaaactctcctgtcattattgagaaggaatctcttggaaggattgcaccgacttggatgaatgtttcattagcaatgaaaaaagatcctgacgcagataaatcttttggctgggttcttgaaatgtatgcctatgccgtggcatctgctctccatggagtgggcaacatcttacgcaaggactttatgattcagccaccttgggacttggaagttggtgattcttttattattcattatacttatggctgtgattatgacatgacgggtaagctgacttatggcaaaattggagaatggagatttgacaagagatcatacacggacaaacctccacctagaaatttgccgttaccaccacatggtgtagctcaaagtgtggtgacacttgtgaaaat

SEQ ID NO: 267399 - DNA, 2316 bp, Zea mays
gttcctcaaccgacacttgtcctcaatcatgttccgcaacagggattgcttggaccccctgctggatttcctccgtggccaccggcacaaggggcatgttatgatgcttaatgatagaatacaaagcttggggaggcttcagtctgtgctgaccaaagctgaggagcacttgtcaaagctccctgctgacacaccatactcacaatttgcttataaattgcaagagtggggcctggagaaaggttggggtgatacagcagggcatgttttggaaatgatccatctccttctagatattattcaagcgccagacccatctacactagagaaattcttggggaggatccccatgatttttaacgttgttgtggtatcccctcatggatactttggtcaagctaatgtattaggcttgccagacacaggaggacagatcgtctatatactggaccaagttcgtgcactagaaaatgagatggttctccgtttaaagaaacaagggcttgatgtttccccaaagattctcattgttactcggctgataccagatgcaaaaggaacatcatgcaatcagcggcttgagagaattagtggaacacagcatacttacatattacgagttcccttcagaaatgaaaatgggatacttaagaaatggatatcaagatttgatgtgtggccatatctggaaacatttgctgaggatgctgctggtgaaattgctgctgaattacaaggtactccagacttcataattggaaactacagtgatggaaatcttgtggcatcgttgctatcttacaagatgggaattacccagtgcaacattgctcatgctctggaaaagactaaatatccagattcagacatattttggaagaacttcgatgagaagtaccatttctcctgtcagttcactgctgatataattgctatgaacaatgctgattttatcatcaccagcacataccaagaaattgctggaagcaaaaatactgttggacagtatgagagtcatactgcctttactctgcctggtctgtaccgagttgtccatgggatcgatgtcttcgatccaaagttcaatatagtctctcctggagctgacatgtccatatactttccacataccgagaaggccaagcgactcacctctcttcatggttcaatcgaaaatttgatttatgacccggagcaaaacgatgaacacattgggcatctggatgaccggtcaaagcccatcctcttctccatggcaagactcgacagggtgaagaacataacggggctggtcgaagcttttgctaagtgcgctaagctgagggagctggtaaaccttgtcgtcgttgccgggtacaatgatgtcaacaagtccaaggacagggaagagatcgcggagatagagaagatgcatgaactcatcaagacccacaacttgttcgggcagttccgctggatctctgcccagacaaacagggcccgtaacggcgagctctatcgctacatcgctgatacccatggtgctttcgtacagccggccttctatgaagcgttcggtctcaccgtcgttgaggccatgacctgtggacttcctactttcgcgacgctccatggagggccagctgagatcatagagcatggcgtctcgggcttccacattgacccgtaccaccccgagcaggctgctaatctgatggccgacttcttcgaccggtgcaagcaagacccagatcactgggtgaaaatatctggagcagggctgcagcgcatatacgagaagtacacatggaagatatactcagagaggttgatgacactggccggggtctacggtttctggaagtacgtgtcgaagctcgagaggcgggagacgaggcgctaccttgagatgttctacatactgaagttccgcgagctggcgaagaccgtgccgcttgcaattgaccaaccgcagtagcttgcgcaactgcgactgcgtagcacttggtacaagactgaaacctgaaggaccttcagtaatttaggcgcggcagacggtagccaataaaatgtgccggagctgaactggtttttattatgtacataatggcagtataacaaaattactgaaggcaggtgggttgcagttgtgtgttcgttactgtttactgtaatatgtcaagctgtcggctgcaatttctttgctggcaagccgcaggcactggtgaagtgctgataaatacatcatattctgttggcctgtgaagaagcttgttcaaggtagattccattgtactagctttgttgctcagcatctccttgtttgggaccattaaa

SEQ ID NO: 267400 - DNA, 994 bp, Zea mays
gccggcagcacctaacttttctcctaaaaatcctccaaaaaaacaaaaaaggggaggggaaaatattctcgtcttcttccccgtgcttgccagctcccgaggtcggcgagctctccgaaagcggcggcgatgggttccagccaggccgataagccactgcgtcgtatagcggtgtcgttcgaggagctcgccgccgtcgctaagcagcagcccgcggtgcccatggacgctggggccttctcgcgcgcctgctccaacgtctccgtcctcttcggctgcctcggcatcgctttcaagttcgcggagatggactacgtcgccaaggttgatgatttggtggaggcgtccaagtcaatttcaacattgccttctatggttgagcgagacattcagaccgacactgtcaggaaaccagggagccatacaaggaatctgcttagagtgaagcgcgggattgatatggttaaagtcctgtttgagcaaattcttgtcacagagggcaactcactaagggatgcagcatcggtggcttatgctcaggtctttgctcctcaccatggatgggcaataaggaaagcagtttctgctggaatgtacgcccttccctcaaagtcccagctgttgaagaaattgaatgaagatgaggaatcagcaaaggtccaaatgcagaactttgtcaggtcatcagctccagtaatctgctatgttgatgaccttttcacctcaaggaatttgggcatagattggtgaagaaaaatatggatacgtttgtttgatgtactaatccagtcagatggtgtgctgtgtgagctgggctcagaaaacctttttctggatccgtgtttccaagtcgtaaactaatataactacttagcgatccaaaacaaaaaaaatttgtgatgtttgcgcagtataaatatacgtgtcgacaaatataactacttagcgatccctgataatactggagttaggcgatgagaaaatatacgtgtcg

SEQ ID NO: 267401 - DNA, 1484 bp, Zea mays
tttctttggacgcgtgggagcaggcttccgctgctgcttcccccactcgaatccaagcaaccacgcccccacgcccagtccaaccccaacccgcgaagctggcgcgcgaggcggccgacgcgagcgcccgcaagcgcaaggcgggggacggcggcgaggtccccgacgccaccgcctcggcagaggtggccgcagcgccgacccccggagaggacgcggccatgggcgacgttccacaggcgccgcacgctgcgggaggtggagaagagtgggcggggccggaccctaaccctagcccgagcctcggcggctgctcggaccccgtgtcggtggagctctccatgggcggggactactaccgcgcctgctgcggcgagcccgatcccgacatccccgaggggcccaagctgccgtgcgttggggacaaggaacctctctcctctttagcagctgagtttcagtctggcagccccattttacaagagaaaattaagttgcttggcgagcaatatggtgctttaagacgtacacgtggagatggaaactgcttttatcgaagctttatgttttcctacctggaacacatcctagagacacaagacaaagctgaggctgatcgcatcatggtaaaaattgaggaatgcaagaaaacactcctctctcttggatatattgagttcacttttgaggacttcttttcgatattcattgaactgctggaaagtgttctgcagggacatgaaactcctatagggcctgaagagcttctagaaagaaccagagatccacaagtttctgattatgttgtcatgttctttaggtttgtcacttctggtgaaattcaaaggaggtctgacttctttgaaccgttcatatctggcttgacaaattcaaccgtggttcagttctgcaaggcttctgtggaacctatgggtgaggaaagtgaccatgtgcacataattgccctatcagatgcactaggcgtaccaatccgtgttatgtacctagaccgaagctcgtgtgacactggcaacctgagcgtgaatcaccacgatttcatcccgtcggccaatgattcggagggtgatgcggccacgacacctgctcctgccacagagaaaccgtacatcactttgctctaccgtcctggccactacgatattctctacccaaagtgaattttgcgcatggttagtttcacgacttcggttgagaaagcacactgcccagaaaactcgtcatgtttcgcctgtgtgctgccaaaggtggcaaacttgcttttgagtgcttaatgccaatgccctcgttcaatctagatgttctctacctgctgtaagtcttactctggtacaaggatttaacattgtgttgactgcaaagaagttcccgtggatatttgctactcatcagttattcgttcatgtttttttttttcttttaccttgatctgtcgttgcaacccaagttcaaaaagtttaaacctc

SEQ ID NO: 267402 - DNA, 942 bp, Zea mays
cgcccacgacgtacgacgtacgtgcgaactgcccgctgaaaaacaaactcaccaacaaagtgacctgaaactgggagcaagcaaccgagggcgagagccatggcgaagcctcgcagcggcggcggcggcggcctcctggacttagaggggcactacgccttttacggcgcctaccacagcaaccccgtcaacgtgggcatccacgagctcttcgtgtggcccatcttcctcaccgcgctcatgctcctccacctcaccgccccctccacgcacgccgccggcatcagcgccgcggtctacgcggcctactacttcctcctcgaccgccgcgcgggcgcgctcgccgccctcctctgctacctctgctgggccgccagcggcgccctcgctgcccgcctcggtttctctgttggatggaaggttgtattggtggcccagttgttctgttggattatgcaattcattggtcatggagttttcgagaagcgagcgcctgctcttcttgacaatcttgtccaggctttcctgatggcaccattctttgtgctgctagagattcttcacacatttggcgggtacgaaccgtatcctggcttccacgacaaggtgagcaagttgattgaggaagcccggaaggaatgggaggacaagaaatcaaagaaatcctcatgagatatgcgtgaattaacggctccgaactgttggggtctgcctgctcgagataacctgctgattggatgaatctattgcaaggatggttaccgaatactgatgctatttatgttgtataagatgatgtgcgctatgttgtctgatgtttttatatatattataatggtgacgaaaccgaggtaaaaaataatttatatatgtatactggtgtgattgccttgctagggcccttgtttctctatgaaaggaatgtcttctgttaaggtgcct

SEQ ID NO: 267403 - DNA, 809 bp, Zea mays
  unsure (1)..(809): unsure at all n locations
atcatccaccgctacctcaactgcagcaacgtcttcatcaatggcaacaacggccatgtcaagatcggcgacctcgggctggcggcgatcgtggacaagacgcacgtggcgcacaccatcctgggcacgccggagttcatggcgccggagctgtacacggagacgtacacggagtcggtggacatctactcgtacggcatgtgcgtgctggagatggtcacgcgggaggtgccctacgccgagtgcggcagcgtcgtgcagatcttccacaacgtcacccggggcgtcccgcccgcggcgctcaagcggctcaaggacgccgagctgcggggcttcatcgagcgctgcatcggccagccccggaaccggccctcggccgctgacctcctgcaggaccccttcttcaacggcgtccgtggcggngacgacgacgacgacgccgcggcgctcgccgacgccttcagcgtcgtcgccgccgcgcccgtgccgcgccccaggagctacgtcgacgacctcgccgggctccggctggactgacctgaccgtccctcccagcgttctgcctttcatcagtaccgggattccggcgcgtgttagacgtgttttattagaagtggattcctggccggcgagcgagactgcctgcaagtgtgtatagattattgtttatttttacgtctccccggcgattggctagttttcactgtacctgtaccaataattgttgttggctttgcgccagatgaagcgctgtatttgactttgcgtgctgattctttcaaacagaggttggttggcaaacttatagt

SEQ ID NO: 267404 - DNA, 696 bp, Zea mays
  unsure (1)..(696): unsure at all n locations
cccacgcgtccgggacaagaacgatactaggaagaagaagaagaaggcgccgtgggaagaagaagacaaggacgaaggcagcaaggtgactctttcggggctcctcaacttcatcgacgggctgtggtcggcgtgcggcggcgagcgcatcatcgtgttcaccaccaaccacaaggacaagctggacccggcgctgatccggcggggcaggatggacatgcacatcgagatgtcctactgctgcttccagggcttcaaggtgctcgccaagaactacctgggcgtgcaggagcatgacggcgggcaccaggagctgttcggtgacatccgtcggctgctggaggaggtggacatgactcccgcggacgtggcagagaacttgatgcccaggtccaagaccaaggacgccgacgcctgcctccggaggctcgtcaaagcgctcgaggaggccaaggcggccgcgttgttggcggccaaagccaaacaactggacgggatcaaggacgaggagggaaccgacgatgaagacgacagcgatgacgatggcagcgttaccagcagaggtcacccctccgacggtgacgaanagagtgccaaaaaagaggaaatgtaataaaaaagtttaaaacctataaaagcctgaaagctaggtgaggatacttgactngagcattcctttccaagctggtggtacct

SEQ ID NO: 267405 - DNA, 1593 bp, Zea mays
cccctccaccgaacgagtccaaatccgctcgtctcccctcgaagtcactccctccagccctcgccggctccgcgtcctccggctctcccacccgagccgagaccacccatccaagcgcgcgcagctccggaagcgacagggccggacgagcgcctcccaaatttagcagccgcggagcgcgtgggcgtgggtccgtaaggagggtcgatggggtacctgccgtccctgagcagcaaggcggcgcacttcgtgtccgacctcaccaccgtcatcctcagccccgtctccgagcgcgagacgtcccacctccccgaggttgacgaagtgctagaaaatttggacgatgataaagattccgagcacaattccgatagccttgatggccctgacacatcttcctttagagcattcttgatctcatttttgtcatcatcgagctctaataacgattcaatggagataattcctgagcagaatggggacatgggttaccctactttaacacccatggggaagggaagcaagggaagaacgggtctgttaagtagggggaagcattccatcggaaaaatcattaacaaggcggcaaggattagtggtttcaaacaaacaactgcagagcctaaaattgacagggaggcagtaactcatactgaaccagatgcacctgtactggagcaccaggaaccaaaggaagttgcttccttcggtagtttgccaactatgtcggaaccatctgttcttttgtcagaactgatgcaaaggattctttatgcctctctcccggttcttgcccagggaaggaactgggtcttgctatacagctgtgcagtacatggaggcatggcatatctttatctactttatatagaaggagcatgctttgccctggcttctcactcttggttgttggggataaaaaaggcacagtttttggtgggttagttgaggccccattgcagccatctagttcaaagaagtatcaagggaccaacaattcctttgttttcactaatttacacaatcgccctgtcatctatcgaccgacaggtgcaaataactactttacgatgtgctctaccgactatttggctctggggggaggaggtcatttcgcactttatcttgacgcagaccttttgattggttcaagttctaattcagagacttttaacaacgggtgtttatcgcattcttcagacttctcagtgaaagatgttgagctttggggcttcgtctacccttccaaatacgaggagatgctgacactctgccggactgagaaaccaggaatctgtcgatggtgagtggtgaccaatcccatagccagttgaacagacaaatggacatgtcgcgtctgtacagtttttagtaggctttgagagttgcgagcatttttgtgcgccggtagtactggagacttgctttttctcaagcgacttcgctcagatttgtaaatagtggacttttgttactgtcacatggcgaaacatgtacgctactagttgttccagtgatgggccctttgaggtaaactgtcactggtggatcaggcttctacccaggactcgtgaaacagcatcaacctgttcc

SEQ ID NO: 267406 - DNA, 664 bp, Zea mays
aaggcacagtttttggtggtttagttgaggccccattgcagccatctagttcaaagaagtatcaggggaccaataattcctttgttttcactaatttacacaatcgccctgtcatctatcgaccgacaggtgcaaataactactttacgatgtgctctaccgactatttggctctggggggaaggaggtcatttcgcactttatcttggccgcagaccttttgattggttcaagttctaattcagagacttttaacaacgggtgtttatcgcattcttcagacttctcagtgaaagatgttgaggtatttaaaacattgaagcagctgtgttctgcatctttcttcctgctttggggcttcgtctacccttccaaatacgaggagatgctgacactcttgccggactgagataccaggaatctgtcgatggtgaagtgggtgaccaatcccatagccagttgaacagacaaatggacatgtcgcgtctgtacagtttttagtaggctttgagagttgcgagcatttttgtgcgccggtagtactggagacttgctttttctcaagcgacttcgctcagatttgtaaatagtgtacttttgttactgtcacatggcgaaacatgtacgctactagttgttccagtgaaaaaaaaaaaaaaaaaga

SEQ ID NO: 267407 - DNA, 312 bp, Zea mays
cagatccgctaccgtaaggagggtcgctggggtacctgccgtccctgagcagcaaggcggcgcgcttcgtgtctgacctcaccgccgtcatcctcaatcccgtctccgagcgcgagacgtcccacctccccgaggttgacgaagtgctagaaaatttggctgatgataaagattccgagcacaatttcgatagccttgatggccctgacacatcttcctttagagcattcttgatctcaccctactttaacacccatggggaagggaagcaacggaagaacgggtctgttaagtagggggcagcattccatc

SEQ ID NO: 267408 - DNA, 1885 bp, Zea mays
cggctcgagtgcagggacaacctttcagtttcagccgccattggatggtccaccacaaagagtgttgtccggtgtcttgcattcctttctcacaagtggcccagctgacgcgtgggttcaaccacttccggtaccagctgctcttggtttatctgaaagcgacaaacaatgcattcgtgatcgtagctgcataatggcacggcatattttttctgaccaaccagaagaatatatacagagtcaggtcaatacgttgctgcattcgcttgatattgacaaccgtatgagaggacctatgcatgggcaatacccagaactacaggagtactggaagcagtcccaaagttctacgcgtcctgccccaacgcataatgctgctgataaatggattactgagtttggcaagcaaaataataatccagaaaattgggcgaactctttcgaacaacaatatggccccaatgggtgggcctctgagtttgaacagcatcagtctcagatggccatgcgccagatgggaggagcgaacatggccaacctggctgctatggagcaatcccgagtgcttgcacaaactttagcaagtaataatgatcccaagtttcagaattctaagttcttccagtttgtttcaaagatgagccgaggtgaacttattatagaagataatcaagtaaaagaaggttcagcatcccaatccagtggctgggctgatgaatttcaaacaccgtacattgctaatgcaaactcatgggcagatcagtttgcacatgaagagctttcacaaggggcggataagtgggttagcgagttctctagtcaacctaatcatggtgcactaaatgagaactgggttgatgagttctcgaaattaaatgttactgacgaatgggcagaggaattcagtggaggtggttttggcgaaagctctgctgatccatgggtagatgagttccaagaacacttgtcatctttcaaacaaagtccgggcgcctctcgaggggtttatgttttttctgagaacaacccgtatgttggtcaccctaatccaatgcaggaaggacaggagctcttccgcaagggcctcttaagtgaagctgttcttgctttagaggctgaagttttgaagaatcctgataatgctgaaggttggaggttgttaggcataacacatgcagaaaatgatgatgaccaacaggccattgcagcaatgatgcgtgcgttggaagctaatccgacaaaccttgaagttcttcttgctcttggtgttagtcacacaaatgaattggagcagggagaagcattaaggtatctttataggtggcttcagaatcatccaaaatatggtggccttgtccctccgcagtcaactgattcaccttatggtcctgatgttgttagattgtttaatgacgctgctcagatgtcacctgaagatgcagatgttcatgtagttctgggagtcttatacaacctatcaagagagtatgataaagctataacttcatttaagacagcagtacagctcaaaccacaggactactcactctggaacaagcttggtgcaacccaagcaaacagcatccagagtgctgatgcaatattggcgtatcagcaggcactagacttgaaacccaactacgtgcgtgcatgggcgaacatgggaatcagctatgccaaccagggtctgtatgagggttccattccatactatgtaagggcagttacaatgaccccaaaagctgacaacgcttggcagcacttgaggatttctcttggcaacgcttcaagagctgacatgattgccgcatgcgacgcccgcaacctcgacgctcttcagaaagagttcctctctgagccccctactttctcacagcgactcatg

SEQ ID NO: 267409 - DNA, 643 bp, Zea mays
  unsure (1)..(643): unsure at all n locations
tgttggtgttagcagcctcacactttttgctctgttcacacaaattagccgtgctctgatgatatttccccattattatctattctccagctttcacaaggggcggataagtgggttagtgagttctctagtcaacataatcaaggtgcgctaaatgagagctgggttgatgagttctcgaaattaaatgtcactgatgaatgggcagaggaattcagtggaggtggttttggcgaaagctctgctgatccgtgggtagatgagtaagtagaaattttgtgtgcctctgtacataacattataattgagttaagttttgtatttcttgagtcttggcaaacctatctttgtaccaaatactggacgaactttgtaattgagttatttgttccagtatacatctagtttggtaaattgttaatacaattgtctaattagtttatattgatgttggtgaattatgttgatttttgtaggaaaccctttggtataactattgtaccagtaatcttttttcattctttctttgtaggttccaagaacactngtcatctttcaacaaagttcangcgcctctcgaggggtttatgtttattctgagaacaaccgtatgttggtcaccctaattccatgcaagaggaca

SEQ ID NO: 267410 - DNA, 509 bp, Zea mays
tcgttacgcagacaatgggccgcgccatggttggggaggccaactcagggagcacgctggcggccgtcggcgtggccggcaccggcagcagcatggctcgtgcacagccaccagctttcgaccgtggtgccgaccgtcggtgaccggggaggaggtgaactacgagctcggggcgccgacttggctggcaaggtgcactacttacgcgcggtgcacgtgatccgtgcccctgccggagcaaccttgcagccgctaacgattgggccaccacaaaaagcgatgtctggggggttgcacatgttcttcacaagtggcccacctggtgtgccatttcaacctgttgcaggcccagaggctcttgggttatctgaaagtgacaaacagcgcatacgtgatcgcagctgcataatggcacggcatattttttgtgaccaaccggaagaatatatacaggctcaggtcaatactttgctgcattcgcttgatatagacaaccgtatgagaggacc

SEQ ID NO: 267411 - DNA, 1565 bp, Zea mays
caaatagctagtggacatgaagacctgttaaatggaatggaaattgctgctgcaactgaagacaaggaaacacattcttttgagattgatccttctcaggttgagaatgtcaagcaacggtgcttaccaaatgcattgaactatcccatgctggaggagtatgatttcagaaatgacactgtaaacccagatttggatatggagctaaagccgcaagcacggcctaggccatatcaagaaaagagtctcagtaaaatgtttgggaacggacgagcaaggtctggaattattgtgctaccttgtggtgctggcaagtccttggttggtgtatctgcagcctgtcgtattaagaagagctgtttatgtttggccacaaatgctgtctccgtagatcaatgggcatttcagttcaagctttggtcgaccataaaagatgagaacattagtcgttttacatctgataacaaggagaagtttacagggatggctggtgtggttgttactacatataacatggttgcattcggtggtaaaaggtctgaagattcggagaagatcattgaagaaatccgaaacagagagtggggcttgcttctaatggatgaggtccatgttgtccctgcacatatgttcagaaaagtcatcagcattacttaatctcactgcaagctgggtcttactgctacccttgtgagagaggacgaacgtattactgacctgaattttctaattggaccaaaactgtatgaagcgaattggttggatttagtcaaaggtggatttattgcaaatgtgcagtgtgcagaagtatggtgtcctatgaccaaagagttctttgctgagtatttgaaaaaggaaaattcaaagaagaagcaggtactgtatgtcatgaatccgaacaagttcagggcttgtgaattcctgattcgattccatgagcaacaacgtggagacaagataattgtgtttgctgataatctgtttgcactaactacttatgcgatgaaactgcgcaagccaatgatttttggtgccacaagccatgctgagaggacaagaattctctaccaattcaagaacagtccagaagtcaatacaatttttctttcaaaggtcggtgataactcgattgatatcccagaagctaatgttatcatacaaatatcatctcacgctggttcgagacgtcaagaagctcagcgtctgggccgtattctcagagcacagggtaaacaccaagataggatggctggaggaaaagaagaatacaatgcttttttctattcccttgtatcaactgacacacaggaaatgtactactcaacaaaaaggcagcagtttcttattgaccagggatatagcttcaaggtatggcttttggagtttctcaagttgggaaggtagattgttctttaggtactttttaaaaggcagatccaatgctgaggctcccatacgaatggggtctagagaagggataaaccgaataaccgacacaagcctttctctcgcaaatgcggagaggctgcttcgaacccgtgatcgggtgactcaatgagaccact

SEQ ID NO: 267412 - DNA, 575 bp, Zea mays
ggagaagagctagaggggatgggtggcggcacggtggtgtgtgtcaccggcggcagcggctacctcgggagctggctcgtcaggaagctcctcggcagaggctgcgtcgtccacgccaccctgcggagcctcgcggacgagaagaagacggggctgctccgggcgctccccggcgcggcggagcggctgcggctgttcgaggcggacatgtacgacgccgacaccttcgagcccgccatcgccggctgccacttcgtcttcctcgtcgccacgcccctgacgcacgaccccaccagcaccaagtacaagaacacgacggaggcggcggtggacgcggcgcgcatcatcctccggcagtgcgcgctgtccggcacggtgaagcgcgtcatccacacggcctcggtcacggccgcgtcgccgctcaaggaggacggcagcgggtacaaggacttcgccgacgagtccaattggacgccgctcaacctctcctacgaattcaccaacgcctacctggacgactacatgcggtactagacgctgtcggtgatggagcttctgatatacttctcttttct

SEQ ID NO: 267413 - DNA, 1234 bp, Zea mays
tcactcatctgcatgagagttgacattactatacaggccagttctggggatcctggatgatctcactgcagaacaattgggtgctaagattagggagtataagattgttgctccagacaccaagaactcattatcagatccatacccttttaatctcatgtttcaaacttccattggaccatcaggtttgagcccagggtatatgaggccagagacagctcagggtatatttgtgaacttcaaagacttgtattactacaatggcaataagctgccattcgctgcagcccaaattggtcaggccttcaggaatgagatatctccccgtcaaggccttttgagagtccgtgagtttactttagcggaaattgagcactttgtggacccagaggacaaatcccatccaaagtttggtgatgtttctgatctagagttctggatgtttccgagagaggatcaaatggcaggaaggtcagccacaagacttaaactcggaaattctatatctgagggaactgtgaacaatgagacccttggctacttcattggaagggtctaccttttcttgacacaacttgggattgacaaggatcgtctccgtttccgtcaacacctgccaaatgaaatggctcattatgctgctgattgttgggatgcagagattgaatgctcctatggttggattgagtgtgttggaattgctgataggtctgcctatgacttacgtgcccactcggataaaagcggcgagaaacttgaagcacatgagaagtttgctgaacccagagaagtggagaaattagttataacgccatcaaagaaggaacttggtcttgcattcaaagggaaccagaagttggttgttgagtcattggaagccatgaccgagaccgaggcactggacatgaaagccgcgttggaatccagaggggaagtcgagttcaaggtgtgtacccttgggaagaatgtcaccataaagaaaaacatggtttcaatcaacatcgagaagaaaaaggagcaccagaggaaatttactccttccgtcatagagccatcctttgggatcgggcgcatccatatactgcctttttgagcactgcttctaccaaaggcctggcaagaccgaggatgagcagctaaacgtgttcaggtttccccctctcgttgctccaataaagtgcaccgtctttccattggtcaagctcgagaaatttgaggctgttgccaagaagat

SEQ ID NO: 267414 - DNA, 289 bp, Zea mays
tctccccgtcaaggccttttgagagtccgtgagtttactttagcggaaattgagcactttgtggacccagaggacaaatcccatccaaagtttggtgatgtttctgatctagagttctggatgtttccgagagaggatcaaatggcaggaaggtcagccacaagacttaaactcggaaattctatatctgaggtattatctcctgatatttctctgttatatatttttgacaatatgatatctgagctcttcttttgctactgtcgataccattctataaacttgtaat

SEQ ID NO: 267415 - DNA, 759 bp, Zea mays
tgaaattctcctccgcttccccagtccaggcacaaagaaccgcccttgttctctgcgactctgcccggccggtctccgaggcgggcggagggaaccagagagcaaggcgaggagcgcggaagggctgagggaaggggcggcggggcatggctcgccggccggcgtcgtgggagcagggcggcgacgagtacgactatctcttcaaggtcgtgctcatcggcgactctggcgtggggaagtccaacctgctctcccgcttcaccaagaacaccttcgccctcgactccaagtccaccatcggcgttgagttcgccacgcgcacactccaggtggagaacaagattataaaagctcaaatctgggacactgctgggcaggagaggtaccgagcaattacaagtgcttactatcgaggagctgtcggggcgttgctagtctacgatgtcactaaagtaatgacatttgagaatgtgaagaggtggttgaaggagctccgggaccatgctgactcgaacatagtcgtaatgctcattggcaacaagactgaccttaggcacctgcgctctgtcgccgttgaggatgctgcaagctttgcagagagcgaaggtttgttcttcatcgagacctctgcgctcgatgcgacaaacgtcgagaaggccttccacaccgttctagccgagatctaccggataatcagcaagaagcccctgtcttcggaggagtctggtttggggtccggtaacctcagacaaggacagt

SEQ ID NO: 267416 - DNA, 1839 bp, Zea mays
  unsure (1)..(1839): unsure at all n locations
ctctcttcccatcttttcctttcctctccctcgtctcgtctcgtcttcgttcccctttcctcctgcgcaccccgtcttctcctcaccgcgtcaaaccccagcacaaatcaaccgcccgccgcctccgctcccctcccgtcccgaatcagccgccgcggtgcccaatccggccgatcccccctcctatccgccgcagaggcggcgcctctgggcctaccccgatgtatagcaacttcaaggagcaggcgatcgagtacgtcaagcaggcggtccaggaggacaatgccggcaactacgtcaaggcgttccctctctacatgaacgcgctcgagtacttcaagacccatctcaagtacgagaagaaccccaagatcaaggaggccatcaccgccaagttcaccgagtacctccgccgcgccgaggagatccgggccgtcctcgacgagggcggcgcggggccgggggccaacggaggtgacgcagccgtcgccacgcgccccaagaccaagggcaaggacggcgacggaggcaacggaggggatgactccgagcagtccaagctcagggcggggctcaactccgccatcatcaccgagaagcccaacattaagtggaacgacgttgccggcctcgagagcgccaagcaggcactgcaggaggccgttatattgcccgtcaagttcccgcagttcttcacgggcaagcggaggccttggagggcgtttcttttgtatggccccccaggaacaggaaagtcttatttggcaaaagctgttgcaaccgaggctgattcaacgtttttcagtatatcttcttcagatctggtttcaaagtggatgggtgaaagcgagaaattagtcgcaaatcttttccaaatggctcgtgaaaatgccccttccattatctttattgatgaaattgattctttatgcggtcaacgtggagaaggtaatgaaagtgaagcatctaggaggattaagactgaacttcttgtgcaaatgcagggtgttggtcataatgatgataaagttcttgttcttgctgccacgaatacgccatatgctctggaccaggctgtgcggcgaagatttgacaagcgtatctacattccgctacctgacacgaaagcaaggcagcatatgtttaaggtccatctcggggatacaccacacagcttaactgaaagcgatttcgagagcttggcccgtcgaacagatggattttctggttctgatgttgctgtttgtgttaaggatgtcttatttgaacctgtgcgcaaaacacaggatgccatgttcttcttcaaggcagacggtgacatgtggatgccatgtggaccaaaacaaccgggcgctgtacagaccacaatgcaggagcttgcatccaagggcctcgctgcaaagattcttccaccacctatctcaaggacggattttgagaaggtcttgtcgaggcagaggccgacagttagcaagaaggatctggaggtgcatgagaggttcactaaggagttcggcgaggagggctgatacaccgcgcgcggacacacacccatgcacagctgcaccacagaaatgtatattgtttatcacttcgattgttctgcttggaagttgcattcacaggattatacatttggtagcccaactatgagtaatcatggcagctgctttaccgtgttgggctaccgatgggcctctgttgtcaacttatttcaatttttatttatgcacatgaaaattttccgcaggtgtattattgaataataattcttaacgtcgagcccttgtggtgctagtttcttanaaaaaaaaaaaaaaaaaaaacaagcccgcccgc

SEQ ID NO: 267417 - DNA, 1242 bp, Zea mays
cggacgcgtgggcggacgcgtgggtgctggtttatctcttgcagaggttgccgcagaagcaaaacatgcatatgaggttgttggtacgatgggagttgcactttctgtttgcacattgcctgggcaaataacttctgatcgtctaggtccaaggcaaatggagcttggccttggaattcatggagaacctggagttgctgttgttgaactccagccagttgacgtagtggtagaacatgtccttaaacagatattgtcacaggaaactcagtatcttcctgtcacaagaggttgcaatgctgttctcctagtgaatggattaggagccactcctatcatggaacttatgattgcagcgagaaaagcagttcctgagttgcaattggtgtatggcattgctgttgacagagtctacactggcacacttatgacatcacttgatatggcaggattatctattaccattatgaagtccggcgaaagcattttgaagagacttgatgctcccactaaagctccagcttggcctgttggttctgaaggaaaccgtccaccagcaaagtttcctgttcctctaccaccatcaccttcaatgaaggatgacgagattcttgctccatctcaggagctgagcaagcaagggtgtatcctggaggctgttattgaagcaagtgctactgaaattatcaatctcatggatagcctaaatgaatgggacagtaaagtgggcgatggtgactgtggaagcacaatgtatagaggtgcaacagctattcttgaagatatgaaaaagcgttaccctatgaatgatgcagcgggaacaataaatgaaattggggcaacaatccgaagggtgatgggtggaacaagtggaatcttgtatgccatactctgcaaggctgcgtatgcaagcttaaagcagagctcaactgtcactgcgaataaatgggctgatgctttagaggcctccattgctgctgttagcaaatatggtggtgccagcgcaggataccgcacaatgttggatgccctaattcctgcttctgctgttctgaaacagagacttgaggctggggatgatcccgtgactgctttcatcgcgtcttctgaagcagcatcagctggcgctgaatccaccaaacaaatgcaagcgaaggctggacggtcatcatacatcgctccagatctcctggcctcaatccctgatcctggtgcaatggctgcagctgcatggtacagagc

SEQ ID NO: 267418 - DNA, 424 bp, Zea mays
gttagctcttatcggtcatccatcatggcgagttccctcaagtcctgcagtgtacatggactctggctgctcgccatgatccttcttgcatcgtgtgtcgttcatgctcacattattaatgggcggcaaagcaacaccgggagcctcactatgaccacgacgggggaagcaagcatgataattggagatgagaaagatgcaatttgctatataaaagccgcattgtattgctgcaaaaggactatacagtgctatcaggacatagcgcaatgcttgaggaactgccgtaaaaatgtctaacaagaggctatgctttctccaactcgtagatggagatcataaagatgttacgttagacctaatcatgcatagaccggaggagaaatataagcttattagcccatccataattaataacttcgta

SEQ ID NO: 267419 - DNA, 623 bp, Zea mays
caccaagcaacccaaaacagcaaagatatctctgaagaaagatgtcaaccaagttagctctccagttgcttctgataagaagactggtgaacgaccgcctgacaaagatagaaaaaaagatgctcctcaaccccgcatgcaatttgacgatacacatcgggtggtgaaagcaaagaagcgttcagttgttagacaatcagaagctcaaaacagggtcgaactgttcagacatctgcctcaatatgcacatggcaactcaactacctgaccttgggtcaaaattttttcaacctgatctgatgcatccttctgtgtacaaggttggacttcaatatttgtctggtgacatatctggtggcaatgctcgctgtatagcaatgcttcttgcattcagagaggcaataaatgattactccatgccttctgaaaaaattctgaatagagatcttactgctaaaatcagtagctatgtgtcatttctcatcgagtgcagaccacgttcaatcagcatgggcaacgcaattagatttttgaagaacaggattaccaagctaccacttgcattttcagagtcagaagctaaagttagtcttcaatctgatattgatcgctttataatgaga

SEQ ID NO: 267420 - DNA, 1399 bp, Zea mays
gctagctagagctagccaagccgcggcgtgcctccgctccggccggcccgcccctgtcggagcccccaccgccgctgccacctccgccagccgtcaccccaggcgttggatcggggccctctcgatccgcgcccggcgaatccagacggacccgcattggggttggggccccttcgatccggcgcttggtgggggtttggctgggagctccaggctgaggggacggtgcggggggacctgagccttcattccgttcggatctggcttttcccccgtggggtctcgactgtcggagggggaggaggacatggatttggcgtcggtcaacgaggagctggccgagatcgacgggcagatcggcgatatcctccgcgtattgcaaaatgggttccagaagctggagaagatcaaggatgccaaccgccgcagcaggcagcttgaagagcttactgataagatgcgagactgcaagagactcatcaaagacttcgagcgagttagcaaagctgaggctgagcatactgatccagcaacagcaaaaatgttgcatgacagaaagcagtcgatgatcaaagaattaaactcctacgttgctctaaagaaacagcaggcaagtgaaaacaagagaatcgatctttttgatgggccaagtgctgaagatggctttggtgaagaaaatgtcctgttagcatcaaatatgacaaaccagcagttaatggatcaaggcaatcaactaatggatgaaactgatcaagctattgcacgatctaagcagactgtccaagaaaccgtcaatgtgggcacagaaactgcagctgctctgaaagcacagacagaacaaatgagcagagttgttaatgagttggattccatccatttctccatcaaaaaggcatctcaattggtgaaagaaatcggtcgacaggttgcaactgatcgatgcatcatggccatgctttttctcattgttgctggagtcatagctataataattgttaagattgtgaacccacacaacaaggacattcgcgacatccctggcttggcaccacccgtcagcaggcaggctgttgcgatagaggacaggtgaattgcctacctggtgtaaaaattgatgtggcgcggcgccttgccaagcccatctgtattctacgtcttgtaaaacgctgctccagtcatgtggtatattgctgtaaaacttctcatgggatccactcctactccttggctacacacagtgcgtatatgttcctcctagttcgccttcctgtttttgcaaaactaactctgaacggtgttctgttagaatcatgtgcacacatgatggttgagatgtgtctatgatgttcattgtgacgaacgattcttaaaaatctcatcggctttagttgaattgaac

SEQ ID NO: 267421 - DNA, 409 bp, Zea mays
atgctcttaagagtatggatgtgataggatgtcacgggttgttgtcatctctagaatctctaaggatacaacactgtcacgggttgtcaatcttccctcgtccctcagggtaatagatactacggttcatgtcagggcagctggatgcactcgatacctgtcatcactggagatcctccgtctgtctcgttgcaaaaacctgtcgtgcttgcccagtgcgcgggcaggaggacgacaggaatactcatctcttcgtgagcttacaattacggtagcagggagacagagccgtccctcaaagcagaaagatcaatgatccttattaattggtcgtacaatacaatatggtacggtgccttattggttcatgatcctatgccttatataatcctagtcttcttcattcctt

SEQ ID NO: 267422 - DNA, 557 bp, Zea mays
ggtgtcccagccgcgcgccgcacgccctgttgccttctctcgacttcgagagcaccgccgcacggcataacgctcgcacggccgagccccgacattctaccgcactccctccgctgcacccctttccattctaccgccggcgacgccaaagttcttgggcctcctcatcggcgacttttccgccggcgacaggaaacaacgaaccaaaccacttctctgtcgagaggcgtcgcgctcctctcttcgccctctgctgttatttttcttaacccggctttctctcgattgctgcgtaaagttgaagatgaggaagctcaagttccatgagcagaagctcctcaagaggcacaatttcttggagtacaagagggagggcggccaccgcgaggcgctcgtcacacagcgctaccgcctcgtggagagggacgactacaagaagtacaatgggatatgcttaatggtgcaaaagctcgttaacatcataaagcagatggacccaagagaccctttcagaatccagatgacagacttgattctcgataagctgtataatatgg

SEQ ID NO: 267423 - DNA, 569 bp, Zea mays
  unsure (1)..(569): unsure at all n locations
ctcgttgattggacctgaatattcaagcccgggggtgcaatgattttgctgatctttagctttttggctggaaacatactctagcagttgagaaaaacagggtgcctcaagaacgtacgaagattttggtgccttgcagtttttgtaagcttgcccttcccagactgattcaaggtggcactgcccctcgttgttattcaaggaattttggggctggcggggttgtttgtaagagcattgtaaaataacttgtttcattttttggtttctgtaacatgaatacatgacatgtgatagttgtatataagatctgtggactgggggcgtatcagcgcattctacacagctaagggttgcatagttgcgagaactgaagcatgtaaatgtctttaaactgccatctgattgagatgcagtagtactgctgttctggaataagacatgtctgcttttggggaaaatgattcaaaaaatgtttcgtttgaactcagcgtctgctgaaaatgaatttggttcccgacccctgttctggttggccgaaattcaaaataataaagcanatggaccca

SEQ ID NO: 267424 - DNA, 564 bp, Zea mays
cggacggtggtcgagacgcgtgggcggacgcgtgggatcacactagcctacacacaccgagcgccgtctaaactgacagcaggtcagcagcctagcgaagccaagacatccgccgatctcagatggccgggagaagggtgcgcggcaagagtgccgtggccgtggcggccgtcgcgctgctggcgctgctcttcgcggcgagcgaggccgacgggacgtgcaacgtcgaccggggcacggtgctgaggcagtgcgcgtcctgctcgagcggcgcgccgagccaggggtgctgcgacgcgctgaggaacgccgacttcggctgcctctgcagcaactactggaacaagctcaagaacacgccatacgccagctgcgccaaggccatcccttccgcgtgcaacctcccaaacgccaagtgccagtagatggagacatggagtgcgtgacccggacagctaacgggcagcttgggccaaacagaataaatccgcttcagtccgtagccagccacctgattgtctgtgcccgttcattacgctgtttcttctctctggagtgtgttag

SEQ ID NO: 267425 - DNA, 283 bp, Zea mays
cccacgcgtccgcccacgcgtccgtttacacactaatccaactcaacacatgtggattggggtcaatactaaattacccaaacaaagcctaacagggaagtcaccagtggcaaattatgtactgatatttataataatatactcaatcctgatgggttgtgcccaataacatacaaaggtggataattgaggtcactggtgcggcgagacaccctatacgtctgcgagacctaccagctgcaggttgacttacgtgagcattatcctatggatgcacctcatg

SEQ ID NO: 267426 - DNA, 432 bp, Zea mays
gacaccacctactgctcccctatcccctgcctgctgtgttcactaacccacctccgccccccgttccgggtccccctccccgtcagaaggttccccagatttatagcccggagtagcggcggcgacggggcatgcgctcggagcccaaaccaggttacaacgagagcaaggccatccctgattccctgatgccttcttccttgagaaggcctccgcggaggcgttcatggagcgagtcgagtcggtagtgggcgaggtattcaacatcgtcaggcagtggcaaactcagcagcagaagcaggtccaggagttccaggcactacacgacacacacttggctccagatgagcattcatagtatttcgtcttccatgtcaattaacctataaactccttaataatggacgtctcgatgatgtggtatcatccatg

SEQ ID NO: 267427 - DNA, 839 bp, Zea mays
gcccagagggcatcaatgctgctcatgtcgaggctgaaagtgcggagaacggcatcggtgtcgcgaagcttatgggccgcaacagcggttttatcgcgatgtacgcgactctagctagccgtgatgtggactgttgtttaatcccggagtcacccttctacctcgaagggaagggaggactcctcgagttcgtcgagaggcggctcaaggacaacggccacatggtcatcgtggtggccgagggtgctgggcaggacctcatcgcgagaagtatgaatttcgtggacacccaagacgcttctggaaacaagctgcttctggatgtcggcctttggctatcccagaagataaaggatcatttcaagaagaagcccagcttcccgataaccctcaagtacatcgacccgacctacatgatccgcgccgtccggtcgaacgcttccgacaacgtctactgcactctgctggcccacagcgccctccatggcgccatggcggggtacaccggcttcaccgtcgctccggtcaatggcagacacgcctacatcccgttctataggatcaccgagaagcagaacaaggtggtgatcacggaccggatgtgggcgagggtgctgtgctcgacgaaccagccctgcttcctgagccacgaggacgtggagaacatgaagcacgacgacgacgagcaccacatgcacgacacggaggttcctggactcgccggagaactcgtccaaatgaaatggggcacaagacttgtttgcttttttgggtgctggcgttgtagagattgatagggttggataatgtgagcatttggtaataatataagcatcctg

SEQ ID NO: 267428 - DNA, 822 bp, Zea mays
gacagagacttcatctaccattcagttagctatgttataataaatggatgatccctgttgaacgaaccatgtctcgctgtccttttcgttagctggggtggtgtgtccctggtctcatcccaatactgaatctgtagcgtttcttggtcgtgcaggatcatttcaagaagaagcccagcttcccgataaccctcaagtacatcgacccgacctacatgatccgcgccctccggtcgaatgcttctgacaacgtctactgcactctgctggcccacagcgccctccatggcgccatggcggggtacaccggcttcacggtcgctccggtcaacggcaggcacgcctacatcccgttctataggatcaccgagaagcagaacaaggtggtgatcacggcaccggatgtgggcgagggtgctgtgctcgacgaaccagccctgcttcttgagccacgaggacgtggagaacatgaagcacgacgacgacgagcaccaccacatgcacaacacgcagctcctggaaggcgggagctcgccggtgtccaaatgcaatggctcggcagcggcagtgtgaggggcacgagaatacgcaaggatatagatatatatagtattaagcatgtagctatggatgttttttttcctttttcttttgcttttttgggtgctggcgttgtagagagtatttggtaataataatataatgcttcgctgagattaaatctcacttttcgctgttcgtaattggggggtgagactctttaaggctcatatgggctggcatattgaaattacaaaaattttaaagaggccgaggggcttt

SEQ ID NO: 267429 - DNA, 318 bp, Zea mays
  unsure (1)..(318): unsure at all n locations
agcttatcactttacgtgacttccttttaacggcaaccgcccnaagttgggcgcggaggcgagcctggagcattggatgatgccccctttcccgattaccctcaagtacatccacccgacctacatgatccgcgccgtcagttcaaacgcttccgacaacgtctactgcactctgctagcccacaccgcgctccatggcgccatggcggggtacaccggcttcacacgtcgctccggtccatgccagacacgcctacatcccgttctatgtaagtcgagagggtcttgcgcttgtgcagttgagcttcctggacatcc

SEQ ID NO: 267430 - DNA, 527 bp, Zea mays
gaaccgcacaggggggacacccggactcagagagagagagaggggcattcgcccgttcgaattctctcgcctcggcctcctcctcacctgcctgctcggctgctcgccagaccaaccacagccgtcggcgctgcagaccgcggcgggcaggatcagcggtgcgtagcctgcccatttcgcgaggaccatataattccaagaccctgatgatggccacaactgcttatatcgatgattcctgttcggaggttattgatcccccgaagactgaggtgctggatgttgctgaactccctggtgaccatactcagaacccaccaaaaccgaatgttgtggtgtctagcagtgtgcgtgaacttctggaatgtccagtctgtttgagtgccatgtatcctcctattcatcagtgctctaatggtcgcatgaactgggtaacataaggtgtcttgctcttgagaaggtggctgcatctcttgaacttccatgcaagtaccagtgctttgggtgcccaggcatttattcttact

SEQ ID NO: 267431 - DNA, 794 bp, Zea mays
  unsure (1)..(794): unsure at all n locations
ccttcgcttatcgttcacgcgtcagcggcattaatgtagactggttgcacaagagctgctgttgtatctgtgtctccagtcaagagcatcactagctgcattcttcggcctttcccagttacatgggcttgccatatttgttcccctgtcagaatcatcaccctttattaaatcacacataatataaatggaaatattcgtccttttttcatggcaggaccatataattccaagaccctgatgatggccacaactgcttatattgatgattcctactcggagattattgatcctctaaagactgaggtgctgtatgttgttgaactccctggtgaccatacttagcacccaccaaaaccgaatgtggtggtgtctagcagtgtgtgcaaacttctagaatatccagtctgcttgaatgccatgtatcctattcatcagctgcacattcatactgatccatttggcatgtttatatctaacaccctgttcaaatgtagtcgattggatgaaaattatggctttactggtttcagcgttcctttcaatatcatgtactgttatcaccattttattctgatccgtttcaatttctatggacgtttagtacataatgtttataaaccttaacttttttactcttttttcttttttgattagctacgatacagtgcagaataatatgttctgcttttttattcaactattcaaatcttattttttattcaactattcaaatcatattttttgattagctgattgcaggangagattaaaatcaaaggggattgagctac

SEQ ID NO: 267432 - DNA, 696 bp, Zea mays
tagaggggggacacccggactcagagagagagagaggggcattcgcccgttcgaattctctcgcctcggcctcctcctcacctgcctgctcggctgctcgccagaccaaccacagccgtcggcgctgcagaccgcggcgggcaggatcagcggtgcgtagcctgcccatttcgcgaggaccatataattccaagaccctgatgatggccacaactgcttatatcgatgattcctgttcggaggttattgatcccccgaagactgaggtgctggatgttgctgaactccctggtgaccatactcagaacccaccaaaaccgaatgttgtggtgtctagcagtgtgcgtgaacttctggaatgtccagtctgtttgagtgccatgtatcctcctattcatcagtgctctaatggtcatacattgtgttccggatgcaaaccaagggttcataaccgttgtccaacttgtaggcatgaactgggtaacataaggtgtcttgctcttgagaaggtggctgcatctcttgaacttccatgcaagtaccagtgctttgggtgcccaggcatttatccttactacagcaagctgaagcatgagtcgcagtgccaatatagaccttatagttgtccatatgctggatctgcatgcacagttgctggtgacatcccatatttggtgaatcacttgaaagatgacc

SEQ ID NO: 267433 - DNA, 2004 bp, Zea mays
ggtttatgttccaggaaagcccccgatggatgatgccccttctagtgcgacgaaacagagggttgccgctgcaaaacagtacattgagaaccactacaagacccagatgaagtccctgcaagataggaaagagaggatgcccaactgcgcacatgccatgccatgtttggatagaatggcaaacacaggtgcggccacgctgatgactaagatcaagtccttacaagcgtgttgtgaccatggtttagcccagaatagaaagcccaattacagcgttaactctagcgctggatgttggagagaaaattacaagatgccgaagttcctgtagaagagcaaaataacattcttaagcatttggagaaaaaagagactgaatatatgcgcttgcagagacacaagatgggagttgaagattttgaacttctgactattattgggagaggtgcattcggagaggtgcgtctttgtagagagaaggtctctaagaatgtttatgcaatgaaaaagctcaagaaatctgaaatgcttcgtaggggccaggtagaacatgtcaaagctgaaaggaaccttcttgctgaagttgatagtgcttacatagttaagctctattattctttccaagacgaagagttcttatatctcatcatggaataccttcctggcggggacatgatgactttacttatgcgcaaggacatactaacagaagatgaagctagattttatattgcagaaactgtgcttgccattgagtctattcacaagcacaactatgttcatcgggatatcaaaccagataatcttttgttagatcgcagtggtcacctgaagctttctgacttcggtttgtgtaaacctttggacagcagtaatttccctaatttgaatgaaccagattatatgtctggaaaagttaccaagcctttgcctgataccacttggttaagcaacccttctgcaccgaggcgtacacagcaggagcaattgtcacactggcaaaagaaccgcagaatgttggcatactcaacagtcggcacacctgattatattgctccagaagttctactgaagaagggatatggaatggagtgtgactggtggtcccttggtgctatcatgtatgaaatgcttgttggttaccctccattttattcagaggacccaatgtctacttgcagaaagattgtgaactggagaagtcacttgaaattccctgaagaggcaaagctttctcctgaagctaaggctctcatcagcaagcttttgtgtaatgttgagcagagacttggcacaaaaggagcccatgaaataaaagcgcatccatggttcggaggtgttcagtgggagaagttgtatcagatgaaagctgctttcataccagaagttaatggagagttggatactcagaattttgagaattttgaggagattggaactcaaattcaaagttcatccaagtcaggcccttggagaaagatgcttccatccaaagatgcaaactttgttgggtatacgtacaagaactttgaaattgtgaatgatgatgaagtggcaggaattgcagagttgaagaaaaagagttccaaaccaaagcgaccaaccatcaagacaatgtttgagaggatggacgaagaggagcctgttcaagggagtttcttaagtatgttgcccccggagggccaaccttcgtcccactccagcgttccacaagaaaaataccaacctcgccgtaaataggatatggaggtttggaaagtaaagcataggaaagtaaaacaagaaaaaaaatcgtctgctgccttttgatctgttccctgtctaagttttgtaaatcctaaccaatgcgttctttagtcaaatgcttaaaaaaatctctccggcaaaatagtgtattgcatttgatgtgagcatcagtgttcggctgtatattgtgtcaccgttctaacttcgaagcgatgcttctcattctcagccatattggcaaaaactagtgtgtatgcc

SEQ ID NO: 267434 - DNA, 524 bp, Zea mays
ttgaaattgtaaatgatgatgaagtggcaggaattgcggagttgaagaaaaagagttccaaatcaaagcgaccaaccatcaagacattgtttgagagtatggacgaaaaggaacctgttcaaggaagtttcttaggtatgttgcccccaaaggaagggcaaccttcggcccactccagcgttccacaagaaagacaccaacctcgacgtaaataggatatggaggttcaaaacgtaaagcataggaaagtaaaacaagtgggaaaaaaaaaatcttctgctgccttttgatatgctccctgtctaagttttgtaaatcctaaccattgcgttctttagccaaatgtttaaaacaaaaaagatcaccggccaaatagtgtatggcattggcatctgatgtgagcatcagtgttcgctgtatattgtgttaccgttctaacttccaagtgatgtttctcagccatattggcaaaaactactgtatactacataccaggagcagacaagctgtggcaagcatgtgct

SEQ ID NO: 267435 - DNA, 1434 bp, Zea mays
cttctatttccaggctgttaggaatgagaacgatttacagtgtgttagcgttccacaaaagtatcgtaccatgaacacattttggaagtactactcaggagaagcagttgctccgtacccaaccatctttattggtggaaaccacgaagcatccaattatctgtgggaattgtactatggaggatgggcagcacctaacatatactttttggggtttgctggtgttgttaagtttggaaacatacgaattggtggattgtcaggaatacataacaaacaccattatcatttaggacactatgagaggcctccatacaataaagatactatacggtctgtgtaccatgtaaggcattatgatgttctcaagctcatgcatttgaaggagccgctagatgtattcttgtcacatgattggcctctgggcattaccgagtatggaaactggcagaagctcattagtgtgaagaagaactttgaagatgaggttaacaatagaacactaggcagcaaacctgcagctgaattactgaacaagctaaaaccaccatactggttttcggcgcaccttcactgtaagtttcctgctgttatccagcatggcaagaatggacctacaacgaagtttcttgcacttgataagtgcattcctgggcgcaattttttgcaggttatagacattccatccaatccaggaccatatgaaatccagtatgatgaagaatggcttgcaataacacgaaaattcaacagtgttttccctttagcacggacacagtttactatgcgggatgagcagctcgacactcaagaagaccggcaatgggtcaggagcaagttgaatactagaggagctaagccttttgattttgttcagactgcaccatctttcaatccttccagtacaacatctaaacagtccataacagtttgctgcaggaatccacaaactgagtcttttcttcagcttctggaactcccatatctgctggactcatctaaatctgagatgtttggtagaaatgagtcaacttctcagacaggaaacacacttgataatgaagatatagagctaccagatgaagatgaggatgctttagaagatgacgagtgaaggacagcacttttagacaagtaccattgcacctatcatgttggttgcagggtttgcgatagatttcattgtcttttggagattgcaatctatatatctagacgaggaactaacatgtactagattgtattgtcatagctgcttctgtgttggaggacgtttgtggatctagagggtgatctgttgatcacaatgccaactctatggtgtttacaagaaaactaatctactgcatggaacaccttgaatacagcttggatgataggtttgatgaacagctatagaactacctagatgatgattatctagagtacgattgc

SEQ ID NO: 267436 - DNA, 447 bp, Zea mays
agaatgcatcagttacatgtttgctgcaggaatccgcaaactgagtcttttcttcggcttctggaactcccatatctgtcggactcatctaaatctgaggatatgtctcttgtgattggaaacacacttgatggtgaagatatggagctaccagatgaagatgaggatgctttagaagatgacgagtgaaggacaacactgttgaacaagtaccattgcacctatcatgtttgctgcagggtttgcgatagattacattgtctttgttggttgcagtattccattgtttgttgggactcgtttcacttatgttttataccgtcactgtagtcttatgctgtaagctttgtacttggtgcttaagacttgcaacaatcgatccttcatggttgtggggttcatgacacttaagggctttgcgtcttatctcaaaaaaaaaaaaaagaa

SEQ ID NO: 267437 - DNA, 785 bp, Zea mays
agcaaatcaaggacgctctgcacgtatctattcatcttccattgttgctttgctttgctttgcttaccggcaaccatggccagcactcgtgcagcagcaactctccttttgctcctcgcgctcgccggcacctcgtcggcgcactgtccacgggcttctactcctactcgtgccccggcgtgtacggcgccgtcaagtcggtgatgcagtccgccatcgccagggagaagcgcatgggggcctccatcctccgcctcttcttccacgactgcttcgtccagggctgcgacgcgtcgctgctgctggacgacacgcccagcttccagggcgagaagatggccaaccctaacaacggctccgtcaggggattcgaggtcatcgacgccgtcaagtccgccgtcgagaaggtgtgccccggcgtcgtctcctgcgccgacatcctcgccatcgccgccagggacagcgtcgtcatcctgggaggtccgacctgggacgtcaaggtcgggcggcgggactccacgacggcgagcttcagcggcgccaacaacaacatcccgccgccgacgtctggcctcgccaacctcacgtcgctcttcgccgcccaaggcctctcccaaaaggacatggtcgcgctctccggagctcacaccatcggccaagcacgctgcaccaacttcagagcccacgtgtacaacgacaccaacatcgacggcagcttcgcaagaacaaggcagtcatgctgccctagatcctcaggctcatcaggcgacaacaacctggcgcca

SEQ ID NO: 267438 - DNA, 710 bp, Zea mays
aatcgttgagaaatgctcgaactatgcgatcttgagaagcagcattatatatgggccacaaacaatctctcctgtggcaaaatcccttccgattcagtggatggatggtgttctttcacaaggccaacaggttgagttcttcagtgatgaattccggtgccctgtctatgtcaaagatatggtggacgtaattttgtcactaacaaagacttgggccccagatgatggcaaaaaagtccaggtcctcctgaatgtcggtggtccagatagggtatcaagactgcagatggctgagtctgttgctgttgtccgtggatataaccccagtataatcaaatctgtgtctgcatcatcggttaatcgcggagtagcttctccaccagacatatccatggacatcaccaagctaacccagatccttggtatcaagccaatatcatttcaagatggagtcagaagtacacttgatgcagaagacagtacatgacgcttcctcactggtttgcttgagttcttaagggggagttgtttgcattcaaatgtagtagtgtgacataaagaatcacatttgatttgcaaaatttcagtatcggtaaatttctgttgggtttatgtgaaatatgtaagttttgtacccactaaacaccaatgccaccatccgtgttactgcttgattctgcaccattatgaataaagatggtctccatttt

SEQ ID NO: 267439 - DNA, 610 bp, Zea mays
ggcttgccttctatgggttggccggctcgatcaatccccatattctgagttaatgtcatccgcgcattgggagaagctagctgaggagctcacccatcaattctgtagccttctgggccagtcgagggagagcccgctgagtgttgcagtgtcagctggttttcaaggactaccaactctgctgaagctgacgcaagtcatggctgcgaagaagcaggagtggcaagttatgaagcagcttcctgtccccatagacatcgggccagaattccagtatcattctgtctttgtgtgcccggtgctcagggagcagtccagtgacgagaatcccccaatgcggatgccttgtggacatgttgtctccaagcagtccatcatgaagctgtcgaaaagcagctcgagggccttcaagtgcccctactgcccctcggaggctatggcgtcgcattgcaagcagctgcatttctagatgtgttaatcttttctggctgcgcaaaactgcaaacctgttggtacatgtttcccctcctgttccatgttgcaccagtccaataactgtctctctgtaatataaacatctacgtccggataaacatgtagtttcgtctgt

SEQ ID NO: 267440 - DNA, 2069 bp, Zea mays
tcgcggacgcgtggggttagaatggatcctcgaaacaaagaagttaatctcgatagtttaatgtatggtacaaggggtggactaacagaacaagaactaataaaacaagaagcagaatacatttaccgttaccgttacaatggtggtggggcaactcaagtttggctaagttctggaagatttgttgtaatagatctttcagcgggcccttgtacatatgggaaaatagaaactgaagaaggcagtgtcagctataggtcaatgccacggctgtcacaaataatcttcccaagaggacttgctgccccaagtgctagttcaacgcaagatattttcattgggcagctcggaggtgcaattgcaactaccattgagcatgtgatagctcctgatataagatttgaaactgttgacatggcagtgaggttgcttgtacctattattgtgctacagaaccacaataggtacaacattcttcaagaaggccataactatagtatagatgttcaagctatagaaagggaggttaaaaagatggtccaccctggtcaggaggtaataataatttctggttcgcatgcgctgcaccagcatgaacagttagctgttgcagtttccaaagcaacacgtagccattctcttcatgaaacaaagagtgatggccggtttcatgtccgtaccaaaacttacttggatggagcaatacttaaagaggaaatggagcggtctgctgatgtgctgtctgctggtctattagaagttgcaaatccttctctctcaagtagattcttcctaaagcagcattggactgatggagaagatgatgtaaaagactctattaagcacaggcccttgtgggaatcttacatgcccaaaaataataaaggaaggagaggaactggaaagaagaaacatggaagtctgtacagaacttatgggaccagagtgatcccagtttttgtattatcactggccggtgtcgatgctgaacttctcatggaagaggagagtcttgtttggacaagtaaagatgttgttattgtgcttgagcataacaatgaaaagattcctctaagcttccggtcagaaacgactaggcagtttgctcttccatctatcgcacagcgccacatcttggctggtctggcatcagcagttggcggtctgagtgcaccatatgaaagagcatcacgtattcatgaaagacatgtagtgaactggctgtgggctgcaggctgtcatccgtttggaccattctcgaactcctcacagatcagtcaaattcttcaggatgtagcactgagaactacaatttatgctcaagtcgatgctgctcttcgcaaaataagagacacatcagagtttgtccaatcttttgcatcagagcatcttaagacgccattaggagaacttgtgaaaggtaataaaaacaagtccaccactgagttatgggtagagaaattctataagaaggtaaccaatctaccggagccttttccccatgatcttgttgagaagttagaagaatacctggataaacttgaagggcaactcgtggacttgtcttccttattgtatgaccaccggctggtcgatgcatatcaaaacagtaccgatatcctgcaaagcactatttttacacaacagtatgtggaacgtgttctagctaacgagagagacaagatgaaatgctgtagcattgaatatagtcatccaaagcagtcatcccaggcttttgtctatggagggatccttctggctggatttcttgtgtattcactggttattttcttctcttcacctgttcgctaattttatgtccagatgcagaaagtcttggatgctttatggtaggctaggtttgtctagggttgtcaatcttcatgagggaatgacctagaccgtcttggatatagaagggctttggcacagttttagtgcgctatttcgcgatacacaagcaatcagacgtctgatatatatgtaactgattcttgtctgcgataaactatagtcgatttcacagaagagctggtgcatgctatccaaatatgaaataatttcccccc

SEQ ID NO: 267441 - DNA, 499 bp, Zea mays
ctgatttctatagtgtacttggtgtctcaagaaatgctagtaaatctgaaatcaagagcgcctatcggaagcttgctaggagctatcatccagatgtaaacaaagatcctggtgctgaacaaaagttcaaggatatcagtaatgcttatgaggttctgtctgatgatgagaagcgatcgatctatgataaatatggagaagcaggtctgaagggtgctggcatgggcacaggagattactcaaacccgtttgatctctttgagtccctgtttgaagggtttggtggaatgggtggaatggggggtggccgtgctgctcggaacagaccaatgcaaggtgatgatgagagctacaatctggtactcaatttcaaggaagctgtgtttggtgtggagaaggagattgagataaccagattggaaggctgtaacacctgcgacggaagtggtgcccagccaggtacaaaggcaacgacatgtaaaacttgtggaggtcaggg

SEQ ID NO: 267442 - DNA, 598 bp, Zea mays
ggaaggacgggtgggcttcatatacaaggccaacaacagaacattcagtttggccgttctattcggatcaccctcttactggtgctgagtatctttctgattgtgccatttctcgcctcggcatgacaaggcatgtattgcttcaccggtgaggaacattggggcagcttaccatggtccggctcgtactacatgtacagatcatgactggtggtgttctctcgccggcaaatgcagcaaaccaaccatgtctttcctgtgtggtgtggctgctgcatatgtgacaggaaaagaagcacggcggtgaaggtttcaactgtgcaatgcgtgatgctccgataccatgaactcctcaccgggcgcataaccatgctaagatttatcagggttatgataaatttgtgatggctgattgctgccaaaggaggtggctgttctcatctcactactctatatcccacgagtgaaagcaattgtaaaaagttctagagccactctatatcccacgaacgaaagcaactgtaaaaagttctagagctggtaggataagtcctgaatactgttattgataataatacatttaatactgtatttgccc

SEQ ID NO: 267443 - DNA, 1221 bp, Zea mays
acgcgtccgcccacgcgtccgcccacgcgtccgcaacaagctgccccgcagcaacgaacacgaaccttggcagaacgaagctgaagtagttcgttgtgaacccagtatggcaaacgcgccgaggatcctggccctcggcctgctgctagcgctcctgtgcgctgccgccggcccggccgccgcgcagaactgcggctgccagcctaacttctgctgcagcaagttcggctactgcggcacgaccgacgactactgcggcgacgggtgccagtcgggcccgtgccgctcgggcggcggcggcggcggcggcggaggcggaggcagtggcggtgcgaacgtggctaacgtggtcagcgacgcgttcttcaacggcatcaagaaccaggccgggagcgggtgcgagggcaagaacttctacacccggagcgcgttcctgagcgccgtcaacgcgtacccgggcttcgcccatggcgggacggaggtggagggcaagcgcgagatcgccgccttcttcgcgcacgtcacgcacgagaccggacatttctgctacatcagcgagatcaacaagagcaacgcctactgcgacgcgagcaacaggcagtggccgtgcgcggcggggcagaagtactacgggcgcggcccgctgcagatctcgtggaactacaactacgggcccgccgggagggacatcggcttcaacgggctcgccgaccccaacagggtggcgcaggacgccgtgatcgcgttcaagacggcgctctggttctggatgaacaacgtgcaccgtgtgatgccgcagggcttcggcgccaccatcagggccatcaacggcgccctcgagtgcaacgggaacaaccccgcccagatgaacgcgcgcgtcggctactacaagcagtactgccagcagctccgcgtcgacccagggcccaacctcacttgctaggccagcagctcctgctagctcgtccacaataaatgctcggcgtcgcaccctcgcgaaaccaagagtttactactgactagtacgagctagctagcatgcagtaataataatcatcgtaataataataataaaacgacggggctgagccactttgttcgacctgaatgaataatgaagcagctgtatgttccctcggtacataattgtgtatgcttgtgcttgtactttccgtttgcagcatgggtttaacatcgcagaaatcaagaaatttcgagaac

SEQ ID NO: 267444 - DNA, 544 bp, Zea mays
ccacccacgcgtccgcccacgcgtccgcagaagctcaaatactgatctcactgatccagtatggctatggcaaaggcaggcgcgccgagggtctcggcggcccagctggtgactctcgggctatcactcctctgcgctgtcgccggcccggccgccgcgcagaactgcggctgccagccaaacgtatgctgcagcaagtttggctactgcggcacgaccgacgagtactgcggcgacgggtgccagtcgggcccgtgccgctcgggcggcggcggcagcagtggcggcggtggtgcgaacgtggctagcgtcgtcaccggctccttcttcaacggcatcaagagccaggccgggagcgggtgcgagggcaagaacttctacacccggagcgcgttcctgagcgccgtcaaggcgtacccaggcttcgcccatggcgggtcgcaggtgcagggcaagcgcgagatcgccgtcttcttcgcgcacgccacgcacgagaccgggcatttctgctacatcagcgagatcaacaagagcaacgcctact

SEQ ID NO: 267445 - DNA, 437 bp, Zea mays
cggacgcgtgggggcgccctcgagtgcggcgggaacaaccccgcccagatgaacgcgcgcgtcggctactacaggcagtactgccgccagctcggcgtcgaccccgggcccaacctcacctgctaggctaggcggcatcggcggacggcgggggccttcaggccttgtgctgggggtcgcatcgcaccctcgcgcgcgaaaccgagcaatagtgacaataaaacgccggggctagctgagcctgtttgttcgacttcgacctgaataatgaagcagctgtgatatgcatgttgtttcgacacaacgtgtacgcttgcagagcgcttgtactttacgattgcattgtatgcagcaagggtttaaaggctgaatcaataaacggtgtgtaggcgatcactgtttcaccccacaaaaaaaaccgcacacgtattcggagc

SEQ ID NO: 267446 - DNA, 592 bp, Zea mays
aagcctctagagcaactcgcagtagccgtgcgcggcggggcagaagtactacgggcgcggcccgctgcagatctcgtggaactacaactacgggcccgccgggagggacatcggcttcaacgggctcgccgaccccaacagggtggcgcaggacgccgtgatcgcgttcaagacggcgctctggttctggatgaacaacgtgcaccgtgtgatgccgcagggcttcggcgccaccatcagggccatcaacggcgccctcgagtgcaacgggaacaaccccgcccagatgaacgcgcgcgtcggctactacaagcagtactgccagcagctccgcgtcgacccagggcccaacctcacttgctaggcgacggcgtccacgttgtacccatggctcctgctagtgctagctcgtccacaataaatgctcggcgtcgcaccctcgcgaaaagtaaaccaagagtttactgactagtacgagctagctagcatgcagtaataataatcatcgtaataataataataaaacgactgggctgagccactttgttcgacctgaatgaataatgaagcaactgtatgttccctctgtttg

SEQ ID NO: 267447 - DNA, 756 bp, Zea mays
agggaatgctggcatcaaaacagataagcttgaaactttgcgcatagctgttgctaaagattctccaatgtgggaaactcttgatatctgtataaaagttgttgacaagaattcacttgatctattggttcctcgcctggctcaaatgattagatcagctgttggcttaaatacaagggttggtgttgctagcttcataactctattggtgcagaaggtcatggttgacatcaaaccattcacagcagtcttaatgaagttattgcatagtgcagttctggaggaaaggagttctgccgctaaaaaggccttcgcctcctcttgtgctactgttttgaaatacgctagtcctccccaggctcagaagcttatcgaagatactacctctctgcattcaggtgggaaaaacgatcagttgtctggtgcaattcttattaaagcctacttgagcaatgcatcggatattcttggtggatataatgcggtggttatccctgtaaattttgtgtcgagatttgatgatgataaagacaccagtgctttatatgaagaactttgggaggatattcctagtatgtgaaagagtaaccctaacactatatttaccaggaattgtacctcttttatgtgatggcatgtcattgtcatcatgggctggtagaagaaagtcagccaaggctataaagaagctatgtgatgttctaggagaacccctttcagcacactatcagaatattctcaaatcacttctgaaag

SEQ ID NO: 267448 - DNA, 383 bp, Zea mays
agtttttgccatgtaacattacgaagcttttatcaaagctacgacttctgcatgaatttcaagacagcagtgagcagacggatcttccttgtcctactgctggatcaccgacattgcggatgtcagcgctcagtgaattgcagaacagtctttcaaactgatgcgctaccatttcgtattggaaaacaaggtgaggaattcgcaccaggtgggtatacttgtgtctcgactctcgacagccctgatttggaatcgtttcagtatgtgcctggagtgattcttgtcttattttcattcttctctttttttttctgttgattatgttttctgcttagctttgttcttccccatactatcataatgtcaatttgtcgttccatttc

SEQ ID NO: 267449 - DNA, 645 bp, Zea mays
cccacgcgtccgaaacaaacaatgtgaatggttcagcgacagatcaggacaatcagtttttgccatgtaacattacgaagcttttatcaaagctacgacttctgcatgaatttcaagacagcagtgagcagacggatcttccttgtcctactgctggatcaccgacattgcggatgtcagcgctcagtgaattgcagaacagtctttcaaactgatgcgctaccatttcgtattggaaaacaaggacaagcggttcggcccagaagtgttttagtactcgagctgcatgcaggcccatttagcacgatctggctatgacttcctacatggcccagaagccgtcgtctactgatcgctccagcttcttcttccttcgtcgccgctgggctggtaacattcattcgcggaccatcctccctcgatcgaagttagcgaggccttgccactgcacctcatcgcttggccaccctctgttctccgttgcggggcggactataatttccgctacaaagtatttacatgacatttgtggcaccgtcaatgctctactcatattttcaattttttaaaattataacgatacatgacttttgtttttttccctatgtattaagagatacagctatgtctatacccatacatagt

SEQ ID NO: 267450 - DNA, 312 bp, Zea mays
gtaagaggctgccagttctaaactgtgctgtggctatggccctatttctattcatttttaactaaaatttatttagggtcttatcattttgttaagaatcatttggatggtgacccattaccatctctagttgtggctcgttattgcatagaagctagccgacagtggaagatcggctttgtacagggatgttcgaaacttcgaatcaggttatttgtggtgtatatataatgccaaattaccaatcacaagaagtaaaaaaaaagtcaaaaaaaaaaaaaaaaaaaagggcggccgctcgcgatctagaac

SEQ ID NO: 267451 - DNA, 792 bp, Zea mays
gttaaaagaatatattatgaagagaaaaggagaaaataagagtgaagttggtgcttctgaacgtctcattgctggtggtttagcaggtgcagtggctcaaacagcaatttatcctatagagttagtaaagactcgtctacagacttattcaggtgaggttggttatgttcctagaattggtcagctctcaagggatattttggtgcatgaaggtccccgagctttttatagaggtcttgttccatctttgcttggtatcgtaccttatgctggaattgatcttgctgtatatgagactttgaaagatgtgtcgaagacatatatactgaaggacagtgatcctggtcctctagtacagcttggttgtgggacggtctctggagccctaggggcaacatgtgtttaccctttacaggttatcagaacaagactgcaagctcaacaagccaattcagaatctgcctagagaggaatgtctgatgtcttttggagaaccctacatcatgagggtgtttctggattctacaagggaattctaccaaatctccttaaagtggtgcctgctgcaagtattacctatctagtttacgaggcgatgaagaaaaatttgtctcttgattaaattgtggagttgttggtgggaaaaacagccatcattattggcatggctgactgtagagataatgacgacacatgaattttactggttgaatagtttctttttgaagataaaaatggggcctttcaatataaaactagaaacaaccgtggcattttccttctaatttttga

SEQ ID NO: 267452 - DNA, 1379 bp, Zea mays
tccacgcgtccggggaaagaagaagcggaggggaggcaggaatcgcctgcccgcgcctccatcgccctgccggcgacggcccacatgccgaccgcctacagcctccgcgcgccgccctccgcctcgcagcagcgcctcaggctgcccctaccgccgcccccgccgccgctgccgttttgcccgggtggaggggccgcccgccggaggaggggtgtcggggtggcgtctgcgtccgcgtcgcccttcgacgagctgcacgcgcgggggaggcccgtacatggaccctccaagaaatccatgctctggaacttgatccaggatatagagcccttggacctaagtgtcatccagaaagatgttgctcctgaaacagtagatgcaatgaagaggactatttctggcatgttgggtcttcttccatctgatcagttccgtgtcattgtagaagccctttggaatcccttcttcaagttattggtatcttcaattatgactgggtatactctgcgaaatgctgaatacaggctttcttttgaaagaaatctagaactgcctgaagaaggtgtagaatgcctaaaaagtgatgtcactgaagataatcatcataacatcaatttgggaagacctgtcactatttttagattatccgaagaagacatgcctcaggaccctggaaaaaccgatgaagcatcatcttatgaaaatatgggagaagagcttggtgacttaacaccacaggcagaggagtatattattcagatgcaatctcatttgaatgccatgaaaaaggagttacatgatctcaggagaaagaattctgccttacagatgcagcagtttgttggggaggaaaaaaacgacttgctggactatttgaggtcattaacaccagagaaggttgctgaactatcagaatcgacgtctcccggtgtgcaagaaactattcattctgtggttcatggtttgcttgctactctttcccccaaggtacattcaaaggcccctccaccgctagataacacttctggaggggtcttaaaccttgggggcgaggatgatgactgtgcagaacttgtggagaatgcttccctcccatttcagcccctaatatctgttccccgtgattatcttgcacgcttgctcttctggtgcatgctgctgggtcactacatccggggtctggagtaccggttagagcttgctcagcttctgcgaatatccagcgacgtgggttctttctctggtggtgatgatcatgttgtttgagggtaccacgtttactgatattcctcaccgggaagaatggaaagatctggccaagcaatgcagaggtggccgttacactgcgttccctctctgaaatgatgccccaagccccc

SEQ ID NO: 267453 - DNA, 568 bp, Zea mays
atgcttcccttcccatttcagcccctaatatctgttccccgtgattatcttgcacgtttgctgttctggtgcatgctgctgggtcactacattcggggtctggagtaccggttagagcttgctcggcttctgcgaatatccagcgtgggttctttctctggtggagatgatcatgttgtttgagggtaccacgtctactgatattcctcaccgggaagaatggaaaggaaagccctggtcaagaaatgggccatatggcagagctgcagaggtgtccgttacactgctgagctatatagttgtagttcctgtatattcagaaaacagtcactcggttgtaaagctagtgttacatatgcacgtgaaccattttctttttcttcctttgatgttgtgccgtataaaaagaatttggtggttcgttggtgtttatctcgtggtagcataataggcatccttgtattctagttgtatgtttctggtggttgtgactgctgtccagtgtccatttagcttttttgtctattcttgattcaagtacagcttaacttctcattttggaggtcgc

SEQ ID NO: 267454 - DNA, 1473 bp, Zea mays
cggcacctccctacccttctcgccttcgcttcgtcgccacggcgagccccacgccgccgatcggggcgccgccagcggcggcggcgcccgatccgatggaagcggaggtggggccgccgaatccgccgcggccggagccagccggatcggagcccgacgacgcgcgcctctccccgcctcctcctgctcctgctccgccgcctccgtccccgccttctcccgccgtcgaggctgtcgtcgtgccccccccctccccggccttctcgctgcaggctccagctccggcgccggcggaggcgaacggcagctccgacaggaagaggaggaggaaggcggaggacggggacgggtgcaagacctgcagctgcaagaagtccaggtgcctcaagctttactgtgtgtgctttgcttctgggttacattgcactgaatcatgtggatgtgaaccttggcataacaagccacaattgcaaggtactctgcggatggcaacagttttacctctgaaacctgtccaaacattcgaagctggccaagatatagtggaacaagtcataaggtctcctatggatcttattagaagaaaatgcacatgcaagaagtcaggctgccttaagaagtactgcgactgctaccagggaggggcaggatgctccatcaactgtaaatgcgatgattgtagaaacccatttgggagaaaagtcggcgttattttggacggtaaaagcagtcttactgcacctatactgcacgaaagaaacgggactgaagttgactcaagcgacgaggaagacgacttctacatgaatcgacagctctccccaatacctccgtctccggtgtctagggagtcttcgttccaacaggagactctagtcggcgtcgaggtccagaccatgaacgggcacctgtaccccaaaccactgacccaggtgcgccccgagccgtcgtcctggcagctctcccggaggcccatcgaggaaccgcgcggggagatatggcgcttctcgaggaggccgagcgaggacgggacctctgatgccatggaagtgcacgccgtcgccccgagagagagcaagaaggcggcagaggtccgcggggacaggttcggcatcccgcggtgcatcgaggtgatgagcgccatggcggagctgtcgccggtggagaagtcgctggcgcccgacgtcttcttggacgcgagcaaccgggagatcttcctctcgctgagtgtagatattaggccaatctggctgaggcgcaagatgaagagccttgtctagctagacgctacaacagagatagcctgaggaattttcgtcgtcggcgtatacctaataaacccgtgctgtactgtagatatataatatatgtgccttagattcagagttgagttctggaccgatgggtgtaatataccttagtgctaatttatggtgcccgctgttatattggagttcaaaaaaaaaaggaaaa

SEQ ID NO: 267455 - DNA, 2015 bp, Zea mays
ttcacgcgtccgcccacgcgtccgatccgattggtgtggtctatttgtctcccaggcccacttcgtccactcgagctctccaccagctttccccttctctccggtccgggaatcggaagctcagggcagaagccatggggcagacgcatcttttgttgctcgcttgtttctgggtcctgtcaacatgctccttgctacttgatgcttcctccgatggactgttaagaatcaacctgaacaagaagagactggacaaggaagctttgactgctgctaaattggcgaagaaggagagccaccttcgaaggtctgtgggtgctgaccagtatctcagtgcctcaactgatgacatagtccctttggacaactacctggacacccagtactttggacagatcagcatcggcacgccaccacagaacttcacagtgatattcgacactggaagctccaacttgtgggttccctcatccaagtgctacttttcgatagcgtgctacttacaccataaatacaagtcaaccaagtcgaagacttacacaaagaatggagaatcttgtacgataacatatggttctgggcaaatcgctggcttcttcagtgaggacaatgtgttggttggcaaccttgttgtgcaaaatcagaaatttattgagacaactcgagaaaccagccctactttcatcattgggaagtttgatggaattcttggtctcggatttcctgaaatttctgtaggaggagcccctccaatttggcagagcatgaaacagcagaaactggtcgcaaaggatgtcttctctttctggcttaatcgtgaccctgatgcatctgctggaggcgagcttgtctttggtggtgttgacccaaaacactacaaaggggaccatacatatgttcccgttacacgcaaaggctactggcagtttgacatgggagatcttattattggtggccactcaactggtttctgtgctggtggctgtgctgctattgtggactcagggacttcattgcttgctggtccaactaccatagtggctcaagtcaatcatgcaattggggctgagggaatcatcagtacagaatgcaaagaagtggtgggcgagtatggagagatgatccttgagttgctcatatcgcagacaagcccacagaaagtgtgcactcagattggtctctgtgtatttgatggtgcccattctgtcagcaatccaattgaatctgttgttgagaaacagaagcgtggttctgatcttttctgtactgcttgtgagatggctgttgtctggatacagaatcagctccgtgaaaacaagacaaaagaactcattttgaattatgctaatcagctctgtgagcgtctccctagccccaatggcgagtcaactgttgattgccatcagatctcaaagatgccaaatcttgcattcaccatagcaaacaagactttcaccttaacaccagagcagtacatagtgaagctggagcaagcaggacaaactatctgcatcagtgggtttatggcatttgacgtaccgcctcctcgtggtcctctctggatacttggtgatgtttttatgggtgcctaccacactgtttttgacttcggcgagaacaggattggatttgccaaatctgcatgaggactggagttctgcgctttagtagcatgtccagtttgttatcccggtattgtacatatatatgttgccaactggtgtaatctgcagtgtttaatagtatatattcatgcagaaatctagaagattgtggcatgatatgtgtttgcaaatggagctatgctatgtatggagctccaggacctagagttttatgtaaagggagacgatgaggattagggcttttaacctattctcatcacgttattgtcctgattactatgtgtaggtatagttgctgagcttgtttgggagcaaaacgattggaggggatgagtggactaaaatttccttcctatcaaaattgaaccccaaaagtattttagctccccc

SEQ ID NO: 267456 - DNA, 845 bp, Zea mays
tcgattcccggtcgactacgcgtccggtgcagggaacttttagtggctgttgccagtggatgggataagcatgtggttatcagggacaagataattccccaggcttggaaggatgaacctgtggcaaggattcttgagctctgcattctacatattgctatggctgagatggcatcaaaaggaacaccccacaaagttgtcattaatgaggcagtagatctggcaaagcgattttgtgatggtggtgcccctcgggtaatcaacggatgccttcgaacatttgtgaaggatcatgttgatgttgcaggcacgagccaggaagctaaatcaaaatcatgattttttgcaaatgctcatacaacaaaatggtggctgaagtaaagaagtacggagaaaaccttgctgtcttgagttcaggcgaataccttctgtctccaaggtttagccttcaacctaagggaatctaaaaggtaaacatgatggactcatcaaggagccacaacacgttcattcttttagaatgttcggttattaggtgaagtatacagagctgtaaactggtgatgcacattcatgcttcatctaaaacaaccgaaggttatggcttctgatagcggatagcctactcgacgcagatcgttaaatgatcagatattaagatgaccaggagttgtgtaaaagcttgatgcacatgtaaaatgttatatatacttggcattggctcattgcaatgggagaaggatattctagtttcataagttgatgtaagacatgtacgctcattttaggattattaatcgcatattgtgtttgcttctatttggattcaatttagtcctttcccc

SEQ ID NO: 267457 - DNA, 436 bp, Zea mays
ctacgccaatggctatagggcacaagaacaccaccaaagtggcgctcctagttctgctgctgtcattgatgctctctttgacagcgtcagtggcgcgcaatctccaatggcgactgtccgtcgctacggctgtggaggtgtgcgtgaaggctgctgtcggggctcctgacaagcttggcgactgtcccttctcacaaagggtgctgctcactctggaggagaagaaggtcccttaccggatgaggctcattgacctcagtaacaagcctggatggtttctgaagatcagcccagagggcaaggtgcccgtgtacaacagcggcgatggccaaatggattgctaattctgatgtgatcacccaagtcatcgaggagaagttcccagccccgtctctggcgaccccttcagaattcccactaattggatcgaagattt

SEQ ID NO: 267458 - DNA, 544 bp, Zea mays
tttttcttacaccaccaaagtggcgctcctagttctgctgctgtcattgatgctctctttgacagcgtcagtggcgcgcaatctccaatggcgactgtccgtcgctacggctgtggaggtgtgcgtgaaggctgctgtcggggctcctgacaagcttggcgactgtcccttctcacaaagggtgctgctcactctggaggagaagaaggtcccttaccggatgaggctcattgacctcagtaacaagcctggatggtccgtctcgtttacttttcctgtttattttccagagcagtatcctgtagggtctgacgactaagttgacaaagtactactgggggtcgtgtcttattttctacactcaagttgttctgggcagagatttctctggtggagttttcactagcttcattgatggactggtagtagagaccaagaaggcaggagcaatatgagacagaatattttgctttctgcttgttttgctttggaggttttagatatatttagtggattccgttggatgggcagattttcttgggtt

SEQ ID NO: 267459 - DNA, 387 bp, Zea mays
ggagaatgtgcaagttatggagtttcggcatctgcgccaacttatccaccttgttattattccatttgttaaatattgccctgccgatttatggctgtggctagtgaaccttttgcagccgttatttgtccactgtcagcaagctcttaattattcatggtccagtcttcttcatgagggtcgggctaaggttcctgacagcattggtaatctttctgggtcagaactgaaggtagaggtaatggaagaaaagttgctacgtgacttgactcgtgaagtatgttctgtcctttgggctttatcatcaccaggcttaaataatggacttccatccttggaacaacttggaccttccaaccgatggattctgttttgaagaatctggag

SEQ ID NO: 267460 - DNA, 564 bp, Zea mays
  unsure (1)..(564): unsure at all n locations
ggtacctctacaccgacctgtactcatcgctgatgtggacgggcacggaggccccagaggggagcgggaactacacgtcggccgtgaagccagtgagctgctccaaggcctccccgatcggctgcgagtccgtcgccgggagcacggacccgctgctcgggtacgtcttctcgttcggggaggacagccgcaaggacgtcttcgtcctggcgagcaagggcgtgtaccgcgtcgtcaggcccagcctctgcggctacacctgccccgcggagagaccggcgaccgacaacggcaccgcgccaggtccaggcgggccgtcgtcgggcgctcccgccgcgacacggctagggaggtcggtggcggcggtagcggtagctctggcgttgatcccgtgtgtgctgttactgtgaccttcagatgtgtgtctcgtgcgatgtagtaggatcagtcgtagctgaagctactgggagctggaagagtacatacgtatagcgtgagtaacgaacactcaaaaacagntgtgctatgtggatgcctcttgacaagacaaagagcaatgggtag

SEQ ID NO: 267461 - DNA, 407 bp, Zea mays
ggccgtccaagttcctggtggtctgtctcaacgctatccgggatgcggtggcgcccgaggaaggcggtggcagcatccacggcgccggcgactggggcgtggagctctggcggtgctgctccgcccaggcgccgtccgacgtgctcgacgctagcggcgcgtgcgccacggtggcgcagaccgcgtggctcgtctccaccgcctgcgacatcgtcgctaggaaagagaggcatgggatggtcgtgtcttgccccttcctgctgtacctcgtctcgtcgcaggataaggccgcgcaggtgcgatcgatatgcaaacccctgaagcctcttgggattcattcagtgagcttgcatcctggcgcatccattgaacaccagatctctggactgaaaacttgtgagccggag

SEQ ID NO: 267462 - DNA, 1064 bp, Zea mays
gttcgcccctccttttaccttctcccattcacgccccgtctctttcgtggccttccttttccggcggccacaagtgggcgagcggcggcgcccttcaccaggtcttcgtcgggcccttcaccggcgacgagcatccaccagaaacgtggagctcagagcattggtgcctctttcctctttcaccaaggattccggtgccttatttcacaagacaaaaaaagtctcaagggtcttgattcttgtatgaactcaagatttatggtggatcttggagctgtgggatgctaagcctggtctagctactagattatgaactctctgctgatctaatagcatttctacaagaattcttttgctggaaggtttattagttatttgcaacaatgaaggaacatctaatgcttaatattgatgacctaagcattcttgagcctaacgaggtcattgggacagtcaagaataaatcatctggggaaaccattgcacatccaccctccatggctcatgccattttagcagtgggagaaagcatggtttctgaagcggaacctcttctgcaagtggtggagtgtcgcatttgtcaggaggaagatagtatcaaaaatttagagagtccatgtgcttgcactggcagtctaaagtatgctcataggacttgtgtacatcgatggtgcaatgagaaaggagatgtaacatgtgaaatatgtcatgagccttatgaacatgggtacactgcacctcccagaggccatcctgatgaaactaccattgatataagtggtgggtggacaattaccggtaccgtatttgacttgcgtgatcctaggatacttgcagtggcacaaaaccacatcatggaagctgaatatgatgattattctgccacaaatgcgagcactgctgacttctgccgctctgctgctcttgttttaatggctctcttattgttgagacacgcactgactctaactgatgaagatgacgacgacactttagcgatgttttcactttttctgttgcgtgctgctggtttcctgcttccgttctacatcatggcttgggca

SEQ ID NO: 267463 - DNA, 920 bp, Zea mays
agctgctcctcctgctgccgccgcgcactaattgccgggtcccccgcctcctattttttagtgacagactactggcaacgatgcagcaagtatcgcgcagatgtgagtaaactggatggcagaaaggtagagagaatgcttgaagaaaaatttggtcctatcctcttttccgatgtttacaaggattgtagaatttgccctagttgttctgaaggaaccttgagattcaaagttagtaggtacggtgaaggctattttgtaggttgtgatcgacatccaaaatgcaagtacattgctcgctcactgtcacagcaagaagatgaaactgaacccatagaagaaaatgcaaaatcttttgaacccaggttacttggtgtcatgcctgattctgatcaaaaggtgtttttgaaacaaggcccatatggccactatgttcaggttggagaggacaaaaagggtctgtttccgaaaagggcttccctttccaaggtcaaagatatagactctgttactctagaagatgcaatcgagcttttgcaatatcccaaaattttgggaaaacatcctgaagatgattatcctgtacttataacacattctaaaggtggatacaacatcaagcataggagatctctagctctagcgccaaagagtgttgacccaaagaagatgacacttgagcgtgcgctcaagctactaagcggtaaaagtgtcagacgaatcggtcgaccgaaggggaaggttgaaaacaaggaacccatggaatggcattagctggctgtactcgctacaagatcctaaacatgagtggatcgataggcagggagccttatatgcatgcaatgaatccagagtgaagccaatattcatatgactccgacgttcagcctttggagtgcttaactgattatgacgagagc

SEQ ID NO: 267464 - DNA, 907 bp, Zea mays
gcttaaccctagccgaaagaaacaatgtctctcctcccctgagcgcgctcgtggccgccccttgttggccatggctctccagctccgccgcctcctcccgcacggatacgcccagcgacaccgcgccgtcatccacgcgctatcgctgctgccgccgccgcccgcaatgattcaagtggatgttggcattcctgaaggagagatgaattttcattccactgcatcaaaactggacttcaagggataccgagctgtctatgaggatgatcaggccagtccatgcattgacagctctgagggagattgtgtgcatgagtgtaactttgaggccttgtcgaaattaatgggtaaggacttggtgtttcctgttaacgtgcatcttggccagcacttcactaaaccaccaccacgatattctgagggtgcattgattaaaaagctagaagaacttggaattggaaggccatctacttatgcatctataatgaaagtattacaggataggaagtacgtgacagcaaaaagtcgagttctacaccctgagttccgtggtcgaatggtctcggcattccttttgcaccatttctctgaggttgctgattacagctttacagctaacatggagacagagctagataatgtctctgctgggccaactgaatggaagggtcttctgaaaggctactgggaacgattcagcaaatattgtgcagatgtgagtaaactggatggcagaaaggtagagagaatgcttgaagaaaaatttggtcctatcctcttccccgatgttgacacggactgtagaacttgccctagttgcgctgaaggaaccttgagtttcaaagtttgtagtgtccggtgaaggcttttttgctggctgtgatcgacattcaaaatgcaagtacat

SEQ ID NO: 267465 - DNA, 367 bp, Zea mays
gagctccaaagtccaaagattagtgaatccaaaaggcgaccaaacagatcccccgcaccccgctcctgtgctccgctcatgttagagaaccccctgggaaaacgcagcggagaaactctggagatcgaaaccccggcacgcagctaggcgaactgcacgcaactgcaggtcgacgtctgatccatttcttgtcgcttcagcttctggtgctggtcttcttccagttgcatcctggttacctgtgtcaaggggcggttggtgtctggtgtagttggagggcagagcttcgcgggcggcgaagaagaagagcagcagagagactctgctgacactgaccgtaggagatatggcgaggaagctgagagag

SEQ ID NO: 267466 - DNA, 301 bp, Zea mays
caaaaggcgaccaaacagatcccccgctcctgtgctccgctcatgttagagaaccccctgggaaaacgcagcggggaaactctggagatcgaaaccccggcacgcagctgcaggtcgacagtctaatccctttcttgtcgcttcagcttctggtgctggtcgtcttccagttgcatcctggttacctgtgtcaaggggcggttggtgtctggtgtagttggaggacagagcttcgcggcggcgaagaagaagagcagcagagagactctgctgacactgaccgagggagatatgacgagga

SEQ ID NO: 267467 - DNA, 349 bp, Zea mays
cctcacccgccgcagccaaaccctctccagcagccgtcgtcgccaccgctgcagcgcggaggcgacccccatcgccgccaagatgcagatcttcgtgaagaccctgacggggaaaaccatcacgttggaggtggagtcctcggacaccatcgacaacgtgaaggccaagatacaggacaaggagggcatcccgccggaccagcagcggctcatcttcgacggcaagcagctcgaggacggccgcaccctcgccgactacaacatccagaaggagtccaccctgcacctggtgctccgacttcgaggtggcgctcagaagcgcatgatgaagacgtacaccaagcccaag

SEQ ID NO: 267468 - DNA, 1353 bp, Zea mays
ttcactgcgtccgcccacgcgtccgcccacgcgtcgcgtcgcgtcgcgtcgcgtccagtccaatcctcggagcctcacacgggcggacgagcgggagcttctcccaatctcccctgccctgccctgccctgccgccgcgcttagcttcgcatcttcccctcctcctcctcctccttcctcggccaagcgaggagcgaggcgcgggcgcgagcgcgtcgttgagatggattcggaggcggtgcagcacggctgcgcgcattacagccgtgggtgcagcgtcgtggcgccctgctgcggccaggccttcggctgccgccattgccacaacgacgccaagaactcgctggaggtcgacccgcgcgaccggcacgagatcccccgccacgaaataaagaaggtgatctgttctctctgctccaaggaacaggacgtgcaacagaactgctccagctgtggggcctgcatgggcaagtacttctgtaaagtatgcaagttcttcgatgatgatgtctcaaagggccagtaccactgtgacggatgtggaatatgtagaaccggcggcgtggagaactttttccactgtgataaatgtgggtgttgctacagcaatgtcttgaaggattcccaccactgcgtcgaaagagcaatgcatcacaactgccccgtctgctttgagtatctgttcgactccacgaaggacatcagcgtgctgcaatgtgggcataccatccatttggagtgcatgaacgagatgagagcacaccatcacttctcatgcccagtgtgctcgaggtccgcctgcgacatgtcggccacatggcggaagctcgacgaggaggtcgcggccacgccgatgcctgacatctaccagaagcacatggtgtggatcctgtgcaacgactgcagcgcgacctcgagcgtgcggttccacgtgctggggcacaagtgccccgcgtgcagctcgtacaacacccgggagacgagggctgtgtgccccaggatctgaggcgaaccagaggctatgtcaaaatgccagggagatgccgtccaacgactggtggagatcatctgtccgcaggacgttgctgcgcttaaggttaaaggctagcgcgagaccaagcctggttgtccagtcttgactctggtgctgtccaggcacacctgtggatcggggccggctcaggattagtggggctgttcatgtttagggcgcgaatgcaacgatatttcacgtgggccgtgggctcggtatgtaactgaaccgattatttctattgcaataataacatgccgttctattgggccgagcctcccacaaaaaaaaaaaccaaaaaaaaaaaaaaaaaaaaggaa

SEQ ID NO: 267469 - DNA, 1090 bp, Zea mays
ctgttctctctgctccaaggaacaggacgtgcaacagaactgctccagctgtggggcctgcatgggcaagtacttctgtaaagtatgcaagttcttcgatgatgatgtaagcgtactcgaatcccagacgatgaacacagaaactgaactcgatgcgttgtttactgcgtttcttttttcccccttcttcttcacgtacatactgtactgctcttggtccaggtctcaaagggccagtaccactgtgacggatgtggaatatgtagaaccggcggcgtggagaactttttccactgtgataaatgtgggtgttgctacagcaatgtcttgaaggattcccaccactgcgtcgaaagagcaatgcatcacaactgccccgtctgcttcgagtatctgttcgactccacgaaggacatcagcgtgctgcaatgtgggcataccatccatttggagtgcatgaacgagatgagagcacaccatcacttctcatgcccagtgtgctcgaggtccgcctgcgacatgtcggccacatggcggaagctcgacgaggaggtcgcggccacgccgatgcctgacatctaccagaagcacatggtgtggatcctgtgcaacgactgcagcgcgacctcgagcgtgcggttccacgtgctggggcacaagtgccccgcgtgcagctcgtacaacacccgggagacgacggcccccggccccaggatctgaggcgaaccagaggccatgtcacaaaatgccagggagatgccgtccaacgatcatctgtctgcaggacgttgctgcgcttaaggttaaaggctagcgcgagaccaggcctggtagtccagtcttgagtttggtgctggagcatttgtaatgttccggtaaaatgtaatgcgtccatgagtgctgtccaggcagtaagcacacctgtggatcggggccggcgcaaggtccctaggcaagctgcaggattagtggggctattcatgtttagggcgcgaatgcaacgaaattacccgtgggccgtgggctcggtatgtaacagaaccgattatttctattacaataataacatgcagttctattgggccgagcc

SEQ ID NO: 267470 - DNA, 233 bp, Zea mays
cgatgatgatgtaagcgtactcgaatcccagacgatgaacaaagaaactgaactcgatgcgttgtttactgcgtttcttttttcccccttcttcttcacgtacatactgtactgctcttggtccaggtctcaaagggccagtaccactgtgacggatgtggaatatgtaggtaagcaccaccacgctgatggctacgtctaaagacttgacgcgcagaagtgtaaaacttctg

SEQ ID NO: 267471 - DNA, 590 bp, Zea mays
gccatttctctgaatagacaagcccctctgggaccggcacactattgaagccggcactaccactgtgacggatatggaagatgtccaacctgcggcgcggagaactttttccactgtgataaatgagggtgttgctacagcaatgtcttgaaggatgcccaccactgcgtcgaaagagcaatgcatcacaactgccccgtctgcttcgagtatctgttcgactgcacgaaggacatcagcgcgctgcaatgtgggcataccatccatgtggagcgcatgaacgagatgagagcacaccatcacttctcatgcccagtgtgctcgaggtccgcctgcgacatgtcggccacatggcggaggctcgacgacgtaggtcgcggccacgccgatgcctgacgtctaccagaagcacatggtaagaagccgaccgcccactcgttcgtcgtcccgttacatcttttccacagccatggctcgctgtttgacgagctctgacactgtccggggtgccgattgctggagctgaacagcaaatgaacgctgtggtgtgagttcaggtgtggatcctgtgcacgactgcagcgcgacct

SEQ ID NO: 267472 - DNA, 388 bp, Zea mays
cccacgcgtccgcccacgcgtccgcgagacgcgtgggtcgcccacgcgtccgcccacgcgtccgctctgtttttttttcacagtatctgttcgactccacgaaggacatcagcgtgctgcaatgtgggcataccatccacttggagtgcacgaacgagatgagagcacaccatcagtaagcatatataccgttctcttcggagctgagaaacggtgccacctcacaacatcctcttttagtcgcagtgaccttacagtctcagccctgtttggtctttggcagcttctcatgcccagtgtgctcgaggtccgcctgcgacatgtcggccacatggcggaagctcgacgaggaggtcgcggccacgccgatgcctgacatctaccagaa

SEQ ID NO: 267473 - DNA, 915 bp, Zea mays
cttcgccccgcgctaccgcacgcctgccagcccccgcgaaactcgccgcaaccgaacgccccccacgcccgtcgccgccgcgaatctcgcccgcacggccgccgccgcgaaaccctccgataccgcaccgtccacacgccagcgcccgcgaatccctccggttccgaacctcccgcacgccacgcaatccgctcctccctccgccgcagccaggagaaccttatcgcgcgccagatccgcgtcacacgccaggagaacgcgctctgcgccgccgcctcttttgaccgcgatgccgccaacgcgttccagctctacgtcgccgagttcctcggcttcggcgtcaagcgggcgggtttcctctacggccgcgtcgacgcagagaccaaggatgtcttcgtcgactttatctatgagccgccgcagcagggctccgaggacgtggtccacctcttgagggaccccgacgaggaggcccgcgtcgataccatcgccgaggggctcgggatgcgccgggtcggcctcgtgttcacgcaggccgttgggagaaaggccagcgagactggtgagtacaccatgtccaaccgggaggtcgtgcaggcggcccagctgcaggctgagggcgggaccccggagtgggtcaccgccatagtcaaactggaggtggcggatgacggcaccggggatgtgcacttcgaggccttccagatgagtgagatttgtgtcaagctcttcaaggatggggtactggaaactgaggttcaggatgctgatgatccccgtctgtcaaagatgcggaaagacgtggtggctggggtgaaggatactatggaagtggataatgacttcttcctcgtgcccgtcaagatctctgatcgacaggggtcactctcagtaagcttgtctatagagaaccgt

SEQ ID NO: 267474 - DNA, 431 bp, Zea mays
cgtcccgctccagcgcctctccctcgacccggccctcctgctccctaacccctccgccgttgtcccactcctcaccgactcggcggcgccgcttgcctcgctccgcctcgccaacggcgccttcgtctacctcgcatacccgcccgacgcgcgctccgcccgcccgccgccgcccaaggcactttccgccgctggctctttcggcaagaagatgaccatggatgaccttatcgcgcgccagatccgcgtcacacgccaggagatcgcgctctggccgccgcctccttcgaccgcgatgccgccaacgcgttccagctttacgtcgccgagtatctcgcgttcgccgtcaagcgggcgggcttcctatacggccgcatcgacgcagagaccaaggaggtcttggtcgacatcatctatgagccgccccacag

SEQ ID NO: 267475 - DNA, 1367 bp, Zea mays
tcggcatcggcgtgccggtgctgccaagctaaaattccccaactcgcgtcgcgtcgtcagtgtgcgtgccagtcctccggcccaaaccccccgcacccaacccccagccccggcaaccgatggcggggtccgcggccgacgcggagcaggagcaaaagcgggcagcggcggcggcgtacgactacgagggcgacgcgcgctgggccgagtactggtccaacgtactcgtcccgccgaacctcgcctcccgccccgacgtcgtcgaccacttgaagcgcaagttctaccagcgctacatcgaccatgatctggtcgttgagccaaggtcattcaccagttccactcaggccagcaggccagatgtaaggtcttcgtcttcgtcatccaccgagaacgtcagggagcgtaattcaggatctactgcaaggtcagcgcctccaccaccgccaccaacacatacagacagtgccgtcaaccctttacggttcgacgcacgcactatacatttctccatcaacgcatggatacttgtggttgctggtctgggaatgcttcctattttgccaaaacaccttgccgacagagcttgcaaactttcacttctgggaacaatattgtcatcagggtattctctatacagtacttatgggaaaccaagagcatggaacatgccagcaattcaagcttggttgcagtctatacttgcaacaaaggattttatccatttaatgttctcttctatgctcttcacatcccaattgcacttgaagattgctgcactacctgtgttttgctgggcgcttgaccatgttgccagattcttaaggcgtaattttgcgcgatcctctttctataggagatacctggaagaaccttgtctttgggtagagacaaataacactacactaagcctccttagttcgaatgcggagattgccttgggttttcttctgatcatatcactgttctcgtggcgccgtagcatagttcagacattcatgtactggcaggtgttgaagctgatgtaccatgctcccgtgacatccagctatcaccagagtacctgggcgaaaatcggccggattgtgaacccgtacatccaccgctacgctccgttcctccagacgcccatttttgcgatccaaagatggtggttcaggtagagagacaggccgagctgcaaacatagcacagtcgagtccccgcgttcttatgtaatgctgtaaccttttcccagaattctggagggccattatcataacaagaaggtttttagctgcagggccaccatcgccgaattgcaaaactcagcaaaaatgttccgtggttttttttttgttgggcaccgatgccccccttcgtagatt

SEQ ID NO: 267476 - DNA, 540 bp, Zea mays
gtaaacacgcaaagaggtggagacgtgctcatcttcctcgttggaaataaaactgaccttgtcgacaagaggaaagtgtccaccgacgaaggagaagccaaagcacaggagcatggtgctatgttcatggagaccagtgcaaaagctgggttcaacgtcaagcccctgttccgcaagatcgctggatcccttccaggactggacgcactttcgtcaggaaagcaggaagacatggtcgacataaacctcagacctgccagcggttcgtcggcttcaggtgcagccgcgcagctggagcagaaatcaggcggttgctcctgttgagacttcgacagttttgtgttcagagaagctacagcagtactgcaacatcgagttaagtactttcagagagattatgacgaagagtgtgttttcgcccagacgtccagtagtgatatactgacatccatagcgagaagccaatttctgtgtacagatttgtttagcaagttatcatatactaggatataactttttgagacacaagggacaaaatct

SEQ ID NO: 267477 - DNA, 625 bp, Zea mays
  unsure (1)..(625): unsure at all n locations
atcaaccatggtgaaagcattccatgagcgtcgtgattaccttgtaagaagctttagggagctgccaggtgtcaagatatcggaacctcagggagccttctatttattcatcgacttcagctcgtactatgggtctgaggtggaaggttttggtaccatcaaggactctgagtccctctgtctgttcctgttggagaaggcacaggttgcgcttgtccctggggatgcatttggcgatgacaagggtgttcgcatttcatatgctgcagctatgtcgacactgcaaactgcaatgggaaagataaaagaagcgatggctctgctcaggccccctgttgccgtttaacaaaaccaacgtatcgctaatcagttgtggaccaaaggcttctgcaatgcactatcatattaaatacattcagttgacatgatctatcttcttccctttatggaaaaaaatgttgctgctgtcatttggctttggtttgtatctgaagatttatatgtacttgctataatatagatgaactgtgcaacgctttttttacctgcaagaatagaaatggtaaacatgactttattttgacaatttcactcgtgaatgtttcatattaaaaaanngatnaaa

SEQ ID NO: 267478 - DNA, 653 bp, Zea mays
tccacgcgtccgggaaatacctgcccgatttactgaaacacacttaaaacctgtcagtggcaaagacatgaacttattgaaggttgatccctataaaggaagctgggggctccgccttctggaacttgagcttttcaatcctactgatgtcgttttttatgttgatgttgctgtgcatttggatgacacggatgtggaccaagaagtaatttcagacggggatgctgcttgtcacaaaactagaattgatcgggactactctgccagagttctcatacctcttgagaacttcaaattgcctgttcttgatgcttccttctttgtaaaggcaagtagtagtgatgaacctcttggatccagggccgccgccatagcagaaaggaatgccaaggcagagctaaatgcgtctatcaacaacttgatttcaaaaatacaagtggaatggcactccgggagaaatagctccggcgagctgaatattaaagatgctatcctggcagcaatacaggcatctataattgacatattgttgccagatcccctgacgtttagctttaagcttgctaagaatggaactgttaacaatgttgattcttcaaaggattctggcgatgccctgaggtgcaaagatcctatatctgctcatgaaatga

SEQ ID NO: 267479 - DNA, 1054 bp, Zea mays
gcggtcatggtcgaagagcaggaaaggccccaaaaaaaaggaggcggaggcggcttcttctcgttcttcggcggcaggtgatgagtcaagtcagtctttaggctgtacatggtgtacaggctcggagtttatgaatgctttctaggctagtgcccgattcattctgtcgttattgtgttgatgagacttgatactactagtcgcttgcattggacctgaactacaagttgtactaggcggctgatccacatccgaatacactccttgattgagctgctagttggtggccgggatgtcgtatgcgcactgctgcactgtgacctggtcgatgggcagcgtgtcggtcgggaacgggcatgcgccgtcgtgcgcgccctgtagcgggtcgcacggcgcggggctgacgttggccgacactccctcgatgtcggcgcagttccatgggtacttcctggacttggacaggtcggcggtgacgttggcgacgcagatgccccggaacggtgcgccctggatgccctggaggcgcgccgcctccttgtagacccccgtggccaccacgtcctggtagctgatgttggcgacgacggggacggcgttggggtcgtacttgtcgtccgggtgggacttgtagtcgcccgtcatccagaacacccgcttcatggtggtgagcgtcatccggcgcgcgaacacgtccctgacgtaggcgccgcggccgacggcggtcttgatgcgcacggcggactcggtgttgatcgccgtgatgtcctcggcgcgcacgtcctggatgccgcccgacatctcgctgcccagcgcgatgacggcgctggtcggggacacgcacgtgaggcggcggatgacgatgtgctggctgggcatcccgtacgagatgccgtactcgtcccagccgctcttgatggccacgcagtcgtcgcccgacacgatgtagcagtcctcgatgcggacgtgagagcaggagtctgggttgatgccgtcggtgttgggcgagttggtcggcgccaggatggtgatgccttgcaccacgatgttgctg

SEQ ID NO: 267480 - DNA, 662 bp, Zea mays
attacctgatgcttaatttgcaacttggcataaggtacacagtaggtaaaatcacccctgtgcctttgcgtgaagtccgttcaaatgatttgggacctcgagcacggataagaatgtacttccctactgaaggctcacagtatacccctccacactgctctgtcaatttcttttggaaggattattgtcctatggttttccggaaccttcgagaaatgttccacattgatgctgcagattacatgatgtccatatgtggtgatgacagtctgaaagagctttcttcacctgggaaaagtggcagtattttctatctttcacaggatgaacgttttgtcataaaaaccttgagaaaaactgagttgaagatactgttgaagatgctaccaaaatattacaatcatgtcagagcttatgataatacgctcatcacaaaattttttggcgtgcacaggattactctgaaaggcggaagaaaggttcgctttgttgtgatgggaaatatgttttgcactgagctgcgaattcatcgtaagtatgacttaaagggttctacacaaggccgatcaaccaaaaagcaaaatatacatgagaacacaacactgaaggaccttgacctatcatatgtttttcatgtggataaaccatggcgggacgcactt

SEQ ID NO: 267481 - DNA, 937 bp, Zea mays
tcgtagtttacaacacatgatcttcacaaatccaatgtcctagagaggcccaacgcgatatacaatgatcggactggcaaatatgtgatgtggatgcacatagatgatgctaactacaccaaagctccagttggtgtggccgtcagtgactctccgacaggcccattcacttatctctacagcatgcgtccacatgactgcgagagtggagacatgaccatcttcaaggatgatgatgggaaggcctacctgatatactcttctgaggacaacagcgagctccacattggcccgctaactgacgactaccttgatgtcactgatgtgatgcgaaggcttctcatcgcacagcatcgagaagctcctgcgctcttcaagcatgaaggcacctactatatggtaacgtctggctgcacaggctgggctccaaacactgcgctggctcacgcagcaacatcagtgatgggaccttgggagacgctggggaatccttgtgtgggagggaacgaggtcttcagatcaacaacgttcttctcccagagcacatttgtcttgccggttccagggctgccgggctcattcatcttcatggctgatcggtggaacccatccgatcttagagattcgcggtatgtctggctgcctctgacgatagggggagtccctgatgaagccgcagactatagcttcatgttccctctctggtcccgggtgtccatctactggcacaaacggtggcgtctccctgaggagtggagggattcttggaaatatctgatgttcttttagaataattcaagatgtggtacattgatagataccaaagtatcgacatacgacacgtcggtctaccctgtataggtcagatgtagatgcagggtttgtaaatgtgcagtttttggagtttgccctgaaatcagataaaactttgtggcct

SEQ ID NO: 267482 - DNA, 377 bp, Zea mays
cccacgcgtccgcccacgcgtccgcccacgcgtccgctaatccatttcggcatttccaacgccttcgccctaccagccacgtcgcttcgaggccgatcgaccgagcagctggtggcaatggcggcggcggcggaggtcgtgctgctggacttctgggtgagccccttcgggcagcgctgccggatcgcgctggcggagaagggcgtggcctacgagtaccgcgagcaggacctcctggacaagggcgagctgctcctccgctccaaccccatccacaagaagatccccgtcctgctccacgccggcaggcccgtctgcgagtcgctcgtcatcctccagtacatcgacgaggcctggccggacgtcgcgccgctcct

SEQ ID NO: 267483 - DNA, 629 bp, Zea mays
ttttcctactttgggtcaacgttctcccgtccccccgagcgcagtctcgcgtggttctcccgtcccccgaggcccgagcgtagtctctcccttttgccgtggttctccagtcctccctcatccgctctcttcctttctctcgtggcgagtggtaacgacgtcaggtgctcaggtcttgttcaggcccttcgccggcgaccagcacacagcaaatggatacaggagttcaagctatgttcatcatcagtcttgtgctctggtgtactacaagctttgccttggatgatgctgctgctacaaggattccaaatgtgggcacattacctctgtcaatgaaagaaaatccgcagtgatgcgcaactttgtgaggagtttgcatcacaggccctcttctatttaaatgaaaatgagacccagactgaaatcattgatacactacaccaagcttgttcaaagtttggctcttttaagctggagtgcacgaggttggtggattattatgtccctcttttcttcacaaaaattgcttcattaagccctgaagaattctgtgcatcagcaagtttttgtgggggggtaacattcattcgtctaccaagacatgaagatacttgcacactttgccatga

SEQ ID NO: 267484 - DNA, 682 bp, Zea mays
ggggggggtggtggtgagggggagaggtcatgctggttaaggatgctaacttttagttgctgaaatgcagagcatttgttgtgttataatatgttaatgttattcaaatcaggtattcatcggagataccactagtattaattcaggctgtactgtacattggagtcatagcagtgacccgacttgcgcggcctagcttgtcgaagatgtgctacaacagaagaatggagaaaaacactatgttcttgctctcccttctcagaatagtggcagcttggtccatacttgctgcctacaccatacccttcttcatcatcccaaggaccgtgcatccgctgcttggctggcccctctacttgctcggttctttctcactttcctccattgtgatcaacattttcttcctccacccgatcaccgtcctcacaacatggtttggattcatcggcgcactcgtggtgatggccttcccttggtatctaaatggcgtcgtcagggccttggcagtgtttgcgtacgcgttctgctgcgcgcccttgatctgggcatctctggtcaagacaatgagctccttgcaggtcctgatcgagagggatgcattcaggctcggagaacctaaccagaatgccgagttcacaaagctatactgaggtggacacgacagatacgtatggttggccac

SEQ ID NO: 267485 - DNA, 955 bp, Zea mays
ctcctcagatcaacaaaccgtgtcctgctgctgcctctggaaaccaccgggggttccccccgcccttttcttcccgcaccccagatcctccgtcccaaaacggcagcttccggaggtctcccgtctccctgcatccttccggcgcgacgggtggcccggctcgcggatccggcggtcttcggtcgacggcgaggcggcgctcgccttggatcgggagtggttgctgaggcgcggcgatggtggccgaggcggcagtcaatgcatcaggcccccgtcccggtgctggaggtgcagtaccaccggcgcgcgacgaccaagggggttgacgacgtcgtcgggatgtccgcgcccgcccccgcggaggttggggttggggttggggttgaggtcgaggtcgaggtcgaggtcgccgtggaggtgcctcgcatggggttggagcagcctgatgtcgcaccaagggtatccatggacatgatacagcagtttgtgcccaacatccgttctggtagcttcgccgacattgggcctcggaggtatatggaggacgagcacatccgaatagatgatctttccgcccatctcggctcgatgttggtctgccctctgcctagcgccttctacggggtctttgacggccatggcggcccggacgccgcagcctacatgaagaggcatgcgatgaggttcttgtttgaggaaagcgagttcccacaggcgtcgcaggtggatgaggtgtacctcgagtccgtggagagctgtgtccgcagagccttcctgcaggcggaccttgccctggctgatgatctggacatcagccggtcctctggaaccacggcgctcactgcattagtgtttggaaggcaactggtggtcgcgaacacgggggactgccgcgcggtgttgtgccggaaaggagtggcgatggagatgtcccgcgaccaccgtgcgaaccacg

SEQ ID NO: 267486 - DNA, 1182 bp, Zea mays
cccaccggttcgagcggagccggcagccaagcagaaaaatacgagtatcgcacgcgcaaggcgattccgtccccattctccacccaatagggagctagagctacgagagggggaaacggggggacgggaataggcgtcgtcggccatgtcgtcgtcgtggaactcggtgggtctggcgatcctgtaccaggtgctgggctgggtcgccttcgccgcgtggtccttcagcttctacccgcaggtcctcctcaactacaagcgcaagagtgttgtgggcctgaatttcgattttctggtgttgaacttgacaaagcactcgtcctacctcatatacaatgctgctctcttcttcagcccattcatccagcaacagtatcatgacaaatatggtgataaagagatgattcctgttgctgcaaatgatgttgctttttcactgcatgctgtagcattgacagcctttaccgtttttcaagtattcatatatgagcgaggaacacagaaagtctccaaagtttgcatatcaatttctgctattgtctggatcgcggctcttgtttgcctcattattgcttggccaaaaagtgactggctttggcttattgatgtattcaattcaatacaagttggcatgacagcaatcaagtacatccctcaggccatcatgaacttcaggcggaagagcacaattggttggagcgttggcaatatattacttgatctcacaggaggggtgctgaatttttgtcagatgggtgtgcagtctatagatcaacatactttggtgaatttctatggaaacattgggaaaacccttctttcattggagacggttttctttgatgtcctgttcattatccaacactacgtgttgtaccctgtcaagaaggacgagaatggtaaggcaatcatttctgaaagggtagccccccttatcaggccttcggacaagcctgaagaagataacgtatgatctagctgtagttatattgcgcacattgcattcacgcgctgtttgcacacaggccacacacgcatgcgaattatttgttcaaaaggaattgctagcgcgtcttgattatattgctacttataacttttactacaatatttttatttattttttatttttatgatttttttttattgtttttagttttttcatttttttatttttttttc

SEQ ID NO: 267487 - DNA, 636 bp, Zea mays
cccacgcgtccgcccacgcgtccgcccacgcgtccgcccacgcgtccgcccacgcgtccggttggagcgttggcaatatattacttgatctcacaggaggggtgctgaatttttgtcagatgggtgtgcagtctatagatcaacatactttggtgaatttctatggaaacattgggaaaacccttctttcattggagacggttttctttgatgtcctgttcattatccaacactacgtgttgtaccctgtcaagaaggacgagaatggtaaggcaatcatttctgaaagggtagccccccttatcaggccttcggacaagcctgaagaagataacgtatgatctaccggtagttatattgcgcgcattgcattcacgcgctgtttgcacacaggccacacacgcatgcgaattatttgttcaaaaggaattgctggcgcgtcttgattatattactgcttataacttttactacttggtgccctggtgagagatgtctcatataccaggttgcgggtttcaagtggccccgtttttactatcgtgatttgtgaaggttattagatatcatctcggccaacatttacgatcaatgctcatgtaaatatttggttgcattacatttctatggtttcat

SEQ ID NO: 267488 - DNA, 571 bp, Zea mays
atcggtgctgggcggtagtgccaatttgatgttgtcaatcaccctccgcattgtctcaggtgcggctgaggttgtggattgcctgtcacaactgatggtgttcttgtgggtgctgtattaccttattactgtggagggaggtggagctacagagcaaatcattgatcttttgccagtgtcaaaacaagtaaaggaccgctgtgttgacgtcatggatcatgccatcagtagtgtattgttggccactgccaagattgccatattccagggggggctgacatggctagtgttcaagttcttcaaagtgcattttgtgtacacatcaactgtgcttggattcataagtgcacttgtgccaatacttccattttggctgtcctcgatatttgccacagggcagcttctcatggaagggagatatgttcttgcactggtggtaactgtgatacacctcatgctcatggattatggcacaactaccattctggaggatatacctgggtacaatgggtatctcaccggcctcagcataattggtggcatgacactgtttcccaatgcactggagggt

SEQ ID NO: 267489 - DNA, 868 bp, Zea mays
cagacgcgtggcgagacgcgtgggcggacgcgtgggcggacgcgtgggcggacgcgtggggcggaagctacaatcctaaaaccatctgcttcagccttcagctagccccaagtttagtcggccgatcgatcactgaagtagtaatggcctccgccaacagctggaccctcgagatcgcgtcgccggtggccccgcagcgcctgttccgcgccgccgtgatggactggcacaccctggcgcccaaggtcgcctcccacgtcgtcgccagcgcgcagcccgtggagggcgacggcggcgttggcagcgtcaggcagttcaacttcacctcagtcatgccgttcagcttcatgaaggagcgtctcgagttcctcgacgcggacaagtgcgagtgcaagaacacgctcatcgagggcggcggcatcggcgtcgccatcgaaacggcgacgtcgcacatcaaggtggagcccgcggccggcggcgggagcgtggtgaaggtcgagtccacttacaagctgctgccgggcgtggaggtgaaggacgagatcgccaaggccaaggagtccgtcaccgccatcttcaagggtgccgaggcctacctcgtcgccaaccccgacgcctacaactaaaccagtggactgggatgagcttcatttcccttgcggcttgtttggatatagaagggtattgtgtacggagattgggttttctttccccttctttttttttcatacaaaataaaataaagctgctctaaagcagcgtgcggtttttggactcgagatggtatgagtatatgtacgtgctgtccttgtgtgattatgtataccgtcatggttttctttgtgggaagaaaaaggacattctgttt

SEQ ID NO: 267490 - DNA, 290 bp, Zea mays
cagcagcccgatcttgcatcagctagctaactaagcaagtaagctaagctagccctaggcaacgagccgaccgtcaagctcatcgcagaccacgagccatggcctccaccaacagctggactgttgagatcgcctcgcctgtcgccgcgccgcgcctcttccgcgccgccgtgatggactggcacaccctggcccccaaggtcgcctcccacgtcgtcgccagcgcccaccccgtggagggcgagggcggcgtcggcagcgtcaggcagttcaacttcacctcagccatg

SEQ ID NO: 267491 - DNA, 431 bp, Zea mays
gactagttctagatcgcgagcggccgctcggatctagaacctaaaaccatctgcttcagctagccccaagtttagtcggccgatcattcactgaagtagtaatggcctccgtcaacagctggaccctcgagatcgcgtcgccggtggctccgcagcgcctgttccgcgccgccgtgatggactggcacaccctggcgcccaaggtcgcctcccacgtcgtcgccagcgcgcaccccgtggagggcgacggcggcgttggcagcgtcaggcagttcaacttcacctcaggtaagtgcccactgcccagcgcagaccagcatgccctccctcgctctctctctctcgctctcgcctgatcgatcaaacagctaggcgcacgacgtcgtgcggtcgctcttgcagtcaggccgtgcagcctcatgaaggagcgt

SEQ ID NO: 267492 - DNA, 660 bp, Zea mays
ggaccgtggcatctacaggcatcacaaagcaatcctgtcatgccttctgatgccacaaatgccggttccgaagaaataatttccttccgtggcgtgaacattgtgacaccatcgcaaaagctattggctagccaactgtcttgtgatgtatctcaagggaaaagccttcttgtgactggtccaaatggtagcggaaagagttccatctttagggtgcttcgaggcttgtggcccattgcttctggtagtcttagcaagccatctgaaggaatttttaatgttcctcaacgtccatatacttgtcttggaaccttgagggatcagatcatataccctctctctcacgaggaggcaaagttgaagatgctctcaggcgaaacaagtgacaagtctacagcttccgagctgttggatgatcacctgaggacgattctagagaatgttcgcttgctgtatcttctggagagagaaggttgggatgctaccactaactgggaagatactctatccttgggagagcagcagaagctggggatggctcgtctgttctttcactgtcccaagtatggcatcctcgacgagtgcaccaatgccacaagcgtggacgttgaggagcatctgtacaggctagcaaccaacatgggcataacagtcatcaca

SEQ ID NO: 267493 - DNA, 975 bp, Zea mays
atgccctccagaatagtctgctgcaagtatcatacaagcatctggattccttgaccttttcaatccttaaccagactaagcttttgtggacagcgtttttcacatttcttattttggggcaaaagcaatcttccaggcaagttctagcattggccctcttaattggtgctgccgttcttttaagtgttggggagagcagtagcaaaggttccaagggtggtggctctgactatatcttgctatatgggatcattccggttacagtcgcttctgtgctgtctgggctggcctcttcattatgtcagtgggcatctcaggttaaaaagcatacctcttacatgatgactatagaaatgtcatttattggaagtgtgtgcttgttagcaagtacctatcgctcaccagatggagaagccataaggaaatatggggttttccatgaatggactttctggaccatggtaccggtattaatgaatgccgtgggtggaattcttgttggtcttgtcacaacttacgcaggtggtattagaaagggttttgttatagtctcagctctccttgtaactgcactgctacaattcgtgtatgatgggaagccaccatcactctactgcctgatggcattaccacttgttgcgacaagcatattcatctaccataagtatccatatgtggataagaagaagaaagtctgatgcacataattgtcagagatgggaagtatcatcagcaggatgtgatcctaacctcattttctccacaaggctggaatttgcaccgtcaaggggaccaaatttgactcttgaagagttgctgttcgtcaagctatgtttcaattatctactgatctatatatatagaattaattagtaggacactagcctggaatcagtttcagcaggcaggtgacatgcttgcatataacttctcgaaggacgcttcgtatcaatgatgatgatgaagtgtttcatg

SEQ ID NO: 267494 - DNA, 544 bp, Zea mays
gctctccttgtaactgcactgctacaattcgtgtatgatgggaagccaccatcactctactgcctgatggcattaccacttgttgcgacaagcatattcatctaccagaagtatccatatgtggataagaagaagaaagtctgatgcacataattgtcagagatgggaagtatcatcagcaggatgtaatgctaaccttattttgtccacaaggctggaatttgcaccgtcaagtgggccagatgtgactcttgaagagttgcctgttcgtgaatctattttcaattatctactgatctagatatataattaaattagcagtacactagcctggaatcagtttcagcaggcagttgacatgcttgcatgtaacatctggaaggaggtttcatattaatggtgtttacttgcacagcatgatgaacctactgtgtctgcctttcctggattgttatttatagactgatttgtgaattttgaatatgttatttatgatgacagaaactaagaactaattcaaaattcacaaatcagtctataaata

SEQ ID NO: 267495 - DNA, 668 bp, Zea mays
ttctatgttcccatcgagtcgagacgagaccgtcctccgcccgagtctcgctcgctagctagggtttccaccaatggcggcgcccaccacctcccgccgcggccccggcggcgcgcgcaacatggacgacgagaacctaaccttcgagacctccccgggggtcgaggtcgtcagcagcttcgaccagatgggcatcaaggacgacctcctccgcggcatctacggctacggtttcgagaagccctccgccatccagcagcgcgccgtgctccccatcatcaacggccgcgacgtcatcgcgcaggcccagtccggtaccggcaagacgtccatgatctccctcaccgtctgccagatcgtcgacaccgccgtgcgcgaggtgcaggctttgattctctcgcctactagggagcttgcttcccaaacagagagagttatgctggctattggggaccacctcaacgtccaagtgcacgcttgcattggtggaaagagtatcggtgaggacatcaggaggctcgagaatggggtgcatgtcgcctcgggaactccaggcagagactgtgatatgatggaagaggaggaccttgcgaacaagagccatgaagcaccaaggccctacctgaggttgcttgcacggcacaccacagctatgccttggtttttgt

SEQ ID NO: 267496 - DNA, 710 bp, Zea mays
ctcgtctcctcttcctctccccaacccgtcgagaccatccttcccttcttccctcctcgccagaggggagtctcgctagctagggtttccaccaatggcggcgcccaccacctcccgccgcggccccggcggcgcgcgcaacatggacgatgaaaacctcaccttcgagacctccccgggggtcgaggtcgtcagcagcttcgaccagatgggcatcaaggacgacctcctccgcggcatctacggctacggcttcgaaaagccctccgccatccagcagcgcccccgtcctccccatcatcaacggccgcgacgtcatcgcgcacgcccagtccggcaccggcaagacatccatgatctccctcaccgtctggcagatcgtcgataccgccgtgcgcgaggtgcaggctttgattctctcgcctactagggagcttgcttcccaaacagagagagttatgctggctattggggaccacctcaacgtccaagtgcacgcttgcattggtggaaagaagtattggtgaggacatcaagaggctcgagaatggggtgcatgtcggctctgggactccaggcagagtctgtgatatgatcaagaggaggacgctgccgaccagagccatcaagcttctagttctggatgaagctgatgagatgttgagtagaggctttaacgatcagatttacgatgtctacagatatctccc

SEQ ID NO: 267497 - DNA, 1326 bp, Zea mays
ctctttacacgctcgattccccccgccgtttccacgggggccaggtgcctgcattactgggtccgggcctagcgtcaccgcaaccgaacacgccggcgaccgctgccgcccttctcccagctgcccaggtcttcgtcgggccctttgcctgcggcgtcggcgacgagcgcctgccacaccaggaatcccgttaagtttatttatgctcaccaatttaagggcagaacttacggacctcaagctcttggttactcctgatcttctctaggcgactaggcacaattgccctctggcaaaatgccatcagtttatctttacatccctaacattatcgggtattttaggatcatcataaatttcattgcatttgcggtttgctattccaacaaggctctctttgctatcctgtacttcatcagctttgtccttgatggtgtggatggttggtttgcaaggaagttcaatcaagcatcaacctttggagctgtgttagacatggttacagatagggttagcactgcttgtttgttggcccttctctcccagttttacagacctggtttagtcttcttgatattgcttggattggatattacgagccactggtttcaaatgtacagttctttcttgtcaggtaagactagccacaaggatgtaaaacacacaggcaattggcttctgaaattatattatgggtacaggccattcatggccttctgctgtgtttcttgtgaggttttatatattttcctgtttctctttgctgatgaggagtcaacaagcttgcttagtgtatgcaaaggcatcctgaaccaaagtcccgtcgttatcttggtgtttgtttccactctagttggctgggcagtgaagcaagccaccaacgtcatccagatgaaaactgctgcggacgcatgcgtggtgtatgatctgaagcgcagcaaatgaagcatgaaggcagcttcacggtttagtatcgacatatccaagggaaaactctgcgagggggcgggctacgtcttgcgtgccttgacatctttctgatgatgcggtcatatgtgggaccaggggatgacatgccgtggccaatgcaaacaattgttttgtgaaagcagcggccgttaagttgttgtcagtgttagagtggtcatgcgatcatgatcccttttgcctagggtagctcccctttgtgttagcctgaacgatgttttgcaagccgcatgttccgaactctaggattatttggattacaaaacttacatattccatcctcaaggccagttccctcgaaagttcgatagttacttatagtcgctggaataggccctc

SEQ ID NO: 267498 - DNA, 1111 bp, Zea mays
gtcgtcgtgatggcccggttcgacgtcgacgccgtgctggccgccatcgagcggcagggcggcacgtacctcttgtgcgccccgccggcgatgatcgcgctcgccaagcacagcaggggcggcaggtacgacctcagctcgctcagatgcatcggctctggcgccgcgccgctcggcaaggacgtcatggtggctatggctgacaggttccccggtgtcgacattatccagggttatggtatgactgaaacctgcgggataatatccctggagtacgtacagaagggttgtgcccgtcagtttggttcgactggagcacttgtcacaggagttgaagcaaagatcgttaatgcaaagacaatgaagcatcttcctccgagccaactaggagaaatctgtgttcgaggaccgaacataatggaaggctatttcaacaatgtgcaagcgactgagtctacaatcaagaatggatggttgcataccggtgatcttggatacttcgatgaaagaggccagcttcatgttgtcgatagacttaaagaactgattaagtacaaaggcttccagattgctcctgctgagcttgaaggactgcttttgtctcatccagaaatccttgatgccgctgttatcccgtatcctgatgctgaagcgggggaagttcctatcgcctacgttgtactatcaccgaagagttcactggccgaagctgatgtccagaaatttatcgagaaacaggtcgcgcactacaagaggctgaggaaggtaacgttcgtgggcagcgtaccgaaatctgctgcggggaagattttgaggagagacctcatcgcccaagtcagactgtccaagctgtagcagatttaatctcgatttcactgcagcccttgtcgtctgggttctgctggacacagaagtgcagaatctctgctgagcactgtacaagatttgtctatcaagtcactgtcaggaaccacacatttcagtctagacatgccagacactgatttcttttttttttgttaaggaataaagcattctggcctctagtatccacggatgaatgatgtatcctatattgcttggattcttcaagaaagttaaagtaatatat

SEQ ID NO: 267499 - DNA, 1290 bp, Zea mays
atacatttttaactagtgcagctgtgtcagaacaaggtagcaaaatgaacagccacctaagcttcgaggagggctggaaagtcctggaacaggggattgtaaaatgctcgaagattttggagtgcaccagtacaaggcctaccgtgaacgaatacatgaactactatgattgtgcttacaggatggctgtgcagaaacaacattactgtccagaaatgtacaatggtttcaagatgatgcttgcagaatgtgtccgcacaatggttctgccccatctcatgcacaagcaaaatgacagctttttcagagagcttgtgaaaatgtggtcaaactattgcatcatgattagatgtgtaattggcttcttcagctatttggaccgctgctatgtgaagcagtacaaactaccatcgcttagcaacactgctgctacctctttctttgatccagtcttttcctacttcaatgatgaagcaagaacggctcttcttactatgatccaacaagaacgtgatgggatcaggatggattcgagccttcgggatgttatgcatggcatatgttgttctgaagcaaaatccataatgcaaaatgcttttcttgatgaaatatatggctactactcggtgagaagttccgaatggattaagcactactccttgccagattaccttgctaaggttgaggaaagtatggaaatggaaaccaagaggctggcttactatctggaaatttcaagtggggatagctacccgctctgtttgcaggctgttaatgctcctttgatggaaacatatgtcagctatgtgacagagaaacaaatcggtggtcagctgatgcttgaaacttacaagattgttgaggaggaactgctcggcagatgcagtagcttgacacttggttaaccgggcagcgccgcagcagttccttggactgagtggagtgggaaggcaaccttgcctaacatccatccatgacccagcttacctacaggagagctctagaacatggcgtgcctgaagtatgacttttgctgtagcttgtttttggtactgctcaaagctacccccagcttactcctagcgtagacttgttacaagcagatctagctgccgatacgaatgcacgattcagttgaggtttatgtggatgacatttgattcccaggatctagggctgtgtaactcaagcgtcatgacccttttgcctcatgttgcgtgttatttggcagaatttagaaatgtacatgtggtttctgttactacctacctaagtactggcacaatttag

SEQ ID NO: 267500 - DNA, 409 bp, Zea mays
tccggtcgaccacgcgtccggcctatgttgttctgaagcgtcatccatattgcactacgcttttcttgatgaaatatctgggtcctactcggggagaacttccgactggattaggctctactccttgccagattaccttgctatggtcaatatatgtataatattgtaggactcaatgccattcttctacagcctgtagacactgctgcttatggtgtcttacaggttgacgaaagcatggaaatggagaccacgaggctggcttactatctggaaatttcaagtggggatagctacccgctctgtttgcaggctgttaatgctcctttgatggaaacatatgtcagctatgtgacatagaaacagatccccggtcagctgatgcttgaaacttacaagattgtagaag

SEQ ID NO: 267501 - DNA, 421 bp, Zea mays
gaagatgtttccctctgacgtcgagttactatgaacaattttgatcacttatgtgcttctaccggtagagtgaagaccttaatgacaacataccgttggatagcagagaagtcaatcccatttttgaagaaggatccaaatatgggcgcaaaaaagttacaagaggagctagaggataaatataatgtgaagctaggatactcaacagtgtgggctggtagacagaaggcggtggaacaaatatttggaacatgggaagaaagttttgcagatttgtataggttcaaggcagagattgacgcaaaaatgcctggaagtgttgtcgatttagaggtgcaggaggaagaggatggtgtgtattttcgcagattcttttgttgtttcaaaccaaacattgatggttttctgaacggatgcagac

SEQ ID NO: 267502 - DNA, 427 bp, Zea mays
cccacgcgtccgcccacgcgtccggtttgagctgttgtgcctgcacccaatccacatatagcactacaaaatggtcactgggaaagtagcagtcgtcctcctagcctgctggacgctagttctctaccaaccagtgcttggccgtttaccgtgtaacaatgatcagaagagagagatcctgcgcgagtgtgatccactgaactcaacacctgactatactccatcccggcacggtgcgtgctgcgtggcggtgagaaaggtgccaggaaccaacatgctttgcattgcctccatactctcacttgctgacaaggccaaatacagtgtaaggaagattctaggctttagagatgcatgcgccccttcacatccacaccatcaggtagttaatacttcgtctatcacttgacagtccttagactacagt

SEQ ID NO: 267503 - DNA, 720 bp, Zea mays
tttgatgcgtgggtgcagctacacttgacggccccagattcactctgcatgcttcacaagttcacatcaatttgcccactttgagtgaatatgataaacatgtcatttcaacttggggttcatgtaacagtgttgacattatatcactttcccatacccgctctgctgaagatgtcagggagctcagggcctttttacaagcacacgcccttcccgacacacaaatatacgcgaagattgaaaattctgagggtttggatcattttgatgacattctcaacgcggcagatggtatcattatttctcgaggagacctgggtattgaccttcctccagaaaacgttttcatgttccaaaagacagctattcataaatgcaatttggagggtaaacctgtgatcatcactagagttgtggacagcatgattgacaatctacgccctacccgtgcagaggcaactgatgttgcaatggctgtcctagatggcactgatggcattttgcttggtgcggagacacttcgagggctttatccttgtgatgcaagtagtactgcggggagaatatgtgcagaagcttagactgtgtataatcaagcgcttcaattgaagaaagttatgtggcatgtaaggtacccaatgccccaccaggaatctggggcatcaacaacggttggttctgtaatcaaagtgaaaactgctgccattggtgggttcacat

SEQ ID NO: 267504 - DNA, 837 bp, Zea mays
atcaaacaaaacagcagggttatattgcctatcatctttcctgcactggagagaaatgccagtgggcactggaaccaagctgtgcaaagcctcactctaaacgtccgaaaactgttctctgacaatgaccctggactattcacggagagtctgcggaaatacgaggaagagaaagcgagagagaaggaggttaagtcgaagcaagaggccacatggagacgccttgaagagatggcatcagcgaaagcgacaagcggcgcggcagttctcgtctctcgacccttatcccggcagtcttcggctgtgtagcgaattttcatgtggtggtcgtgagaacattgtacaggattgagttgtatatacgaggtatattaaggtgggcaaattgacaaatgatatcgtcggagaagccagccagatgggttacagggctaggcacacatcattttcttggtcccgaatctgggcttctgctaagatctgcagctggtcgtggtatcatcgttatgtttatccttgtcaggagttggctatgattcaattgttttcacctgctggtcctgcagtcttgccatgcatgggtatctgtttctggagacaaaaaatcggtggaagtcgatagaacttagcctggaaacgagtcgtgctgttgttcttggagtctggaattgttgcgtttctttctagtacaattcatgtgttgtcatcattagaagttaaatcctttgtgctcatcatcatcatacgtatgtggatccaattataaatgcctgataaatggttaagggttcacgatgacgaggaaaaataaaaattaaaaaaaacattctaatatgt

SEQ ID NO: 267505 - DNA, 873 bp, Zea mays
caagcgggcatacaaagagcgcgtgcgcactgcgcagtgcttggaataggtgggtcgaacttcgaaggggttcgaggacttcagctatggcatctgtgggacgtgcaggacgaggagggaaaggagatggagggaagggagaagggtcgctggctcgcagggcgtggaggcagtacctgctccagctccagcaacatcctctccgcacaaagatgatcacggcggggtgcctcgccggcgtcagtgactccgtggcgcagaagctctctgggttccagaagattgagaaacgcagactcctgctcaagatgctctttggttttgcgtatggtggcccatttggacatttcttgcacaaaattttggattacatcttccaagggaagaaggataccaaaaccatagcaaagaaggtgttgctggagcaagtgacatcttctccctggaataacatattgttcttgttctattatggatatgttgttgagaggaggcctttgaaggaggtgacgaccagggtgaagaaacaatacccttctgtgcaactcagcgcttggatgttttggccgatagttagttggataaaccaccagtacatgcctttacaattccgagtgatcttccacagctttgtcgcatgttgttgggggattttcctgaaccttcgtgcaagggccatgtctctgaagcaggcctagatggtttagaaggaacgtatagcatcgtagctcctgcccggtgctaactaaagcagccgaagaaggaggacgctggatgctgtatcctgtactgttacaaaaaccgttgtttatttcctggtagtagtcggtttatttgattgtcaacgcatgcgaagacagattatgcttttgt

SEQ ID NO: 267506 - DNA, 283 bp, Zea mays
atttcgatcgagatgtttattgtggtgcctgcgccgtcgggatcggagaagctgcgccggcgggggcttgtgcagacccgcaaaactatgtcagctgggacgggatacatgcccctgaagctgcaaatagtaggatagcgtatgctgtgatcagcggctcctattcgtacccacctttcgatctttcaaagctatgtagcccttaggcatcatcagtcgtgaaagggagtgcacgcctccccatacaccgcatttctctgaaacaagcagccacatttctttc

SEQ ID NO: 267507 - DNA, 762 bp, Zea mays
ggacgtggagcagccgcaaagaaccctcctagacgacagtttgaaacaactacagcggagcgtactgaagaaggctgattttaggaatgttagattcctctccaactttcttacggaagctggaattatcatcaagagaagccagacccgtataagtgcaaaagctcagcgtaagattgcaagagagatcaaaaccgcacgtgcgtttgggttaatgccttttacaacaatgggtagaagaccattcatttttggcagaagtgcggaggagcattattgggatgatggatatttcggctttgtgaagcagaaggatggtgagcctgttgagaatgaggacgctgagccaaatgtggaggctgtgtaaacattctggagcatccttttgcaagcgctccgttcggtttcttctggtgccttcatgacaagtcacacaatgctcgttttgcgtcttcagatcatagcgtagctcagcttgaataaaactgtaacatcacgcctgttttgtgaaaactcgtgccttgctcaattgtgccactttagcagacatccccagctcacctcatcctggctgcagatcatatcatatgcagatatgaaatggaacgtgggatcacagttttagtggacgctcaatcttttttgaggtagcagctctgatttcagtttctgttggataatgattgtttggctgttcagcgagaaaaatattgtatgcacgtacaaaacgttacttttcttagcaacgaaaatattttcttc

SEQ ID NO: 267508 - DNA, 441 bp, Zea mays
ctctgcaaacgatttccactttttactcacgccgtcagctgatccttttcgccgtagtatccccgagcaaaagagaaaacccttttttttgtgcgctgtgctgtttcgccatctctgttcgtcccaccgaggcaccgactcaatccccattcttggcctctggcttcacaaaacaagaccggttcccgttccctagatctctgcgtagaggcggcgaggcacccgaatccggcaaaaaagggttcgcggtttgccttggttgggaggagcgcaggagcccggcgtcaaaacccaatcttggcgcccgggctgccgtgcgccatcgtcttctcccccctgtggtgtttagggagaggagaaggccggtggagatggtgccgcgggaagggtacgtcagcgacgagacgatgggcaccttctcggccatcgtgctctactggc

SEQ ID NO: 267509 - DNA, 794 bp, Zea mays
cccacgcgtccgcaacagctatcgtcaaatctacgacattcccagcaatgactatgctagtaattatacagaggaaacatcaatacaacttccagaaataggcaccagcaatactattgttcaaggtcatgttgatgtcaatgaacaccgatttgatggaccaagaacaatcgaagaaatcgttcctgttccattggatgagatacagatccatgaggatgtcccagggcaaccgggagcagccgatgagatagatgaggttccattttctgacgctccgatcattggtgctccattcagactgatctcatttgttgctaggtatgtcagcggcgctgatttggtcaaccaaaaataactgtctgcataccaggaattcaggacttttatgtcaggagttcctttttgatcccactgataattacgtcagtatcttgagataaagatggatagattggattcagaatagatatggagctgtattcattcgtgtcagtgctcacgtccactgccaattcttctccttcccctgtacttttttcaggcgccggagaaattcttgttccttggcttatactacctgttcttgaatatttgtcatccgctacttcatttttaaattaaaacccgataaataaaaaagaacggagaagtacaatataagaagctatgtaccatgggcctctttacgggtctaaccatgcgaaaaagttgttctggaaattctattattaatgactgaattttggtgtgctgacactataacctgtgacagacacctatatgcttgattt

SEQ ID NO: 267510 - DNA, 973 bp, Zea mays
ccgcgttcaagcagccgcctttcgccatcagcaacgccgtggccagttcgactgtgggttcctatggcggaacaagggatgcggtgaggccaaggacggcacaactgacgatcttctacgccggttccgtcaatgtgttcaacaacgtctcagctgagaaggctcaggagctcatgttcctagccagcagaggaagctcagcccccgtggcctgtaagccagaggctcctcctactctcgctccagcgaaggtcacagcgcctgaggttcttctgcctgcgaagcagatgctgtttcaaaaaccacagcatctctcgccgcctccatccagtgtccctggcatcttgcagtctgcagctctccccaggagcgcctcatctagctctaaccttgactccccagctccaaaatcttcggtcccgttagctgttcctcctgtaagccaggctccgccagcaacacttcgccactacaactgcagcagcaataatgcctagagctgtccctcaagctaggaaggcgtcccttgctcgattcttggagaaaaggaaggaaagggtgacaactgccgcgccttacccatcagccaagagcccactggagagcagcgacacgttcggcagcgggagcgccagcgccaacgccaacgacaagtcctcgtgcacagacattgccctctccagcaaccatgaagagtccctgtgtttaggggggcagcccaggagcatcatcagcttcagcgaagagtcccccagcaccaagctacagatctgatcgtgccgtgcccagtgttcatagatttgtccaggctgaccgatgcagaaaaccataagaatacttttttccactcaagaggaagagattactatcgatgccgttgttgtttaccgtgatgctgttttgccgtgttaggttactgtactgctggtacagatggtagtgccccccacccacctaactaacatgagagctg

SEQ ID NO: 267511 - DNA, 774 bp, Zea mays
gagagctcagcctgcaaccattgccgctacaactgcagcagcaataatgcctagagctgtccctcaagctagaaaggcgtcccttgctcgattcttggagaaaagaaaggaaagggtgagtactgctgcaccttacccagcagccaagagcccgatggagagcagtgacacgtttggcagtgggagcgccaacgacaagtcatcatgcacagacattgccctctcaagcaaccatgaggagtccctatgtttagggcagcccaggaacatcagcttcatccaagagtcccccagtacaaaactacagatctgatctgaatatctgatcatgcccaatgttcatagatttgtccaggctgactgatgcaaggaccatacaatacttttgcattcaggcaaggactcgagaggaagagattacgtatgttatcggtgccgctagctgttgtttatgatgatgttttgttgtgctagtttactgtgatgctggtggtgcccccaactaactaacaagagagctgtcacttgcagactcttgattttttttttgtcctagcgccatttctttagcggtatcaagtcaatttatataggcttacaaattctgcgccttttgtatggccaaagtgtaatattcttgttcttgtattatgaacctccatgctgcagaatgcaagagcaaatcttattgtcgatggtgttctcattgccagcatgtgtacacagtagcggttcatgttgttttgagctgttctgttttaataatatctcaaa

SEQ ID NO: 267512 - DNA, 2732 bp, Zea mays
tttcctgttcacgcgtccgcccacgcgtccgcgacttcccacatcccctgcggccccgccccccgactcttctcgtcgcggcgcgcccaatcggctcggtggcaggctagtgcaccggctcggctcgggtccggttctaccgccaacgcgggccgcggcgctcccggatctcggtctagtcagagagttagcagacaaagatggcgacttatgagcccaagaacattctcataactggtgctgctggtttcattgcatcgcatgtcgccaaccgtctggtcaggaactatccccaatacaagatcgttgtccttgacaagattgactactgctccaacctaaagaacctcaatccttcacggtcttcaccaaatttcaaatttgtcaagggtgatattgcaagtgctgacctggtgaattaccttctgatcaccgagtcaattgacaccatcatgcactttgctgctcagacgcatgttgataattcttttggcaattcatttgagttcacaaaaaacaatatatatggcacccatgttcttcttgaggcttgcaaggttactggtcagatcaggaggtttattcatgtcagtaccgacgaggtatatggtgaaactgatgaagatgctgtggttggtaaccatgaggcctcacagctgcttccaacaagatccatattcagctacaaaggctgtggctgaaatgcttgtgatggcatacggaaggtcttatggtcttcctgtgattaccactcgtggcaacaatgtgtatgggccaaatcaatttcctgagaaactcattcccaaattcattctttgggccatgcatggtctgcctcttccaattcatggagatggctccaacgtcaggagctacctgtattgtgaggatgtggctgaagcttttgaggttgttcttcacaaaggggaggttggacatgtgtataatattggtactgtgaaggagaggagggtgattgatgtggccaaagacatttgcaggctctttggcttggatactgagaaagtaatcaggtttgttgagaacaggcccttcaatgaccagaggtacttcttggatgatcagaagcttaagagactgggatgggcagagcgcacaccatgggaagagggcttgaagaagacaatcgagtggtacaccaccaatcctgattactggggagatgtcactggtgcgctgctccctcacccaaggatgttgatgactcctggagttgaaaggcataactgggctgaggatatcaaatctctgacttcttcaccagctgaagctagcacaacagctcctgcaaccagtgccaaaaggaccactgctgcccctcaaaagcctttgtacaagttcttaatctatggcaggactggatggattggtggcctccttgggaagatttgtgacaagcaagggataccatatgaatatgggaaaggacgcttggaggagcgctctcagctgttggaggacattagaaatgtgaagccaactcatgttttcaatgctgccggagtcactgggagaccaaatgttgattggtgtgagacccataaacaggacaccatccgcaccaatgttgtaggcactttgaatcttgctgatgtctgtcgcgagcagggtctgctaatgattaattatgctacaggctgtatatttgagtatgatgctaagcaccctgaagggtctggtattggctttaaagaggaagacacgcccaactttattggttccttttattccaaaacaaaagcaatggtggaagagctattgaaggagtatgataatgtctgtactcttagggtcaggatgcctatatcatcagatctaagcaaccctcgtaacttcatcacaaagatagctcgttacgacaaggtggtgaacattcccaacagcatgacaatcttggatgagcttctgcctatctccattgagatggcgaaacgggactgcaggggcatatggaacttcaccaaccctggcgctgtaagccacaacgagattctagagatgtacaagaaatacatcaatcctgatttcaagtggaccaacttcacactcgaagagcaggccaaggtgatagtcgcgcctagaagcaacaacgagatggacacgtcgaaactgaaggccgagttccctcagctgctgtccatcaaggattctttgatcaagtacgtctttgagcccaacaggaaggttcctgttaattgaggatttacgttgcgtggatgcggaggttatttgtgttggttattggactctaaattagctaatgttgcaccgtggtgcgtactagttgtgttcgattcttttgggacaatagcaagcatacctctttctggtcgtctattatacacgcaatctacaaacaggtagatatttagatgttcttttagtggctgatacgaaggcttggcctggtgaagtggtgagagctttcttgctgagccactaggtcatgctttcgaagcagtctctccgtgtttatggtatagtggctgatatgctgagacacggttatcgatgaacactacgaattgtcttaatatattatatatattaactcccaagagcagttgtacatggtcttgtaaatttttatcccttcgttgcagttggctccaattttccggttcttgttttttatatgccattttcctgttcttgttgtttctatgccaaacgaagcatcaaattttcagttggttttgtgttgctcgtcc

SEQ ID NO: 267513 - DNA, 474 bp, Zea mays
tcggcaggggcatatggaacttcaccaaccctggcgttgtcagccacaatgagattctggagatgtacaagaaatacatcaatcctgattttaagtggaccagcttcacactcgaagagcaatccaaggtcatagtcgcacctagaagcaacaatgagatggatgcgtcgaaattgaaggccgagttctctcaactgatgtccatcaaggattctttgatcaaatatgtctttgagcctaacaggaaggttccagctaattgaggatttaggataagaagggcatcgaggtattagttactattaaacattaaattagctataatgtttgtcaatttttttatgcatcgtattttaacagaacacgtagatgtcctttgttctatatagtggatgatgtgttgagatgtggttatggacaacacaataagtcgttctgttgtgcattttaattatttgttgcaatgtgctttcc

SEQ ID NO: 267514 - DNA, 519 bp, Zea mays
cccggtccatccatccaactgcaccgcacctaccttttcaatccaatcctgccgcattgcataattcgcatcgaagatcgatgtgaatccgtggaagggagggcggaggagaaggaagaagaggggtcgaggccgaatccgccggtgagaaggggagcgatggcgaggctggcggtggccgcgagggcgttctccgctgcggcctccggcggcggcgtgtccttggtgcagggggcgtcccgggggatcggcctcgagttcgtgcggcagctgctgcgcagaagcgatggaggccgcgtcgtcgctacgtgccgcacgccgggttccgcggccgagctccagaagctcagggaggagcacgcgcccgggcgcctcaccgtgctgccgctcgacgtcaccgacgagagcaccatagaggcagctgcggcctcaatcacggagacccacggttctcttgaccttctgatcaactccgccggcatcctctcgatcccgaacgtgatacagccagagactacg

SEQ ID NO: 267515 - DNA, 1210 bp, Zea mays
ctgaaagaactgcgagtggcactgtgaatacttcacaggcggatcggttgacccaaacaaaattgcagaatggcaggtccagcagcttgtgccttcaaaacaattccgatggcattcaatggcccagagaccacgaaggaggactggaaggctctttgaggccttgctctcgcaatacaagctccgagggtgatgagcaacaaaagcggcctggtgatgtcaagttgtttggacagattctcagccatcagtcaaccctgcagagttctggcttgtcttgcaatggtaacaagagcaagcctccctcaccaaagatcgacacatctgtgagatccatgaacaatccaatggaccgtgtggtttgttcttccaggcctggcaccactccacatctgggtctggaggaaagattggcgaggtgctatggtcatctggatggtagcacggcacagcccgagccactgctcgtgatggcaaagcgccagcggtccttggccggcgtacagttttactcggctaagaacggcacgcttggtgtgttaccagattaccaacaaccttcgacgcagccacagcaatcagatcccaagcgtgtggaaaggttgtctgatccgcagaagaggaacgtgctggaactcatctcgggtttccagcagcccggcagagtcgcccgtttcgggggtgctggcatcctcgtaagcggcaacgtctcggaccctgtggctgctgctctcaaggctcagtatggtcccggttctaagattatgggcagcgacgtggatccttggacggacataggaagcaggtagcgccgtagcagctctactgcttctgttgctccttgtaccatatatttagttttggtgtaacttgaatgaaatcatcagaatatgagatgtggggggtggggagtgaatggctttcctgcccatactatctgtaggcttttggccagtagcagtcgggtttcgctgtttactggcattaacatttttactctttcttctgcagctccatacccttttggtatagcttgacatgccagcagtggcacagtgccgtaggttccctagaggtgaactagatgtttgtcagcatggtttgattttgccagcctatgcagaaaacctcacttggtctttgtaatgtggtaatgccctgtatcagtatcctagtctgatggagttttggttgagacagttctcaaaaa

SEQ ID NO: 267516 - DNA, 489 bp, Zea mays
tccgggacggcaccggcagcgctccacaggcccaacctgccgtccacggcgcgaaagaagagccgcgaacccgggagtcctgcctgtcctcgtcctcctcccccttgccatccgccgcccatggcgtccgcgtccgcccccgaagtggtggtggtcttcgacttcgaccggaccatcatcgactgggacagcgacgactgggtcatcaccaagctcggcgccgccgacgccttccagcgcctgcgcccaaccatgcgctggaacccgctcatggacaggatgatggcggagctccacgccagggggaagacgcccgaggacatccgcgactgcctcaggagcgcgccgctcgacacgcacgtcgtttccgcagtgaagacggcggcggcgctggggtgtgacttgaaggtggtgagcgacgccaacaccttcttcatcgagaccgtcctggcgcaccacggcgtgctcggctgcttcccgagatcgtca

SEQ ID NO: 267517 - DNA, 466 bp, Zea mays
ggaatctataccagcaaagtaggaaccttgtttttgtctgcgtcctacttttgctgctgcacatatgctggcactatgtttggccttgctggctgctgcccatgctgagcaaagatcagtgacctaatgaggaagttgcagcacaagccaaagccctcaggcagagttttataaagcaacacgaagcaaggaccgcattgcaagatttcagattagagaactaactgtagagcctggaacgtggtttagcttaaccatgtatacataacgttcaaacatcgttctgacttctacaaaaagttaagaggatctgaaattctaaatcttgcctacgcctttttagttagattggaagcaaagatagcttccatccatgaccacagaaaaataactattcttttcctggtgtaatttctagaagttttgagataaaataaataaaatttttttttattatttatttaat

SEQ ID NO: 267518 - DNA, 359 bp, Zea mays
ttcttataggaagtattcaatgcatgtttatttgccatcctatcataacaattttgcgttacaaatggaagtggtggtgtagtaataaagaattgcacagtgataattaggtcccctccatgacttctaatatctaaaacatgggattttgtagctcctagttcatgactacattcatccatatgcttcttcccaagtactagccaatacaaaaacgctcaggtgaggctgtcctctttccgagtactagccatatgcttctttgtagttgtactttctttgtaaggtttatgaactctcttgtaccccctcctcctgcagcaatttctgctgctcctcgtcgttctcttccttcggct

SEQ ID NO: 267519 - DNA, 476 bp, Zea mays
gacctaccaaggaagaaacgccgaagattagaggcccagcgagagatgctggaagatgaggatgaagatgccgaggaagcaacggaaagtgatagagggaagacactgaagaaaggccagtctctagtggatgctgcttaccgaaaggcaaagtcattgaaggcggctagcaaacggggtcctggtgcaagcaaaggaaagaaagagaagaatgcaagacaatattctgagaagactcctaacaggcatgaggagatgcgtgagctgttccagaatgatatgagtgaatggaaacagggacgctcctcgaagaaaaacaacaatttcgcgcacaaaacaccaaacgcttttaacagcacagcaagatataagcgccgcaaacagaatactcggccatccccggatttatttacattctcgtctcagttttgactgaccgaccttgacgaaattctctgggatccagatgtttccag

SEQ ID NO: 267520 - DNA, 539 bp, Zea mays
atcaaatgtcccattacaggcaaaacgttcatccaagaaacccgcagcacgggcaaaggttccttttgagaaaggctatagtcaaatggattggctaaaactgacacaaacacatcctgatctagctgggcttaaggggcagtcaaaccgaagttaatttctttggaagaggttaagcagcacaaagcaggagattgtatttggacagttctcaaaggccgcgtgtacaacattgctccatacatgaaatttcatcctggaggtgttgatatgcttatgaaagccgctgggaaagactgcactgctttgttcagtatccttctattattatttctgcactgtgatacattatcttgctgcttgtgggctcatactggaacaccattcttattattatgcaagctggtgtggcctaaaggcatgatatacaaacagcgatcactatgatgcctttgcagcttttgctcaatctcttcgtgattgttgattgtgcatctgcttataattcttgattgctccttgactagactattagataa

SEQ ID NO: 267521 - DNA, 1073 bp, Zea mays
cccacgcgtccgcccacgcgtccgctcgtacatccacgacctgatgctcaccatagtgaagttcctgagcgacaacggcggtgccttcaccgtcaacatctacccgttcataagcctctacatcgacccgaacttccccgtggactacgccttcttcgagggggcctcgtcgccgattgtggacggctccttcaccgtccgcaacatgttcgacgcgaaccacgacacgctgatatgggcgctgaagaagaacgggttcgggaacctgcccgtgatcgtcggcgagatcgggtggccgacggacggcgaccggaacgccaacgcccagatggcgcagcgcttcaaccagggcttcatgacccacatcgcctccgggcggggcacgccgatgcggcccggacccgtcgacgcctacctgttcagcctgatcgacgaggacgacaagagcatccagccagggaacttcgagcggcactggggcatcttcacctacgacggcctgcccaagtaccagctgaacctggggtcgtcgaacgcgggcggcggtggcctcgtgagagccaagggcgtgaagtacctcgagaggaagtggtgcgtgctgaagccttctgtgaacctcaacgacccgaagctggccgacaacgtgggatacgcgtgctccatggcggactgcaccagccttggctacaagacgtcgtgcgggatgctggacatccgcggcaacgtctcgtacgcgttcaacaactacttccagaagaacgaccaggacgacgtggcctgcgggttccagggcctcgcgacgaccacgggccaggaccccagcaccgggacctgcaggttcggggtcatgatcgaggtcgactccgccttctcgtggaggctgcaggggcttgggagcaacctcctcctgttcctcctgcttggggttctccagctatccctgtccttctcttagacgcagaggttctgcgagggatgggtggggtggcagtgagcgcataaacagtctgacaacagcttgaggatattagatgtgtgttgtcagtgccattcatttagaaactctttcctct

SEQ ID NO: 267522 - DNA, 703 bp, Zea mays
taccggttcgattccgggtcgacccactcctccgaaaaccataacaatgtgcgtgatgtgcttaaaaaagaggcattgcaacttgcaagggaaaatttagaaaaggagcagcggattttggaacttaggaatcagtgcacaataattagaaccacggaactggctgctgctcaagaccgcctaactgatttggagaggcaaaaggatgatattatgaggtcctattcccctgccgcactgctcaacaagctccaaacatcaatggcaaagttggatgaggagtccgaggagctgcaccagaagttcctggagaaggacatcgaccttccaacctttgtgcagaagtacaagaagctccgcacggcttaccacaagcaggcgttgctccatctcgccggccagacatcactccgctgacatccggccaggcgtcatggcaactttgttgtattcctgctcgcctgttcttgttctacactatgcttggccctgttttacgagtgcagcctcttgtaaggctttgccgaacatcagcggatattgttgcatgtatagttttatgtcttgcaaaaacgtcttatgtactctgtcctggtgtagtggtgtttacgtatctagtgtccaagttgggattcatttgtggtaactaaacactttgcctatttcgttcaattcgatgataataaagcttttgtacgtttgt

SEQ ID NO: 267523 - DNA, 2321 bp, Zea mays
agccttcttttagaaaggacgcttgtcagaaataaccacatgctcgaccaatgcctgaataggtcacttagccggatggcccaaagcactatcgaacccaatgggatcaatagtatcgctagagtggaccccacacatgatctgaatctggacacatttactgtccccatctctattcctcaaatagacaatccttcaattgtctcccccatgggttcgtgcacagctgacccaaggcgcagcattgtcaacaatcctgctgtaattccaagattcaatgggtcgtcaaccgtgaattcgtacgccagtcttagtgctgtgacacacagcattggaacttcaatcccaaagctgaaaaatgtggataacttagataaacgctatcctgggtgtccacttgattcgttttctgtgtcccactcacgacatcagcggccgcgtagcagtttcaagtaacctggagcaaaagaactcccagaagttggacagattcagatcaacagtcccatggcaagggtatgaagaacttcaatttgaatgagacactgtcagattgtcaggaagatggtcttgtagaacaagatgggagatgtgcttccagttttcagcatgataaagacggggggtcagtactcgggatctcttggctcaaaaataaacctatgtctgctgatccaacagctgtggagaaggccagggaaggatttttggccattcgtttggaactacaatggagctgaaaaatgctaaagaccagaacgaaccagctgtgactattcggaatttgtcagactctgcttcgacatctcttggctgtggaattaagaaggatgggccttcagaagacattgccactggaactttgctggtttgtaataaagcccaagaggatgctacatgtttacctctttcatgccagaaacatgtgcctaaagatggacaagatgctgatggagtcatcaagataagtggtgcctccatcaggaatttcatcgatctcaatgatgctgtgccaaacgatgacaattctgaggaatcagtagtgtcacatgaatgccaggcggaaccttcacggaacaaccatcctaaacgagcatttgtgattgatctagaggtgccggcttgtgaagaggatgctgcttgggattttgatcaagaatgtgcacagcctaaacctgatgcacaccaggaagttgacggcagatctgatacatctgctctagctgcagctgagaacatcgtagcgttgtcaaggattattccaacagctctagaggcatctgatgatatgttgcagtggtttgcagatctcgctgtattgaacatcaacgaccttgctgagcaagctgaactccaagcttgtaccaatgattccagtaacgacgagtcggattcattcgagtccttgacactgaagctggaagagaccaagatcgacgagttctggagcaggccactggaacctgaaaccacaaccgatgaacagacagtttcagctgctcaccttctcaccaagcccagaaggggccagcaaaggagacggcggcagaagcgagatttccagagagatgtcttgcctggcctttcgtcgctttcccggcctgagatcacagaggacgtccagttgctcgaggggttagtccaggcttccgggggatcctgggagtcgagcttgactaggcgaggacgttgtggtgggcgtgctagaggcaggaaacctcggaaaactgtagtaaccgtaattgtacaggaggaggaagaggaggaggtagaggttagcccaccgccaaaacctgctggcactggggaattggaagccgatggcaggggtatgatcgggtggggcagaacaacaaggcggtgtcgcagagcgagatgtccgtcaggtaacaacttggctactgcgtcttgagaaagggtattgccagcaagcattggacctgattaggtacttggtggttcacaattgttatagactccgatggatggactggtataaggtgatcacagtcatgagtgtacatactctgtcggcgtattggcctcaccccaactttcatgcttttgggttgaaacatggtttacgttcttataataagttccgtaaattagctggtaagacatttctgcgacagcatgtattaagctgttccaggttatgaggtccggtataaattcattgtgagaaaaaaaactgcaatgcctgtaaacccccttgatctctgaagattagctcatcgcatgcccaccaaagggtgtgaaagacttcgggtctgtattcttttttagcttataaaccccctgcctaattggctcgtccc

SEQ ID NO: 267524 - DNA, 955 bp, Zea mays
ataggcgaaagggaggagagagaggggcagggcagagcatgagagagaaatccgatagtgcacccatgcccactccctaccggacaccactagccaagctaaagcaggacagaaggaggtccgattcggcggcagttgccggaataaagaggatccggacagactacaaacgctcaaggacacggccactgaactacacatagatgagcttgtggagttccacaaggatatttcttacagggacctggtacaatttcttgggggtgccattgctgggctccattcgatgacagatgaacatttcggaatattaagtgttgttgagtatatggcagctggagctattccaattgcacataaatcggcaggaccgatgatggacatcgtgctagatgaggatgggcatcaaacaggatttctagcctccgagaaggaggaattcactgaagcgattatcaaggtcttgaggatgccagagtcggggaggcaagaaatggcagctgcggctaggaaacgtgcacaaagattttcagatcagagattccaccaagatttcactgagaccgtccgccctattttgtcagcaagggaaggctgactgacaagctgcagtttccacctaacaatctgaattctctgtcaagtttcacacggtacagtgaaagacttgcaaggggcactgaattggcagattattgctgctcccttttcccagactgcttgtgtattgtgctgcatcgtgtaacgctactgtgcagaaatagatcacagaaagaaaactttcgtcagcgatatagaattcaaaatggtgatcgtggtgcacggttttgaatctttcttgcggcactctagtaccaagttcatctttgtactgagcaaaagcttctgcttgaattgtgccactgactggcggacccatggactttttatactaattcaatctgtcttccactct

SEQ ID NO: 267525 - DNA, 1285 bp, Zea mays
cgccagtcgcgtccatggcgatcttggtaggcctcgtcggcgtcctctcggccctcttcggcgcggcgcttcggcgcctcctaatctcttgtcgccaccccgcatacgccgccgggttcttccacccgtacaccaacgatggcggcggaggcgagcgcgtgctctggtgtgcggtgcgcgccgtgcaggagcttcgcccggacctcccctgcgctgtctacaccggcgatgtcgatgccgcgcccgaggccctcgccgcacgcgctctcgaccggttcggtgtccgtctcctccgcccgccgcaggttgttcacttgaataagagaaagtggatcgaggcatgctcttatccccacttcacaatgatcgggcaaagtcttggctctgtttatcttgcatgggaagcccttactaaatttaccccgcagttttactttgatacaagtggctatgcttttgcgtatccactagctcggctatttggttgcaaagtcatctgctatactcattaccctacaatcagttctgatatggttgaacgtgttaagcaccgcagttctatgtacaataacaattctcttatcgcagggagcatttggctatcccgatgtaaaatcctctactataccatattcagttggttatatggtctggtgggttcatgtgcgcatcttgtaatggttaattcctcatggacaagatcccacattacaaatatttggaagatcccagagcgtactaagagggtgtaccctccatgcgatacttctgctcttcagatgcttcccctggaaagaccaacaacacctcctgttcttatttcagttgcacagttccgcccagaaaaggcccatggccttcagctggaggcatttgcacttgctcttcaaaagctagaccctgactttcctaagccaaagattcaatttgtcggtagttgccggaataaagaggatctggacagactacaaaagcctaagggacaggtccactggactaccacatagatgagcctggggaggtccaccaggatatttcttaccgggacccggtaccatttcttgggggggccattgctgggctccattcgatgacagatgaacatttccgaattaaggtgtggtggagtatatggcagctgaagctatttcaattgcacataaatcgggcagacccgatgatggacatcgtgctagatgaggatgggcatcaaacaggatttctagcctccgagaaggaggaattcactgaagcgattatcaaggtcttgaggatgccagagtcg

SEQ ID NO: 267526 - DNA, 601 bp, Zea mays
acctcattccaatttccaagagagacagagagagcgtgtggatttgggggagcttcttcactggagagtggagagctccggtagcgaggcgaaggaaggaagagggaggaggggaatcagagaggtctccccgatggcggactggggccccgtgatcgtagcgacggtgctgttcgtggtcctcacgccggggctgctctgcacgctgccgggccggggccgcgtcgcagagttcggcagcatgcacaccagcggcctggccatcctcgtccacgccgtcctctacttcgcgctcatcaccatcttcctcatcgccatcggcatccacgtttacgcgggctagtagccgcccggagcaggatgcgatatacggagtagtaggttgcgccgccgccgtgatccagatcaagatgtgttttttttctttgttccttttcgctctctctctctctctgccctcctcctcggatttgctgccagtatggacgaaatcattgattatggtctggacgtctgcttgtaatcaatcatgacttgtgtaatcttgcttgcagccatcagtatcgatcaaatatcaatcgcgctcattccatattttttt

SEQ ID NO: 267527 - DNA, 748 bp, Zea mays
gtgcgtgctagcgagcgaccgcccgagcgagccaccgcccgagagagagagagagggagagtgagagtggggattcaagtttcaaactcactatcgaggggggataggaaggtggtcactcatcggtccacagctagctcgtcgccccccatggctgactggggccccgtggtgatcgcgacggtgctgttcgtgctgctcacgccgggcctgctgttccagctgccggcgcacggccgaatcgtcggcttcggcaccatgcacaccagcggcctcgccatcctcgtccacgccgtcctctacttcgcgctcatcaccatcttcctcatcgccatcggcgtccacatctacgccggctagctagggccgggtgtcttctagtccacacccccttcgtctcttcctctcatcatcggcccctgctagcttcctagtcatgtactactactagccttcgttgggcggatgatgcgcgcatgctagcttagctgcggcgaacaattaatccggacgccggataccccccagtatgttggtatttattatgggattgttatggtgttttatattgttccagctccttccgtcgtcttaacgcttggttgcgcatccatttcactgaagatggtccggccgggctcttgattcagtctgaacagttgtgtgtgtgtgtatgtgtttatacaagactcagaatgaacacttcctggctgttggtttgattatacccctggggttcgttcgttcc

SEQ ID NO: 267528 - DNA, 266 bp, Zea mays
gagcgagccaccgagagagagggcgagagtgagtgagtgagagggagagtgagagtgggggattcaagtttcaaactcactatcgagggggataggaaggtggtcatcggtccatagctagctcgtcgtcgaccatggctgactggggccccgtggtgatcgcgacggtgctgttcgtgctgctcacgccgggcctgctgttccagctgccggcgcacggccgcatcgtcggcttcggcaccatgcacaccagcggcatcgccatc

SEQ ID NO: 267529 - DNA, 1701 bp, Zea mays
cctgctatcaatccgtcactttgggacaggcggcatggctatgcaggggacttgacagaagcatcaagttttcatcctggcagtgttgggagcatgggatttcctggtagccctcagcttcatggtctggagctaaatagcatattttctcacactggtgggagtcgcatggatccaactgtgtcttcagctcagatcagcgcaccatctcaacagagaggtcctatgttccatggaaggaatcctatggtcccccttccttcatttgattcacctggtgagcggatgagaagccggagaaatgattcaggtgttaaccagtctgataataagcggcagtacgagcttgatgttgaccgcataatgcggggggaagactcacgaactacactgatgataaagaatatcccaaataagtatacctccaagatgctcttggctgctattgatgaaagtcataagggcacttatgattttatttacttgccaattgattttaagaataaatgtaatgtcggctatgctttcatcaacatgaccaatcctcagcatatcattccgttttatcagagttttaatggtaaaaagtgggagaagtttaacagtgagaaggtggcatcacttgcttatgccagaatccaagggaaaacagctctgattgctcatttccagaactctagtttgatgaatgaggacaaacgttgccgccccatactcttccactcagatggtcctaatgcaggagatcaggaacctttccccatgggttcaaacatccgagccaggtctgggagatcccggacttcttcgggtgaagaaaatcaccatgacatccagacagtcttgaccaacggtgacacttcttccaatggagctgacaattcaggtcccaccaaggatactgagtagctgaactgcagcttgctgcatcgctaaccacaaaggcccaagttattactttttgcagacctattttcagttctagcccctcccttcccatttcgattttgtttgttaagtcctcccgatctgtatttattaacttgcatgatgcgggtcaccgaagacttaggctgctgcagaagttttgtctctggcgggaagctatatgcaagagggtggtaccggttcgttccccagaatctatgtgcttgttaacctgaaggccgagaaaggcgaaaaggcgcagggagagcctccagattttggtcgctgtaagaattaaccccatgttgtacagctggtcccagtaatttgtgctgaggggagagtgaaggagtcatttgatcagtttttagtggtggtgtgtggagaggaagagtcttgcctgcttttcctttttgaactttcttttgtgccttcacctgtgttacattttgagtcgagggctcctcttaaattgtgtgcagaggggctcgattttgttaccccagaacaaggcgcatgtgcgtcggcgtcgtcttctgccaccgtatctatcgcccttatgtacatcttcatctatatatagtatcagttttgatgtcatctttttcttggatgtctcacaaggttatttatttgtaaaaaaaaaaaataaaaaaaaataaataaaaaaaaaaaaaaagatacaataaaaaaaccccataaaaaaaaaaaaaaatacatatataaaacaaacatctaatataaactatacttactttcattatacttacatac

SEQ ID NO: 267530 - DNA, 1333 bp, Zea mays
gttctagatcgcgaggagccgcccttttttttttttttttttaattaattagtacagatccccagcagtctgcatatttatttattttactgaagaagaaaatgttttaccaaatcacatgttctttttcttatgggaaaccagtcacacattccgcaccaaggtttggcggcttatatatagtatatcaaacagagctgtagctcgctcagtcttgtttatcttcttccccggatgcaccagcaaccttcgctgctgcggatgcatagctcacgctgctatccctcatgttcttgcactggctggactgctcgtagcggacaaagcctatcttaatttttgtcgagcaatgtttcaacatgtgaaggaagacgctgatggggtggcgtccgcatatggtgttctcgtactcctgcaggtattctttgaacgctacgggatcgccagtctctatgatctccatgcccatacggtccaaggcctcgatagatttatggatggcaccgtgcttcttttcgtagtatgtgtagctaaacctggatccccaatggcagaagtctgacgacacggaaaagaagttttttgggtcatccacatatttggagagcagctgcccatacaaggcttcgttttgggagctaagtgcaccaacaaggatagggacgactttcacattatgtccttgaaatactttagcaaggtagggcaaatgcatttccatgctatgttcagcttcatccacattaaggtccataaattcaaactttccagtagcactgagttcctcaatgacttcctggtctactggcaaatccccgattggggtacagtagacagaagccctggttaaagcacattttggagtgtagtagtgatgagaagggccaagcagaaacacccgagaaatgttagttggatcgatgttgccaaaagcataagctgcacatcggcccgagtatgaataaccagcgtggggtgcaattactgccctaacatcaggagacttggttagaccggctgcccccagccaaccattgagttcctcttccagcttcctggcatcgttggtgtaccaagagccggcgtgcgaagccctcctcgcgcgctccatggatcgatccggagaccttccgtgctacgagcggcctccggcacccccacccccccccccccctgcctgcctgccgccgcggcggtgctagtgctagggattgcgagttgggtgtgcgggtgcgggattgggggaatcgatgccgatcgagcccgagcgtggcttactggcgcggtgagtgcggcgcgtcagttgtggcgatggcgagcagccacgcgtccg

SEQ ID NO: 267531 - DNA, 1259 bp, Zea mays
gccgggccgcgaatctctgcgtccccttcgccaaccatggcctccttcttcgccgacgacggcaccgatgacctcccacgcaccacttcccaccccttcgactccgatgacttcggcgccgccgcggccgacgtcgccgccgccgacggatacggcgggtacgcctctttcgccgaggggggtgtcgaggaggtggacgaggagatcaccgtcgagtccgatggggtcccgatccgccacgtctccggggggtactcgccctcgccgttctcccccgagctcgagcccaacggcggcgacggcccgatcctaccgccgcccaccgagatggggcgggacgagggaatcctcctccgcgagtggcggagaaaaaatgctatggaacttgagaaaaaagaacagaaggagagggagctacgtgcccaaataattgctgaagccgaagaattcaagaaagccttttttgagaagaggatacagaactgtgcgtcaaacatggtgaacaacagagagagggagaagatttttgtagccagccaggagaaattccacgccggcgcagacaagcagtactggaaatcgatttcggatctcatcccacatgaaatagccaccatcgagaagcgggggaagaaagacaaggacaagaagccatccatcacagttgtccagggccccaagcctggcaagcccaccgacctctcccggatgcgccatatcttggtgaagctgaagcatgctccgccgccacatatgttgcagcctccaccaccagcacctgctgctaaagagggcacaaaggatggcagcgccaaaggtggtggaaaggatggcgccaaagaaggcggcgcggcagccccagcaaacggcgccaagcagcctgctgagagccaagaaaccaccgccaatggcccctcggaggcggagaaagagcagcctgcagcctctgagtgaccggaaagggtgtctttattaagacatacacaagagccttaactgtcagtagatggaagcgtgttttatttcagataatttccagacccgtctttcccgcgctgctgatctttttgtagaggagatctgcatccggatgtctttacatcatagcgcagaacattcatgattgtatcaccacagcagttgtatgtttactgctttcccccttgcccaagtgttgccttcactgagatgctgcctgtgatatcaagttcagacctgaaactgttactgagagttcgactgaataatactcctatgat

SEQ ID NO: 267532 - DNA, 556 bp, Zea mays
tgaagcacgctccaccgccacatatgttgcaacctccaccagcacctgctgctaaagagggcgcaaaggatggctccaaagaaggtggaaaggatggtggtgccaaagacggcgcggcagccccagcaaacgacgccaagcagcctgcagagagccaagaaaccagcaccgccaatggcccctcggaggccgagaaagagcagcctgcggcgtcggagtgaccggaaaggaaagcgtagcattacagaaacacaagaggcttgactgtcagtagatggaaacgtgtttttgtttctgatgatttcgcagacccgtttatcccgtactgatcttttgcagagatctgcatcaggatgtcttcgtatgagcacagaacattcataatttagtatcaccacagtagtcgtatctttgctgttttcacccctgtccagttgtgtcgtcactgagatgcctgtgatctcatacaagttgaggtctgaaactgttacgatgatatggtactgccctaataataatctgaagctgtgcaacaaacagcaatcttgcattgctc

SEQ ID NO: 267533 - DNA, 653 bp, Zea mays
  unsure (1)..(653): unsure at all n locations
cccacgcgtccgcccacgcgtccgcccacgcgtccgcggaggtcgactcgtcccgcagcgtgcaggaggtcccgccggcgaactcgccctgcgccgcgtcggaggctgccgtgcacaagccggtgatcagcgtcaacatcgagcaggaggtgaaggtggacgggaaccaaatcatggacatgtacatgaagagcatgcagcaattcacggattccctggccaaaatgaagcttccagccttggacatagacaacggtagcagcgggaagagcagtcccgcagcagccacacccaacgcagactccactggtgccgactcgaccgcggtgaagaagccgaccgccgccgggcagcaggagaagccctctcccaaggtgttctacggcagccgggcgttcttctgatctccggttcgctgatcagcggtagcacaccgctccagccgccgagtaacgaagcaaagagacggcatttgcagtcgtctcagctgaatcttactagcgcagaggaataacaccttctcaggctcttgttctaggtttgtcagatcggggatgagttactgtctttaatgtatccgtcagtacttatgaaaaatggtttggtttctctgttttagtaatgatatttagatctttttttcctgtngcttc

SEQ ID NO: 267534 - DNA, 698 bp, Zea mays
tgcatctgcatgggcttggacctgcctgctttttaggatcttccggagagccaatacccctcttgtcatccttggcacgtttccaacaggtctggctttgctcatcgagaagaagagcaggaggattgagatatccctgtactgtcttgccagagctatcgagagttttttcacatggatgaccgatgcaggactctgccctccaatacttcagataaagcgagctgatgtggttgtgttcagcatagctacctctatcattatgcactgctatgcgcaggaaagagaagtcttccggtccaagtacctgaatgtgctggactgggtatttggtgtgccgccaccacccgacagtgaggataagaactgctatctaccagatgaagccaggaaatgccagtgacatactggctggtagagttcattgcatgatttttgtatggtcacccatgtgatcctagcgcgagactagacccattagagggtttagtgaacgaaccttgtacaggactcttcggagaatcgggactttagtggatatagcaagatagattttttaattaattgatttgtccaaacgatgccctggtcattaaatgaccatatgtggttgtaacttatgacctttattgttgttgttgtcatgcgaatataacttatggtccttgaaattgtttaaaaaaaaaaaaaaagggcaa

SEQ ID NO: 267535 - DNA, 326 bp, Zea mays
cgcccctggactgcactgcactgctcgaggctccagctaaagccgcctgtagctgtagcaacagcgacagagcttactctggattccttcgcgccgtcaacgcgctgcagcatcaggggcacacactaatactagacgcattctcaggtccgtatgttccacaggccacaacaacacaatgggagcctgcaccttcctacaggccactgacgtggaaagcgctccggggtccccagttacccgatgcgaaggtaggtgctgcttgaccgcgcgctgcggaagttccctggccgcacgcgggcgtcccatgccaagaaagcgtcagc

SEQ ID NO: 267536 - DNA, 535 bp, Zea mays
ttcctgattcactactccgctacgccgggttgggatccggccctgatggcctttcccgatcccgcccgcttccctgcaccgctcggcacgatccgcccccgctcccggcggctccacgaccggtccgccgtcgagctcccggcacttctgcggccggcgccatggcgaccggcggcggcaacgagcagccgccagcggaggccgagccgctggagctcgtgctgttccaggtcgccgagtgctacgtctacctgataccaccgaggaaaacggctgcctcctacagggcggatgagtggaacgtcaacaaatgggcatgggaaggggcgcttaaggttgtcagcaagggagaggaatgcatcattaaactggaagataaaaaaacaggggagctttatgctagggcatttctcagagagggtgaaccacatccggtggaacctgtaattgacagtagcagatattttgtactacgtgttgaagagaatatagcaaagatatttaaacaagaagaaggccgctgaagagatgattc

SEQ ID NO: 267537 - DNA, 563 bp, Zea mays
cccacgcgtccggcaccacgcgccggctctgctccacgcctggctcgcgcagaagtggttccgggtgtcgccgatcgtcagggccgagcgcgacgcgttcaccgccaaggactgggagatcctcaccgcgctctggaggaagcagcgcgagagcggcctggtggacccggccaaagcgacgcagcaggggacctacgagtcgctgtgccgcgtcgccacgatcctgttcggcacgtgggagttcgaccccacggagatcgagaacccgttccccgacggggagggcggcgtcagcatctggcaggggcgccaggacaagatcgtccaggtggagatccagcggtacgtggcgcagaagctgccgtgggtgcggtaccacgagcaccccgaggccgggcacgcgctcccggacatggacgggatcggggacgagatcatcagggagctcctgctcggcgagagcgagctgccccaggagcccagggcgcaggatgcctgagcctcaactgaacgtcgggaaaggtcggtgaagagattaaactagctactgtagtagatagata

SEQ ID NO: 267538 - DNA, 664 bp, Zea mays
cggacgcgtgggcggacgcgtgggcggactcgtccgctctcgcctggctgacacaccagcgtcctctggtcagtgcatactcatcattcgtgagtatggctggtgttggctatgatttggatcaccagcgaaggaggatggaccctgggacaaatgagccattgttcacaaattgcacaagggattttaccggtaccctagattacatattttacacagcggattcattgactgtagagtcattattggagctgttggatgaggatagcttgagaaaagacacggctcttccttctcctgaatggtcatcggatcatatagcgctcctagcagaattccggtgcaagcttagagttagacgatgatactttaggaggagctgtaggggagggattcttgacaatcgcatgagatgatgagaatgtaccctggcgaaggcaggaacgagaagcctaagggaaagaggcttgttatgttcctcacccttttacatttccgcctcgatgttctctagtggcactagttggaatgcgacttcctacagaagatatgttatcaatgcaaagagaaatgatttaatagattcgtgtgccgtttttagttttccatcctcacgttgtcgcccccccttccccttcatcgtcttcaatgtgagttcagtgtc

SEQ ID NO: 267539 - DNA, 562 bp, Zea mays
gtggagagcctggcagtgccagcattccgcgttgggtaccccattgtaaccgataagctcggtgagctgtacgaaaagggtaagccaaagggagtgacaatgacagtgctgctggcgaaggctgcagccatggctcttgcacagcaccctgttgtcaatgctagctgcagggatggaaagagcttcacatacaacagtaacatcaacattgcagtggctgtggcaattgatggtggccttattacacctgtccttcaggacgctgacaagctggatatgtatttgctctcgcaaaattggaaggatctagtgaagaaagcacgagcaaaacagctccaaccaaatgagtacagctctgggacttttacactgtccaacctgggtatgtttggtgtagatcggtttgatgcaatccttccacctggccagggagctattatggctgttggagcctcgaaacctacagttgtggctgataaagatggtttctttagcgtcaagagcaaaatgctggtcaatgtcactgctgatcacaggattgtatatggggctgatttggcag

SEQ ID NO: 267540 - DNA, 1652 bp, Zea mays
gagagttgttcaggagaagatgcctgaaggcgtaaatgaaagcggccttaccttgactgggttcctttttctgcatgccctctttattgaaaaacgtcgtttggaaactacttggactgtattgaggaaatttggttacgacaatgacatcaagcttagggatgatctcattgcagtgccaattaaaagagctcctgatcaaactctggaattgacaagtgaagtggtcgatttcttgagagggatattcaacatgtttgacattgataacgatggagctttactacctgctgagctggaggacctattctcaacagcacctgaaaacccatggtcttccgatccctataaagactgtgctgaaaagaatgtgttgggtggtctgtcacttgaagggtttctctcaaagtgggctcttatgacactgctagacccgacaaatagttatgccaaccttgtatacgttggctatcctggcgagttcagttctgcatttactgtcacaaggagaagacgagtggatcgtaaaaagcaacagacacagagaaacattttccagtgttttgttttcggtgccagaggctctggaaagacgtcgttgctacaatcattcatcggaaggcaaccttctgacgctctgccatctaacagcgaacgctttgcaacaaattctgtcgaaatggctgatggaactagaaagacactaatattgcgagagattcctgaaggtgatgtgagatcgatactttctgacagagaatcattggcgccgtgtgatgtagcagtatttgtttacgatagctgtgatgaatattcatggcaaagagctagagacttgcttgtgcaagtggctacacatggagaaaatactggctacgaagttccgtgcttgatagttgctgcgaaagatgatcttgaccaatcttcacaagctctacaagaatcaactagagtgagccaagacatgggaattgaaacaccaattccgatcagtgtgaagctgagagatttgaacaacattttctgcagaatagtacatgctgcgcaactgccccatttgagcattccagagactgaagctggaaaaacacgccggcaatatcggcaacttctaaaccgttcgctaatggttgtctctgttggagctgctgttgcagttgttggactagctgcttaccgggtttatgcagctcggaaaaactcttcctcttgaagcctcctggacaagtgggaaaataagttgctttcttcctggagattactttgcaacatcagctggatccatgctggctgaatttcgcagctggggtttttacccggaaggaaaccaacgtttttgtacagacatgtcatcagccataatttatccggtcaattggtgtttcagattctatataaatggcagacaccactcggctccattaaatgccgtatctgataatctgttgcctaaattagctcagctaaatattgtcgttactaccctatgtttttgctctcttggagtcttggcccttgcagtagtttggtattggaatttcttttcgttagcaaacatgctgagacatttagttgaacgaacctgagttgttccgagatttctgtcgggattattcaattggaattttaaagcttggtaatccacccggtcc

SEQ ID NO: 267541 - DNA, 475 bp, Zea mays
acgcgtccaatgaagcgcagcatcctcatttgagcattccagagactgaaactggaaaaccacgtcggcaatatcggcaacttctacaccgttcgccaatggttgtctctgttggagctgctgttgcagttgttggcttagctgcctatcgggtttatgcagctcggaagaactcgtcctcttgaagcctcacctactggacaattggggaaataaggcccttccttcctgcgacctcagctggatccatgctggttgaagttcgtcgcttgggtttttacccggcatgaaaccaacgtttttgtacagacatgtcatcagctatgaattatccggtcaattggggtttcagattcagacatcacctggctccgtaaaaatgccgtatctgatgatctgttggctaaattggcccagctaattattgttactactagcctaagttcttattattcgaattttttttcgttggcaa

SEQ ID NO: 267542 - DNA, 318 bp, Zea mays
cggacgcgtgggggtttcagattcagacatcacctggctccgtaaaaatgccgtatctgatgatctgttggctaaattggcccagctaattattgttactactagcataagttcttattattcgaattttttttcgttggcaaacatgctgagacatttagttgaacaagcatgagtttgtgttgtaccttgatttctttcggggatttatcaaatcggaattacctagtcacactgccactgaggcctcgtgcacacggttatactttgtatgaataatttgatatacatgtaaatgcatgcagtcacactttgctt

SEQ ID NO: 267543 - DNA, 603 bp, Zea mays
cgggcgccccaaacccaggggggattcatgggtgacggggtgagtccatcctggcgccgcagcagccgtgaagcacaagagctttgctgcagcacgacggctttgtcctctctcctttaaaacggactgctctcctcaattgtcagtcagtagcatccaattgattgttctatcctcttctctgttctcacccccttgcaagcaacaatcgttcaccgatcgatccagtgcgtcctgcatggaaactgccgccgtcgccgccgccggtgccgggcgccgcatcatggtggccgtggacgagggcgaggagagcctgcacgcgctcaactggtgcctcgccaacgtcgtctccccggcaggaggcgacacgctggtgctcgtccacgcccgccgcccgcgcccggtctacgccgccatggacagcgcagggtacatgatgacctcggacgtgctggcgagcgtcgagaggcacgccaacgcggtctcggcggcggcggtcgacaaggccaagcgcgtctgcgcggaccacccgcacgtcaaggtggagacgacggtggagagcggggacccgcgggacgtcatctgcgacgcagccaacaagat

SEQ ID NO: 267544 - DNA, 956 bp, Zea mays
gtgcgcgcctaccttagccgcttcgcccaccgccaccacctccagcagatcggccacggccccggcccgcacggccgaggggagccgcccgccacggccgcctccatcgccgcgctgcccacggtcgaggttgctgagcccaccgccgtctgcgccatctgcaaggacgacctgcccctcgcctccgaggcgcggaagctcccctgcgcccacctctatcactccttctgcatcgtcacctggctcgggatgcacaactcctgccccgtctgccgcttccgcatcccccccgccgacgaccccgaccaggccgcaccgtcgcagcaggacccgccgcccacgcggatcaccatccgcttcagcaccaccacacgccgccgcgtccgcatcggcagcgatgcgccactggcgtctcatatctcggcgtcgcccacgcagctcgcacaggctattaccggggatggagctggtggacctgccaatagcggcgagactgtgtcatctgagtggcctccgcaccccgaatcggatacagtcatgtcggaggcacgcgaggggggtggcttttttgattgagccagaggttccaattatcaggcgataaggtagctgctgttagctgtcagccaacaggagtaaaaggaggctaccacctaccatacgcttcctgtcttcgttcgaacgaggtttctcgcaaggtgatggcgtgctgttacagacttacagctgaaactaaagctgtccttgttcggacgaggtttctggcgagcgagaagatggcatgttggttacagctgaactaaagttgtcctgttaggagaacaagagcattcatcgcatgggttcccggtgtcttgtatattggttaaacgtccttatccgtaataaatatataggcatgtacaatgtgcagtgctccaagggcggccgatcgcgatcggacgcgtgggtccccc

SEQ ID NO: 267545 - DNA, 430 bp, Zea mays
ctttcatagcttacctgcccataatgcatggttgatcttgccaatataattgatgcagtgcgtgatgaagctcaggacagagctcccgagttgaagatgaactccatctgcgaggaatcgaagctccagcatcagaaggtcccaaatgacctgttggagcatgccaaagctgctgctcagacagctctcgaggagatggatcctgactaagaaacatgatgatatgcccaaacttcatgttttggcgctgttgaaatctctgatccctctggggtgacagactggatatggcaaactcgtcggattttattttgatgtcatgtaaaactcaattgactgtaacttcggatctgaattgattgatgtcatagctgctgctattgacattcaaaaaatttaccctatactacaatacttcgaaatcatatta

SEQ ID NO: 267546 - DNA, 414 bp, Zea mays
  unsure (1)..(414): unsure at all n locations
cgcttgctaccccgggtccccaccacacgcacgcgagcccgcggccaccacctcgaggccgctgacgggctggaatccgctggcgcccgtcctccagaccgtcgccgctttctcccgccacatcctcatcgcccccgacgccgggctcgacgaccaccgcctccgcccccttctagcgctctccctctccccgccttcgccggcaccaccgcaaccggaggtccggaaggagaagaaggatgccaaggaggcgccactgacgaaggaggaggtcggccgggccacgtggttgctgcttcacaccatcgcagcgcagttccctgacgaacctacgaggcaacaaagacgcgatgcaaaggagttgatgcatataatctcgagactatatccttgcanagaatgtgctgatcactt

SEQ ID NO: 267547 - DNA, 774 bp, Zea mays
acggattaagacccccacaatacatacttctataagctttgcaagttgaaaacattggagaacttcaaaaatatcatattgttatcatcaccacaggatggctatgtaccatatcactcagcgagaatggagctctgcccagccgcatcatcggacacctcaaagaagggtcaagtcttcacagaaatgctcaacaattgcttggatcagatccgtgcgccctcatctgacacccggacgttcatgcgctgcgatgtgaattttgaccagtccaaccacggacggagcctgaacaccatgattggcagggcagcccacatcgagttccttgagaccgacatctacgccaagttcatcatgtggtccttccctgacctgttccgatgacagacaacgccgctcgtctcatgtctctgtaatactgctgcataccaaacctaccaaaccgatagcgcacactactgagtactgaccaggcaaggaaaagtaagcttgcataaaggctcccccagaatccaacaccgccacaggcagagtagcgctgtaaagatcctagaagcaacggtttttccagcttgctagatctgattctgtataaatagttgattctttcgtcattccattcatagtgctgtagatgtgcacctttcctgtgaatttataatactttgtcggcggggggatctaacgcttcggtttaggatgggctgccaatcagtgagcttatgtccaaataagccccctttcttaaaaaaaaaaaaaaaaagtagaaag

SEQ ID NO: 267548 - DNA, 383 bp, Zea mays
gcacggaggaggcgcgtgctctgctccactccacctccccccccccccccccctgcgccactgacgccgctcgttcgcgcagttttggtcttctggccagcagggcagggggggaacccgcgggagcgaggcgcgcgagcgagcgagcggagggaggaggaggatgatgcacgccaagtcggagtcggacgtgacgagcctggcggcgtcgtcgccgccgcggtcgccgaagcggggcgttgccgcggccggcaccggcggcggcggcggcggctactacctgcagagcccctcgcgggagccgcacgacggcggcggcggcgggtacaagtcgtcgtcgatgcaggccacgccggtgtacaacaacagccccagcgagtcgc

SEQ ID NO: 267549 - DNA, 582 bp, Zea mays
  unsure (1)..(582): unsure at all n locations
gttaaagaagaatgctcgagccctgcatttttcaagaacaagcttgcactctggggatgcaagggcaagcaaggttacgttcaagggatgctgctgccaaggaaggggatggcaagagaccttgcagtgatgagctggctaatcaaaagactacaaagagaaatgagccagccaagaggaggggtgtgggtcggcctccaaagagtgggcagaggattgctggggcacaggaaaatagccccatcaaaggcaggaaaagtagcgctggggcacaggtagatagccccagcaaaggcaggaagaggagtgtggaagcacatgatgatagctccagcaaagggggcaagaggagccggcggtgaagctaccatcagctcaatgccggtgaaactgtgtacagcttaaccatatatcataagctgttcccttccggtttggttacctgacaaaaaaaagttattgtcccagtattcaaactgatgtaacaggaagggttagttggttctgatgttgntttgtaaggagtaaggacaattagaagggaaccctcaattttatattgagaatattccgagtaggctt

SEQ ID NO: 267550 - DNA, 420 bp, Zea mays
gtagcatactattctgccgcttttcttttgaagagaatgatgacagaggaaccagagatgtgccaacggatgcttcaaagcctcatctcaaaagctcaacagtgtaacaatgagaaacttctggagaacccataccttcagatgcgtgggatattgcagttatcaaatgacctaggagttcaatgataagatcgtgatgacatttcaatggataaagctctaagttagaatcactacttctggctgtgtttattgcagagaacctgaagatgttccgaactaagttttgcagatgctatgtgaatcatgtaaattattgctttggccagatgcatgtacagatccatgaatttctttattctttggtagtcttgtcacagtccaagggagtcacagattaacaaggatatctgatgatca

SEQ ID NO: 267551 - DNA, 449 bp, Zea mays
gacccggcagcgttcggtgacgaaaaattaaaaacccaatcgcctgcgccccctcccctactccgggcgcagccgccgacgtcgccacgcgcattccgccgcgccaatcgggtacacgagcagggcgggggatgacgtcgtcggcgtccgcgccggcgtccaatggaccgcgctacgcgccgccggatccaacgctgcccaagccgtggagggggctcatcgacggcaacacggggtacctctacttctggaaccctgagaccaaggttacgcagtacgagcgccccgtcgcggccgtgcccaactccccgccgcagccgcctggctactccaggcccgaggagaggccgagaagcagcacaccttccgagcggagctcggaaaccacggtgagccgcccgcagtatgcacctgtcttggataacagggctagggatgaccactcggag

SEQ ID NO: 267552 - DNA, 499 bp, Zea mays
gctgcattaacaccactccagtatcagtttatatggtgtaggtccgcaacagaaaagttgttctgcgagctgggtgcccactaacgtctcaggcagaagcaaggcggcgttgccttcgcatgatcctgaaatggaggtagatccatggaatctgctcgaagatggcacaagctgcccctcaacagcatctggaagccatggcgcgagtggagtgacgggtgaccatgctaatctgaaagcgtgcagctggcttaagggtgctgtgagggtgaggaggacagaactgacctacattggctctttagacgatgacacctgacgtgtgtatgattattttggtgaattgtggaggaaattagtctcacctgttggcactggagtgaatggtggaaaccaaccatggcccttggctttaagatggttgttgttggtgtagaatacatacacatcgctgcccccgttttggtttggtttggtttggtttaaggcccttgtgggg

SEQ ID NO: 267553 - DNA, 581 bp, Zea mays
caccatcgggacccatgataatgaagatgctgcaggaaccccatccttgcatgtagttcagaaagatgccatggccctgaaatccgccagccctaattctcaaaaggagcaggaaacatctttgaactctgaactacaaagtcaggattgtcctctggaacatggttttagtgcagatttggtgaactccaggactgaaaagggagtcaggactacaagttctgctagtgctgttaaatctgattacaacaccatgtttcatcctgctaatggtagaatcaatgtccttgatcattttagccgcagcaatttgaatgatggttcatcaattgtcgcagaaagtaagcaaaacaatgaagatggaagtctaagggaagtgaagaataaaaagaagaaacgaacgcaaggtactggtagcgttgaaccaaatgatgttatagaatctcttccctcagagatagctagcttaactggtagttttggtaccagcaaagctgttgtgtcatctgttgcaacagaaaacatgaaaaaaaaaaaaaaaaaaaaaaaaagggcggcaagtcgcgatctagaactagttc

SEQ ID NO: 267554 - DNA, 1398 bp, Zea mays
tttcgttcggcccgcccaccccacacacacacacacacacacacacacacacacacacggtcacgcaccgaaactgccccgcctccgcagcacactcgtcctcccagcgccgcctcggggacgtcccggtccgcgacatccctgaccacggcgatggccgccgccgccctccgctcctccgcacgccggctcctgcgtctcaccccggcagcctcgtcggctctgttcgccgcttcccggcccaccgccagggttgcaccgctctcacgccccatcgccgctctgtcaggtggcaacaatcctatctcatggaaactgagacgcttcttcagttcaaatgaaaagcacttgcctgcaatatctgatccagagatcgaagctgcatttaaggatttgttggctgctagttggaatgaacttccagattctctcgtagcggaagcaaagaaagcagtatctaaagcgaccgatgataatgctggtcaagaggctttgaaaaatgtatatcgtgcagatgaggcatgcgaagaatacaggggaccttcggttaccctaagcatgattcaggctgagatggggctatggactgtttacagaaggtgagctattgccctctctgcagttcatggaagaagatgggtggctatcagcatcctattcatgttggggcacgaagcatgaaaaagaatatttagttgaagcaaaattcaaggaacttgagcaagaagcttgtagtatttcgtcctcgagttctggtgaaacaatgaaaaataacattgatgttttggtttgcaaagctgaatactaccaccagagtggagagtaccaaaagtgttttaaactcacatcctcgttacttgagagagaccctttccatctaaagtgcacattagttcatttggcaactgcaatggagcttggtcattccaatgatctttatcttttagcatgcaacttagtgaaggattatcctgaaaaagctctttcatggtttgctgtcggttgctattactattgtattaagaagtatgatcaagcgcgaagatacttcggcaaagctacaggtttagatgggacgtttcctcctgcttggattggtacaggcattgcctatgctgctcaagaggaaggtgaccaagcaatggctgcatttcggacggcagctcggttatttcctggatgtcatctgccaactttatacatgggcatgcaatatgtgcgaatgcacaatttcaaacttgcagagcagttcttcacacaagcaaaatccatctgcccatctgatccacttatttacaatgagttgggggttgttgcgtataatatgaaggagtaccgaaaagcagttcagttgtttgagttaacattggaccatacttcatcctctttgaatgaaat

SEQ ID NO: 267555 - DNA, 578 bp, Zea mays
aagcttgatcggattgattaatctgattggcaagtgtatctgttgagggtatttctgtcaaatacataagttctatcatctcttcatttaaataactcggaggacatgttgtacttgcaacctccggtcgttttgagcattatagagactaacatggcgctatggtatttcttcaggagctgaggtattgtcctctctgcaattcggtgaagaagatgcgtggctatcaccattctattcatgtctggccacgaagcatgaaaaacaatatttaggtgaagcatatttcaaggcacttgcgcaagaagcttgtagtatttcgtcctcgagttctggtgaaacaatgaaaaatatctttgaggttttggtttgcaaagctgaatactaccaccagagtggtgagtaccaaaaatgttctaaactcacatcctcgttacttgagagagaccctctccatttaaagtgcacattagttcatttggcaactgcaatggagcttggtcattgcaatgatctttatctttggccgcgcaacttagtgaaggattatcctcaaaaagctctttcatggtttgctg

SEQ ID NO: 267556 - DNA, 1054 bp, Zea mays
  unsure (1)..(1054): unsure at all n locations
tccaccgcgagttgcgcctctcgccctcacccccacccccagtcccccgcaggcgcaccaccgaaactgctccgcctccacgcccgctcgccctgaccacggcgatggccgccgccgccctccgctcttccgcgcgccggctcctgcgcctcgccccggcagcctcgtcggctctgtccgctggttcccggcccagcgccggggctgcgccgctcacgcgccccatcgccgcgttctcaggtggcaacaatcctatctcatggaaactgaggcggttctacagttcaattgaaaaacacttgcccgcaatatctgatccagagatagaatctgcatttaaggatttgttggctgctagttggaatgaacttccagattctcttgtagcggaagcaaagaaagcagcatctaaagccaccgatgatagtgctggtcaagaggctttgaaaaatgtatttcgtgcagctgaggcatgtgaagaattcagtggaactttggttaccctaagaatggctcttgatgatctgtgtggcctgactggcgaaaatgtgggtcccttacctggttatattgaagatgctgttaaagctgcatataatcgctacatgacatatctggagtcctttggccctgaggaaaattatctaagaaagaaggtggagactgagttgggcacaaaaatgatacacctcaaaatgagatgcagtggcataggttccgagtggggaaagatctccctgattggcacctcggggatctcaggctcctatgttgagctaagggcatgatgtgaagcctgcagatcagaaccatggaaattatcgatgagctgaggaagtctgtagatcagaatatgccgttctacattttcctttcccctttgtagctaccatggcaataacaatgagaccatcaaacagctgtgcatttaagtatggaaatactcccgtctgtgtctgtaataaggacgtttcatgtggctgaaacctgccaattctgttaatttttgcatgaaaattatagatctaaaaaaaaaaaaaaaagggcggccgcn

SEQ ID NO: 267557 - DNA, 474 bp, Zea mays
cagtggcataggttctgagtggggaaagatctccctgattggcacctcagggatctcaggttcctatgttgagctaagggcatgatgggacgtctgcaggtaaccatggaaatcatcgatgagctgaggaagtctgtagatcagaatatgccagtactgcattttcctttcccctttctagctagcatggcaataacaatgagatcatcaaacagcggcgcggtttaaggaacttcagatactcccggcccttgtgtctgtgtctttgtctgtaataagaacgtgtatatgcgtgaaacctatcagttctgttattttttggcatgcgcctgacttcttgttcaactggtgtgagttgtatgctttgttcatgaagcactgatcaatgatcatatgccttcgcccgcaacagaacttccttcagcactgcaaaaatacagtgacctgccattttttatgaaagggttaacaatc

SEQ ID NO: 267558 - DNA, 464 bp, Zea mays
ggttcggaattcccggctggagccacgcgtccggcgataatgggctggttactgctttcatgtcgaatctgattacttctgattgatgcatatcctttttggctgttggctagcgaatgctttcagaaaccacctcttctgtttagctattttgggcagtaagtcaagcagtgctttgtattttgtaaataggcattctttatgttaataaatctgtatagaaacaaaattggtcattcaataatcaatagtattatcagaattacatttctgtactacaacaattattttatcaaacaagttaaaaaactatcttgggaattttatccaacctatttttttctaagtcatgtttaggaaggtaggtttgtaatttttactattacaagcagttatactaattgctattaaatactactcaatttacatttagcattctgtattcagggctgaattgcttcatt

SEQ ID NO: 267559 - DNA, 773 bp, Zea mays
attcacgcgtccacagcactcgttcatccacgcatctccaacgcagcaagcagacagaaggacaggcaggcagcgagtgcaaccgcgagagcgatcagcgatgggctccttcttctcgaccttagtgacgccccctccgcccgccgccgacgacccgaactgcgccgtggtggccgcgcactccaaggccacctacgacgagcagtgggcggcccacaagagcagcagcaagctgatggtgatcgacttctcggcgtcctggtgcgggccctgccgcttcatcgagccggccttcaaggagctggcctcccgcttcaccgatgccatcttcatcaaggtcgacgtcgacgagctcgcggaggtcgcaaggacatggaaggtagaggcgatgccaacgttcgtgctggtcaaggatgggaaggaggtaggccgtgtgattggggctaagaaggacgagcttgagaggaagatcaggatgttcgtcacgtcatcttcctcgtcctaacttagcagtgcatacactcccaccttcttactggtttctcgactccagtggttcacctgggacggggttgctgaaatggttcccttctctgaatactgaaaaatcaaaaaaagaagtatatgaaaaaatgatggtagacgtgtctgggtcagtaataagagtttctgaaacctgaatgagatttgaatcgctccccgttgatgaatttctcatggtctgtgtattccaccatgattcataaggtcattctcagtgatgagttttaata

SEQ ID NO: 267560 - DNA, 522 bp, Zea mays
gttttcagaacatattttagagaaacactctgctactctcactggagcagaaaaacaattgattcatacagatgcaggcagccttaaaatttcattctgattcccagacacgtctacaaggcaacagtggcaattacatattcagcactggttgtttctaactggtcaaacctttgaattttcacaggaggtcgcaaggacatggaaggtagaggcgatgccaacgttcgtgctggtcaaggatgggaaggaggtaagccgagtggttggggccaagaaggacgagcttgagaggaagatccggatgttcacgtcatcttcctcatcgtaaactcctgtggttcgcctgggacggagttgctgaagtgaaatggttcccttctctgcaatgctgaaaaaaggggaaaaaaaactatgtgaaaatgatggtagacgtgtctgggtcagtaataagagtttctaaaatctgaatgagatttgaatcgctctccgttgatgaatttctcatggtctgtgtattcc

SEQ ID NO: 267561 - DNA, 537 bp, Zea mays
gacaaaagttgctcttggcatgatacatgaatactacaaaagtaatgctacaggtcttggtgttttctttactctttactatgctttcgacacatcaagctttggggaataaggaaaattgtgacaaggataaagatttcatttagcgtcaatgcgaaaagtgcattggagtgggtcgtaaattccctacgacacaactatgttgcaatgctataaaaagagctgatatggcttgcgtctgtcgtagcataacactagaagagcagctcacaataagtgtcgtgaaggttgtggatgttgcaaaggaatgtggcaacccggtgccgcctggaaataaatgtggaacttggactgttccaccacaactgctgggatgggtgcatccgtaagggttcaacaaagcgagcaacaaagggcgcatggataggagttcaacaatgaaagcaatcataggaaaatcttgagataaatgaatgaatgtatgctctactggcttttggaatattagatcaaaattatatgagatgtgaattattt

SEQ ID NO: 267562 - DNA, 826 bp, Zea mays
atttctgcagtggttagaggcacctggtttgtttttttgctgaagctggtggtacatgtgaatagcagggcctgtcttctgcctctgcttttgcttcgaagcaatggcgaatgcaagcaagcacttgcaaccttcaagtcaagcaggcaatgacaagaagtatcagggcacgctggttgcttcaccagcaaaggccatttcacctaagtgtgtgaaccgcattgtgccatcgaagcaactgatcttgggtgggggttcaataggccatgtggcatcatttctgatcaaggtcgttgcccttgaggcagtcagatgagtttctaaaacaagatgccctttcatatggaattctgttcaagcattgcagatccttgtgtatcctccatttagctggatccaaagatgggcaccgctcagatttctcgtgcagggaatggagaaactatccatgccactgttgtttttgtcagtcacaacaacagtaagtgagctgtcctccaagcgtgatgatgaaccagaacattctgaaacaccttctgaaacaaatgaattggcatcaacttctggcacaagcgatgctgctgatggcacaaaggaaatcgtacaagagaactggcttgtgttacttttcagggagcttgagaagcaaggcatcactttacctgagaggtttactgaagatgaattacgcagattttatgttgctgcaaatggtgacttttcaagtttactctcttcggttaagaagacaattcgttggagggaaacgtttcacatacttacactgcaagaacttgataaatggtctcacttagtcttttggcat

SEQ ID NO: 267563 - DNA, 374 bp, Zea mays
ctcagtgttgacaatgaggttgagccttttatcactctgcaacgtttcaaacaacagttggaagtccctttctagtttctacattgaaattatcatattaatcagctggagcatttgggtctcaaggagtgagctggaacatcttccaagaaattctaccgtctgtatcaaatggctaagcctttttcaagaaagagtttgcccaggttatccatagagcatagaagaaatatttccttgaagaatgactagagcgtcagttgtggtctttttttaatatcttttgtgtcctttttttgtttcatgaattttgttgcttgcagctgtctggctgcaatttaggtagctgttccttttatgtatttgcataatta

SEQ ID NO: 267564 - DNA, 636 bp, Zea mays
gatctgtgcaggcaaactcttccaagacgccgggcggcgagaggctgggtagggagaggtcggaatcttgcgggaggaactggctggaccgctgggtggaggagaggtacacggacgacgagaagaacgccaagattctcgaagtggacaacggcaagccagggcggcacggttccaagcggcgcggcggcggcggcggcaaccatcaccagtcgccgtgctcgacgatgacctccgagcagaacagccggagctacgcgaccatgccggagtcgccgtccaaggactcgacgaccgcgcagcagtccgtgccgagcccgtcgtccgtgggcatggcggccgaggccctgagcccgctgcgcgtgccagcggacatcgccgagctctgcgacagcccccagttcttctcggcgacgtcgcggcccgggagctccaggagggggggcgcgttcacgccggcggccaagagcgagtgctcgcgcagcctcttcggcggctactccgactgccccaactacatggcgaacacggaagtcgttccgcgccaagggcgcgttcccagagcgcgcccaagcagaggccgcagcagcagtacgagaagtcgggctccctccgcagggcgtcggcgcacgccct

SEQ ID NO: 267565 - DNA, 444 bp, Zea mays
tggatgtgcactgtaggatccgccgacgccggagaagtacgagcaggcgggtgcgcccaggcacggccgttccggctctctgaaggcgaactcttcgaggacaccgggcggcgagaggctgggcagggagaggtcggaatcctgcgggaggaactggctggaccgctgggtggaggagaggtacatggacgacgagaagaacgccaagattctcgaggtggacaacggcaagccacggcgccggtatgcttccaagaggcgcggcggcggcggcggaaaccaccaccaccaccaccagtcgccgtgctcgacgacgatgggttccgagcagaacagccggagctacgcgaccatggcggagtcgccgtccaaggactcgacgaccgcgcagcagtcggtgccgagcccggcgtcggtgggcatggccgaggaggaggccctgag

SEQ ID NO: 267566 - DNA, 1451 bp, Zea mays
cgtgatttaaagccagagaatcttcttttggattcaaaatgcaatgttaagattgccgattttggcttaagtaatattatgcgtgatggtcactttcttaagacgagttgtggtagcccgaattatgcagcacctgaggtcatatctggtaaactatatgctggtcctgaagttgacgtctggagctgtggagttattctttatgctcttctttgtggcactctcccatttgacgatgagaatattccaaaccttttcaagaaaataaagggtggaatatatacccttcctagtcatttgtcaccttcagcgagggacttgattcccagaatgctggttgttgatccaatgaaaaggattacaatacgtgaaatccgtgaacatatgtggttcaagatccgacttccgcgctatttggctgtgccgcctccagacactgctcaacaagttaaaaaggtcgacgaggaaactcttaatgatgttattaagatgggttttgacaagaatcagctaattgaatctctgcaaaacagattgcagaatgaggcaacagttgcctattatttactcttggacaataggcttcgtacaaccagtggttatcttggatctgagtttcaagaatctatggacccatctttctctcaagtacatgctgaaacaccaacttcagcaactgaacttcgtcagcatgggttttcagaatctccaggttctggcttgaggcagcattttgcatctgaaaggaaatgggcccttggtcttcagtctcgagcacatccacgagaaataataagtgaagtgcttaaagctctgcaagaactgaatgtttactggaaaaagattggacactacaacatgaaatgcagatggagtcctggctgccttgagagtatgatgcataacagtgatagcttcagtgcggagtctgctataattgaaactgatgttttcatggagaaatcaaccccgacagtgaagtttgagattcagctttacaaaacgagggatgagaagtaccttcttgacctgcaaagggtcagtggatcacatcttctctttctggacttgtgttccgcctttctaactcagctgagagttctttgagcctgacatgattggcttcccaagcactccttgatgcacccagtggagtttcaagttacatttgagatgtacataatgaccatatataatcctccagtagattatattttctggagcatgtaatgtagacgttagaggcttgtcctggtttgccaagatggttgttacctaaggtcctaacaagaggccgcaggcgagcccagtccaattagatgatgtgaaaaatttttggcctttttttagtctttggacatgttatcaaattaaggaggtcgtgctagcacgatacccaaactaagaaataccccattgaaaactgaaaccaaagcttgctcgttcaaaaa

SEQ ID NO: 267567 - DNA, 471 bp, Zea mays
aatacccgggccgaccgacgcgtacgcagagtgtgtgttcagcaaatgagttggcctcattgccgccgggtccacgagggggaaaggaaacacgagcatcgtttcctccgtcgtcgatagagctctgttcgtctcccctcgtagaaattgccgaccaccgccgcaccttgaagaccgccgcgctgttcgtcgtggtggcccgtctcaggcaacgacgagtacgccggtcgcggcctcaaagacctcccgccaccgctatgacttgaagccctcctccatgccaatcaagattcatggtgaacgacatccataacagagacgggtttgtcctcggaacctcaagaggagggcatgacactacgaaaatcattgattgtcttcaggaccgtgatactaaccagatttatattattgaagatacgatgtgtaacgcaaaattcctgaaacatggttttaggaagtctggtgacc

SEQ ID NO: 267568 - DNA, 1179 bp, Zea mays
gctcctgcaggtgcacggtccggatatcgctcggtgtcgagcccacagcgtaccgcttcggttctcctagtgatcctgaccgtacggtggcttcggcggaatctgagctttggttgctctattggatgccttacagaggcggagggctactggctgaagcaagcgtccgggtcaccgtactccggttctatgtatcacggctccccattgctccggtctgtgtcttggtccattaactagtagcaggcctgacggacatcatgctcatatttactgcagattgatttttgtggctgtagattatctagcagccatgctcatccgagcgactgggcatgaactccaaatggcacggaacagaagtttgaagtcacttgacctcacaaaggcagtaaaggatacagttaatgtaagcgctggagatgttgcttctctcatatatttgtggaacccttgggcaatagtcacttgtgtgggatcatgtacatcaccaatcgagaatctaatggttgtaataatgatctacggatcctgttcacgtctggctcctcttgctgcttttggatatgttatggccacacacctctctctttatcctgcaattctcatagtaccggtcattctgttgctgggttatggtctagatgctcctcctccaaaagtatttcttataaaagggtcaattgccagaaaaagtgatgtgtcagacaatgataaaacaagcagacagagagttgttcagcagttttcatggaaaccagtacttcactttatattttggctgttcatctggtcgtgccatgtgttgttattgagcagcgtgattttgaagaaagttggtggcctccacgagatgtttgaaaagacgtatggttttatacttacagtgaaagacctatcaccaaatattggtgttttgtggtacttcttcgctgaagttttcgacttctttagaaatttctttcttatggtattcaatatgaacatcatttttatggtcttaccattggccatccgattaaaaagtcgtccgtgctttcttgcatttgtttacacggcaattgtggcaatattgaaatcttatccatcggctggagattcagccctgtatcttggtcttctgggcttatttgtcaacgaattagcagaaatgcagttcacattcttcttgttttttgg

SEQ ID NO: 267569 - DNA, 669 bp, Zea mays
cccacgcgttcgagtaattggagtcgtgttataagcttaatggacctcctatttggggtgatcttcacagatcaacaagtgagcggtctttgcatgctgcatgagatcaagcaagccgccgactggcaatgctccacctgccattcagttcgttggtgaggtattaatcaccagccatgttggcacttggcggcatgcagatggagcagaacatccaggtgaagcggacagatacatgatcgatcatgagttggcgcagacacaggccagacaaccagaggctatattccaattcatacattccatgataagcaaaggaagatccaagacaacacaaatatacaaatagttagttatacaagcaaaaatcctgttgttttgtgcctcccattttctagtccagaattaatatgacaatttttcactgaaactggttggatcagagaccaggaaaaaaagggaaatgacaactacagctgtgttttttttttcaaagaaggcagctgcccgtcgatgatgtgctcacttgaggatttcctctgccttttcagtgacactgcttcatccttttcagagtcaaatgaatctctacctcatttcactgcacatacttccaaactgatttgctgtaacatacttgggtttcggtacgacattaattcttaactc

SEQ ID NO: 267570 - DNA, 684 bp, Zea mays
ccggtcttcttcgtcccctccgtcgccttcacacctgcttgccatttgcgatctcaccgtgcccgtcccgtggcgcaacgaccgccgccttccggccacccggtcgcggctcccccggattcgcgcccaccgcgcctccggatcgtctcggagatctgccgctgagggagttgcatataatctgagctggtgctcctcaagtgttcggaagaggtccctgttttattcgtttttgttggtgcgactgcgagtgtaatggaggaagtggaggaagcgaacagggaagccgtggagcgctgccacagggtgctcgccttgctctcccagccgcatgaccccgcgcaggccaggagcatagctctgggcacggacgaagcatgtgccaggttcaggaaggtggtctctctactgagcaatggaggagcggggccaggagaagccgggccgtcaggcgcaagcgcaagcgcaagccgtcctagagctaagcttgttagcagaagacagaatccagggttcttgacccaggaaggcttcctggacagtaacaccccggtcgtggtgctgaacagcgccgcccatccttctccgacctccgcgcaggtgcatccaagagccggagcattggatacggagggcgtgcaccccctcggagttggaggacctcccaagctggtccagcctttg

SEQ ID NO: 267571 - DNA, 2102 bp, Zea mays
cccacgcgttcggcagcggtgactgttgcggtgttgccgcatccacgccctagtcgaccacgccgcccccagcagcccgctgctgccgcggctcgcgcccccaggagcccccgccgtcgcggctcgcgcctcgtatccgtaacagctacaccgtgccgcctaccctcgcttcctgctggctgcatcgtcctcaggtcttccgagggcgtgctccaatccccaaccgctattcacaagatgactacaaaacttgagcaatcttctgcggagcatcgcccagcaaaattcgcagcaccatcgtctttgacccccaagatctcaatgtttggggcaaaagctggattcatcatacctaagaacaagctggccggctcactcgtaatccggagcaccagtgacaagaatgaaacaccaactgcatccaacgaagatagcagcaggcatgttcacagaaagacaaagtgggggcctgaccttgctttggaccctgtcgtgtgcaaaggaagggctttggcctaccagactcgagtggagcaaatttccaagcagctgaagtctggagctttggacacgtccgaaattgatggttcagtgtctgctggaaatgaattgaattctattggtcctgacatcttgaaagagaacgagctgggaaatgttgaactattggaacttgaaagacgagagcttatcggtgaaatactccgtttgaatccgggatataagacacctgagaactacaaaccagtacttagggagacaaaaatccctgttccggcagaagcacacccaggaaataatattattggagttcttctaggatctgagagcaatacccagaagagactacatgaagaaactggtgctgtcattcgagtgtatgggactaagaaaatcaatggagagaagagtgagattcgtcatcaagacataaatgaaacacaagatgcttatgaagacctatacatcaatgtatcggctgactcttatgataaagtagatgctgcagttgtgttgattgagctgcttcttgctcctgtttccgtaaagtcgacagctacttcaacagctgctactgtttcttcagcagatacatccaaggtatgcagttttcagctcaatgtgcaactggagcagaataccacgtcacagccagatctacttcattaccaatcacacaacgcaccttggctgcccacaccccagaccaatgctccatcaattccttccacggggccggtttgagtacattacctaacaatcccgcgcagccacaaccgcctgctggttctttcagtatgcctccatatactggtcaacctcctcacatgaatagcatgccaagcaaatccatttccttgtccctgggcctcagcaaccagtaccaagcaatcaacaacatccacctcaatttcgagctaactcctcgattgggccttttttcggtcaaccacctggtattgtaagccaacaaatgccaccatcttcctcaatgccaccgccagttagaccccttcaaataccccatgcctctggtggctggccccctttctctcctgttacatcacaatctcataggcctctgcaagctccaccgacttttatggcagtgagacctcctatttccgtctctcctcttggtgcaactccaccgcaaggtcccattgcattgacaccaccaaatatgcccaccatgtaccgcggccagcatccaccagtaccaaatttcactggttcagcgccattggtttccaggcctcctggtggtggggctcagtcttttcctacagctgcgcctcaaggcccttcctcagtagcatttcccggtggaccatcgctgcggccaccttaccctccggcgcctgatcaagcgagggggccacctccagctttctctccagttggatcaactcctggcatggtgcctccacctattgcatcttccggcctgcctgccccgcgtcctgcgaacacgagctgcatccagacacaagtagtagcccctttgagacctccgctcccagccgcgggcgaatttactttccggcctgccataccacggcgcatgctccagagttcgcagcaccaggcagtcaaatggg

SEQ ID NO: 267572 - DNA, 1099 bp, Zea mays
  unsure (1)..(1099): unsure at all n locations
cgganctttggcggacgcgtggggacaaatttctcgcccgcgaggggccggccgagtacctgagctgatcacgagtctctcagcgagtgctggagagcccactatgtccgccgccggcggcgacctgccggagactgtggaggtgacgctgcgcgccgtcggcccgtcccgtccaaccaccctccgcctccctccgcttctctcggtcgccgagctgcgcggctgcatcgcgcgcgaacgccgtctagcaggcacggaagaagttcgactccgcttgatcctgcgggggaagacgctcccgcaccaagacgacagccatgtcactctccgcgatggggatactcttatagtcgccgtggcacctaagcctcctgttaatcatcttcttgatgatgacgttgaggacgaagaagaggatgaactgaagttcagaataccacaaacgacaaccttgtggaagaggaaattttttatgtttcttcgagacaaattgagattgcctgatatcattttgatggcgctgttttctctcagtatgaaagcatggattatcattgcaatgtggttcctattggcaccgattgctcagaagtacgacattggacctttatatataattggtactggtttcttgatcatacttattaatctcggaagacgacagcaaggttgatgttagtgcatactccatattcaacgaagattttagggagctgccaggaacacttaatgcagatcgcattgatgcagacatccgggcaggtcatttttaagcccttactgggcattgcagagatagggaccatggtatgctgagatttgtacagaagcgtactgngcattgcatttgtttgtgcatggaaagcagtgtggagataaaggctgtgcccctctaaggttaaggtcaaataaatttctgacctgtaagtgaaaatgttgcctggttacaattggaaattaccgtgatactttgcagatctgtacttgtgaaaccaaaagagcagagtagcttaagactggcaacaaagtgattttattcctctcttgcaaaaaaaaaaaaaaaaaaaaaaaaaaaaaaaaggggggccccccttttttt

SEQ ID NO: 267573 - DNA, 1175 bp, Zea mays
tcctaatctggtcagattaattggctattgtgccgatggtgaccagcgcctcttagtttacgaatacatgttgttgggatcactggaaaatcgtctgtttggtccagcaggcaaggaacctcttgactggaatacaaggatgaagattgctgctggtgcagcgaagggtctggagtaccttcatgacaaggcaaatccaccagtcatatacagagacttcaaatcatcaaacattcttctgggtgaagactactaccctaagctgtctgattttgggcttgcaaaacttggtccagttggtgacaaaacccatgtatcaacacgagttatgggaacatatggatattgcgctcctgagtatgccatgacccgggcagttgacgctaaagtctgacgtttacagctttggtgttgtgttccttgaacttattacaggccgcatagcaatcgatcacacccagccttcaggggagcaaaaccttgtcgcatgggctcgtccacttttcagagaccgaaggaagttctgccagcttgctgatccattgttgcatggcggctacccgaaaaggggtttgtaccaggccttagctgttgcagctatgtgtttgcaggagcaagcagcatcccggccgctgataggagacgttgtcactgcactgtcttacctagctgcacatccttatgatccaaatgcgccttccacaaaggattcttccgcctgcccgtctaccccaagggcaaagacacaccgacgaaccaccagtgttcctgatgctcaacatgctgctgagtcgcttattttgaacttcccagacatgaggaaggagactgtcagaggaggggaattcgagaaggatcgtactgaaggttctggcagcagcagtagctctggaaggaacgattgcctggatgtcccgcgacttctatccgttcctaacggcaaagtttgcggtgaaggtaataacattcagaagtccactgttaaggtttggtgcccgtgagaactagaatacagagccggccaaattctgcaggcatctttgaatggatgcatggattagaccattctttccatgcttgctgtcaattttgcgaggaatcttcgtcgcttggcgtgagtctttctgaaggggactgttgtcgagagttgagtactaccacttgcacaggtttgg

SEQ ID NO: 267574 - DNA, 1245 bp, Zea mays
ctcgatcgtacggcgcgagcgttgcgctccacgccttcctcttcctcgtctggcatcgcgaaccgccgctcccctcccacccgcccacaggccacagcccacccccttctccaggtctctccccggcggcggcgggtgcggttctccggccatcaccgtgcgcaccaggaaaaactatgaggaggtacagccccccttatcgcagtccccccaggaggggatatggtggcagaggaagaagcccccctcctcccaggaggggatatggaggacgcaaggagggtagtggaagccttttggtccgcaacatcccattaagcgtcagagcggaggatcttcgagttccttttgaaaggtttggccctgttcgggatgtttacattccaaaggactattactctggggagcctcgaggatttgcctttgtagagtttgttgatccttacgatgcctctgaagcccagtatcacatgaatcgccaagttttctttggtcgggaaatagctgttgttcttgctgctgagtcacgaaaaaggccagaagaaatgcgcagcagaactagagtaagaggttactctggtcatgaaggtcgccggtcttcttactatggtcggtctcgttctcgctctcctcgctatcggggccgtcctcggtcgagatcatactctcctgctccaaggcgggggaatgactactctgcctctccaaggagacaggaagcccatcgctcatctcctcccaggcgcctgccaaaggagcatgatgaagataagaagcggaggtcctactctcctgccagtagagatgatgctgacaatgtttatgagaagaggtcgcccccagcagacagcgatggatctcctctgcatcgcaggtcccccaaggagtactcgggctcacctcctggatcccgctccaggtccgccgacgaatcccctgttgccagtgactgatcgaccgatggatgctacaatatgaatgatatgcgcatgaccagcatggtcatgcggtcatcagtcctatgcctttgtcagactgagctcactaaacttacccccctttgggggtcgatgttgtattgctaagttccgtttgtgctaagtattagcgcatactgctagactgccactgtcgtctgtactatgcatgcttttgatctcgagtgatcgtgttgatggtgctgaatattggaccctgcagtacagtagtagcatgatgcttgcttgctgggccacggctcgttcc

SEQ ID NO: 267575 - DNA, 1223 bp, Zea mays
tcgttttgtttctcaaagaatgccttttaccattactaacaattcatttgcttggcaagagagagtcttgtccaatgaagttcttctatgaagacaagatttgatactttgagaaaattaatttcatgaagagaagatgagagacatatatactggctggtacatgagaagataaaagagagtcaagtcaatttcaagtacttttgtgactttttcaaatgttggggaacttgaagcgaacgatttttatgaagatactctttatgaggatcaccttacgtagttgtatacaagaaacttggacactagagcctgggcatcttactgctttttgcaacacttgcttctcttctgatggaatgtttgtaagttgttgactgtgcttcgctgagaaccatagagggcacagtgaatatttgaatttgatgggagcctcgaggatttgcctttgtagagtttgttgatccttacgatgcctctgaagcccagtatcacatgaatcgccaagttttctttggtcgggaaatagctgttgttcttgctgctgagtcacgaaaaaggccagaagaaatgcgcagcagaactagagtaagaggttactctggtcatgaaggtcgccggtcttcttactatggtcggtctcgttctcgctctcctcgctatcggggccgtcctcggtcgagatcatactctcctgctccaaggcggtggaatgactactctgcctctccaaggagacaggaagcccatcgctcatctccttccaggcgcctgccaaaggagcatgatgaagataaaaagcggaggtcctactctcctgccagtagagatgatgctgacaatgtttatgagaagaggtcgcccccagcagacagcgatggatctcctctgcaccgcacgtcccccaaggagtactcgggctcacctcctggatcccgctccaggtccgccgacgattctcctgttgccagtgactgatcgaccgatggaggctacaatatgaatggtatgcgcatgcggtcatcagtcctatgtctttgtcagaccgagctcactaaacttacccccctttgggggtcgatgttgtattgctaagttccgtttgtgctaagtattagcgcatactgctagactgccactgtcgtctgtgctatgcatgcttttgatctcgagtgatgtttgaggaaccagtgatcgtgttgatggtgctgaacattggaacc

SEQ ID NO: 267576 - DNA, 763 bp, Zea mays
cccacgcgtccggaactttgctggaacctctactcaacagtttaagccacaacagagcattcatgaagctggagtgtcaaatcagtatcaagctgctttaacccagaatgtactgccagcaatcgctcagatttcacagctagttgctgggagccatcgtccagttggcatcccaaatcaggcccttgctgttccgcctcaatatggtagtggtagtgcaaattattatggagtgacgtccaccaggccatacaggcccatcactctacctcctggacctggtgctttgaatggtccaagtgcgcaggcatcttcaagatcaaggctctattctggagatccccttgcggctgtctcccgatcatcagataagaagggatcgtcttacaagtattctttgtccagtatgtcaacttatgatcgtaaatgaggatttgttttatctgccagtggacgaacctagtgaaccttgaaagtttgggtttcagaccagagatttggtccccccgtagatgttaagtcattgtagctaacaatgggccttttttacagtaaaggatgtgggtttgtatctagaagagattctcctacagagtctaataaatattgtaggaattctaacttataaggccaagttaggtgtaatggtgagagttatcttaccgagcccccagatcctaggtttgaagtagcctcttcctattttcattgggtcatgaatttgtagtatctgtacccccagcggaaagcttcccttgttttt

SEQ ID NO: 267577 - DNA, 804 bp, Zea mays
gtcatactgaattttggaaagtccgtagcaagaaagcacatcccagctgaaagtgcctggtctactccattaacacctcctatgccctggggtcagtcatcaaggccagttaacggctcccgccatccccaaagtcctaaacactatgggtatgctccaatcagcggtgtacttccagcaccaccagttggagctcatcacgtcccaccgtctgatgggatgcagccactatttgtagcccctgctcctatttctgctgcagccatacctttcacgccaactgttcccttgcaaaatacatcagctgcttggatacaagaagttactccaaggcctgctccgccacgattccctggtcctggtacgggggtcttccttcctccgggatcaggccaccctctgcctcatcagatgatgccggcttctcatggccatggcgaacccaactctccacaaggttcatccgcttacctgcatagtaacgtcaatggcacggagacatctaatggcaatctttctcctaagaactcgccgagaaagacatcttgcacagccgaggagaaaccagaatgcaatgggagcttaaatggtggtggcggctctgcggatgagaagtcaactgtaggtatggagcagcagaatggtgttcagaagaatgttgggagtagcaaggtccagccacatggacatgcaactgaatagagtgggacttatagtacatagacaacagaaaactgaagagacgaggagttgaattttgggccgtgaatttgcggtagtgcgcagagctcagcagaggtcttt

SEQ ID NO: 267578 - DNA, 1206 bp, Zea mays
gtggcagcactgcactgcactgcaactgcgaatttccgtcagcttggagcggtccaagcgccctgcgaagcaaactacgccgatggcttcggcggcggcgtgggagggtccgacggccgcggagctgaagacagcgggggcggaggtgattcccggcggcgtgcgagtgaaggggtgggtcatccagtcccacaaaggccctatcctcaacgccgcctctctgcaacgctttgaagatgaacttcaaacaacacatttacctgagatggtttttggagagagtttcttgtcacttcaacatacacaaactggcatcaaatttcattttaatgcgcttgatgcactcaaggcatggaagaaagaggcactgccacctgttgaggttcctgctgcagcaaaatggaagttcagaagtaagccttctgaccaggttatacttgactacgactatacatttacgacaccatattgtgggagtgatgctgtggttgtgaactctggcactccacaaacaagtttagatggatgcggcactttgtgttgggaggatactaatgatcggattgacattgttgccctttcagcaaaagaacccattcttttctacgacgaggttatcttgtatgaagatgagttagctgacaatggtatctcatttcttactgtgcgagtgagggtaatgccaactggttggtttctgcttttgcgtttttggcttagagttgatggtgtactgatgaggttgagagacactcggttacattgcctgtttggaaacggcgacggagccaagccagtggtacttcgtgagtgctgctggagggaagcaacatttgctactttgtctgcgaaaggatatccttcggactctgcagcgtacgcggacccgaaccttattgcccataagcttcctattgtgacgcagaagacccaaaagctgaaaaatcttacctgactgacacaaaggcgccctaccgcgtgtacatcatgactgtcctgtcctatcgttgccttttgtgtttgccacatgttgtggatgtacgtttctatgacgaaacaccatagtccatttcgcctgggccgaacagagatagctgcttgtcatgtcacgtttgaattagaccattccttagcccttttttttttcctcctcttattctctgtctgccagtctataaaacgtcttacatttgttgacctgaaaaa

SEQ ID NO: 267579 - DNA, 312 bp, Zea mays
caatctgcaagaaaacagcactggacacctaaaaacatggctgcctttttccttaggaaaaagccggtagcggcagggcaagtggttgccatctaaccacaccctcccatgactagcaaagtatgttacacctttcccatcatcaacatacatgtgggaatctatactataggtggtacatggcacttgcctgaagccaatggctgtagaccatggagttttatcctttgttttttttcaatcttagatttgggatttaaaatttattcaatgacatttgatttacttgggcaatctgagatattcgccatc

SEQ ID NO: 267580 - DNA, 435 bp, Zea mays
ggtcgccctaaccacgcggctactacaagtgcagcacggtgcgcggctgccccgcccggaagcatgtggagcgcgaccccgccgacccgtcgatgctgatcgtcacctacgagggcgagcaccgccacagccccgcctccggccaggacccgccgccgccgtcgctcgcgccgctgccggagctgcccagccattgatttggcttcctgcctgctctgtcctgtcaattactagtagctgttgtcataagttataaaatcaaaatcgccagttcagttttagcagctccgttttccgatttttttctcttctgtcgttcgcgttagcagctttgtgaaaggattaggaaagtgttagcatcagacttggagaagggaaaattagccaacaggttatgctcttgttcttagcactagttttttgtattcatccttg

SEQ ID NO: 267581 - DNA, 1240 bp, Zea mays
acgaaccctaagcaaatcgaggtcgaggggtggtccgatctcggtggcgactgattgtcggccgcccttcccgcgccgcggtctgcgctttggccggtcctgcggggccttgacgtccgcccgggtccccgtcaaccatatcaactgaatatccaattcaaagggcggggagcgtacgtgtaccaccaccgtcttccggccgtccaccgtttccagcacacagggtaaaggcaagcaaacgagcggggggacggctagcccgcaatacaaaatccggaggaactcccaggaggcgaaaagcagatccgtctcccccgagccccgaccggcgatcgctatcgacttgtagcggaagccatggcgtcggcagcgctaatctgcggcacggagcagtggaaggccctccaggcgcacgtcggcgcgattcagaagacgcacctgcgcgacctgatggccgacgccgaccgatgcaaggcaatgacggctgagtatgaagggatctttctggattactcgagacagcaggcgactggtgaaacatggagaagctccttaaattggctgacgtgactcctctgtcgccttttctttttgtgtcattttgtgtgtggggattgcgccttcctgtggtaatttgggatctgtttggtttgttataggctgcgaagctcaaggagaagattgagaagatgtttaaaggtgaaaagataaatagcacagagaacaggtcagtgcttcatgtagctctgagggctccaagagatgcagtcataaacagtgatggggtgaatgtggtccctgaggttcggagtgttaaagataaaatcaagcagttttcagagacttttagaagtggatcatgggttggagcaactggaaaaccgttgacaaatgttgtgtcggttggaataggtggtagctttcttggccctctatttgtgcatactgcactccagaccgatccagaagcagcagaatgtgcaaaaggccggcaactgagattccttgcaaatgttgatccagttgacgttgcacgaagcattaaagatttggatccagaaaccactctggtggtggttgtatcaaagacattcacaacagctgaaacaatgttaaatgctcgaactcttaaggagtggatcgtttcttctcttgggccacaggctgttgccatacatatgattgctgtcagcactaatcttaagcttgtgaaggagtttggaattgacccaaacaatgc

SEQ ID NO: 267582 - DNA, 467 bp, Zea mays
aagcaaacgagcggcgggacggctagcccgcaatacaaaatccggaggaactcccaggaggcgaaaagcagatccgtctcccccgagccccgaccggcgatcgctatcgacttgtagcggaagccatggcgtcggcagcgctaatctgcggcacggagcagtggaaggccctccaggcgcacgtcggcgcgattcagaagacgcacctgcgcgacctgatggccgacgccgaccgatgcaaggcaatgacggctgagtatgaagggatctttctggattactcgagacagcaggcgactggtgaaaccatggagaagctccttaaattggctgacgctgcgaagctcaaggagaagattgagaagatgtttaaaggtgaaaagataaatagcacggagaacaggtcagtgcttcatgtagctctgagggctccaagagatgcagtcataaacagtgatggggtgaat

SEQ ID NO: 267583 - DNA, 1450 bp, Zea mays
cccactcgtccgcggagattcccctcccagccgtcgaaagtcgaaaccctagccccgcctcaccgccggcggtggtggcagcctcagcaccggcacacagcccgccgtacctctcctcgtacgctcccttccggtgtgccgtcgccccctcgaccggtccatcgttcgtcggctcggtagccgccggatcggatcgggatcggccggcgccatgtccaaggccagggtctacaccgacgtcaacgtgctgcgccccaaggagtactgggactacgaggcgctcaccgttcaatggggtgagcaggataactatgaagttgttaggaaagttgggagagggaaatacagtgaagtctttgagggtattaatgttaacaataatgagaaatgcatcattaagatcctcaagcctgtgaagaaaaagaagatcaaaagagaaattaaaattcttcagaatctttgtggaggccctaacattgtgaagctgctcgatattgttagagatcagcattcgaaaacgcccagcttgatctttgaatatgttaacaacacagatttcaaagtgttgtacccgacattaacagattatgacattcggtattacatctatgagttactcaaggcattagattactgccattcacaaggtattatgcaccgagatgtgaagccccacaatgttatgatagatcatgagcttcggaaactccggctgatagactggggccttgctgaattctatcatcctggcaaggaatataatgtccgtgttgcctccaggtacttcaagggtcctgagcttcttgttgacttgcaagattatgattactctctggacatgtggagtctgggctgcatgtttgctggaatgatttttcgtaaggagccatttttttacggtcatgacaaccatgatcaacttgttaagatagccaaggtacttggaacagatgggctgaatgtctatttgaacaagtacagaattgagcttgaccctcagctcgaagccctcgttggaaggcatagcaggaaaccctggttaaagtttatgaatgcagataaccagcacctagtgtctcctgaggccatagatttccttgacaagcttttgcgttatgatcatcaggagaggcttactgcacttgaagctatgacgcacccgtacttccaacaagtgagagccgctgagaacagcaggacgcgagcgtgacaggcaaagagcgaagaccatctgctcttttatcagtcagtcaggttgtatgagatgagtagccgttgggtcacttggcagaaaataaacaatagcggtagagcctgtactgtacgtaacgtaacctcctcgaggagttgtgaggtttgggacgtgattgcgaacatggtatattaatgattgttcatgtaaggtgctgtttggttcaagaaaaaaaagaaagaaaaaaaaaaaacacaa

SEQ ID NO: 267584 - DNA, 455 bp, Zea mays
actgacacggtccgcgacctgggactgtcgtgagattccttgccccctttccccttcaccatcgtcgaaaccctagccccgcctcgccgccggcacgccggatcggtcggtgccatgtccaaggccagggtctacgccgacgtcaacgtgctgcgccccaaggagtactgggattacgaggcgctcaccgttcaatggggtgagcaggatgactatgaagttgtcaggaaggtcgggagaggaaaatacagtgaagtatttgagggtattaatgttaacaataatgagaaatgcatcattaagatcctcaagcctgtgaataaaaagacgatcagccgagaaattagaattgttcagaatctttgtggaggccataacattgtgaagctgctcgatatcgacagagatcagcattcgaaaacgcccagctagatcttcgaatatgttgacaacac

SEQ ID NO: 267585 - DNA, 702 bp, Zea mays
  unsure (1)..(702): unsure at all n locations
ngtcaccatgatcaacttgttaagatagccaaggtacttggaacagatgggctgaatgtctctttgaacaagtacagaattgagcttgaccctcagctcgaagcccttgttggaaggcatagcaggaaaccctggacaaagtttattaatgcagacaaccaacacctagtgtctcatgaggccatagatttcctcgacaagcttttgcgttatgatcatcaggacaggcttactgcacgtgaagctatgacacacccatacttccaacaagtgagggctgcagagaacagcaggacgcgggcatgagaggccaaagaccaaagaggcaaagactggtgctaaccgtggatcagatcatctgctcttggtggagccatgctcttaccagtgatgaaagtggtgaatagtggtttgggggtttacttggcaaaaacaaacagtagctatggcgcctgttgtacccttaaccgcgtcgagacgtgactgaattactcaggtcatcggcttgtgggacctgattgcgaacgagattattcatgtaagatgtttgtcataaaaggtcgccggtgggctgatttgtccggtttgtattgttgaagctagtaaagaatatcccaaaatttgtttggacttaaaaaacaaaaaaaaaaaaaaaaaaaaaaaaaaaaaaaaaaaaaagggcggctgctcgcgatctagaac

SEQ ID NO: 267586 - DNA, 1090 bp, Zea mays
aaaggctgcctgtggaatcgctggtaagcctagacaagtggtcgatgacatcgacgggctggacgtcaacaatgagctcgcggcggtggagtgcattgaggacatctacacgttctacaagattgctcagcacgacagacggccatgtgactacatcgacgcccaactcgagagcaaccctaagatgagggctatcctggctggttggataattgaagtacaccacaagttcgagctgatgccggaaactctctacttgaccatgtacatcatcgatcagtacctctcgctgcaaccagtcctgcgaagggagctgcagctggtcggtgtttcatctatgctgatcgcctgcaagtacgaggagatttgggccccagaggtgaacgacttcatcctcatatcagacagtgcatacagtagagaacagattctttcgatggagaagggaattctgaataggctggagtggaacctgactgtccctacagtgtatatgttccttgtccgttttctgaaggccgcaacattgggcagcaaagttgagaaagagatggagaatatggtcttcttcttcgctgaactggcgctgatgcagtacggcttggtgacgcggctgccttcgctggtcgctgcttcggttgtctacgcagccaggctcactctcaagagggctcccctctggaccgacaccctcaagcaccacacgggcttcagagagtcagagacagagctaatcgagtgcacgaagttgctggtcagcgcacactcgtcgtcccgccgctgacagcaagctgagggctgtatacaagaagtattccagcgagcagttcggaggggtcgcgcttcgcccacccgcagccgcagtggagatgaagtaaacgaagataacttcgtgctacaagtaaacgaagataacttcgtgctagtgtttgttagtataatgtaatggaaggcgagcctgacattcgctaggttttatgtttgcttgtggcggtagtcaagagagtttgaatgcttgagagacagcccgttgtttggaaggctgttctcagagtccaggtgttatctgacttgagatggcatgttgtgt

SEQ ID NO: 267587 - DNA, 364 bp, Zea mays
gagctcattgaatgcacgaagatgctggtgatcgcgcactcgactgcccctgagagcaagctgagggttgtatacaagaagtattccagcgaccagttcggaggggtcgccctgcgtccacccccagaggagatctgcaagtgaacgaaggctactttatccgtgtttgcctattgcttgctttaggggaagtggccatggaaggcgagtctgacattcgctaggcttttttatgtttgcttgtttcagacacccgtttgtttgctaggctgttctcagagtcggttgttatctgacttgtgatggcaactataattctatctagtacaccatttttattcataaatgtgaatggtgttttccc

SEQ ID NO: 267588 - DNA, 538 bp, Zea mays
attcccgggccgaccacgcgtccgatctgtgcctgacaatgccttgcctgaattccaccacactgattgtcggtgcgctgactgatgggaatcaggaacagaagaagatgtggagattgatgatgagaagaaatctgagactgctatgacaaatgaatgagcgttatgggcttggaatgattggatggcggatcagattcttttgctggtgagcaatgccactcaagcaggggcgccgtacaattttaacagcgctgctttgctattgaggagtctggttgttactgcatactcgggcacgcacgctcttttatcatctcacctcatcaccatcatcccacatggaccaatgtcgtctggcggctcctgattttggtctcttcgaactgtaatatctgcagtgagttttttccatcagtttttattttttttttccgggtttctgcatctgtaatagctatttcttcaagccccaaacctgtcttaaatttgccgctataaaaagcatatagtttcgccaaaaaaaaaaaaaaaggaa

SEQ ID NO: 267589 - DNA, 1386 bp, Zea mays
tgtttgtgtctgcatcctgtcagcaattaggatgtgacaggacatggcctccctccaatgcaaaaatcccaaaagctccttgcaggcacacttatttgcattctttgcgctgacatgcagttaggatgcgatagggcctccctccaatgcaaaatcacattaaccatgtcaccgctgtcaattgtttttttgagtttgttcccaaaacctcttaattattattgcccacggatagtcatgttatctacataatccgttttgccactcttcagggttctgcattgtgaatagaggttcatctttgtgattagattgccaccgccgctgctttctactcattcgacgaatgttttgcaaagaagaaatctggtttatcttaccctcgattccttcctatgatacaactaacaaaatgaattggtacattcaggtatctttaaaaccttttcacttccaaattagaatgatatcatgctcaagaggtaacattttctgatgttttttattttaatagtaattattggtcgctgactttttaaaactatttgtgttgtacttcaagcatcttctacactgcatctaagctttgaagagttacggtcaattttgtactaaatgttttctttattttcccaaatgtgtgccacttcctttagtatttttgcagtgcagacgattgaaaactactgttttacatcacctctctgtcataggaatagtttactactctaatgctcattctattaacactaacaaaaagatatatcgcttgaaaacaggtatgtatttcaatcttctagatttatatttctttctttatatatacaaaacaggtaagtttgtaccatttgttttattttttaaaaaaagaaaaggtatgacacttacattagtattttttcccaccagaaacgattgaaaactattgtttcccgtcacctcctgtcatagatggcttggaccctcttattatcctgggagcctcggtggtttggaagcatagaaacagagtggtgttcggtagagtttcttccaacctcactcttattctggagtctgctaatgaggaaagcgagaaatgacaagttgcaggagccaagggttatcctttctggctgctccaagccatataatttagggtggttggatccttcatggatattttaatgtacttctgttgttggcctccgtaagaagtgcatgtatcccgggcgtctttcagctctttgtattcttcgtcttttaatatagtggggcgcagttctcctgtgcttttcgagaaataaaaatatgtgcatctatttaagtctcttaccattaagtgtttataaaatatgtttcattgttcttaaaaaaaaaaaaaaaaaaaagggcgcccagacataa

SEQ ID NO: 267590 - DNA, 1491 bp, Zea mays
gtctgacaagaacagtgaaaacaagcattacctttacacacacaagaacatccttgttaaatacaatgataacaggataattcatgtaaatctcacccaagagtctcctacgcttcttgaagatggtaagaaattggaaatgacatattcagtgaagtgggtagcgactgatgtgtcatttgcacgccgttttgaagtgtacctggactatcctttctttgaacaccagattcactggttctccattttcaactctttcatgatggttattttcctaactggtttggtttcgatgatattgatgcggactttgagaaacgattatgccaaatatgctcgtgaagatgatgatctagagtccctggagagagatgttaatgaggaatcaggatggaagcttgtccatggcgatgtatttcggcctccccaaagtttgatgtttctttctgcacttgttggtatcggtacccaattggcagctcttatcctacttgtgatcgttttggccatcgttggcatgctatacattgggcgaggggctatcatcacaaccttcattgtgtgctatgctcttacatcttttatttctggatatgttagtggtggtctttactcaaggaatggtggcaaaaactggattaaagcgatgatccttacagcatcactttttccattcttgtgtttctcgattggattgttgttaaacactattgctatcttctaccgatcattagcagcaataccatttggcacaatggttgtcatgtttgtactttgggctttcatctcctttccgttggtgcttttgggaactgtagttggtagaaactggagtggtgctcctaacaacccctgccgagtaaagactattccacggcctattcctgagaagaagtggtaccttacaccttctgtcatctcattgatgggtggcctgcttcccttcggcagcatcttcattgagatgtacttcgtgttcacatcattctggaactataaggtgtattatgtctatggtttcatgttgctggtcttcgtcatccttctaatagtcaccatctgcgtcactattgtgggtacttatttcttgctgaacgccgagaactatcattggcaatggacgtcgttttcctctgcagcgtcaaccgctctgtacgtgtatctgtactccatctactactaccatgtgaagacaaagatgtcaggcttcttccagacaagtttctatttcggctacacgctgatgttctgccttggcctaggcatactttgtggagctattggctatctagggtcaaccctttttgtaaggagaatctacaggaatatcaaatgtgattaaatccctgctgcttaagctagcaacagaaaaatcatatgtattgtcagtggaggcatggcctataagaatggattgtaatggtagaccctgattttggaaaaacaaaaaaaaaaaaaaaaaagggcggcagctcgcgatctagaactagt

SEQ ID NO: 267591 - DNA, 666 bp, Zea mays
ttttatcgcgtccggtttcatgttgctggtgtttgtcatcctcataatagtcaccatatgtgtcactattgtgggtacttatttcttgttgaatgctgagaactatcattggcaatggacatcattcttctctgctgcttctaccgccttgtatgtgtatctatactctatatactattatcatgtgaagacaaagatgtcaggatttttccagacaagcttctactttggttacaccttgatgttctgtcttggattgggaatactttgcggtgctgttggatatttgggctccaccctatttgtgaggaggatctacagaaatatcaaatgcgactaaacttggtctaggctgctagcatgtcttgtcacaatatggtgcagagtaataccttgagcttctgattgacttcggaaattacacaggaggttgctctccctttcgttactcttttcatcttttttggcctatcttcctggacgtgtggaactgcccatgataaatgtatacctagttggagaattagtcagagtactggaaagtacatgtaggtttttttggtgcggcctctctcggtcaattgtaggagtacattgatgaatattactgcagtgcagattccagtgggctagattcgcccctcttaaaaaaaaactcgagcggaa

SEQ ID NO: 267592 - DNA, 360 bp, Zea mays
gtcttcacatggtagtagtagatggagtacagatacacgtacagagcggttgacgctgcagaagaaaacgatgtcaggcttcttccagacaagtttctatttcggctacacgctgatgttctgccttggcctaggcatactttgtggagctattggctatctagggtcaaccctttttgtaaggagaatctacaggaatatcaaatgtgattaaatccctgctgcttaagctagcaacagaaagatcatatgtattgtcagtggaggcatggcctaaaaaaatggattttaatggtagaccctgattttggaactgctgaggacttgctcccctttgttcgttgttaaaaaaaaaaagag

SEQ ID NO: 267593 - DNA, 392 bp, Zea mays
tctcattcgtccggtctaggcatactttgtggtgctattgggtatctagggtcaaccctttttgtaaggagaatctacagaaatatcaaatgtgattaaatccctgctacttgcagcagaaagatcatatgtattgtcagtggaagcaaggcctgaaaaaaatggattttaatggtagaccctgaataggtttttgaaactgctgaggacttgaccccgctgttcttatacgccacattttgtttgcctgcttattcctgtgagatcgtcctcatagtgtatatctgtggtagttgaggattagcctgaagcacctgttttcatcatttttttcttcatttaattacttcattcgttaggatgtaatcagtgaatattgatgcggcgcgagt

SEQ ID NO: 267594 - DNA, 1345 bp, Zea mays
cggacgctggtcgcgaaagccatccacggggactgagcggctagcatgcaagcgaaacagcaatatacaagtcgtcttcgtctccgtcccttgggccacctggtgttcttctataccacgcgtccacgccactgctaagctgctccccgttcgccaggtcggcgaccaggcgaaacgtgctgctgctgccgctgcaagaagaagaataggtacacagacagcatgtccggagttcaggcgatgccgacggccgtgggcgtcgcggggctgagagggtcagggttggttagcagcagcagtaccagcttgttcgccggcgactgcaagaggaaggctcgccgcccgtcgtactcggcctgggccctcaggcagagccggatcggcagcaggagcaggatcaggagcaagaggggcctcggcatcgtctgcaacctcgcgggacagtacgaggattccttcgacgacgtccagcggcaactgatgaactacttcacctacaaggccgtgaggaccgtgctgacccagctctacgagctgaacccgccgagctaccgctggttctacaacttcgtcgctgtcaacaagcctaccgacggcaagcatttcctccgtgctctcggcaaggagaggcaggagctcgcagagcgagtgatgctcaccaggcttcacctgtacgggaaatggataaagaaatgcgaccatgccaagacgtacgagaagatctccgacgagaacctggcgctgatgcgggagcggctgatggagacggtcatctggccgaccgacgacagcagcacggagaagatcggctgatgcctgatgcctgcggaggcgccgagtcctttcgggttgctgatcaagcttagctccttctattagcatgtatagcagcactctgggtttctctatcagtcagccagccagtcagtcagtgggttgtatataatcggagttgtagtagacagtatacatttctctggggcagtgtttattacaggctatcactgtttgaggtgctaatagtgccgttttgccctcccaattaagcctctacagtcggtctaagtgaagcaaaaaatgcttaccttgtagtagctaaatttacatgtgcggggatatacgttgtaatagaatatttctgcgccccgtacgtggctgtttgatgaaaaaaaaaaaaaaaaaaaaaaaaaaaaaaaaaaaaaaaaaaaaaaaaagacggctgcaaaggaataagatttaagtatacgtgcaattaaagtcaaagtaatgttacaacgagagaagcaacaaatttaaaataacgtggagatcaatttacaacgatcgcaaaagcaaaaactgtaac

SEQ ID NO: 267595 - DNA, 444 bp, Zea mays
tgtcgcatctctcctcgtcggccagctgcagggcacctagcgcgtggtcggcgagcgcgcgggcgggcggcagggggcgccgcggcggcgagcgcgcaggcccccactcacagacgactgggccggccttcactgctacttcggccccttcgtcgccgacgagaaccaccgcgtgctggttggaatggcaagtacagcatgctttgtgattgtcagtaagaatgatatcccaatctacgaggcagaagttggatctgcacccaaaaaagaggatttgtcttatcaccatcagtttatcctgcatgctgcgttagatgttgttcaggacctagcatggaccacaaataatgcaatgtccctgaagtcagttgatagattcaatgaccttgtggtgtctgtttatgtaactgctggtcataccagattcatgttgcttcatgactc

SEQ ID NO: 267596 - DNA, 527 bp, Zea mays
ctgcatgctgcattagatcctgaacaacatctaatgcagcatgcagaataaactgatggtgataaggatctagcatggacaacaaatgcaatgttcctgaagtcagttgatagattcaatgaccttgtggtgtctgtttatgtaactgctggtcataccagattcatgctgcttcatgactcgcgtatcgaggatggaataaaaagcttttttcaagaggtccatgaactttacatcaagatattcctcaacccgctttacctgcccggctctcgcatcacatcctctcatttcgataccaaggtgagggcgctcgcgaggaggtacctgtaatacgggcatatgctggggtttcatcgtaaagcaggcacgccgatttttttgtgccatcatcatctgataacacatacgtctaatttttcttggcgttggctttgttatgaccgacctatggatcatttttttttcgagaacaaaatgacttgtctaaaaaaaaaaaaaaaaaaaaaaaaaaaaagggcggccgc

SEQ ID NO: 267597 - DNA, 959 bp, Zea mays
ggtttcgtaattcccgggtcgagccacgcgtccccagggggtctgccaaatttttaaatccaatggttccgtatacatccaaaaagaaagcaagggggagattatttcaggtgccacaagaccagtatatgctctagagccacatgacgtaggacgctatttgcaagctgaaatcgacgttggcggcgaaatcgcagtagcaaagactgctgggccagtagaccctgatgctgggttggttgattatgtggagacgctcgtaaggaaacctgaaactgaattcaatgttgttgtgcttcaatccaatggcgtcgatcagccaaaagagtcggttcatgtactaaatgtcgggaggctgcggatgaggcttactaaagggaagtcggtagtcgccaaggaattctattcctcatcgatgcagttatgtggtgtgagaggcggaggcgaacagcctcgcaggcgatgttttggcgacccagaaacgacctcagcttggtgctagccttcgagagcactcgagaacgcaacgcagccatcatgctcgctcggcgtttcgctgtagattgcaacatcatccttgctgggccaggcgacaaaactccctggtgaacgaagatggcacctgtgctctgccgataccagataccacccagcacccaccactcctgactgtcctgctcttcctcgcgtcgtaggttcctgaaagaaggcgccgtccgcaccattttaaccgcctgggcgccgcctttctatgtcactgtgctatgttttcccagtccgcgagggttgtaatctgttgttgctgggagatgcgacaccaatgtaagctacaagtctaactgtgtttgacatatgtttaggcctcgttcggttggcctggaacggccctattccatccggatatatttggtcaggattgaaaccggaaacaactaataatggttgttcggttatgtcta

SEQ ID NO: 267598 - DNA, 627 bp, Zea mays
ggaattcccgggtcgacgccacgcgtccggaggctctgccttgtcgatcatccatcgaccgcctcctgctcggcttcccaccccgcctgcctgcgttgcacaccagggaggagctcctccgaccgaccggccatgagctaccaggctcctcctccgggcacctcagcctacccgccgccgggcacggcctaccctccgccaggccagccgcaggcgtacccgccgccggcatacggcgcgccgccacccatggccgccggcgggtaccctcccccgccgcagcaggactctaagggcggcaacgacggcttcctgaaaggatgcttggccgctctctgctgctgctgcgtgctcgacatgtgcttctgagttcgtcgtcaggggctcagggcacggggatggcgcgcctagagtccagaccgatctccatcatgcagtcaggcgaaaaacaatgcatggagctgttctttttttttccttcctttctgaatcatgacgatgatacatctttgtttccgtttccatcctgtatatgctttcccgtgctatgcatggaaacttcactagctaccccagcagggattatgttctctggcgttcatgcgcgtgtgttcttgagctctgaag

SEQ ID NO: 267599 - DNA, 703 bp, Zea mays
aattcccgggtcgagccacgcgtccgcacgcgcgtcgcgtcggccactgctcctctttccgcgcgcgcctgtcggcgccgactggtcagatcgtgccggcgtaccggaacctgctgtcgggcaagtgcgcggcggcggcgggcggcgccgacgaccccgtggtggccaacaacgtgcgcgacgaggacccgcgcgccgtcgcggcggccttcccgtccttcctcgggaagctgcgcaaggccagggactttctggacaacagctactaccacaacaacctggcaaggatcgtcaccttcaactccgactggcaactgctcacggagaaggaggcgctggggcacgtcaaggagtacgccgagaacggcaccctctgggacgaggacttctccgacgcgctcctcaagctcagccggctgcccatgccgccgcacagcaagggcgagatcaggaagacgtgccgctgggtcaaccaccactgatcctgctcaagctctgcacccggccggacggaaatataccagatgggtcttcacgccgatttgtttcgatcttctttcattttgttgctgtatgtttgtttgattattatctgatgatatgcatgtgtttttttatgcggttgatctcttgttgtatcttgttctttcatgtatgtatggactatgggcaacagtaatctctactaacaattaagggagcc

SEQ ID NO: 267600 - DNA, 517 bp, Zea mays
ccggtccggaattccgggtcgacgcacgcgtccgagagatttcagtggcagagttggatcgccacatgtatagtgccggatgcccagatcgggagatcgtcatccggacttcgggcgagactcgattgagcaatttcctcctttggcagacgacgtttagtcacttgcagaatccagatcctctgtggcccgagttctcttttaggcaccttgtttgggctatcttgcagtatcagagagtttaccctgctctggagcataacagaaagttggctaagaagcagttgtgattccatgttacttgcaaggaggtatcatgaagggctattaacatcaaacttttccttctcaatttcctggtaatggtaaatgcaaagaagaacatactagcatataacattatgaatagatcaccatgtaacttaagtgtgattgctaccgtaaccatgtaacttatttgagctcgtacaaatgctgtgattcctatatatatatatatatatatagtgcctggggt

SEQ ID NO: 267601 - DNA, 391 bp, Zea mays
  unsure (1)..(391): unsure at all n locations
gttgtattgtcacctgttgggagcatcacttaccgtggaagaagagtggagtatgggaagaaccaggaggccggagtcgtgtcccaacaactctatgccgcactcagcggctatccagaaaggtctcacggaggacagcatgggatggacgttgcagctaacttagcagcttttttcacatgatcgagctctacaactcttatttccgttttctcgataagtctcacttctatcaacttgttcttctgttgaaacagagtactttaaaagggatccccaataatgactttccctgtgtattgctgatatgttggcactagatatttttggaaactctatttaaagcacagtgttttgcaccaaaaaaaaaaaaanaaacaaaaataaataa

SEQ ID NO: 267602 - DNA, 1326 bp, Zea mays
gaattgacccaaacaatgcttttgccttttgggactggataggcggccgctatagcgtttgcagtgctgttggcgttctgccattatctcttcagtatggctttccaattgtccagaaatttttggagggagcttccagcattgacaaccacttctactcatcttcatttgagaaaaatatacctgtacttcttggtttgctgagtgtgtggaatgtttcatttcttggttatccagctagggcaatattgccatattctcaggcacttgagaagttggcaccacatatacagcagcttagcatggagagtaacgggaagggtgtttccattgatggcgcccaactttcctttgagacaggtgaaattgattttggtgaacctggaactaatggccagcacagcttctatcaattaatccatcagggaagggttatcccttgcgactttattggtgttgttaaaagtcagcagcctgtttacttgaaaggggaaactgtgagtaatcatgatgagcttatgtccaatttctttgcccaacctgatgctcttgcttatggaaagactcctgaacagttgcacagtgagaaagttccagaaaatcttatccctcataagacttttaagggcaaccggccatcactaagtttgcttctgcctacactatccgcatatgaggttggacagcttttatccatctatgagcaccggattgcagttcagggcttcatatggggaattaactcatttgaccagtggggagtggagctagggaagtcactcgcttctcaagtgaggaaacagctgcatggaacccggatggaaggaaagcctgttgagggttttaaccacagcacttcaagtttgcttgcacgatatcttgctgtcaagccatccaccccgtatgatactaccgtgctgccgaaggtgtaattactcagttgtttttgacatgccaattgctgagttctgacttggcaaggttgagcataagtctttcttcatttgggagttatcacagagccagtttggcagtgctgtagttttggttttacctactctttgtagaagaaaagtgaagagtggatattatggaacaaaatatatacctacggcagcacgcagcatgatgaaacatatttaaaaaatttgggtgctctaccacatgcccgtggaataaaacggatgtaaactcagtgcacttataacaccctaattgtggttttgtttgtagttggatagcattatgcatgctgccgctgccgtgatttatgtgcttttacaaatggttcaaacttcaaaaaaaaaaaaaaaaaagggcggccgc

SEQ ID NO: 267603 - DNA, 560 bp, Zea mays
ttcacgcgtccgcccacgcgttcgcccacgcgttcgcccacgcgtccgggcagagctctcatcctctctctctctctttctcgcgctcgctttgcttcctcgtcgaggtccaagttcctgcattgatggcgaccgaggtggctgagactcccgcgccgttggcggaggcggtccccgagacccccgcggaggcaccggcggcgcccgccgccgaggcgaagcctaccaaggccaagaaggcctctgcgcccaagaagcgtgccaacccgacccacccgccgtacgccgagatgatctcggaggctgtcacgtcgctcaaggagcggacggggtccagccagtacgcgatcgccaagttcgtcgaggacaagcacaaggacaagctcccgcccaacttccgcaagctcctgctcggccagctcaagaagctcgtcgccggcggcaagctcaccaaggtgaagaactcctacaagctgcccgcacgcgccccggccgccgccaagccgaagcccaagtccaagaccgctgtgaagaagcccaaggccggtgccaagaagccc

SEQ ID NO: 267604 - DNA, 720 bp, Zea mays
tgttcacgcgtccgcccacgcgtccggtttggcaaagcaagtggcatggccccacgtgctagggtagctgtctacaaggttctttacaggcttttcggtggttatgtggctgatgttgtggcagctattgatcaggctgttcaggatggtgttgacattctcaacctttctgttggacccaatagcccaccaacagctacaaggactacttttttgaatccttttgacgctgcacttctttctgctgtgaaagctggggtatttgttgcccaagctgcaggaaatggcggaccatttccaaaaacactggtgtctttcagcccatggataaccactgttgctgctggagttgatgaccgcagatacaagaatcatttaacactaggaaatggaaaacttctctctgggcttggagtatctcctgcaacacatgggaatatgtcgttcagctgatttctgcagctgatgctctattgggttcatctgcaaccaagtacagtgcattagattgccagaggcctgaactattgaataagaataaagttcaggggagaattcttttgtgtggctattcgttcaattacatttctgggacagcttcaataaagaaagtgtctcagacggccaggaatctcggagcagctggctttgttgttgctgtggagaatagttacccaggaacaaaatttgaccctgtaccagtcagcatccctggaattc

SEQ ID NO: 267605 - DNA, 873 bp, Zea mays
ccctcgcgttcgatggtcttcttccacctcattgtccattgagggagcaggtggatgctttcaagcaacgcatcgcttcagctgagcttgagaagaacagagcggatcaaaatgggagctcaaaagctgatactcatggaaaattacgctcattgagtgagatactctttagacctgatgttggtggttcatcacaggagggacgagaagattcagattatgatgatgatacggaaatggactatgaaacaacggtatctggtgatgaaagccgagagaatgatcaaggtgtcttccggggcagtttaagtttccgatttcatcaaagagaggatcaaaccaatgtacacactggtgagaatgggtcagtcgagtcccctcgaaacgatgattttgcttttcagtcagatgttgccatcgatatgaaacaaagatatgttgcacactgcaacgttgggacagatatcaaacaagccagttttcttggtgagcaaggggagttcattgccagtggaagtgatgatggtagatggttcatatgggagaagagaacaggaaggcttattaaaatgcttgcaggggacggagctgttgtgaactgcatacagtctcatcccttcgactgtgccgttgcaacaagcggaatcgataacacaataaagctatggacacccgatgcaaatgctacatcaatggtttctggacctgaacttgatgtattgagtgccatagagaataatcagcagaagttatgtcggaaccgtcactttgtactatgcatgagttttcagaaggtttcgagtgtgcccagagctgatttactatcgctggagctgcttgaagaaaagggtaatacttggaagaatgatatca

SEQ ID NO: 267606 - DNA, 1059 bp, Zea mays
cccacgcgtccgcccacgcgtccgccaacttccattccctaccgcccgcccaccccactccactccgctcctcccactcgagccatcatggccctcgcctcccgcgccgccgcagccgccgtggcgtgcgtcctcctggcgctcgccgcctccgccgcgggggcgggctccaactcccctgcaccggcgccggcggtggactgtatctcccaggccgccagcctgatcgactgcatcgactacgtccagaaggggagcagcgcgcgccgtccgtccgctgcctgctgcggcgaggtcaagaccgcagtggccagccccgtcatcgtgggctgcctctgctccctcgccggctccaactccagtaacctgggctttcccatcgacatgaagcgcgtgctggcgctccccggcgcgtgcggcgcgtccaacgccgccttcagcaagtgcaacatttccgcgctttccccaaccgaagcacctgcaccgtccgccgccggggggtcatcgagcggtggcgcggcggcatcttcaccgcgcgccgcggcggcgagctctcctccgatgacggcgaccgccctgttggctgccgtggcggctcccctgctcgcctactactgctgctacctcttctgagggtttccttctgctgctgctgccgtctaggctgagtgacctatttctatgtatgtgacgattcaagttaacttgtggagcgcggctgcgcgtgcgtttgtgcttgtgcagtcgccactgttgctgtgttcttgcgatactcttgtcacttgagaggtggtgttgtatggactggtttagctggctcccccgtgcttccatcgacccgcttcgcgcttcatgtttactacttgcgatactgttgttacttgtgattgatgatgataaaagccacggcctgtgttactactgctgtaacaagtccgacagaagaaccatccaatgcaggcccacgaaggggatccaggctgcgccggcctagtactccggcttagggagttggtgtgagttgtaattgagatataagggaatattgattagggaaaa

SEQ ID NO: 267607 - DNA, 826 bp, Zea mays
cgcacacgcactacgacatccgccggtccgagccggcacgagagcagcaggacaagaaggagaagacgcaggggggcaactcaacaagggccaagtcgagctcgggggctaggaagacgcccgctcagaggcaggcggaagccggcgccgagtgcgtggacgcgagggcggaggcattcatcgacagcttcaggcagcagcagcaggtgcaccactagcaggaggaggaatacgtcccgcctccggcgcccgcggcgccgctgtcgcgcacgtcgtccgtcctggaccgcctccgctccttcggcctgtaccgcttccgctccggcgacctcggccccgaccttccctccgccaccgccgccacggagacggacaaggaggcccagcaggcggcgcactacgggcggagccggtcggagccggcgcgggagcagggcaagaagcaggacacgaggatgaacaagtcgagctcgagcggcgtcgtggcggaggcggacgcgcatcagtgcgtgaacgcgcgcgcggacgacttcatcaacaagttcaggcagcagctacagctgcagcgactgaactcgctgctcaactacaaggagatgctcaaccgcggcggtgacaagcagtagccggagcgtgcaaggcggagggagaagggtagctagctgtaggatccaatccaaaaccatactgaaaaaaaaaatcgatctttggtccatcaaccactagacctcgagtgtggattatgcagtgttgttcttattagcatcgttatgtaagaatcgctattttttcagcttgttaatttcaattggtttgtgttgctggc

SEQ ID NO: 267608 - DNA, 604 bp, Zea mays
atcaagcctgtgatcagcgttaaccttcagccagagcagtcagttgtccaacaggacatagttgacatgtacatgaagagcatgcaacagttcacagaatctcttgcaaaaatgaaacttccattggacgttgagaatagtagtccctcaaacgaagattcatactccagtacagttgagaagacatccccatccccatcttcatctgcagcaaagggttctagggtcttttatggaagcagggccttcttttaagtttctaatgcaaagtagtacgctagctcagtagctcgttactatctcctacatacatatacatggttccaggtttatcatatatctgctggcatgtaatcacatactttctgtctccataatatgcttctaggactcactcctggtattgctattagtgttatgctttgctagaagataataatttcatctcatagttgtagattaatcccatgtactaatacatacccatgaaatataatgtcatgaaatcagttctgactcgagattaatccctgcactgtattgtgacctttcgattaatctaaattgtgaccaggtggggactcttcgtcccccccgccctgtc

SEQ ID NO: 267609 - DNA, 471 bp, Zea mays
cccactcgtccgaaaaaaaaaaaaaaaaaaaataaatttttaaaaaaaaaaaaaaaaaaaaaagagaaaggaaaaaaaaaaaaaaaaaaaaaaaaaaaaaaaaaaaaaaaaaaaaaaaaaaaaaaaaaaaagagggcgcccgttttaaaggacccaagtttacttccccttccttgcaacgtcataacttttttttagggccacctaaattaaattcactggccgtcttttaacaacgtcggaactggaaaaaccctggcgttacccaacttaatcgctttgaagaaaatccccttttccccagttggcgtaataccaaaaaggcccgaaccgatcgcctttccaaacagttgcccaccctaaatggcaaatggaacccccctctgtaccggcccattaaaccccgcggttttgggggttacccccaaggtgaccgttaaatttgccagcgccttaaggcccgtttttttt

SEQ ID NO: 267610 - DNA, 392 bp, Zea mays
tcaatgacctcggagattgagaatgggaaggaactggaggacgaattggccaggacgcatatcaatggagacagcagtggccggaattgcagcggggacgacaaggaggcgagggtgccacttccctgggagctgctccagccagtgatgagggttcttgggcactgcttgcttgccccgctgaacccacctgaggtgcgtgatgccgcagcagacgcagtgagggtcgtctatgcccgtgcatgccacgatcttgtggcacaggcaatcttagcatcacggagcttgattgagcttgacaagagcgcacgataggctgccaaggcagcagctgctgcggcttctgggcaaattgttgcagttggcactgctggaagcaatgcatcaagctc

SEQ ID NO: 267611 - DNA, 615 bp, Zea mays
gtggattatgcctttatgttctcaagttctggcgagacccacacgctgttacaagtgtgtcgccgaaatcttcaggctctgaatcatggttttctcagttgcatttcaaatccctttggcacaagggctcgtagcagttcatgccctcatcattttggcagtttggcgtcttcatcagctccaaaacatagcaagagatcttctgcaattctgagatggcagtatgtttagatgtgtttggataaaatggttactgttggtttctgaccgtctcaggcacagtgaaagaatcaagaatcagcctagcttgattggttcaaggcgcagagcaaacatgtccttagaccagaaagtactgaaccttattattttggtagcttaaatcgttaccttatgctctctcggtgtgtgtttgtgtgtgtcaatgtttttaaggttctcttggtgtgtgtcattgtttttaaggtgtcgcctaggcgtccatgcgcccaaaaatcataggcgccttgctcgcctagacgtccaggcgacaggccaacgtcttatgctttaagaaccatggtttgtgtatgctacgttgctactatggattctttgccttgctaggtttggaat

SEQ ID NO: 267612 - DNA, 419 bp, Zea mays
agtatgtttagatgtgtttggataaaatggttactgttggtttctgaccgtctcaggcccagtgaaagaatcaagaatcagcctagcttgattggtttaaggcgcagagcaaacatgtccttagaccagaaagtactgaaccttattaatttggtagcttaaatcgttaccttatgttctcttggtgtgtgtggtgtgtcaatgtttttaaggttctcttggtgtgtgtgtgtgtgtcattgtttttaaggtgtcgccaaggcgtccaaaaatcataggcgccttgctcgcctaggcgtccagtcgataggccaacgtcttatctcgacttatgctttaagaaccatggtttgtgtatgctacgttgctactatggattctttgccttgctaggtttggaataaaaaaaataacattac

SEQ ID NO: 267613 - DNA, 758 bp, Zea mays
attgagtttatagaagaggaggaatctgagatggatgaaaagaatgggcgaaaggaacctgattcacctcaaggcgtgaagatcgaaacccctggtcttacaacaagacagcgagcccttcaaggcaggggtggcaatggtgacccccgcgttcggtttcctgatggattaccaacagcttcatcaagaaagcaaaaggagaagctcgcagatatggaggtacaagccaaaaaggcagaagctgcgctgaggcgcaagatgcaagttgagaaggcagagaaagaacagcaggctgaagcgatgaggaagatactgggaatagattctgagaagaaaaaggaagagaagaagctgaaagaacgagaagagagggaaaaacaggcaagattagaagaatacaggaaaaactgcgtccagactgtcatgggcccaactgggactgtgattacattccctgagagcatggggcttccgagtatatttaactccaaacctgtcagctatccgcctccgagggagaagtgtgcaggcccatcgtgcacaaacccgtacaagtaccgccactccaagactctggtccctctctgcagccttgcttgctataaggccgtcgaggaccgtcctcctgcccaggggagtgaaggtggtggtggccagggaagcgatgctgggcagggaactgatgccgcccaggagagtgctgggaagcaagcatgatgaatctagctgcctgacgcgattcaacgtgaccgtcagtt

SEQ ID NO: 267614 - DNA, 495 bp, Zea mays
ggaattccgggtcgactcacgcgtccgccgacgcgtccgcggacgcgtggggcgctggtggcgcgggtgctggagcagctgctcgacgacgcgccgttcccgcgccggatgcgcttcctcatgctgcggagcctccccttcgtgccgccgcctctgcccccgccgccgccgccgcacgccctccacgttaccacccgagtctgattattggctccatttttctcaggggtttcagcctactgcccgccatggccgcccacccactagcctgcgcttgaagcagctagtagtagatactgtaggttgaccagtgatccacggtgtgtttctcgctttccttttgtctgttgatttctattggctatactacacggtgctgtaaaggatcaattagttctgcctttgaggccctcatttggtgtaaatatttttgataacatggaccatggaaaaaactttcctttgacaaaaaaaggacaaaaaaacaacaaccac

SEQ ID NO: 267615 - DNA, 1314 bp, Zea mays
cccacgcgtccgggagatccacctgcactcaatatcattcagtacataccatgcacttacaactggaaagcagctgggcttactgttactcagcaaatcaaaaccctcagctcttctgaccagtatcttcaaatttcattctccatttctgcaaacacaagaggtcagactgccaatataaattttagaattccgtcatggacatttgctgatggtgcaggagcaactttaaatgacaaagatttggggtctatatctccaggatctttcctatcaatcaccaaacagtggaactccgatgatcacttagcgctacactttccaatcaggttaaggacggaagcaattaaagatgacagactggaatatgcatcccttcaagcaatcctgtttgggccatttgttcttgctggcctatccactggtgactgggatgcaaaagctggcaacggcagtgctatttcagattggatcgccgctgtccctccagcacacaactcacagctggtaaccttcacacaagtatccaacggaaaggcatttgtcctctcaagtgcaaatggcaccctgacgatgcaagagcgacctgaagtcgacggcaccgacgccgccatccatgcgacattcagggctcaccctcaggaggactcaacagagctgcatgacatctacagcacaaccttgacgggaacttccattctgctcgaaccattcgacttgccaggaaccgtgatcaccaacaacctcactctatctgcgcagaagagctccgattccctcttcaacatcgtgcccgggctcgatggaaaccctaactcggtctccctcgagctcgggaccaaaccaggatgcttcttggtgacgggcacgaactactccgcagggacgaggattgaagtcaactgcaagagttcccttgagagcattggcgggatactcgagcaggcggcgagcttttcgcaaactgacccattgaggcagtatcacccgatcagctttgtcgcgaagggggtggccaggaacttcctccttgagccattgtacagtttgagggacgaattctacacggtttacttcaacgtcagggtctgagtcctgacgcttacacttgcagtagaagtaatacagaataaataatgtgcgcgacctttttcttctcatacactgtagcttagaacagccaatgaagaagcaattgggttgtttgaacttgttatgcacgcgggagtattcactttgtgtgaaaccacttgttatgcaataccaagcgagtcataccccgttccttcgatcatttgctaaggaagttcaagt

SEQ ID NO: 267616 - DNA, 836 bp, Zea mays
gccaaaacggggtttcaacctctaattagttgaaacgtcgtttaaatgtagttgtaagaacactggataatgaagtgcattggttgtatatcaatctgacacactatggaaccccaataatatgcactgctgtataattaggttctgttactgcattttgagattccttttgtttgaagaaatgctaaatttgacatctctcttttgttgacaacttaggtacgactaccatgctggtttttggggtgtcatgggacgggaatgtattggcattgtccctccatttattagagaatttaattatccgatggccaaaaattgtgccggtggggatacaggtgtttttgtcaatggcagagaactgcatcaaagagatttagatttacttgtaggaagaggactaccacggacatctggcatgtcatattctattgagatgtcaggcaatgtaatcgatgaagcaactgggaaaaaactgcgcagtcttggaaaacttgctcctacgattgagaagttgaagcgtggttttggcatgcacgtcctgaagagttcagataagctggttctagtgctgaatattggctttgccaattatccactccacaaggctgaccatggggtgccaaaccaacgatttctgcgcattgtgctgttaaatcctgcgattgtgataaatcgcaggtttctctgaattggactggggctctgcgagccaagataatgtggtccagtgacttaaccaccgattatagtatccctcctgctaatttcatcacttcaatggaagcgacgtttgctagtgactctagcctgcaaggcagttcttaacttcactg

SEQ ID NO: 267617 - DNA, 550 bp, Zea mays
  unsure (1)..(550): unsure at all n locations
ccggtcggattcccgggtcgacnacgcgtccgcgcacgcgtccggccaattcccaagctgggagtggttcatcaattaatgagcggacgaattctgggttttctcgcggttcatcagaggctgggttagatgaagatcagtcctcaaccggtaagagtggggactcatcattttttgctggtttcttgaagaagggtttcaaggacctttctttattaaataagtccatggacagcgttaaggtttcaattaatggtcatccaatctctgaaagagcccttaagaaggcagagaagaaagctggtcctgttgacccaggtacatattggtacgactaccatgctggtttttggggtgtcatgggacgggaatgtattggcattgtccctccatttattagagaatttaattatccgatggccaaaaattgtgccggtggggattctggtgtttctgtcaatggcagagaactgcatcaaagagatttagatttacttgtaggaagaggactaccacggacatctggcatgtcatattctattgagatgtc

SEQ ID NO: 267618 - DNA, 2685 bp, Zea mays
aacaataactggtataagtgatatggatcctttaaggtggaaaaactcccaatggcggaatgggcacgttgcatgggatgaagcagcaccaagtgagagacgcaccagggtttccctttgggaggttgaacctgttatcgctccattcttcatttatccctcgccattgttcactgcaaaacgtccgaggcaacctggggtaacagatgatgatagctcagaaatggacaatctttttaagcggaccatgccatggtttggtgaggaggttggcaagagagatctgagtactcaaaacggtttagttcctggattaagtttggttcagtggatgaatatgcaacacaacccctctcttgccaacacggttatgcaaccggaattgctaaattcgttagctggaaaacctgtacaaactctggctgcggctgatctatctaggcaaattagcttccagccccagttcctgcaacaaaataacatccagttcaacacttcgctgctacctccccaaaaccaacagaccgaacagttagcaaatgtaatagctacaccaaaccaattgggaagtgttatagtaccacaaaaggcagttcaaaattgcagttctgaacagaaacagaatctggttacacaaccactgcaagtcagccaaccaatggttagtgtggcacagcctcaacttgtccatactcaactccagcaacctcaagtagttctccaggctcagcctcagcaacctcaagtcattgtccaagctcaactacaacaacagcaacctctggttcaaaatcacaccaccatacaaggtggccttcaacaaatccagcttctgcagcaacagcaagttcagcagtcagtgcaggaacaacagcaaataaagatacagccttttcaggtacctaatgatgccaacatggtaacacagttatctgatcagatgaaaatacaactattgaaggctctacagccacagcagcctctggtcatggaacagcagaaaatgatatttgatttgcagcaacaagcagtaaattctcagtcaactgctcagcagtgctcacaggtagctacccaagtggttggtttgcatagcagtagcactaatcagtacccgacgcagcaaaagactcaacctctcaaaacatttcaagattttcctgggaatgctgtttctattgtaaaaccagaaattgtcacctccgtgggtgctcgctctttgcatgtgcctggtggggtgcagtcaatgaagatggatgaagttccctcttcttcaacatcgccatccacaaacaacaatcctgttattttgcgatcaactccaagtagctccaagaaccaatgtttacctactgcagcaaaggctcctcagtcatctgttgtattgggttctacacttgaacagggtatgaagccttgtgacagtacacaacacccaatggtgattcccaagctggctgaagaaaggccagctactggacaagactacatgaacaacaatcagctggattatttggatacatcatcttcagcgacttcagtttgcctttcacaggctgatggatcgctgcaacaaagttttccaccttcatccttcaatcaacatcaaccgttgagagaagcagttccagatagtgagtttgaggttacagatgcaggaaataactttctatttggggcaaatatcgatggccatatggagcctcttaacgaagacgatttgcttggaactgccttcgaagctgacaagtacatggaacagatgccaggaaacggcatctctaactacatttcatcaaaggattctcagcaagagttatcatcttcaatgatctcacatccatttggcgttgctgatatcgcgttcaattccatagattcatcgatcaatgatatccaattcttaaacagaaattcccgggctccaggtcctgctcaacaacgtatgcgaacatacaccaaggtgcacaagcgcggcgctgttggaagatctatcgacatcaacagatattctgggtacgatgaactgaagcatgacgttgcccgtatgtttggaattgaggggcagctcagcgaccaaaacagagttggctggaaactggtttacgaagatcacgagaaggatgtcctattagttggtgatgacccatgggaggacttcgtgaactgcgtgcggtgcatcaggattctttcgccgcaggaagagaggcaaatgaggctggccagcgactacggagacagctttcttggcaaccaagcgtgcagcagctcggacggaggtcgcccgtggagggtcaccggcgactagaaatagcaggcgatgtctgagcacaaatgtttggtataatccgtccaacgatagcaagaaaatgatacgcgatttctgagcacaaacttttgcactcagatgatcgtgcaaacaattagcattttaagaaaaatgttgcagttcaatgtaactgcaggaatgtctctgatgtagcctcttcgatgtggcagccttaacaatcgatgtgctacagttactctgcctatgtatttactatactacctcggccttgtatatccttttgacgtaggagcagctggaccctgaaccccccggaggctgttagggacaataacaaccgttcataatttgccccagatacagatttgagtggacaaatggattcagtttccgtt

SEQ ID NO: 267619 - DNA, 905 bp, Zea mays
tgtcagcggaaaccaatatcaactgctttccactacatgagtctagtgctggacagaatgatgcaggatgcaacctgaatatctgtcataatttgtctgcaatggttgaagatttgaaaaatgatcttccagcaattggtcgatatcttgagggaaacttgcttccttcagatgttgcaagcttcctagagagggtgagcacgatgatcaagagtcataccccaccacagggcagccgaaggaaagatcgagtaagtcatggccacgctgacccagtcaggtcaaagaacccaagaaaaaggggaagacattcactctttcaagattcttttcctcatcggtatctaggcaccccggtaaacatagtgtttgatggcaccattcctctactaaatgggggtgaggcactgaaggaacaagtggccatggatccctggcgggtctcccagtcccatttgacgatgaccacatcttcttcatctctagactcaagctcaccagaatcaatgaagcggaggcgggaaggtggggatgaaattccaatcacaagggacactgattgcctccaaagtggaaggctctgtgtgcagctgaaaatgttcaagcacagagatggagtgaatgccgaggcagctaatccgatttttcgctgacgaagacaaaacttcgcttggtcttcatattgtacaaagtagcaaagaaacatgacttgtttgctgcactgctgacagttagctggccaccaacaccgctctgcggtattgctgtctgcagcgaggattttcatgtgtttatatcgttgtgaaacagttgcctctgtgaaatagatgccttttcagaagcgatagagttgtaactgtttatgacaattaacatggctattaaaggggcaagtcttttggcac

SEQ ID NO: 267620 - DNA, 692 bp, Zea mays
aacggagtgagtagcgatagtgacgcagtcgtcttgccgccgccgtcccaaacgtccgcgcggtcgtcctcgatcttcccgtaccatcccgacgcgatggccgccggcgcgaagcccgataccgccgcgcccccgcaagcgccttcggcggcgaagggggtcttcatgcgccgcatcttccccttcctcctcgcgacgaacgtcttcatcggagtttatgtatttgccaagacctacaaaagagaccaggaaaagaaaaatgctcagactactgccgctgcagcattgtcatccccagcaagtacatctgccaaggctccagatcctgctcctgcacctgcgcccgaatcggttctcccacctctatccgaagatgagcagtggaatctgtacaaatggattctggaagaggagcggaagatcaaaccacgcaacgccactgagaagaagaagatcgctgaggagaaagctcttctcaaggagataattcgggataagtctctccctcgtttgtgatggttacatcggctgtccttctgatcttgattttttctttctctccacctgcagtccattgaggacaacatctgaaactatgtgccctgttagttagcaaaaccattagcatttctttgcactatcacatctcttcatttgacaataagaaggtcgagttgttttgctctgatgag

SEQ ID NO: 267621 - DNA, 1424 bp, Zea mays
gggagttaagggaggatccgcagagcatggtgaagcagctattaaccaagtgtgctgaagcattaagtgaggagaggatagaggagttccttaaccttgttcagcaagctcgtggagttgtatcaattactggggagccaatccagcggttaggtgcttacctccttgagggtttggttgctagacatgcaaactcaggtacaaacatatatcgtgccctgaagtgccgtgagccagagagtaatgaactcttgtcttacatgaagattttgtataacatctgtccgtacttgaagtttggctatatggctgccaatggggcaattgcagaggcattaagaaatgaggacaggatccatattattgatttccagattgcccaagggacacagtggataacactgatacaagcgctagctgcaaggcctgggggtccaccacacgtgcggatcactggaatagatgacccagtgtcagagtatgcccgtggtgaaggtctggaccttgtagggaagatgttgaaaagcatgtctgaggaattcaggatacctttggagtttacccctctgcccggtatttatgcaactcaagttacaaaagaaatgctggacattaggtcaggcgaacacttgctgtcaacttcactctgcagctgcaccacaccccggatgagagcgtggacgtgaacaacccacgggacgggctactccggatggtgaaaggcctgtctccgaaggtgaccacgcttgtggagcaggagtcgcacaccaacacgaccccgttcttgatgcggttcaccgagaccttggactactattcggccatgttcgagtcaatcgacacgaacctgccacgggacaacaaggagcggatcaacgtggagcagcactgtcttgccaaggacatcgtgaacatcatcgcctgcgaggggaaggaccgggtggagcgtcacgagctcctgggcaaatggcggtcgaggctgaccatggccgggttcagaccatacccgctgagctcgtacgtgaactcggtgatcaggaagctccttgcctgctactcggacaagtacaccctggaagagaaggatggcgcgatgctgctcggctggaagaacaggaagttgatatctgcttctgcttggcactgacagtaacgttttcagaagaccggaagtacacgtcaactcttacatatatatatgtatgtatgcataatgaattacctggtctgctttccgcaaaaaaggacgccctttgttgtacatgtacatgatgctgtacccttagttttcctgaagtgcagaccagagaagagaacattgacattagattgtagctgctaagctgtatggtaattacagttttctttaaaaaaaaaaaaaaaaaaaaaaaaaaaaaaaaaaaaaaaaataaaaaataataaaa

SEQ ID NO: 267622 - DNA, 344 bp, Zea mays
  unsure (1)..(344): unsure at all n locations
gacagtaacgttttcagaagaccggaagtacacgtcaactcttacatatatatatgtatgtatgcacaatgaattacctggtctgctttccgcaaaaaaggacgccctttgttgtacatgtacatgatgctgtacccttagttttcctgaagtgcagaccagagaagagaacattgacattagattgtagctgctaagctgtatggtaattacagttttcttttgctctcatgtattcacccctgtcatggacttctccaagcgtattcttagctaatcagcatgcatacatgctgagatgcttcttaagagagcgcgagggggtacngtaaacgcctaggctc

SEQ ID NO: 267623 - DNA, 1170 bp, Zea mays
cccacgcgtccgcccacgcgtccgcccacgcgtcctagggtttccgcgtcggctagtttggacgcatggctgctgcaggagagtagagaccacagcgcgcgaggcgaggagaataagctatgggcgcgccgaagcagaaatggacgtcggaagaggaggatgcgctccgcgccggcgtgcgcaagcacggcgccggcaaatggcggaccatccagaaggaccccgagttcagcccggtcctctcctcccgctccaacatcgacctcaaggacaaatggaggaatttaagtttcagtgcaagtggactgggatcaagtaaactgcgggttccaaagataactggaccctcatcttccccatcatctagctcgcagcctctgcttctcccagcggcaaacaaatttactgaagctacactgcctgcagatgctgagaaaaagccacaggatgggaaaactctgccaaagtatggtgccatgatcatggaagctctttcggaattgaatcagccgaatggttcagatattgctgcaatcttcggcttcatagagcaaaggtatgtggtgcaatcgacctttagaagatttctaccctcaaagttacggcgacttgcagactcaaacaaaattgaaaaggtcgataacttctataggctcccagattcatttgcaacaaggactccagctcaaataaaagtttcagatccaaaacagaaggatccatctaaggcgtcaaagaccataggcttgtttgctgcctccagccctgcactagaggcagcgatggcagctgctgtcaaggtgactgacgccgaggcaaaagcacatgatgcacatgatcagacgatggaggcagaaaggatcctcaagatggccgaggataccgagtctctcctcataattgcagcagagatctatgatcgatgttcaaggggagagataaccacgttagttccagtggcacaaagggggatttgagatctattggagtctctcttgtgttgttgtacatggataggttctggaatccagtggcccggattgctcctgttgtatgatgtaaccgtttgtgttgtactacctcttctcgaatatttgtctccaatctttatcgtccctagtttatttttgaaataaaatgcaacaaataaaaaagaaaaaaaaaagaaaa

SEQ ID NO: 267624 - DNA, 1589 bp, Zea mays
gccaaaccgtccgttgacatccagcccgagtggtcggtgaaggagcagatccctttctcatccttctccaagctctccttcgccgtcgccgaccagcccgaggatctcctcgtctgtggcgcagtcgagtactacgaccggacctacgatcgcgtcacccccagggccgagcgtcgcctcgagcgcttcaagtcgcggaacttcttcaaggtcaccactaccgacgaccccgtcatccgccgtcttgctgagaatgacacggccacggtcttcgccaatgacaccatcctggccgcactcatgtgtgcgccccgtagcgtccagtcctgggatatcgtaattcagcgtgttggcaacaagttgttcttcgacaagcgtgatggctctcagcttgatcttctcaccgtcaacgaaaccgcccaggaggcactccctgaggccaaggaagacatcaactccgcgcattcgctggcggttgaagccacatacgtcaatcagaacttctcgcagcaggtgctgctccgcaatggtgagaaggtcacgttcgacgagcctaacccgtttgccactgaaggggaggaagctgcttccgttgcttaccgctaccgccgctggaagcttgatgaggagacaagcttggttgctcggtgcgaggttcatgccgtgagcgttgatctacgcggcgagcgccagttccttacactcaacgccctcaacgagttcgatcccaaggtcactggtgttgactggaggaagaagcttgagacccagcggggtgctgtgcttgccactgagctcaagaacaatgccaacaagcttgcacgctggactgcccaggcgctgcttgccggcgcagacatgatgaagttgggttatgtgtcacggctgcacccacgcgaccagtacaaccattccattctcagtgtgatcggctacaagccaagggatttcgctgcacagatcaatctcaacaccgcaaatatgtgggggatcgtgaagtctattgtggatgtctgcatgaagcttggagaggggaagtatgtgcttgtgaaggacccagtgaaaccacaggtccggctttatgaagtgccaaatgatgcattcgagaatgactacgttgaggaaccactccctgaggaagagcaagtgcgtcccttctccgaggatgttgatgccagcgcgaaggaaatggatgctgccgcagaagcggaggctactggaacaactgcaggcgctgagaagagtggtgatgtcgctgctgtgtgaaggcggtggctacaacctgaagaggtctttttcggaccttgaataaggttaccttggctagctatctactacaatcatgggcatctggatacaggtttgatgtttctaccatcgaaggttatgctattattgttcgctgaatcttgagttgtgttccctttatgtgtccttatggctggacttaaatggaatccccaacctatattgccctttccccaaaaaaaaaaaaaaaaaaaaaaaaaaaaaaaaaaaaaaaaaaaaaaaaaaaaaaagggcggccgctcgcgcggacgcgtgggcggacgcgtgggcggacgcgtggg

SEQ ID NO: 267625 - DNA, 278 bp, Zea mays
cccacgcgtccgtatctatggtagaaacatcaaaggttatgctattattgttcgctgaatcttgagttgtgttccctttatgtgtccttatggctggacttaaatggaatcctcaaactatattgcactttccaagactcacatgttgtggattgccagttctgtttactgtgatttgagttgtggtgattgcatttgcatttacttggccatattagtaccttcagtttgttggatgaatacatgatgccatgtgaatattgccatttgtgcaaatc

SEQ ID NO: 267626 - DNA, 473 bp, Zea mays
accggttcggaattgaattcgcggggggagccacgcgtgcggaagatggccaagtacagtagctgcgagtggctagcagttgtggcatttcttctttgcgtggcatcgtggatacttctccggctcgttatgttccctttctggatcctaagaagcacaagctatgaagtgctgctgaccctggacagggagaagcatcggttttatggccccatatactactatgttttcaactgtcttctgttctcactcctagttcttcacatatattggtgggtactgatatggcggatgctagttaaacagattcaatcgaaagggcgtgttggtgatgatgttcgatccgattctgaaggcgaagatgagcattgagattaactttttaggttgaatgattaacttgagaactacattgtgtgatacctgcagcaaggcacaccttctgaaccttttttttttcttttacagaagat

SEQ ID NO: 267627 - DNA, 288 bp, Zea mays
tgataaaactgaagctcaaagctgtctacatgtatgctgctggattttacacatattcaattttcgctctcctgttctgggaaacaagacgttcggactttggagtatcaatgtcccaccatatagcaactgttgttctgattattctttcctacattttccgattcgctcgtgttggcactgttgttttagcccttcatgatgcaagtgatatattcctagagattgggaagatggccaagtacagtagctgcgagtggctagcagttatggcatttcttctttttg

SEQ ID NO: 267628 - DNA, 390 bp, Zea mays
agccaatccttggaggagtcatcagatgatagagatgctgatgaatctgagaagatgaggaatggcaaaaggtctcacaagaatggcggccaccgtcgccgtcaccatcgacaccaccatgaatgacatagtaactctgcagaacctaatgacaggaggcaagtactgaaagatggccagagggcccttgaaggtgacagcgcatactgaagatatcccagcaaggtcgagttaattgtccttattaaggacatgaagatcatttttttttcgttcctgatgttctcagataattattgtattgctgacaacatttctttgatttgtgaatatactaaacatgttgcctatcaaaaacttggggatacgtgatcgcctatgcatttgctt

SEQ ID NO: 267629 - DNA, 510 bp, Zea mays
ctcatcagcaagtctaccaagtcttcataatcaagaagcacaaagcggtcgatcttggaggaggcagaggctgaaagagaatcatggggtgaaaatcccttctacgacaaaaattacagacactaaacctcttcaaaatccacctagcagcttgaagacaacctttgcccacgagcctcatccgagctttttagttgcatcagactgaagacgaccttcccaaatttctgactctcagtgtactgtaccttgttacattcactgccagtctgtcgctggacaatgctgagttctagagcaattgtggactgtgtttgtaaatggaggcagatgctagcgttgatcatttttcactgtacgtttcttccttctggttggtggtacgtgctctgctgcaatttcaagcgaacagatttcagcacctcgtgtcattttttttttataaatttgttatttctgtcaaaaaaaaaaaaaattattaaaataataaaagatgtaaaacttaataac

SEQ ID NO: 267630 - DNA, 415 bp, Zea mays
ccggaattcccggtggacccacgcgtcaagcaacgagcgccgctccccttcacccctccgcctccctccaaaactcaaattgacctagcgagaagcagaagaggcgaagagtgataacgaacctctcccacatcgatttccccaaatcgcctggcgcgatgaccacggcaggagaggtggattcggcagcaggaggtgaggacctggagccgctcttcgactacaagcgagtgcagcccaggatgacgttctgctttgacgacagcgacttggaggtggccgacatcttcaaatactgcaacaagcgcccaaaggtccacacctccacggaggaggagggtaagcctgacgaggaggtcgccgctgccaaggtggtggtcctcgatgaggaggattggttgcaaccaccgtcacc

SEQ ID NO: 267631 - DNA, 522 bp, Zea mays
actaatttcataccctctaaagatttaaaaaaacaagaatctttatctttacaatctaaattctcgctacaacatgttggcttacaacgagattgtaaaaaacagcattaccagtgtacgactgtacaacgctcatttacaaggacaattacggttcacaatttatacacacacatcatacaaaatcgctatcatacacaggcgttgaggtgtacacgcgcaacgctcccgtgccaacagccaggctcacgcgaaaaaaagcccttccacgatgaccgaaaaacaaagcacatccaaatccatccccaaaaagggcaaccgcgacatgcgaaacctctcaaaaacgaccatccggacgttggacacaggccacctctcttcttttcatcgccgtcttcttcacgagaagccgatggtcttaccgagcagccacaggaacagagtccactcgagcataaatatcgtgtgcaggtacgaacggtccagcgtgaaaccgaacacggtgatcccggctctgttgtt

SEQ ID NO: 267632 - DNA, 736 bp, Zea mays
cccacgcgttcgcccaatcccgtccgcttctctccccgtcccttacctcgcccaggaggggagcctcccgcttacaaaccctagcctctactcctctgagcttccaccgctccgctccccatggaggacgaggacaccggccccggcgatgggggcgaggcctctcctccgcaccacgtcgcggcgtcgagcgaccgggcgcgcgacatggtggcgtccccgaccagctcgcgctctgtgacgcagacggtcaaccggtcccaccgcttcgtgatccagggctacgtcgcgcgcgaagggcaggggcgtcgggaagcacatcgccagcgagaccctcaccgtgggcggttaccagtgggcgatctacttctaccccgacgggaagaaccccgaggagaactccacctacgtctccgtcttcatcgcgctcgcgtccgaccgcaccgacgtgcgcgcgctcttcgaactcactctcctctaccacacccgaaagggcaagcataaggagcactctcacttcaaccgctccctagagtccgggccgtacaccctcaacaacccaatatccatgtggggctacaaaagggtctttccgcatactactcttgaacaatcacattttcttaaagatgaatgcttgaacataaactgtacattggcatgttgtaatatcaactattgattattctaagccacattcaatatatgttccacactctgacataggctttcattt

SEQ ID NO: 267633 - DNA, 407 bp, Zea mays
ctccatttcatttccgttccaggtctcctgtttccatcctcttccacggttccacttccacccccatctcctcgccctcggcaagcccagcaaccccaatccccaatcccgtccgcttctttccccgtccccgaccttgccgaggaacctcccgctcccaaatcctagcctctcctccctcgccgctcccctccccatggaggacgaggacgccggcctcggcgacgggggcgaggcctcccctccgcaccatgccgcggcgtcgggcgaccgggcgcgggacttggcggcgtccccgaccagctcgcgctccgtgacgcagacggtgaacgggtcccaccgcttcgtgatccagggctactcgctcgccaagggcatgggcgtggggaagcacatcgccagcgaca

SEQ ID NO: 267634 - DNA, 568 bp, Zea mays
ggaattcccggctcgagccacgcgtccgccgacagtgccaaccttacttccagctttctattccagtagtcccacgcacaaacttggcgcagctgcctgcgcccgcccaactaccccgcgcgcggcagccggcagcaggtcgtgccatggacgacgacgccacggtcggatcgcggcagcgccagcagcagccggcctcgccggcggcggctgattccagggccatgatggcggagctggacgcgccgctgcacgccctcgggttcgagatggaggagctctccccgtcgcggctcaccggccgcctccccatcactcccatctgctgccagccgttcaaggtgctgcacggcggcgtgtcggcgctggtggcggaggcgctggcgagcatgggcgcgcacatggcgtcggggtaccgccgcgtcgccggcgtgcagctcagcatcaaccacttccgcagcgccgccctcggcgacaccgtcctcgcgcaagccgtccccgtccacgtcggacgctccacacaggtttgggaggtgaagctctggaagatggatccgtccacgggagc

SEQ ID NO: 267635 - DNA, 725 bp, Zea mays
caaagagcccagagcccgggaggttacttcgctgcctgaggagtccccggcaccggaggtcttgctaccggctggcggcttcttcttccgttcctccccaagtcctcttcccggaggaatcatgatcgtctgcgtcgccgttgtcggccaccagaacaatccgctgtacctgcagagcttcacggaggcggacgacgccctcaagctccaccacatcgtccactgctctctcgacgtcatcgacgagcgagtgagcaatcctaagaggagtgcacctacattgaatgagacatttttgggtcttctatacccaactgagaactacaaagtgtatggctatttgacaaacacaaaggtcaaatttatcatggtcacgactgatcttgatgtcaaagatgcagatgccagaaattttttcaggaagttccatgctgcatatgtagatgccgtctcgaacccgttccatgtcccagggaagaagattgcttcaagaagctttggtgcaagagtaagcaccatcgttaaatccttcggttcagggaccagttgatcgaatgctacttttgtcagactttctgtaatcaaacatatgtgttctctccctgtttgacaaaattactccctaccgtgtactgcttgtctggtgaacgagatgctattggtactgattgctgaacaaagaaaaatagtggtttattcataaaaaaaaaaattttatttaaatt

SEQ ID NO: 267636 - DNA, 629 bp, Zea mays
ttcagctgttatgacgattgtgcctggtcttggcaagaaggatgtgtacggggcagatcttcccctagcacatatccttgaattggcagctgaggcaatcataactggtgttggggcttcaataggttacgggtcacctttgaccctgactgatacatcaaataaaataaaaaaggggacgcaaggtgatgcttctgtactgaagccaacgctaatgactgctgtacctgctatacttgatcgtgttcgtgatggtgtacgaaaaaatgtagatgcaaaaggtgggttagcgaagagattatttgatattgcctatagccgtcgtctagctgctgtcaatggaagctggttgggtgcgtggggactagagaagcttttgtgggatatgctcgtcttccgaaaggttcgtgcaatcttgggaggacggattcgctttattcttgcaggtggagcacctctgtcaggggaaacacagagatttatcaatatatgtcttggggctccaatatctcaaggatatggcttgactgaaacctgtgctggtgggacattttcagagtatgatgaaacatctgttggtcgtgttggtccccttttgtcttgttcatacattaagttgattagacttg

SEQ ID NO: 267637 - DNA, 415 bp, Zea mays
gcagatctcttgccttggtgtacagtggaatgtaccttggatcagtcaccggcctgtctttgtcacctctgttgattagcagatttggctggccttctgtcttttatgcatttggatctcttggaaccgtttggtttgcactgtggcaaagcaaagcacacagctctccagatgatgatccggagctaagtaaagctgaaaagaggcatatactgggtggcagtgccttaaaggagcctgtcacttccataccatggaggctaattctatcaaaggctccagtgtgggctctcataatatcacatttttgccataactggggaacattcattctgctaacatggatgcccacatactacaatcagggtctgaaggtcaatctaaccgaatccgggcttctttttgtcttggcatt

SEQ ID NO: 267638 - DNA, 604 bp, Zea mays
gaattcccgggtcgacccacgcgtgcgaagaaatcttcaagtcattggcccgtgttacgacttttcatcgacccgccgcctgtagcccttcccgtctctggagtctggaagcttcttcctcctcgcctccgactccgtcatggccggcggcaacctgttcgggcgggcgctgagctacgtagtcaacgagctcctcgtcgagggcctcgccaacaaccgtgcattccagaggttcgctgtgaagaccaacaggactcttgagagcctatcgtctaaagctaaggaagtgagggaggagttatcggaacaattgaaggaagctcgtggccagaaagatcacttcaagcagtgaagctggttcccacatcgattcagcaagatgatactgacaatcttgttacgagtttagtccttgtctgggtactatttatgaatgacattctggatgtcattcaatggaaattagtcttaagtttctctgcccttagattagtagacgcagagcagttggtctcatgtcctttgtcataaactattgtataatttttaataatgtgggcctatgttgatattttttcttgaagtgtgaaatgtagatttgaag

SEQ ID NO: 267639 - DNA, 648 bp, Zea mays
caaagcaatacaaggctggactcagcgtcctgtaagatgacatattcgaagtggatcagccaggggacctgttcctctactgctactaccgagggatgatttacattgggctcaagaagtttcctaaagctttggagcttcttcacaatgctgttaccgccccaatgtcaacattgaacgcgattgctgtagaagcttacaagaagtatatcctagtttcactcattgtgaatggacaggtcccaccatttcctaagtatacatccatatcagcccaaaggagtatgagaaaccatgcccagatttatgctgagctttctacaagctatagcaacggtcgctacactgatttagagacattcgtccaatcaaattcagcagcatttcaatctgacaacaacctagggttggtgaagcaagtgctctcatcgatgtacaaacggaacatccaaaggctgacccagacttacttgactctttcacttgaagatattgctaggtctgttcaacttgaaacaccaggggatgctgaaatgcatgtacttcgcatgatcgaacacggagagagccatgcatccataaaccaaaaggatggaatggtcagctttcatgaatatcctgaacaatataaaagtgttgaaatggtgg

SEQ ID NO: 267640 - DNA, 514 bp, Zea mays
ccggaccggaattcccgggtcgactccaagcgtcgcgtccacgcgtccggctggctttactgaacgaggcctagagggcaacaaattcgtggtcgctgatcgaccacaggggcactcgaggggactctactgtacagactcggttgaagcagtggttgaagagcggaaaatgcgaaaagaaaatgcctgcgatgtactcgaggaaaatgggtgcagccaccttcaggaatcaaacggtctagacttgatgtttgcagactagagtatgacaacatgttatcccatctctgatgttaaatctactccctgcatcgtcattgatggcacaaagttgcaatacagaacatgacagggcttatgagagagagagagagagagaaatttatcctgacacacatgtatggttcacatttggttgtcttcttaaaacaagacgcgacaagatattttttttacataatccacaactcacagttatttcaaaaaaaaaaaaaaaaaaaaacccacgcgtccg

SEQ ID NO: 267641 - DNA, 983 bp, Zea mays
  unsure (1)..(983): unsure at all n locations
tccacgcgcgcgcactgcgcccgctccggcctccagcttttcctttgcgccccagggccggaagagcccacacaccaccaccaccactagatagccagcgacgatcgagccgcgcgccggtggacgcgcacatacacgcggtagcttccttctcaagcctagctagccccatcctgcgcgcaggcggcggcagcgagaattgacgtgcgacgacgagcttgtgcttgctagctagagagcgaggatgtcgagccggaggccgtcgtcgcgtggcaacatctccgaggacgagatcaacgagctcatctccaagctgcaggccctgctccccagctcccgccgccgcggctccggccaggcgtcgacgacgaagctgctcaaggagacctgcagctacatcaagagcctgcaccgggaggtggacgacctgagcgaccggctgtccgacctcatggccaccatggaccacaacagccccggcgcggagatcatccgcagcatcctccgctcctgatcgcccacgcgcctcctactgcggcggcgccggccggcgcgcgagagagcgaggtcggcgacgacctcgatcgccgacaacgacgaccgcgcgcgcccgcgccccccggcccatctgttctctccaccggctggccgccgggagccgagctcaattagctagggtatatctcaacctctctctctctctctctctcgctcgctctacatgtgtgtgtacctttctcttcctttcacctgcctgtctcctccctagatctgagatcatgtggctagctctcccatatcaaaatgtactagctacacgcgcacgtatggtggtctctgctaagcctaagcttcactgggtagtaggggactagtagccctaggggcttaagcaagctaagcttatcctcctcatcagaatcaccattagctcgcaccgcaaaacacaaaaaaaaaaaaaaaaaaaaaaaaaaaaaaannaa

SEQ ID NO: 267642 - DNA, 951 bp, Zea mays
  unsure (1)..(951): unsure at all n locations
nctanctcagcttaacgcaggccctaacggataaagggaagtttcttttggctgctcgaaggttcagacaaggagcacatacagaatatatcatctcttatgactatgatgatctgcacccaagaagcagttcatatgttggaaagttaagatctgacttcttggggacaaagttcatcatctatgatagccaggcgccatatgacggtgccaaaccttcgaggacccgatccactcgccgctttgcaagcaagcagataagcccacaggtttcaggcggcaatttcgaagttggacaagtgacctacaggttcaacttcatgaaatcaagagggccgagacggatgcagtgcaatatccagtgccctgtaggccagggcagcgcttcggatccacccaaggagaaaacaccctcgccgagttccttggacctgaagaacaaggctccaagatggcacgaccatcttcagtgttggtgcttaaatttccacggtcgggtgaccgtcgcctccgtgaagaactttcagctcgtcgccacagctggctccggcggtccatggggcgtcggagacgaggagacggtgatcctgcagttcgggaagatcgaggacgatgcgtttacgatggactaccggcagcctctgtccgccttccaggcgttcgccatctgcctgaccagctttggcacgaagctggcctgtgaataaatggttgccggtttaccaactatgttggggatcagattgtagggggtagtctgaactagttgccctgagcccctcagatgggagaaacctggcgataagaaacagggcggacgttgtccctataagctttgactccttgtaatcgcctaaatgattgatttatatatatatgatgtgcgcctatgttgttgaagagatgaccatgacttatagttgtaaccggcactccctttagttccccgcc

SEQ ID NO: 267643 - DNA, 785 bp, Zea mays
ggaattcccggtcgtcgcatcccagaaccgagatcctcaaaacccttctcccccctcccggatcgagtgcttgagctccgaccaaatctcgcagcggctgcaattccgagcccgaagagcggatcaggcgaggacgacgccttcgattctgatctgcggtcggcgcgacctagagagaaccggagatgcagcagggcgacggcacggaggcgcaggtgacgtgggaggaccagcagaacatcaaccgcttcggtcgcctcaacaaccgcctccacgagctccaggacgagatcaagctcgcgaaggagacgaatgagaaccttgatgatgctgggaatgaactcatcttgtccgatgaagacgttgtacgcttccaaattggggaagtgtttgctcacatgccaagggatgacgtcgagactaggctggagcagatgaaagaggatgcggctaagaagctggagaggctagaggaggagaaggaatccgtcctcgcccagatggccgagctgaagaagatactgtacgggaagttcaaggacgccatcaacctggaggaagattaagagtagtactggagttgtgacaacgtggctgtctcgttctagttcaggtcctgtttttgttcccctgctccccccacagaagcgcttggcccgctcgtgtaatggaagcttgagtctctcagtctttcagaagctcttttcaccaagaacccagaatagttttcattctgcgggtttatacggattgaagctaatggcgctgagcccatgaatcctttt

SEQ ID NO: 267644 - DNA, 649 bp, Zea mays
ccgattcccggtcgacccacgcgtacgcccacgcgtacggacttctccatgccagcgaacgcgtccgagaattctccaccgccggcaccgtccaacttcgtcggccccttgaaacggcctctctcttccatggctccgaccgcggtcgcctaggacgggaagctggtggctgcagtcggcgccagtggtggcggcatgatccccgccggaacgatcgaggtgttcatcaaccatttcgtcaagaacatggacccgttggcttcggtcatggcgccaagggtgtatcaccagctgatcccaaacgaggtcaggtacgagaactggacgacggtgaccggcgaccacttcgagctcgacgccgccacgagggccgacctgcacaggagaggccacgttcctgacgccgatagctggagggaccataagccagcttgtggtgcacaacgtcgggcgccaaggcgacctcaccgccgttagcgaccccagaaaaggcggtgtcccggccggttactgagcaggatcggaattccaagcacggttcattagtcccctgctgatccgtgtgtgatgtgcggcgaagccaggaattatatggaatggaatatacaagagccaattcattatttgacactggtaaagtttttggttt

SEQ ID NO: 267645 - DNA, 677 bp, Zea mays
taccggttcggaattcccgggtcggcgcacgcgtacgcccacgcgtccgcgaggaccgcccgtttgcgccacactacttcggccgagggaaaaggaagcgcgtttagggaccaccaccagatccttgttgctggattctttctttgctactagctaggtgtcccttctcctatcagacagactataagggcaggcccgtcctcaccgttccgccgccgcctcgaactggaggagcgagcatgtatcccgcaccgaaacacacacgcaaacggcaccaccaccaccaccaccgtccggcgaggtagggaggcagcggcgccatgggttgctatcctcccctggccaagatcgtgtctagagcgctcggaaaatgcaacggcgggcgcgagagatggcgggaagggaggctggagctggactttgatcacgccttgggctgtcagcccacggagacccactacatgcggccggtggcgcgcacggtgaccttcgccagcaacaactccatctacgtgaccccgccgtcgccgtcgccacaaccgcagcagcagagcgcaccaccagagccacagcgaccccaaacgccgccccggcacgagcccgagcagcacgacggtgcacccgaatcccaaccccaagccgagcaacccgaggcacccgcgcaaacggaagacgcg

SEQ ID NO: 267646 - DNA, 685 bp, Zea mays
tccggaattcccgggtcgacgccacgcgtccgcgaggcgacaccgtggatgaggaggacagcgacgatgagtttaagggtttcgacgaggatggcgacctgtgtctgccattcgtcgtctcctgggatccgccaccagtactagtttgcacggcaggagcaagttttacgatggaggaagcagaagaaatagttgactctgtcaatgaaaggtacgatgacctgctctcagcatggggtgaaatggttaacaacaaagtgactcctttgcctgcaacgcctctacatattcttccagccataaccacattctgtgtttctggatatgagtgctaccacctgcgatattggactgaaattacttctgaaactgatccagatcatccatatttcaaaccctgtgagatgatgcaagtgttctccttgggattatcaagccctctcactcatcctgttaatatttatgggtatttttctgttcgtgataactgggaaccactccgcaattatctatttaagcgctcaagagctgatccagccatgatttctcagggttgctctttcctgccactctgcagcccatgtcgcgggatatatgtgttgcaatttttcttagtagacattgagctttggataaaagaggaaggagaagcatctgctgacaaactgttgttagtgggtatgtt

SEQ ID NO: 267647 - DNA, 558 bp, Zea mays
cccacgcgttcgcataattctaaaactttagccagtttacacctgttatttagtctactccttgaaaaaagtttttccctttgatctaaacatgaatgcttccttttactccaacatcacagcaaaaaaaaatcaaaagcattgcacttcttactactgactcccccgtgtcactactaccatacaggttagtgcacggtccttacctttatgttctacatgtcggtgggggtctctttttttcaagggcgttctattattgtttatatgtccaccttcacactgattagctgttccttgttcctacacaggtattatctgtcatgtacatttttatacctttccaaattagcttattatctttaaaaaattgtattttcttggctactttacatttgcatgaccagtggcaacatcttcaaacactcctagcttacttagaggaaagaaaacataatctttaaattgctcataagagagaatgtcatttttcagaaaaaaagacaaacagtattgatgccttataaaatcttaaactgatgcatgttaatattatca

SEQ ID NO: 267648 - DNA, 460 bp, Zea mays
accggttcggaattcccgggtcgaggcacgcgtccggggatttgattattgattgggtacaagaaggttttcaagagtttttccagaaactcggtggacattttcatgtgctttctgggagaagcaaaacaaattcacaagagccaactatggattctgtgcaaactgataagacccccacagtcttggtacttatgcttgcacaactctgtgtttacattgaacaaacaacagtccctaaagttacagaggagttagcttctttttttggaggtggtgcacatagctacgaatatggaccaccttttgtgcctggagaaatatgtcggctatatcgttcatctggagagaaattcttgcaccattacataaatatgaagacccagaagatctccaaacttcttaacaagcgatttacaacaccagtttgggttaagcacaaggaaccttagggaagtga

SEQ ID NO: 267649 - DNA, 779 bp, Zea mays
cggaattcccgggtcgagccactggttcgctaccacgcgtccgctcttggccacacccactgaccgcgccacaccacacctgtggctctccgcctcgagatgctttacacggtgtagctggcaagaagccaggaaccttccctgttccctcccgggcgcaaaggggctcacttttaatttcctcgagaggggactgcctcctttctccggcggcaagccttctcctgccttgttgcctgccactcgggctgtcctccttcttgattcttggcaccgtcggtttaatttcgcgaaatggcggcaggggtgtcgctcaagatggccggcttctgcgtcgtctgggcgctattctggctcgccggctccgccaccgtgagcacgagcaccaccgccttcgccggcggcgaggcggtggtcatggacgcgcggtccgtcgtcgccgtcaccgacaacgacttcgtttgcgccacattggactggtggctgccggagaagtaggactacgacacctgcagctgggggctggcctccctgctcaacctgcgttctcccccttgaagctccgcctgggcggctctctgcaagacatgtacgacaccggcgacgctcgccagccctcctgcgccccgttcgcgaagaacgcgtcggccatgttcggtttctcgcaaggctgcctgccgctgcgtagatgggacgagctcaacgccttctttcagagaaccggggcaaagattgttttcgggctgaatgctctgaatggccgggtccccatgcctgat

SEQ ID NO: 267650 - DNA, 542 bp, Zea mays
caggtacttcagacatgagcgagacgcgcaagaattcaaactacagcaagtgggagttagttccgtttgagaagctgagaagagaagcgcaagaacaccatatccaaatgggtggcgtgtctctatacaagctggacccacgcgtccgggatgatcttgtctgtgtgaggcagcagcgttcatcaagttaagaccgtggccgcctaagcctagttgtttgggcccctgaattgatttcatggtggatctgaaaggatcctagacagcaagacccagaaaatccgttaaacagctctgctgtacccacttgtaaaattacatgagccatcgggttcaaagcgaggcagccctctaccttgaatatggaattcttttattggttgttttgggacttgtgaccttctaggaatagctacttaagctgtctaagggttgttatgcgcacaccacattacatggttttcacttcttttaacacacatttaactgatgcaaataggtcttgccattttttaaaaaaaaaaaaatcttttttattttat

SEQ ID NO: 267651 - DNA, 704 bp, Zea mays
  unsure (1)..(704): unsure at all n locations
cccacgcgtccgcccacgcgtccgcccacgcgtccgcccacgcgtccgcccacgcgtccgaaacaccgcacaaattccgcttgttgcgagccatccagatgtgtacgagccatgtgatgattcctttgcccctgttgatgcactactctcagacaaggcacaactcttgacactacagccaaggttatgtatggaggtagggtctggtagtggttatgtcatcacctcgctggcaatcatgctcaggcagttaggctctggagcccagtacctagcaactgacatcaaccaacatgctgccgagacaactcaagcgacccttgaagctcatggggtgcatgcagatgtgattgttactgacatcatgtctggtcttgataaacgccttgctggtatggttgatgtggcagttgttaaccctccttatgtgccaactcctgtggaagaagtcggatgtagaggcattgcttcgtcctgggcaggcggtttgaatggccgccaagtgatagacaggatccttcctgctgtgcgtgagatgctatcagaaagggggtggctgtacaatggtggccctcgaagatnatgatccttcagacatatgccatctgatgagcgagatggggtatgcatcccgcgttatcttgaagaggtgtacttgggaggagagcctttatgttctcaagttctggcgagacccacacgct

SEQ ID NO: 267652 - DNA, 632 bp, Zea mays
  unsure (1)..(632): unsure at all n locations
cccttagatttctttcccacaganccacaaaggcgggcggcttcttatggaggacattttacaccacattaatgctgctcgtggcgagccttccagatgtgtatgagccatgtgatgatttctttgcccttgttgatgcactactctcagacaaagcacaacttttgacactacaaccaaggttatgtatgtaggtagtgtcagatagtgagtacgtcatcacctctattgcaaccatgttttgtacacaatatatgctttatatatggtgcacttggttccgtctctatttcactttttatcttaccctcttcttttcatgctttttcgttagacgatgacactatcatgcaaggcccactatcctctttgttgtcctctcatggatcctggtccagtggtggaggctgaggaatcagaaaggccccagatcatggccagtcatcgacgcaacggtggagcttatggctggaagtaatatgaagagtctatatttgacaaaaaatcatctaaaattaaatagtgagataaactttgaatagctgatgtaaaattatggagtaacattgtattagttgttgacaaaaaatgtgagaaatttaggtcaataataatatatgtattgtttgttt

SEQ ID NO: 267653 - DNA, 342 bp, Zea mays
  unsure (1)..(342): unsure at all n locations
tctctctcgcatcagcacgcagctgtacncgtacgcaactgcgacaggtccacatcgcggcggcccactcacccccagcgactgccgactgctgttccatggcggacggcgacggcgcggcggcgacggggaagctcgcggagctccccagcggcgccgagaaggggctccccaggaggggcaaggcttcttctgggaggacattaaacaccgcacaaattccgcttgttgcgagccatccagatgtgtatgagccatgtgatgattcctttgcccttgttgatgcactactctcagacaaggcacaactcttgacactacagccaaggttatgtatggagg

SEQ ID NO: 267654 - DNA, 994 bp, Zea mays
gacccacgcgtccgcggacgcgtgggcggacgcgttccggcgagacgcgagtcgtcctcctctctgtcttcgctcggcgatctatcaaggagggtgagggggagatggcggagaatccgcagctgtttgggaacgggatgccggtgccgttctacggcgagatgttcgtcctcgtccgcgacggcgtcgagttccacgtcgacaagatcccgtcagctcctggaggtcatgtgaaaacaaaaggcacaatttacctgtccaatataaggatggtgtttgttgccagcaagcctgttggcaacttctttgcttttgatatgccactgttgtttgtgcatggtgagaagttcaatcagcccatatttcactgcaacaacatctctggattcgttgaaccagtcgttccagacaatcagaacagggccctgtactcaactcacaccttcaagatcttgttcaaggaaggcggctgtggtactttcgttcctctcttccttaacctgactgcatctgtgcggcgctacaatgagtttgaagcccagtctgctgctagcatggcacctcgtgtggatcctctgcaagctgtgcagactcctgttgatgacatgatgcgtcatgcgtatgttgacccaaacgatcctaccaagatcttccttcagcaacctgcgccagaatcgcagctgaggaggaggaactaccacggcccagctgatgcaaattagcgcttggctggattggcagaactcatgctcaattaagtgctgtgtccatttgagcatttcacctatccttgtcgtttaccacaactgacttccatattcgggtacccctgggtcctgtgaccttacatatataggacataatgttgcgagttctcgcaatatgtaatgtacataagtggcgtgttcatatattattgctggagcctggagggtcaacttggatgtgggttgcttggatattgctgatctgctggtgctgcatgtttctctgc

SEQ ID NO: 267655 - DNA, 432 bp, Zea mays
gtaatcgaccccaccgggccaccgttccttgccaactgccaagcatcaccgcgaaatctaataactcgttgctcttcgtcttcgctccgcgatcgatccaggagggggaagcagaaggagggatggcggagaacccgcagctgtttgggaatgggatgccggtgccgttctacagtgagatgttcgtcctcgcccgggatggcgtcgagttccacgtcgacaagatcccatcagctcctggtggtcatgtgaaaacaaaaggcacaatttacctgtctaatataaggatggtgtttgttgccaacaagcatgttggcaacttctttgcttttgatatgccactgttgtttgtgcacggtcagaagttcaatcagccaatatttcactgcaacaacatctctggattcgttgagccagttgttccagacaaac

SEQ ID NO: 267656 - DNA, 371 bp, Zea mays
aacctgccccagaatcgcagctgaggaggagaaactaccccggcccagctaatgcgaattagcgcttgctggattggcaaaactcatggccaatgaactgttgtatctgtttgaacaatttatcccacctggcttcaatatccgggagcccccgtatactgcgaatctgtggccgttacatcgtacataatgttttgagttcgctcaataatgatgtacataagcagtggtgtactggtgtgttcaaataatattgtagtgttaagtaactgctccgtgttgctgatttgctggtgtttcgtgattgctgccgacatacaaatcgtatatagttcaaatgatttgaattgaatcatttttatttttatttg

SEQ ID NO: 267657 - DNA, 1260 bp, Zea mays
gggcctgcccccccaagccaagcagaatcctcgcccggcaatgcagcacctggccgccgtgctcctcgtcctggcggctaccaccgcgctgccgcccggcgcggcggcgtggcgcccgtggccgccgcgcgacaacgcgacggctgcggcgggccttggcgcgtccaagaggctggagggctcgtcggagttcgtgaagctggagtaccacatgggcccggtcctggcgtcggccatcacggtgcacccgatctggtacgggccctggccgggggcgcacaagcgcacgatccgcgcgttcctccgctccctgtcgccttctgccgccatcccttcgccgtccgtgtcggcgtggtggcgcgcggtgcggctgtgcgcggaccagacctcggcgaacgtgtcggcgtcggtgtcgctgggcgcggagaagtcggacgcgcgcatgtcccgcggcgcgcgggtgtcgcgcatggacatgcaggcagtggtccgcgacgccgtgacggtgggtcgcggaccactgcctgtggacgccagcggcggcgtgtacctggtgctgacgtccccggacgtcgccgtggacgacttctgcgggcaggtgtgcggctttcactacttcaccttcgcgtcggtggtcgggtccacgctgccgtacgcgtgggtgggaaactcggcgcgcacgtgccccgaggtgtgcgcgtacccgttcgcggtcccggcgtacgtgcgcgggcgcaggcccgagtccccgcccaacggcgacgtcggggtggacggcatggtcagcgtcatcgcgcacgagctcgcggagatggcgtccaacccgctcgccaacgcctggtacgccggcggcgacccgtcgttccccacggagatcgcagacctctgcgagggcatctacggcaccggcgggggaggggcgtacacggggcagctggtcacggacgcgcgctccggcgcggcctacaacgtgaacggcgtcggcgggcgcaggttcctcgtgcagtgggtgtggaaccccgtgctcagctactgctccggccccaacgcgctcgaccagtagctgtttggtttcggtttcgtttcatctcctactaggatggaatggaatgggattttactacgtaccaatgaatcgaatcctctagcgcatttggattttcctctcctctcctctcctctccccggggaaatccatgggatgcttctgtatagagttgttattatcaattaattaatgccactttcggtggggaaaaa

SEQ ID NO: 267658 - DNA, 829 bp, Zea mays
gcgtgccccgccgcgttcccgccgcgacgcccccccgccgccgagatgtcgcccccgcgtccccgacaatgcattcatggacggggaaggatacgggtttcagtctgaactgagagttttgaagagcagcagctgtgttcggctcacagttgcaggggtcggcagagtgattgaatccttcaaggctctcgagtacttggatgttcggtcatgccctcaggttacaagggacagctgcgagcaagctggagtgcagtttcctgctggctgtaaggtgaatttcgatggcagtttgctggaatctgatccatctgctgagatgttcttctaaaatgtgatctcggttgaaatcagatttagtgtgaactgcaaaactaagatttgaagagctcggtcatggaggcgagtgcttgacattgctgctgatctttcactgtcaaaatctatgcaagaacctgagaccacaacggatgcaagccatgatcatattcagtacccaattcaatatgcatgtgatttaatctgtagaaagtagcgcaaaagaccatgaaataagttgtctgaccaaagaacgtatttgcattatgtattgtgccagtgcagcgggtgtattaaaaaaatgtgcattttaatagactggtttcagtggattgtacgcagttctgttttttatctgcatcgctggtatagatctttgttttggcgttatgccaaacagggaaacaagtgttcggtttgttgtcttatgctcaaatactgctcccacctgccagaattggtgggatgtaagccgcatattttacgatactatataaaagtattcgatatt

SEQ ID NO: 267659 - DNA, 516 bp, Zea mays
cccacgcgtccgcccacgcgtccgtctctaggaagcaagggaatcacatcgccatggcagccaagatgtttgcattgtttgcgctcctagctctttgtgcaaccgccactagtgctacccatatcccagggcacttgtcaccactactgatgccattggctaccatgaacccatggatgcagtactgcatgaagcaacagggggttgccaacttgctagcgtggccgaccctgatgctgcagcaactgttggccttaccgcttcagccgtgccagatgccaatgatgatgccaggtatgatgccaccgatgacaatgatgccgatgccgaatatgatgccatcgatgatggtgccgactatgatgtcaccaataacgatagctagtatgatgccaccgatgatgatgccaaacatggtttcaccaatgatgatgccgagtatgatgccttcgacgatgacgccgagtatgatgccaccgataatgatgccaagtatgataccaccgatgatgatgc

SEQ ID NO: 267660 - DNA, 982 bp, Zea mays
gaggatagttgtaggacagagagatgatggacagcaataccagcataactttcccgcgcctccggctgaatcaagagtttttgcaagacccactcaatcttttgcacatactcctgattatggtgtgctcagttatccatctcaacctgccatgccttttaccccagcgttctttgccccagggggcagtccatacttggtggatgcaaaaggtgcaccagtcataccaccgctgtcaggtctaagcctcggcatttctcatccatctttcaacaccagagcaacacagccctcatctaatgaactgagttacttccatcctagcgtggatttcagttatggagtgtcatctgaaggcgcacgtagggaagcagggagctactggcccatgtcctaccagggtcagacaatgtttgtggatgaacgcatgaggaatgtatcacaggatggtacttctgggttggtgctgaagcgaaaagagccagagtcgggttgggatttgtacccacgtcgttgagcctgagcctgaaggtttgttgcagtcgcaatcgattttgtcccactctcttaaaaaggatatgttcaatgctccgtttatggcggcaccttggacattgtattttagggtatttctttggcacgggcccagttctactaggtctgaagacatacacggagaactgaataagagatcagctacaggtagatttgacagatgttgacatggcaaggacattgttagctgctggaaaccacctcgtgtagatctggttctttgtgaatgtattagctttgttttagttgacataatatagccaaattgctctctagggagctaaattatgtaaatcatcatcgtataactcatagatgaaatgcatccctttttatctatctttatttttccagtgttggtgcaagttgtactgtggtcacctacattgtatatatgtcattgttttaacctgcgcattcaggtttg

SEQ ID NO: 267661 - DNA, 744 bp, Zea mays
  unsure (1)..(744): unsure at all n locations
ccggaattcccgggtcgagccacgcgttcgcggaaagctggttatccctgcccaccttacaagattattatacttgactaagcagatggaatggcagaagatgcccagaatgctttgaggcgtaccacagagacttactccaaagtgaccagattcttttttatatgcaactatatcagcaggataatagaaccacttgcatcaagatgtgcaaagtttaggttcaagcctctttcagaagaagtgatgagtagtcgcattatgcatatatgcaatgaagaaggcctcaatcttaatgctcaggcgatgtccacactgagtgtcatttctcaaggtgatcttcgtcgtgctataacctaccttcagagtgcagctcgcttatttggatcttctatctcttccagtgacctgatcagtgtttcaggggttatccctgaagatgttgtcaagtcactgcttgcagcctgcagatctggtgaatttgacgtggcaaacaaggaagttagcagcattatagcagatgggtatccggtctcacagctgatggcacagtttctagatgcgattgttagcgcggatgatattccagatgatcaaaaggcaaggatatgtaaaaagcttggggaaactgataagtgcttggttgatggggcagatgagtatctacagctgctggatgtcgccagcgagactattcgcgctcttttcaacatgnccgcgacgctggtcttctaagagttcata

SEQ ID NO: 267662 - DNA, 1668 bp, Zea mays
cccacgcgtccgctcatgtactatagtactgcgctgcgccctttcatttacccggagtagtaaacgagaagaggaataattgtgtcgcaaactaatccgtttcgccgctgcctgctgcttgagccaatcttccgcgggtcggggccgatgacctgccaactggtctgtttcacttgccattttggataggatcgctcgttttggaattaactttatgctaacagaatctaggtgtcattaagctagattaagcttgctgcttgacttagtagtgtaaatctgtaaagaaaattacctggtttgggtttagtctctataaaagaaatggaacagaggcatgttctggcattgggtgaacatgttctaaaagctactgtttggaagcggaagcataagactgctatggagcaccctgaaggcaatgatgtgacggggtgctctcagcatgatcaaagaaagcaccctgtgatatttgacgacagagctaaatgtaagaagtctaaattaatttcctgtgggagtggagttatattggagtcatattggaactttaagacaagtgggctgcctgtgcgcgtgcttttctaccaacatggtgactggagtgattttccagaggatgttgtaaatctagcacaacaggacttccagttgaagaagccaattacaactgctgtgttccagaacaagcacatcctgttggacttcattcacatgatttgcatagattatgagatgaccatagacaaaccactagcatgggttgatgataatggcaaacgcttctttccagatttatctgctgggctctacacatctaaaccatctcagcatgagaatggtgaagctgatgagtgtgatggaacgcctacaagtgtagctgaaagttctagttcggtatctgttggtgaagtagtttctcatggtaagaggatcaatgatattgcagaggacaacatgagagcacataacatattgtatgaagctgttggtgaaaatatttcaggtccttcattccatttgaatgaatattctagtggaaccatacaagctactggcaagccaaacgattgtcgacgtattgattcagctgtgcggaatttgttgctcaaaggattaggtcagccgtttagtgaggaagatattattggtatctatagaacaccactgctagatcagcgagggcaagttcgttgtggtctcttccagaaggagatcgaagagaccaggagtcgtcgggggaatgcaaatgtacgttatgcttggcttccttgctcaagatataccatggagcagatggcaatgcggcgtgctctggaaatcgcgaagcctcataaggggtccatttgtggtgttgggacttgtcttgctcctgcaaactgtacaaattcatgcgccagatattctgattttcatgaagatggcatcatcagaatgatgttgcgccgtgtaataatgggtaatgttgaggttgctttgcctggatcaaagccatttcagccatccaatggaagttttgataatggtgcggatgaccttcaacatccacagaattacattgaatggcatgctaatgtgcataaacacatatatgctgcatattccgcatttgtccaagcccctctctttaccaaagcacgcccatcatatctctaaatcataccattc

SEQ ID NO: 267663 - DNA, 932 bp, Zea mays
acctgtcatgctagtcatctgggaaagcattgcggaaggataaaccttcacaagatgtagaagggacctcggttaaagaatcaaaacctccagccgctcgtccggattcgtcaaaaatatgttataaatgcaaaaaggctggacatctttctcgcgattgcccagaaagcacatctgaggtggaccgaaatgatggcagtattagtagaagcagagacgatacgggtaccaatactgctcctgctggtggcaacagtcctatggacgaagacgatgttcaagaaattggtgatgaagagaaagaaaagttgattgacttggactacttaactggaaacccactaccaaatgatattttgctatatgctgtacctgtgtgtgccccttacaacgcattgcagacatacaaatatcgtgtaaagattaccccaggcactgcaaagaaagggaaagctgcaaaaaccgcgatgagcttgttcctgcacacacctgatgctaccaaccgtgagaaggagctcatgaaggcatgcacagaccctgagctggtggctgcaatcgtcgggaatgccaagatcacagcgcctggcctcactcaactgaagcagaaacagaagcagaaggggaagaagtctgcaaaacagaactagtgtgaaactggtgggtccaaagaactgatccatccccgattcgcaggaagtgaagctttgcctttgcagaaagtctgtggatgttgtggtttgtcagttgtcgctcgaggcgcatttgggggtatatgcagcctgtcagggagtacacccctttggcgtcacactggtgaggccagagcgacaggcacgcagtaggggacccaagctgctcgtttatgaagcaattgcgatatacagctccacataaaagaagtattgatttcgaagaagaaaaaaaaaaaagga

SEQ ID NO: 267664 - DNA, 361 bp, Zea mays
gcttcctgcaagctgccatggacagaaactggatatgcagggagtcattcagggaggcggaactttgcaagaacagtcggtatcgatttacggatcaaggtccggatgaatcaagagaccagaataaaaccaaggcatcgccaatgtaccatggccatcattgatttcatcttggtttgctcagtcgtgtcatgaacccccaaaaagaaaaaaaaaaaaaaaaaaaaaaaaaaaaaaaaaaaaaaaaaaaaaaaaaaaatggggacacgaacccaggtgctctaaaattagaacgaccagctgccaattcaaagcctatctcactgagcatctagaatcaatactacatgcgcaggataaa

SEQ ID NO: 267665 - DNA, 537 bp, Zea mays
  unsure (1)..(537): unsure at all n locations
ccaagctatccacataaaggacaataagaaactagtactagatctggtttgaatgataggcagagacgggacttgacatataaccaggctggtttttggggtaagacacattcacttcaggaatcaataaattcacaagaagacgtgaaagtgacaaaagtctcaccaccccggagaaaagctaacagggatgagaaatcagaaaggcaggtcaactacatgaaaaaagaaagtgggcctgaaattagtcggactggtgttaagcagcaacagcaacttaaacagctgcaaaggccatcatcaacctcatcgtcgcaggttttatccaagcaatctgagaaggaagatatggaaataaacacaatacttgaggaagaggcgctgatagcagctcacagaaaggaaattgaaagtacaatggagatagtacgagaagagatgaatctattagcagaggtcgatcagccaggtagtcttattgacaactacgtggcacagctaagctntctgttgtcgcggaaagcttctggtttggta

SEQ ID NO: 267666 - DNA, 932 bp, Zea mays
agttaacagacagcacgcgacgatggaatcatttttaatttaagggaaatcctatttcaggcccttaactgcgaatccaataagcacaactggtggagtattttggaggaaaaagtaaccgatcttgcggaatctgggtttacgtcagtgtggcttcctcctccaacacagtcattatctcgagaaggctatctaccacagaatctgtactgccttgactcatgttatggttccctccatgagctaaaattgttgcttcataaaatgagcgaacataatgtaagggctatggcagatgttgttatcaaccatcgaattggaactactcaaggatccaatggcatgtataatcgttatgatggcatcccagtatcatgggatgaacatgctgttacatcttgttctggcgggaagggaaacaagagcactggggataactttgatggggttcccaatatagatcatacacaaccatttgtacgcaaagatattatcgaatggttgatctggcttcgaaaatcagttggttttcaagattttcgctttgatttcacgaaaggttatgcagccaagtttgtaaaagaatacattgaggaatcaaaacctctttttgcagttggggaatactgggatagctgtgaatatagcccccctgactaccgactgaactataatcaagatatccataggcagaggattattaattggatagataacactggaggactttgtgccgcatttgatttcacgacaaagggcattcttcaggaagctgtcaaaggagagttgtggcgtttgcgagattcagaaggaaaaccacctggtgtgatgggatggtggccttcaagatcagttacatttattgaaaatcatgacactgggtccactcaaggtcattggccttttccgtcagatcatattatggaaggtgt

SEQ ID NO: 267667 - DNA, 513 bp, Zea mays
atgagttgagcaacatctttacacagttggcaaccatggtttctcaacagggagagctagcaatcagaatcgacgagaacatggaggaaaccgtggctaacgtggagggagcgcagggccagctcctgaagtacctcaacagcatttcgtccaacaggtggctgatgatgaagatattctttgtgctgatggtgttcctcatgatcttcatattcttcgtggcttgaccttctgtaccattctgcccgaggtgctctggccgctaaacgcgtagcattcttttatttttaactcatactacaccgtgtacacaattttcacccctggacgatgagccgagtcgttcacccttttgtggccatgtaaatcgggaggagttccagtcctgttacgttactcttgattggcaatatctccactgtatttgatgtatcaatatgctcaacagtaacagtaataggcaggtggcaaaaccgcttctcgttcttgtcagatcactatacctatacggga

SEQ ID NO: 267668 - DNA, 404 bp, Zea mays
agatcgacatgcgagagagctcaagatgtgcagcgtccactatggcggaccgccgatctccgacgagtgacgtcgccggccgtcgtctccctcactggttgtactatgtctaactgatcgcggcacggcagagcccccccgcccgcggccgttgtgtatagcaggcagcagcaagccataggctgtagttacacgaagtcccgagcgagtacaatgcttctcgctggcctgcatcgttgttctctagatgccctttctttcttgttatttttgtttctactactactacaagtagacgatgttttgtcctgacgatggatgatacagataagtcatatatatccacatatttcatttttgtcaaaaaaaaaaaaaaaaaaaagaaaatgaaaaaattaaggatt

SEQ ID NO: 267669 - DNA, 533 bp, Zea mays
tgaattcccgggtcgacccacgcgtacgcccacgcgtccgcccacgcgtccgcccacgcgttcgatagtgcagcagagctaagagaggaaggcgaaaaagctcgggttgaactagcagaagccgaacaaaagatgcaattggctttaaaggaagcagaagaggctaaagcagctgaagcaagagcccttgatcagatcaagcaactctcggatagagcaagtgctgctagatcctcaacatccgagtctggagcaattatcacaatttctaaagaggagtttgtatctctcagccgaaaggttgaggagtcagagaagttgagtgatatgaaagttgctgctgctatggctcaagtggaagccatcagagccagtgagaatgaggcaatcaagaaactagaaactgcccgcaaggaaatggaggacatggaattggcaacagaagaggccctaaagagggcagagatgcctgaggcagccaaaaaggcggtagaaggtgagctcaagagatggcgcgagaaggagaagaaaac

SEQ ID NO: 267670 - DNA, 210 bp, Zea mays
ggcgcacaagagtacataaccttgcttttgcgaaattcataataacaaggtgcttctttgaattttggccactgacaacaaacaaaacattgcgctaagccaagggtgctataaagctgcagatattacatatctgatacccagagattacagggaaatatgatgatatccatagggaagtgaaaaaaaggtttaagagaaatcgacatg

SEQ ID NO: 267671 - DNA, 659 bp, Zea mays
ggaatcccggtcgaccacgcgtcggacaccgcttcatggcttctcctccgcctccaagagcagtgctcgctcctccgagtctccagctcccaccacccaaaccccatcgatatcccaagaaatcctcgcaagaaccaacttttagtgcccaatgcggccaagattgccaacgcctccgaaattccggttcctcgcatccccactagcacttccaaggccgcaatcctggcccggaaggccgcgctttggcgggacgcccttgtccccgttgccgccgccttcgcgtcctgtccgctcccttccctcgcggcggagggcgacgggaaagtgagcctcgagtccatcgtggtggcaatcgacgacttcaacaatcgcaaccctttcttcgtggctggggtcgtgttcgtgtggctagtggtgatcccgctcctgcaggagtacgtcttcaagaagtacaagcccgtgagcgccatcgacgcgttccgcaagcttcgcgacgtgccggaggtgcagctgctggacatcaggcgtggcaagagcgtgcggttcatggcgccaccgaagctgaagcttatcgacaagagcaccgtgcaggtcgagttcgacgaggaggacgagaaggggttgtcaaggaggtgctagcgaggttccaagacccg

SEQ ID NO: 267672 - DNA, 1105 bp, Zea mays
tcggttaagccgacatcagtcagcccattctcattgggtctccagatcaagcagttcttcgccttcaagaacaaagtcactaagctcctgtctgaaggagatatgcacagccgatacattcctcagcaagattacttctcagagggactctacacgttcgatattgggcaggatgaccttgctggtgagttctattcaagaacagaggaccaggtcatcgcatccattccaactattttgctggaatttgagaatggtctcaagaaactgtatgaccaaggtgctaggaagttctggattcacaacacgggccccctcggttgcttgcctcaaaacattgccctcttcggcaaagacccatcccaactggacgagctccactgtgtggcgaagcacaaccgtgccgcaaagcttttcaacttacagctgcacgcactttgcacgaagctgagggcagaattcgatggagccagcatcacttacgtggacatccacacgatcaaatacagcctgatcgccaactactctcgatacgggttcgagcacgccactcaggcgtgctgtggatccggaggcccacccctgaactacgatggtaacgtaccatgtggacacacggtgtctctggagggtaagatggtccccgcaaaagggtgcagcgacactactgaattcgtcaactgggatgggatacattacacggaagctgcgaatttccatatcgcctcgcagatcctgaccgggaagtattctgatcctccgttcgtggataagatgccgttcgtcataaaacctagattctgattggcatacaattttccctctttactcacccactttacagcaccggttgcagatacgatgtatacttattacttgccaataaccatatatagcttgagtaaaaaaatcatatatacggcttggtttcagttgtccaaaaggttcagcttttttttttctaacggtcttttctaagaatctgattatgtagagaatttggttgtaagtgagtatataggatttagaatctgaaagtaaagtgtggatttctctaaaccaaacactccataaaacaaaaacaggttttaggcttagggtttcg

SEQ ID NO: 267673 - DNA, 841 bp, Zea mays
cggaattcccgggtggacgccgcgcgtccggccaaaaccacccgggctgctccggcgacccagagacggggatcatcactgacatgaggtactgccccgtggccggggaccacttcgacctcagcggcacggcgttcggcgccatggccaagcccggccgcaacgacgagctccgccacgccggcatcatcgacatccagttcaagagggtgccctgcaactaccccgggcagaaggtgacgttccacgtcgaggagggctccaaccccgtctacttcgcggtgctggtcgagttcgaagacggcgacggcgacgcggtgcaggtggacctcatgggggccaactctgcgtcgtggacgccgatgcgcgagtcctggggatccatctggaggctcgactccggccaccgcctcaccgcgccattctccctgcgcattacgaacgagtccggcaagacgctggtggctgaccatgtcatccccgccaactgggtgcccaacacctactaaccgttctatcgtccagtattagccgctcccagctgctgcgccggccggataataatatacaattctgtgtcattgtgctttactattagtttggtattagtattgtatttctgcatgggactgatgaggcacagagctgaagtgaggtgcctcactccattgctaatttgctactaggtgttaagttggtgtgcggcttcagggagttgaagactgggaagtggaggaagcagtgctttttcccgcccattgtcgtgaatgcatgtaccagtgcgattaagattatataaattatattgacagtaaaaacaaaaaaaaaaaaaaggggcggc

SEQ ID NO: 267674 - DNA, 944 bp, Zea mays
ggctcttgcactaggattgtcaactttaatgcctcccacatcaccaccgacccctactgggtggctgccagggccacttggtacggtgcgccaaccggcgctggcccctatgacaacggtggtgcttgtgggttcaagaatgtgaacctatcctcctttctcggccatgactccctgcggcaaccagcccctgttcaaggatggcaagggctgtggctcgtgctaccagatacgttgtgtcaaccacccggcatgctctggcaacccggagactgtgatgatcaccgacatgaattactacccagtcgccaagtaccactttgatctcagtggcacggcgtttggtggcatggcacagcccggccgcgacaatgagctccgccacgccggcatcatcgacatccagtttaggagggtgccctgcatctaccccgggcagacggtgaccttccacatcgagcacggctcaaaccccaactacttagcagtgctcgtcgagttcgaagatggcgatggcgatgtggtccaggtggacataatggaggccaactctgggtggtggatgccgatgcgcgagtcctgggggtccatctggaggctggacgccaaccacaggctacaggcgcccttctcgctgcgcgtcaccaacgagtccggcaggaagctggtggccactcgggtcatccctgccaactgggcgcccaacacctactaccgctccatcattcagtactagctctctgctactgcgcctcgaccgattcggtgtcatttggcttcatttgaactgtatgtaattgtatcttcacgtgcacaggattacggtgccttaactagttagtcagtgagacgtcaagaatgacagtaggagatggatgaggaagcaagtttggatgtgtgcttcctctcttacgttactgtcaatgcatgaattaacgtgatca

SEQ ID NO: 267675 - DNA, 1582 bp, Zea mays
gggtcgacgaacccttcgggcccgcggaaacctaacccggcccggcttcgccaacggcaatggccccggcataatcggtgcttccccttggaacggctggccttcgggaaccgcaaaccccgctgcggcggtggccttctccttaccggggctcgcttctcccttctccgccttcccgcgtcctcccgcggccccgcccccagcgggatccgggcccctcatgtcgaaggcgaaggtctacaccgacgtcaacgttctgcgtcccaaggagtactgggactacgaggcgctcaccgtccaatggggtgagcaggatgactatgaagttgtcagaaaagttggaagaggtaaatatagtgaggtctttgaaggcatcaatgttaacaataatgagaaatgcatcattaagatccttaagcctgtcaagaaaaagaagatcaaaagggagatcaaaatacttcagaatctctgtggaggtccaaacattgtgaagttgcttgatattgtcagagatcagcattcaaagactcccagtttgatatttgaattcgtcaacaacacagacttcaaagtcttgtaccccacattgacggattatgacatccgctactacatatatgagctactcaaggctctagattactgccattctcaaggcatcatgcatcgagatgtcaagccccataatgtcatgatagatcacgagcttcgcaaacttcggttgatagactggggcttagctgagttttaccatccaggcaaggaatataatgtccgcgttgcatcgaggtatttcaagggacctgaactccttgttgatttacaagactatgattattctttggacatgtggagtcttggttgcatgtttgctggaatgatatttcgcaaggaaccattcttttatggccatgacaaccatgaccaacttgtgaagattgcaaaggtccttggaacagatgggttgaatgcttatttgaacaagtatcacattgagctggaccctcaacttgaagctcttgttggaaggcatagtagaaaaccctggtcaaagttcatgaatgctgataaccaacatctagtatcacctgaggccatagattttctcgataagctcctgcgctatgatcaccaagacaggcttactgcacgggaagctatggcacatccctacttccttcaagtcagagctgtggagaacagtaggacgagagcacaataatcatggtctgcactcttgaaatggagttgttgctagttcgtgaaaatcataggcttaaatccatgttcagtattcacatcgctccaggaatctgggccatgactccatggcaatgaatcaaaatagtacgagccgcatcatgtggacaaccttggcagatctttttattcttgtctttattgctgggagcactgtagctttaaacctacaagtagtgcttgaatgagatgagattcatatcatctcctgtggtggaatgtgaaattgtatgtgacctttagactaattaaaaagtacaatacagcgctaagcatactgcttgtattatgttgtgctattatgtatctacgattcttattt

SEQ ID NO: 267676 - DNA, 469 bp, Zea mays
tcagagctgtggagaacagtagaacgagaccacaataatcgttgtctacaccctcgaaatgaagttgttgctaatttctggaacatcataggctaaaaccgttcaataagcatctcgctccaggaatctgggccatgactccgtggcagtgaatcagatagtatgggtcgcatcatgtgggcaaccttggcagatgttttaattgttgtctttaatcttgggactactgtagctttaaacctacaggctgtgcttgaatgacatgatattcatatcatatcgtctcctgtggtgggatatgaaattgtatgttatctttaaacataaacatactggttgtattatggtgtgctattatgtatgtatgattcttatttattttgtgtgatattgtgatgaaatactcatggatctcataaaaaaaaaaaaaaaaaaaaaaaaaaaagggcggccgctcgcgatctagaac

SEQ ID NO: 267677 - DNA, 437 bp, Zea mays
gacaggcttaaggatcttaatcatgcatttctcataattgtcaacattgatgccttcaaagacctcactatattgacgtcttccaacttgtctgacaacttcatagtcatcctgctcaccccgttggacggtgagcgcgtcgtagtcccagtactccttgggacgcagaacgttgacgtcggtgtagacctttgccttcgacatgaggggcccggatcccgctgggggcggggcggcgcgaggacgcgggagggcgaggaaggaggacgcgagcgccgctacgacgacggcagccgcggcagcgggcttggcgatgccagaaggcaggcggttccaaggggacgcaccgatcatgcagcgcccatcgccgtcggcgaggcggggcgggctagggtttcggcgggcggaaaggtgggagcgaccgtcggacgcgtggg

SEQ ID NO: 267678 - DNA, 685 bp, Zea mays
ccggaattcccgggtcgacgccacgcgtccgcccacgcgtccgggtaaatgaatctcttggtttgcaatccaaggatgatcctgggaagtctggtcctactgagcatgagattgatcttcaggtggtggtgactttatagtgtactttggacagtcagaaaccttccagcctcagcatgagtcccattagttccactggtcatttcttgatgctgttctggttgataattttgttgaccttgcctcattgccgtaatctacaataaggaaaaaaagctattctttatttcctttgggaaatattctgatctgactagccaagcgatagaataattaactcttgaggttaagttatattattcttaatagggctgacatagggaatagttagggtttcaatgtttcatttcctttccaagcttcacattgcctgtcagaatatggagtcatgtcacccacgattatgcattgatttggatccctctaagtacaagtgactggtatttgcctgccctgcagtaatatatgatgttcaagggagatagcagccccagccgccgcgaagcatgagaaggcgatatataccattccccagtgttccgttttgtgggccccttagatgttgcacaacatggatgtgccaaaacctcatcattcaatgattcattcgttcacctttgctcct

SEQ ID NO: 267679 - DNA, 439 bp, Zea mays
gggaagcggttggcatcgcttgagatggagctggctgcagcaaagcatgaaggtttggtgggcaaatatactcccgagacaaatggaactcattctgggaaaaagccactgattgttattggaataatgagtagctttgggaggaaaaactaccgtgatgctgtcaggaaatcatggcttccaacaggttcaatgctgaagaaactagaagaagaaaaaggcattgtagtacgttttgttgttggaagaagtgcaaatcgaggtgatactttcgatagggagattgatgacgaaaataggagcaccaaggatttcttgatattggatgatcatatagagtctgatgaagagcttcctaagaggaccaaaagtttctttgctaatgcagcaaatacattcgatgctgcattttatgctaaggtcaatgatgatttataca

SEQ ID NO: 267680 - DNA, 559 bp, Zea mays
  unsure (1)..(559): unsure at all n locations
caggaggcccggatcctggtatgcgcttacctgccccctctctctgtctcgtggttctgctgaacgagcactcgcctgcgctcttctctctctcgtggcgacgactgggtgactgccggcgccccaggcctgaggctccatcttcgggcccttcactggctacgagcaccaccagaggattatggattggctggggcagaagcgcgcggagatgctgatgcaggtgctgctggtggcgtctgctgtggcggcgttcctggtgggctacgtgcgcgcggacttccagctcatgctgctcgtctacgccggcggcgtcgtgctcacagcgctcgtcaccgtccccaactggcccttcttcaaccgtaacccgctcaagtggctcgacgctgccgaggccgagcgccacccgcgcccccaggtcagcgccggtgcggcagcagggggaaagaagaagtccgggaagaacaagtagttggtcgatgtgtgttcttggtcgatttgactcaacctgtttaagatctattcgcagaactaatcaatcataaaaagagatnctgag

SEQ ID NO: 267681 - DNA, 361 bp, Zea mays
  unsure (1)..(361): unsure at all n locations
nccactcgtccgccacgcgtccgggaccgtggggaccgtggctaccgttccactctcgtgcgctcttgttttcttctctccgttgccgccctacgctcgggtgcccgaattctccattttcgggcccttctccagcgacgagcacccgccagaggattatggattggctggggcagaaacgcgcggagatgctgatgcaggtgctgctggtggcgtctgcggtggcggcgttcctggtgggctacctgcgcgcggacttccatgtcatgctggtcgtgtacgccggtggcgtcgtgctcacggttctggtcaccgtacccaactggcctttctacaacctgaacccgctcaagtgggtcga

SEQ ID NO: 267682 - DNA, 409 bp, Zea mays
ggtctctgattcccgggtcgaccgactcgtccggaatcacagtcagtcccatcttaccttgatcctagaccaagaacctgaactcagcttacctgctgcaccaactggccatgcagcagtcccggcaaaccagcagcaggaggatgagctaggattgcctacagtgccacaagcatccattcgtacataatcaagcagaatcacgtttcttgcagtcaacgatataaaggaagtcgtattatatatctacagctgggtgtaaaaatgctgttatgtaccgcaccacttcgattttttttgtcactccacttgtggatggtgtaaatctgattgaattgaattagttgggagttgggacataataaaaacttattaaaaaaaaaaaaaaaaaaaaaaaaaaaaaaaaaaa

SEQ ID NO: 267683 - DNA, 2240 bp, Zea mays
cctacgcgtccgggcttctctatctagggattcatcttcctctcgtcttccctcttcctctccgaagatacaaggcgccgtcccaggtagaggtagggtcgccaccatgctggaggagctgctcatcttcacccggggcggcctcatcctgtggtcgtcctgccgggcgctcggcgccgcagccctcaagggctcccccatcgacgccctcatccgctcctgtctcctcgaggagcgatccgccgacgccagcttctcccaggacaattacgccctcaagtggaccttccacaacgacctcggccttgtcttcgtcgccgtataccagaagatactccacctcctctacgtcgacgatctcctcgccgccgtccgcaaggagttctcccagatctacgaccccaagcgcacctcctacgatgactttggggacatcttccgccagctccaccgcgaggccgaggcgcgcgccgaggaaatgaagaagtccaagcaggccctctcgtcccgtccgcagcctgctctcacccagaagaagcctggtcccaagggccgcggcggtgattcccgcggcggcgctgctaacaagggcggctctggtgccaaggatgactctgatggcgacggctatggcaaccaggaccaccgtactctggcaaatggtgccttcaagggccaagagaatggcgtccgcaaggagaattcttctcatggccgcactgttgttgtcaagggaaaggagaatggggcccccaaggatgaaggggccttcgatgtaagtaaactacagaagctacgggccaacaagaagaatggtgccactgacaatggaaccaagaagctgaccaaacctgacataaagaagaaagggaagcaagatagggtgtgggacgacaaaccttccaacaagaagctggattttacagacccggcagacgagagaggggacgaggtgacagacaatgtggcggtcatcgagggagaaagcatgatggataaggatgaggatctgagcagcgacagcgaggacgaagaggtggaagatggacccaaaaagaaaggatggttctcatcaatgttccagagtatttctggtaacaatgtattggagaagtctgatctgcagcctgcgctcaaagctctcaaagataggctgatggcaaagaacgtggcagaggaaattgcagagaagctttgtgaatctgtcgcagctagccttgagggcaagaagctaggatctttcactagaatatcatcaacagtccagacagctatggaggatgcgcttcttcgtatcttgaccccaaggcgctctattgacatactgagggatgtgcacgctgccaaggagcgtgggaggccatatgttattgtttttgttggggtgaatggagttggcaaatccaccaatcttgcaaaggttgcttattggcttcttcagcataacctcagtgttacacttgcagcatgtgacaccttcagatctggtgctgttgagcagctgagaactcatgcaaggaggcttcagatacctatatttgagaagggttatgagaaagatccggcagttgtagcgagggaggctattcaggaagcaacccggaacaaatcagatgttgttctggttgacactgctggacgtatgcaggacaatgagccactcatgagggcactctccaagctaatcaatctcaatagcccagacctggttttatttgttggagaagcattggttggaaatgatgctgtggatcagctcactaaatttaaccagaaattagcagacctatctgctgttcccactgctagattgatcgatggtatcctgctcaccaagtttgacaccatcgacgacaaggttggagcagcgctttccatggtctacatatctggagctccagtcatgttcgttggctgtggtcagtcctacacggacctgaagaagctgaacgtgaaatccattgtgaagaccctcctgaagtgattgcaccaccgtgttgaagtgcagtctgcccaaagtctgttatctattgtatccccagtgacctttgtcatcctcatgttggacgtcgtcgtggatttgtaactgtcggagttgcaacaaaacttgtgtgcttgcgtcaacgtgtgccgtcttgctctaataatgcactatctgcattttgaatgggtaaaaaatggatgagtatgcgagtttaaaaaaaaaagggcggccgcccgggaatacggacggtacgtgc

SEQ ID NO: 267684 - DNA, 340 bp, Zea mays
ttcctctcgtcttccctcttcctctccgaggatacaaggcgccgtcacaggtacgctacgaaccaacccccgatcgaccggatcagtatcatatccaactgtagagtagggagaatcagtcaaattcccccgttgtagctgtaggcttggcgttgctgctcgatcgcgctcctgtctagatccaggggcaatcccccttatcaattacaactgggactggtagaggtagggtcgccaccatgctggaggagctgctcatcttcacccggggcggcctcatcctgtggtcgtcctgccgggcgctcggcgccgcagccctcaagggctcccccatcgacgg

SEQ ID NO: 267685 - DNA, 966 bp, Zea mays
caggcagtcaaatgggagcaatacatggcagaactcaccaccctggaccattctcctcccatcctggtgaccagaagaaccccagccaaggtttccaagggccgtttgatggcagcaggcccatgtacacgacgaatcaggctcggatgcacgctccacctcctccacacttccacggagccttccccaggaacgcacctcctcctgagttcccagcggggttccggggagcctggccgtccgtgcaggcacctccgatgccggcaccgtcacatccatcgtctttcccgccgtttcagttgaggccaccgccaccatcgcagcaggatatgtctggcgcaggcggcaccaggtggcccggtggcaatcaaatctacaacccttttgcaccaacggctgcggcggcggctcagagagcggaggctgaccctgagtacgaggatctcatggcatcagttggcatgaagtagcgaagactgctggctggcccctgatctgtctgtggcacaaacacagaggcttcttcctattgcttgccaagatgtgcgggttactaatctcctccaatgtatctctagatggtactgaattccgttccatcatagacaggtgccatgcttgaacgaaaaacaaaaataaaaaataaactagtggaccttgtttgagacatgctgttgggtgccgaggttgtgtttgtgcctatctcgaaatctcatgcatgtgttgctcccggcgtcagctgatgttgtttattttatggagaggaatttgtgagcctgttctgagaaagaagaacatctgttggcattatcacgtgtgtgtatatatacatgaaggatggggtggaatatggtaggtatgcggtatgatgtcaggatgtctccagcagatcgtgtatatacggttgtgtaaaacactttcacgaagtttgaaataggggagacactctcagtgcttgtgactttt

SEQ ID NO: 267686 - DNA, 708 bp, Zea mays
tccggaattcccgggtcgacccactcgtccggatagtcctaaggaccacatgatgattcatataaggattcaaatgtgatgtctactttaggagagttctcttatgaccttgacaagagcaatgctcagaccttccaactagagagaaccgctcaatcacgtgttgtcaacatggttcagcttgatatctcctcaaaccatgggaacttggaacttacatgcatctatcgcttcagggtgcatggcagaaagcccgtctcccccagcactggaggatgaagccctgagctgtgacatgcgtgccaaagcgcgacaacattcttgcagcatttctgcctataggagctttggttcagcggttagcggttagtcggagcatttcagccagcgccgctgcaccagtgttgataatgttgattctattctcgcacattgttgtgaacagcgcggaaataccttgcgaggtttccttaagctgttcctagtttggcatcaagttcgcctgttttctctgctcctcctcccctcctgttaagactgcagcttagtattccgtttgaaattggtcgtctcatttcaccaggactcgctcttaaaaagaagactttgccattatatggcctactcagctagggaggaaaagaaggggaatgctggggccaactgccaagctagttatgcacttatatctaatctattgatttgaat

SEQ ID NO: 267687 - DNA, 613 bp, Zea mays
cacggttttcttcttgtggcaactcagcattgcctactcagaagagccttgttcctcaaacaaagcctctcgcagaccctcagcaattagcagcaagcaggcctaaccagtcacaaggaacaaaaactgatagagcaagtgcacaagcatctgcaattaaaaatgaaggttcacgatccagatgcaataaagctaccattccccattcgagaaacaaaggcagcaagaagacgcaacagcaacctaatggacgtgttcatgcgatcaagttcccagtagagtagcccattcgtaggtaatttattggttaagtggaagtgtctcttctggtgaacagtctcttcttttctcctttccaaatgaaattggttattgtcaggattgttctaatttggactgtcccgatccgaggttttggttcgccggccattggtactagaagctaacagcactagttgtagcactgacgatgaacttacctgtaaatatggccacagaggccttggcttcttcctgccgaaggtcgtggacctgatgaacattttgaatgtagccttcatcttttgggcattgagttctagctgattgatgttttgtgtttgattcttgccct

SEQ ID NO: 267688 - DNA, 1065 bp, Zea mays
atcgaggagactacctacggccatggcgaggagaaggcttctcgcgctcgcctcccggctctacgggaggcctcaggcgacgcagccgtggcggcgacccccgccccggtttctctcctcagctgcgtccggcaccctcgatcacctgaagtcgccgcctttcgcgcgtccggctgcccggaaccccgcctcctatccatgggatcgattcggaggagggcagaagaggaccatgttcatccagacacagtcgaccccgaacccgcagtcactcatgttctatcctggaaagccagttatggagattgggagctctgatttccctaatgctcggactgcgatgacatcccctttggctaagtcgctttttgctattgatggagtaaccagggtattctttggatctgattttgtaactgttacaaaatcagaagaaacttcatgggattgcctcaaacctgaggtttttgctgcaataatggacttctactcatctgggcaaccactttttctggactcaaatgctgcagcttctatggacacagcaattcacgaggatgattctgaaatagttgccatgataaaagaattattggagactcgtattcgaccagctgttcaagatgacggcggtgacattgaataccgaggattcgacccagaaacaggaacagttaagcttaaaatgcaaggtgcctgcagcggctgtccaagttcgtcagtcacattgaagtctgggatagaaaacatgcttatgcactatgtgcctgaggtgaaaggagtagaacaggagttcgatggtgatgaggaagctgaagtggctggatagatcgagagagtttttacaggttttgagggtcaacacagcctgatgttatagcaacttcgcacgtacggtattgccgatcctgatgtatgcaggaggcaggcttagatagcagaggcgtcaatagtctgaaataacatccgttgcactagtatccgaataaagtgacagtgaattgattttttattttcattaaatttctgtgtatatgtgagttactccaagcccgatgatgtaac

SEQ ID NO: 267689 - DNA, 381 bp, Zea mays
gattctgaaatagttgccatgataaaagaattattggagactcgtattcgaccagctgttcaagatgacggcggtgacattgaagaccgcggtcccgtcccagaaacaggaacagttaagcttaaaatgcaaggtgcctgcagcggctgtccaagttcgtcagtcacattgaagtctgggatagaaaacatgcttatgcactatgtgcctgaggcgtcgtgcggctgctttcgctgtttgctgatgtttcctaatgctcgtggttcaaaaaattgttctctatttgataactagaatgcgaagtggtttattctgttcttgctgctgttccttctgcctgtggcacaaccgcacaaaagatgttctctgttagataactag

SEQ ID NO: 267690 - DNA, 544 bp, Zea mays
  unsure (1)..(544): unsure at all n locations
ctcccttcgtgtgtggtggtctgctgatatgaagaatttggtttccctggctcactagaacactatcctttcagagaaacaggaacagttaagcttaaaatgcaaggtgcctgcagcggctgtccaagttcgtcagtcacattgaagtctgggatagaaaacatgcttatgcactatgtgcctgaggtgaaaggagtagaacaggagttcgatggtgatgaggaagctgaagtggctggatagatcgagagagtttttacaggttttgagggtcaacacagcctgatgttatagcaacttcgcacgtacggtattgccgatcctgatgtatgcaggaggcaggcttagatagcagaggcgtcaatagtctgaaataacatccgttgcactagtatccgaataaagtgacagtgaattgattttttattttcattgaaaaaaaaaaaaaaaaaaaaaaaaaaaaaaaaaaaaaaaaaaaaaaaaaaaaaaaaaaaaaaaaaaaaaaaaaaaaaaaaaaaaaaaangggggcggccgttttaaagg

SEQ ID NO: 267691 - DNA, 1615 bp, Zea mays
cagtattcacgaccattctagttcacactcaattcggtcgttttctgcattaacggagtcaggcccaggcctaacctcagttcatccgagcagccgaacacgcccgccgccattctacgccctgctgcccaggtcggacggaccctttgccggagacgagcacacgccacagcagagcagcgcgaagcgagagatccaatggcggcggcggaggggcagtgggtgctcatggcaacggggcggacgccgaccaacattgcggtgatcaagtactgggggaagcgggacgaggcgctcatcctccccatcaacgacagcatcagcgtaacgctcgaccccgaccatctctccgccaccaccactgtcgccgtcagcccctcattcccttccgaccgcatgtggctcaatggcaaggagatctcgctattaggaggaaggtttcagagctgcctcagagaaatcagaaagcgtgctcgtgactttgaggacaaggagaagggcgtcaagatcaagaaagaggactgggacaagttgcatgttcacatagcctcgtacaacaacttccccactgctgctggtttggcctcttcggctgctggccttgcctgtttcgttttcacccttggaaagctgatgaatgtgaaagaagattatggagaactttcttcaatagcaaggcagggatctgggagtgcatgccgcagtatatatggtggttttgtgaaatggtgcatgggagaaaaagatgatggaagtgacagtattgccgtgcagcttgctgacgaaacacactggaatgatcttgtaattattattgcagtggtcagttcaaagcagaaggaaaccagtagcaccagtgggatgcgagatagtgttgaaacaagtcctctcttgcagtacagggcccagacagtggtgccaggtcgggtgttgaaaatggaagaagctatcaagaaccgtgactttgaatcatttgccaaattaacttgtgcagatagcaaccagtttcatgctgtatgcttagacacgagccctcccatcttctatatgaatgacacgtcacaccggataattagccttgtggaaaaatggaaccactcagaaggaaccccacaggtcgcttacaccttcgatgctgggccaaacgctgttctaatcgcccaaaaccgtaaaactgcagcacatttcctccagaagctcctatactatttccctccacaggataatgatttgagcagctatctggttggcgataaatcaattctaggtgacgccggattgcattccatgaaagacgtcgaggctcttccagcacctccagatacgaagataccggatcagaaattcaagggcgatgttagctacttcatctgcagcaggcttggggcaggtccaaaggttgttgttgacgaaggtcaagcactgatcgattcagtcaccggacttccaaaaggcgtgtagttctagatttaggttggaataatggtttaagctggggattaaagacaatggtatcatacaagcaacctgggccggccaataaagatagaacacgttctcgcctaaaaaaaaacaaccgcgcctagtatgtggctgaaatatttgtttcgctaaa

SEQ ID NO: 267692 - DNA, 684 bp, Zea mays
aaatcgattctaggtgtcgccggattgcattccataaagacgtcgaagctcttccagcacctccaagacgaagataccggatcagaaattcaagggcgatgttagctacttcatctgcagcaggcttggcgctggtccaaaggttgtttctgacgaaggtcaagcattgatcgattcagtcaccggacttccaaaaggcgtgtagttctagatttaggttggaataatggtttaagctggggattaaagacaatggtatcatacaagcaacctgggccgggaagatacattaggctcgtgtcacgttggtttcgtgctgattgacttgacggtgtattggtcatgtattatgcatttgcgctggtgttcgttgctgtccaataaagatagaacacgttctcgccttttgttttaaaaaaaaaaaaaaaaaaaaaaaaaaaaaaaaaaaaaaaaaaaaaaaaaaaaaaaaaaaaaaaaaaaaaaaaaaaaaaaaaaaaaaaaaataaaacaaaaaaaaaaaaaaataaaaaaaaaaaaaaaaaaaagataaaaaaaaaaaaggggggccccttttaaggggcccaggtttacttccccgtatttccaacttaaaactttttttttggggccccaaaatttaatttcaggggccgggttttaaaaacctttatattggaaaaacct

SEQ ID NO: 267693 - DNA, 398 bp, Zea mays
tgcggagtcaggcccaggcctaacctcaaggcatcagagcagccgaacacgcccgcggcaaccgccgccattctaccccaggtcggacggacccttgccggagacgagcacacgccacagcaggaattatcgggcgtagagcagcgcgaagcgagagatccaatggcggcggcggaggggcagtgggtgctcatggcaacggggcggacgccgaccaacattgcggtgatcaagtactgggggaagcgggacgaggcgctcatcctccccatcaacgacagcatcagcgtaacgctcgaccccgaccatctctccgccaccaccactgtcgccgtcagcccctcattcccttccgaccgcatgtggctcaatggccaggagaatcttcgctattagga

SEQ ID NO: 267694 - DNA, 355 bp, Zea mays
ttcacgaccattctagttcacactcagttcggtcgttttctgcattgacggagtcaggcccaggcctaacctcagttcatccgagcagccgaacacgcccgccgccattctacgccctgctgcccaggtcggacggaccctttgccggagacgagcacacgccacagcaggaattatcgggcgtagagcagcgcgaagcgagagatccaatggcggcggcggaggggcagtgggtgctcatggcaacggggcggacgccgactaacattgcggtgatcaagtactgggggaagcgggacgaggcgctcatcctccccatcaacgacagcatcagcgtaacgctcgacctgacatc

SEQ ID NO: 267695 - DNA, 544 bp, Zea mays
  unsure (1)..(544): unsure at all n locations
taccggttccggaattcccgggntctacccacgcgtnccggaggtaccgcaaggaggttgtagagagagtactttaatgtggacataacacaacatacactttctgagccagatgatcctgcgacaaggaagcatcggattgagaacatgctcaggctctgtggcaaccatcgtgaaatagctaagaaaccaaaggtccagtcaccagcaaaggaaatgttctgcagtgagaacaagtctccagcaaagcaagtgtttggggatcagaacaaatcgtcatcaaaccaaatttttggagatgaaaacaaggagccgtcggcatggggtgctatagagacccccatgtgcgatgttagagtgactgacagcccagtgtcttctcagctttctccaatcgtatgccaagttgtgggtgcaccattatcagaggaactgaatacatgcagtgcagtggaaggaagtgatccgagcaaggagaagaacagtcttgctggacagaaagatggcggccgcctcttggagtttacataaaatgggagtctgc

SEQ ID NO: 267696 - DNA, 460 bp, Zea mays
agcaatactgacctcgaattggcaagagaaaagggtcatgtgaatgttgttcgtgccatagagggacggctttgtcttttatgtggatggatgagagagaactatgctcctgcttttttggatgcaattgctccacagttcatgacaagaaaaatttgggctgttgctttaccccgtgaagtgcgaactccaaccaggcctcttaagttagagatagctatatatcctgaattacaggcttctaaaccacgttctgtacttaaactatggaaatgtcaaattgagcaaccaaagcttaatcaggctgacccttccattatcatttttgacaaaggaacaaagactgcacacaagatcttaccggcctatgtaggtgacaaacagcagcttcaatggttttataatgcatgttgcggcatggcccaggttttgaacacggttccagtagcaccagcaaatt

SEQ ID NO: 267697 - DNA, 867 bp, Zea mays
tttattgttgtttgataggcaacaggagtatgtcaggcgacaaacgcgttttgtctcaagaaaaccagctaagactatagtagctacaattgaagttgttgccgagtcaatgagtctcaaggtccactcccagaattacaagctgcggcttgaaggtgcatcatggaacagaacgagccaatttgctgttgttctagaggtttttcaagttgccccttctctgttcatggttgatgttcgaaaggtcgccggtgacaccctggaataccacaggttttacaagaacctatgcagcagacttgacagcataatctggaggccaatcgaagtttctgcgaaatctaagctgctgaggacgaccacttgctagcccagcactgagctactgtaaatggcaaccaacaacaagagacgtggttcctagccgttagaagaggggggaacttctggtaaatccagcgtatagctcgtggagctgggattcacgaggatttctgcatctcgctttctcaggtgatgcatgtaccatagctgtcttcgttagatcagacgaggcagctcaaagcaccaggtgtttgtatatatatattttttgtaacgctattgtagatagcctgtgtagctccagccgtgcagctgtatgtagcagaaacctgaatgtccgaaaacgcccctgaatgtcaggtagaatcgttgcttgcatccagttaacaagctggcctatgtggtcatgccaccatacagtagtacacatgcaccacaggatcagcaagaggatagagccgtagtagaatcatggaagcagatatgttgaacttttacaggttgcatctgaatttgatgaggttttaagttattatattaaaa

SEQ ID NO: 267698 - DNA, 897 bp, Zea mays
tgaccgatcgagctagatctccaggactcacctccccaaccgtttgcctccgtctcgcgtgacttcattcccagcggccggcggcgacctccacgtggtgccattcgccggcaacgagcacccgcccaccaggatccaggtttgtgctgcgagagcgcctatccattcaccatgattaatttcgtgctcctgatcagccgccagggcaaggtgaggctcaccaagtggtattctccttacacccagaaagagaggaccaaggtcattcgcgaactcagtggactcattcttacacgagggcccaaactctgcaattttgttgagtggagaggttacaaggtcgtataccggaggtatgctagcctgtatttctgcatgtgcattgatgccgaggacaatgagcttgaagtccttgagatcatccatcatttcgtcgagatactggaccgctattttggcagtgtatgtgagttggatttgatattcaattttcataaggcctactacatactggatgagattctcatcgctggtgaacttcaagaatctagcaagaagaatgttgcaagacttattgctgcacaggattcattggtcgaggctgctaaagaggaagccagctccataagtaacatcattgctcaggctacaaaatgaagttcttcatgcctgccccccttccctctatcttgttattgttgtacaagcaactgtaatgcactggactgcgagtccatttgctctgctcatgtttatggatttcaagactccaggttatttagaatgagcgtgatgtgtaactacattgcatgtgttcccgttgcaagtaaaatcatgatttccaggattgctcaggcatacatgtaaattcctaatgttataagtggatattttgtc

SEQ ID NO: 267699 - DNA, 523 bp, Zea mays
ccgtctcgcgtgacttcattcccagcgtccggcggcgacctccacgtggtgccattggccggcaacgagcacccgcccaccaggatccaggtttgtgctgcgagagcgcctatccattcaccatgattaatttcgtgctcctgatcagccgccagggcaaggtgaggctcaccaagtggtattctccttacacccagaaagagaggaccaaggtcagtaccccacactgctctgtgtgataactcgtgtaattcagttccggggttgctttattcatcactggcagagtggcagtgggtgctaatttctgcaggagttaaggctatgcatgctagtttgtgtcaggactttgcagtcatgacttttgttcccaacaaatcgatgaacattagaagtgaatgaatagttgccgttttgtaacgagtttgacgtacagtatgcatgtcggttgccaacttccaaagctatatcttgatccagcatacatgtttctgtatagattgtgatgaatgtttttttgtta

SEQ ID NO: 267700 - DNA, 534 bp, Zea mays
  unsure (1)..(534): unsure at all n locations
cccacgcgtccgcggacgcgtgggcagccgaactagttcacagattgagtgttctttgtcgacccacgcgtgcggttcgatatcactgtacgactcttgtatggaagcaacagacagtgatcataaacctgtcaaatgtgtgttcagtgtagatattgctcatgtggacaaacaaacaatgaggcagaagtatggagaaataatgggttcaaataaggaagtgcttgactcacttcagggcttggaggctttgcctgaagtagatatcagcacgaatgacatcattctgcaagatcaaaacccttttgttgtgaaactgcacaacagaagtacaaaagagttggcttgttttgagatcattggtcagacaccaaagtcatctggcacacctttctcaggtttcccttcttggctgaaggtttctccggcagtcggtataatttctcccagacaatctgttgaagtgacgttgcaacatggacaaatacgaagtcaagattatcttactgggacttcangggacagttctggagc

SEQ ID NO: 267701 - DNA, 415 bp, Zea mays
cggaatgcccggggcgaccgacgcgtacgcacaccccccgcaccgctctctccccacccaggcacccagcctccacgccacagatctctctccctggccgccctctctctctctccgaactctaccccgcagtctcggccgcggccatggcggaggacgcccccaacgccgtcgccgagggcagccagcccgcggcctccgagggatccgccgacgccgccctgccggctgccgcgggcgccaaggccgcggaggcgctgctcccgtcgctcagtatctggccgccgtcgcagcgcacgcgcgacgccgtggtgcgccgcctcgtgcagacgctcgcggcgcccagcgtcctctcccagcgctacggtgccgtcccggagcccgaggccgagcgcgccgccgtggccgtcgaggc

SEQ ID NO: 267702 - DNA, 466 bp, Zea mays
ccggtacggaattcccgggtcgaccgacgcgtccgcgccttcctggcttcttcctccccagcacgcacacgcacacgcacacacccagccttttggctgccctggcggccgtcagagagagaaaccgagctctaactaactgaagtggcggccacatagctagctactcttctgatcctgagcgcgcacgcgccatggctcaggaggacgtgcacctggacgacgcaggcctcgcgctgggcctgtccctcggcagcggcagcggcggcgcctctggtgcggcgcgccacggtggtatcagccgccggctgagcagggaggtgcggctgccgtcgccgcacccgctggagccgtcgctgacgctgagcttgccggacgaagcgaccgcgaccgggtccggcgggggcggggccgcgcacagcgtgtcgtctctgtcagtggccggcgtgaagagggagcgcgtgga

SEQ ID NO: 267703 - DNA, 512 bp, Zea mays
tccacgcgtccgttccagactgcggtggaggtcgctcagcaggcaattgacgccgctcatgtggaggctgttagcgccgtcaacggcgtaggcattgtgaacctccgcggctccggtacaggccatatcgcccttcacgccaccctcagcagtcgggacgtcgactgctgcttgatcccagagggggatttctacctggaaggcaagggtggcctgttcgagttcctgtacgaacggatcaagaagaaggggcatgctgtcgttcgtggtcgccgaaggagctggccaggaactgattccccggactgacgatcagaagcgggagcaggacgagtccggcaacaccgtcttcctcgacgtaggaccctggctgaagtccgagctgggcagatggtggaagagggaacatcccgacgagctgttcactgtgaagtacattgaccctacgtacatgatccgagcggtccctgcgaacgccagcgacaacttgtactgcactttgctggctcatt

SEQ ID NO: 267704 - DNA, 461 bp, Zea mays
aagttcagggcagtgaagaccgtcccgttaccattccgtgaacttgaaactgattgatcaagtcaaaaataagaacttgccagcatgttcccaggaatttaaggaggggggcaaaagttccaggaatggaccccctgcccctgctagtgcttgcgcaaggattggtgttcaagtgggtaataaaacaaatcagagagcataactgcccaagagcaaaacgctgcagatttttaaagatggaattagctcaaaccgcccccgcgtccggaggcgccagggtcaggaaagatgatgtgcgtttactctttattggttgattgaggagtgggggcatgctaatcgactaacaaatccttgacttcgtcgattcattaacctatgaatgtatctgggaactgatgactgaaaaatattgcatgaaaatacatggtggtcaaacagaatttgaaccatgtttccat

SEQ ID NO: 267705 - DNA, 791 bp, Zea mays
cggaattcccgggtcgacccagcgcggtcggttctgggcgccgggggggcccccccagccgccggggcaccggcccgtccggggggccgccggcggcggcgtgagcaggcaggcgggacgagccgtcgtccgtcgtccgcggcgaccggcggcggggcctgggcctgccgctcatccgcatgctccccgtcgtcaagttcactgccgcctcctgcgacgccggcgccggcgctggtggcgtggcgccgaggatatccgtgtcggagtgcgccgtgtgcctgagcgagttcgtggagcgcgagcgcgtccggctgttgcccaactgctcccacgccttccacatcgactgcatcgacacgtggctgcagggcagcgcgcggtgccccttctgccggagcgacgtcacgctgccggcgatcccgtcggcgcggcgcgccccggcggcggcggcggcggtccttcccaccagcaggcgccgggacgacgcgctcgccagcgaaagcattgtgatcgaggtgcgaggggagcgcgagaggtggttcagcagcagccacgggacgacgacgacgacgccccggcgccagccgccgaagcagccggcgccgcggtgcagcaaggcggcggagagcgtcggcgacgaggccatcgacacgaggaagacggacgcggagttcgcggtgcagcccttgcggcggtccgtctccctggactcctcctgcggcaagcacctttacgtgtccatccaggagctcctcgccacgcaaaggcaagtgcgcgacccatccgtgcgt

SEQ ID NO: 267706 - DNA, 800 bp, Zea mays
  unsure (1)..(800): unsure at all n locations
gcgtccggccccggacaggcaggcgcacgcaacgcaactagtctccttcaccgtccgtccattcctccgatccgcaggaggattaggaacttaggatcggggaccggcggagcccgacgaccttctcggtccacccgcccggcgatcgaaccatggcgctccgcgtgcgccgggatcacggcgccgccctgcccctcatcgcggaccaggcgaaacatgccgccgccggtggcatcgtccggagcgggagcatgtggacggcagcggcacacgtgatcacggcggtgatcgggtccggcgtgctgtcgctggcgtggagcatcgcgccgctggggtgggtggccgggccggccgccatgctcgtcttcgcggccgtgacggcgctccagtccacgctcttcgccgactgctaccggtcgccggaccccgagcacgggcctcaccgcaaccgcacctacgccaaagccgtggaccgcaacctaggtagcaacagctcgtgggtgtgcatgcttctgcagcacacggccctgttcggctatggcatcgcctacaccatcacggcctncatcagctgcagggcgatccttgaggcgaactgctaccacgagcatgggcatgacgcgcactgcgactacgatggcaactactacatgctcatcttcggcggcgtccagctcctcctctccttcatacctgacttccacgacatggcgtggctctccgtcgccgtcgcggccatgtcgttttgtacgctttcatcggtcttggtctcggcctctgcatgaaccaatgctaactgt

SEQ ID NO: 267707 - DNA, 745 bp, Zea mays
tggtagcatgtggacggcagcggcacacgtgatcaggcggtgatcgggtccggcgtgctgcgctggcgtggagcatcgcgcagctggggtgggtcgccgggccggcagccatgctcgtcttcgcggccgtgacggcgctccagtccacgctcttcgccgactgctaccggtcgccggaccccgagcacggccctcaccgcaaccgcacctacgccaaagccgtggaccgcaacctaggtagcagcagctcgtgggtgtgcatgcttctgcagcacacggccctcttcggctatggcatcgcctacaccatcacggcctccatcagctgcaggcaagaagcatacctgggcttgcggctcgctgcagtacgtgagcctgtacggctgcggcgtcgcctaccatcaccaccgccactagcataaggtagccgccgttggccggtaacaaaatttcccagtctctctctctctcaaaacttcctcacagctcaagctgcctgcagtcgtgtgcttccttccctctctttttagcgagcagggcgctgacgatggttgcttctgttgaccttctgccggttaaatttctctgaatatttttgttcttaactgcgtgtgctttgcttgtgtgttccatacgtgtcgggctgctctgctgttggatgtcgcagggcgatcctgaaggcgaactgctaccacgagcatgggcatgacgcgcactgcgactacgatggcaactactacatgct

SEQ ID NO: 267708 - DNA, 699 bp, Zea mays
ttatcgacagaggagggagacctcgcccgggcggtccacccctcgcccacatcacttcgtctctctggtcgcatcccaccccacacccctcctctcccatctccgctcgatctcccattcttcctcgtctccgccgccgtctgccccacctccaaccaacgcccaacgatcagtattccagaagcttccccggcaaccttcgtccccgtcccggatccggggcgcccctgatgcggtgcccgcgcggcgcgatcgcgtgacggacggccgccatggatcccccaggccgcggcgaccaaggcgaggcgccgcagccgcagccgctggagtggcggttcgctcaggtcttcggcgaacgtgccgcgggcgaagacgtccaggaagttgacatcatatctgcaattgaatttgacaaatctggtgaccatcttgccactggggataaaggaggacgtgtggttttatttgaaaggacagatgttcgggataatgccagccagagagaactggagagacaagatgttccagttactagacacccagagttccgctacaaaactgaatttcagagtcatgaacctgagtttgactacctcaaaagtttggaaatagaggaaaaggtcaacaggatcaagtggtgccagacagccaacaatgctctctcccttttgtctacaaatgataaaacaataaaatact

SEQ ID NO: 267709 - DNA, 677 bp, Zea mays
cccacgcgtccggtcaaatgtctgtgcagtttttctcctacgccactctgaagagcatggacgaggagcttgcagaagagtttgacttggatcacccagacaggaggtggctctggccacaaactggagaggtcttctggcagggtctctatcagagggagcggatcatgcggcagcaggagaaggagcggcggaagcagcagagcagagagaagatccagagaatcaagaatagagctcggcaaaagacgctgggaaagtatataaagccaccgcctgatgatacaggtggctcgaacgatacaacatcagtagatttgtagcattttgaccatgatgattcttaccgtggggaatttggttcattctttgtaacggctgtccttggtcctcactgagaacccccggacgggtgtgaatattttgtcagttttgtcgtgccctctggtgtctgggtgctttacaggcgattttgtaacatatctaggccattgatttgtcaagctgccatcttaggtgtaaatttgggttcccgtagggttgtttttgcccatttcgcttatgagcttctctataacagacagttaacacttaacagctgctccgcatttgcaatctcccttgtttcataatgagtcgactgatggtatcaatctgtcaagatatatttgggtgaa

SEQ ID NO: 267710 - DNA, 609 bp, Zea mays
tctctctctctctctctctcttcatcgccgcagtgcgcgctcctacaacccatcgctcaccaccacctgctcctccagcggcggcgtccagggtgaacccgaatccccaacaccatggcggggggcaagatccagaagaagcgccacggcgcggcgggaggcgcccggctgcagggcggtatcccgttcgagaagtccaaggggcagcacatcctgcggaacccggcgctggtggactccatcgtcgccaaggccggtctcaagcccaccgacaccgtcctggagatcgggccgggcacaggaaacctcaccaagcgcctcctcgaggctggtgtcaaggccgtcgtcgccgtcgagctcgacccgcgcatggtgctcgagctcaaccggcggttccaggggcacccgctctcctcgcgcctcaaggttatccaaggagatgtcctcaaatgtgatctcccatactttgatatttgtgtggcagacatcccgtaccagatctcttctccccttactctcaagcttctgtcacaccgtccaatctttaggtgtgctgtgattatgtctcaacgtgaatctgccatgagacttgtggcacaaccgggagat

SEQ ID NO: 267711 - DNA, 890 bp, Zea mays
  unsure (1)..(890): unsure at all n locations
gtcgagatgttgatcggtagatgatgcatgtgtnctgctggtgtgactgacaagcttgccttccgccggaatgatagtataccaaaaagctgctcaaggaatctgacgattacaaaggatatgaagcagccgatttttgtgtggtatcagctggatgacttttaccagaatcataggaggtatgtcaagagccgtaacgacgcacagctaagagataaaagtaaggcgagtgactctaccaattgtgatcccgaggccaaaacggtagacggaaagccaattgtgccttgcggtcttattgcatggagcctgttcaatgatacatataccctcatccacaacaatataaccttgagagtggacaagaaagacatctcttggaagagtgacagagaccacaagtttgggagtgatgtcttccccacgaacttccagaaaggacctcttcaaggtggaaaaatacttaatccaaaaatcccgttgagtgaacaagaggaccttattgtttggatgcggactgcagcgcttccaacattcagaaagctgtatggtaggatatatgttgatctcaaggaaaacgatacaattacagttcagttggagaacaactacaacacctatagcttcagtggcaagaagaagctggtgctttctactgcaacctggattggtggaaagaacgattttctgggccttgcatatctcactgttggtggaatctgcttcgttccggcatttgcattcaccttgctatacttgataataccaaggaaaatgggagataacaactacttgtcatggaacagacccactttacgtcgctgatatggttgtgaagttacatgtttacacggacaacaaattcatttatggcttacatgtatcttgta

SEQ ID NO: 267712 - DNA, 1129 bp, Zea mays
ggtccggaattcccgggtcgaccgacgcgtccgcccacgcgtccgaagcgggccgcggtggcttaccctcaaccgctgaggtggacaaatatgcgagggaagtaccgcaaggatgctgagatctgcgtcaacgcggttgaggaatccgtacgtgcatctcttggaaagaggaagaccgcgcctaagccgccctctggcgcagacgctaagaagcttaagatttggttgggaaagaacaaagtagaagaagatgaaagtgatagcgatagtgacagtgacatggatgatgaggacagtgaagatcaggagagcgcagatgcaaaatctctcgtagttgatgaaggcaattgctcaaatggatccataaaaaatgagaaacttgatctgggttctgtttctggatcacattcagaaggagagtcctcaggggaaaagtcccaaccgacaacaaaatcaggagctgaaggtggtgactttgaatctgatggcagtgcagagcctgaattaggaatggtggatcatcccattcctgtgaacaatgctgttgctgctgcttcagaagaagtgctgaaatcagatgaagtgacagcagatgaggataacactacttcagcaacttcaaaccaaaacaatccagtggtaccacaagttaaagaagcgctgaaagcagacgaggataacagtgcttcagctacttcgaaccaaaacaacccagaggtgcccaaagtagaagaatatgccgatgccagcaaatcttattcagagccattggaccttgcaaagtacagttcagctgtagaattggaggtgcttggtctggagaagctaaaaatagagctgcaatctcgtggattaaaatgtggtggaactttacaggagcgagctacccgactcttccttctgaagacaactccattggataagttaccaaagaagctgcttgctaaggccgctattggggggaagtgagaagctgtataaacaagtactgatggtgcaatgcttaagttttttctttgacgatgtatggaaatctgttgtggtgtaatcacgtgttacaagcccttggtgtggcattgacgattaatgatgtgtctgtatctaaaaaaaaaaaaaaaaagggcgaaca

SEQ ID NO: 267713 - DNA, 763 bp, Zea mays
cccacgcgttcgcccacgcgtccgcccacgcgtccgcccacgcgtccgctctctccgtatctcgcttcgccaccgcctgcgagagctagggtttcgtgcgccactgccacttccggtcttccgcccgccatggccgaggcccccacgtatcagatcctggtgcgtctcctcgacgggcgcaccacatgtcttcgcttctccacgcccaccgtctccggcgccgtgctcctcgaagctgtcgcgtctatatctcgcgtccccgccgccgccctccgcatcgtcaccggccgcttcgacgtctcgccctccaacgtcctcacctcagcagctgatggccagttcccctacgcgtcagcgctcctccgccttcgaggaggcaagggtggattcggctccctcctcagaggggctgcctccaaagcggggcagaaaaagactagcaactttgacgcctgccgcgacatcaacggtcgccgcctccgccacgtcaacgctgagcgccgcctcgaggaatggaaggccgaagccgccgaccgccagctagaaaagctcgccgagaacttcatcaagaagaaggccaaggaggcgggccgccgcggcggaccctcagctgctgaggtggacaagtacctggagaagtaccgcaaggatgctgagatctgcgtcaacgcggttgaggaatccgtacgtgcatctcttggaaagaggaagaccgcccctaagccgccctctggcgcagacgctaagaagcttaagatttggt

SEQ ID NO: 267714 - DNA, 727 bp, Zea mays
  unsure (1)..(727): unsure at all n locations
cggacgcgtgggcggacgcgtgggttcaggagctgaaggtggtgactttgaatctggtgatagtgcagagcttgaggtaggaatgttggatcatcccatttctgttgctgctgcttcagaagaagtgacagcagatgaggataacactgctttagctacttcaaaccaaaataatccagaggtaccacaagttgaagaagtgcggaaagcagacaaggataacactgcttcagctacttcaaaccaaaacaatcaagaggtgccacaagtagaacaacatgttgacatcagcaactcttattcagagccgttggaccttgcaaagtacagttcatctgcagaattggaggtgcttggtctggagaagctaaaaatagagctgcaatctcgcggattaaaatgtggtggaactttacaggagcgtgctgcccgactcttccttctgaagacaactccattggacaagttaccaaagaagctgcttgcaaaggctaatggggggaagtgagaagttgtaccaatatatataaagaagtaccaatggtgcaacgcttaagattttctttgtcaatatatggaaatctgttgtggtgtaatcatgtgttataagctcttggcttggtttgacaattaatgagatgtctgtacgtacgtatatgttaaccttacttggaaggcgctccgtttgggctagcgtttgaattcgttatagtttttgatgaanaaa

SEQ ID NO: 267715 - DNA, 893 bp, Zea mays
ttttagggagcctacatttggataaaatggaaatcctcaaaaagtagcatgcaggcgaatgtgcatttcacactatagttgatttcttagcttgatttgaattccttgatccctgcatatctgaccattttggaacatttaggtattgtgttgctgccctcttcattcattctttgtccttgtaattgaattcttttcaatccaatagtctgcttttcttgcaagtatttttggcttacctttctacattttctttgtaaatccatgtttaatttgtttagaattaattggagcaataattcttttcagagatgtattgcaaaattttaggcataaaacatttgtatacaaatgacaatatcaatttcaaatatatttgcttgcacaaatgcacattcttcatgagtagcatgtccatggatctcctttgctttcccctagttttacatgaacctttagaaagtcgttctgctttctcaatcaagctcctcatcatcggtatcactgccaagtgtgaactggtcaaaaaggatggttgtaatcagcattcttttcagttgattcacgatagtgacctctgatgcagcaccttacacattacagcctacgttggactggcatgtcctacagaattttgtttgggttatggatagggaggctgttacattattggataagtggttacccaggcatgccagttgcagtcttccaacattttttgataaggctgagaggttaatcaccatcaattccacatccagcagtgattgatgcctggttcagtttttcagctccttcgacttgtgttttagaattcaaaagtgcatcactgtggactttttggtgcttgtctagaccatgtatcttctatggggatcgacatatgtgatgtt

SEQ ID NO: 267716 - DNA, 572 bp, Zea mays
cccacgcgtccggatcacatgtagagaaactgaattcagggcctgttactaaagattatggaactactggctatgtgcatggaactgataaggttgctccaaatcctcaggatctgttgcatataaagtcttctgaagcttttatcacgcaaagatcaatgggcaatggagaatctggtgtatatcagaatgataatttgcacaagtcatcagtgctacatactgggctgattgatactgatccaagtgtgaacttgcacgacaatggtggcctctctgtgtcttcgtctcaaaatccagttgtggactgtgtttctaggagagaggatccccttcgtgattggggcaatatcgcctgcagtgaaggaataattggatgtgaccataccaccaccgataatgaacacataaagctagcacacaggctgcacgataatgttcaaatgaatgtacctgtcatagttgaggacgtgactgataatgtgccttcaggcattccatcatcgagaccagttgttcctcaggttgtaatggcagctgaagaacaccaagaggtgattctttcatcacag

SEQ ID NO: 267717 - DNA, 665 bp, Zea mays
caagtttcacggctgatcttgacaagaggattgctgaaaaggaaagattggaggaagagcgcaggaaggagaatatggaaaaattgcagaaagatatgatgaaatccaaaggacaaactgtggtgctcaccactggtttgaaggaaaaaaattctgtttcagacatgatggatggtgctgatgaggaggaagaagaggaagcattggaagattttgggttttctgaggatgatgaagacgaagacgaaggagaagatgaggaggtggctcattttggcttttgaggggatccaatagttacttgttggtgtgtcttacagagagtccatatggggggctacttgctgaagtggaatgaagaactgtcaatatcagtaggttgttgactttgctattagtctactcttttaaattctggtgccccactgctggctatttatgctatatatttgggacctcatgtcaaagtttatctcgtcgctgagctgtactaatcatattaattgtacgtgcgagtaagaagttgatgggtcaagttgtgtgtgtaatcggttgtgccacaacctgtacctaatccttcgcttcgctcaccacttaccaacttatttttatattttttttttttaaagggcgtccgctttataggatccaagcttacttactct

SEQ ID NO: 267718 - DNA, 1752 bp, Zea mays
accttccactcgtacgcccacgcgaccgcccacgcgtccggttggagagaggacgcttatgtccgcgtcgtctccgcccgcagccggcagccccaccacccaccacatggccgccatgccgggtggggcccacggcgccggcgccgcggacccgatgcaggtggaccagccgctcccccctgccgtcgcaggcacagcacacgcccccgccgacgccaagggagtgatccggtcacaggtcatataatctcgacaaccattggagggaagaatggagagcctaaaaggactatcagctacatggcagagagagctgcgggaactggatcatttggaatcgcctcccaggcaaaatgtctggagactggtgagactgttgcgattaagaaggttttgcaggacaagcgctacaagaacagggagctgcaaatcatgcgatccatggatcactgcaatgctgtttccttgaagcattgtttcttctccaccacaagcagagatgaactttttcttaacttagtgatggagtttgttcctgagtcactacatcgtgtgctgaagcactacagcaatatgaaccagaggatgccgcttatttatgttaaattatatacctaccagatatttcgaggtttagcctatattcacacagtacctggtgtttgccacagggatgtgaaaccacagaatcttttggttgatccactgactcaccaagtgaagatatgtgattttgggagtgccaaaatgttggtcaaaggtgaagcaaacatttcatatatatgctcacgttattaccgtgctccagagctcatatttggggcaaccgagtacacaacatcaattgatatttggtcagctggatgtgttcttgctgagctgcttcttggccagcctctcttccctggcgaaagtgctgtggatcaacttgttgagataataaaggttcttggtactccaacacgcgaggaaatccgatgtatgaatccaaactacaccgagtttagatttcctcagatcaaagctcacccatggcacaagattttccacaagcggatgcctccagaagctatagatctcgcttcacgcttgctccagtattcaccaaatctaagatgcactgctcttgaagcgtgtgcacatccattctttgacgatttgcgagaaccacatgcgaggttgccaaatggacggccatttcctccactgttcaactttaaacaggaactagcaaatgcctccccagagctcatcaacaggttgatcccagaccatgctaggcggcatcttgggctcacattattgcccgctactggaccataggcgaaggctctatggtggtgcttcgttgtgcggaaggcaacctgcattcaaggtgtagaatctgacaattattggaaggtcaaacatgagctggcgcgtaaggagaggtggtatgttctcgtgcagccagccttaatttgtcgcatgtcttaatgcaaaaatctgatttttgcccaagtagtgagaggagggaagggggtggtcggtgtattgttaagctattgaaggaattcgatccctgctattgtgttactttctccaacgtttaaacgttgtagtgcgcctgtaagtgttccatatatcccctgttgtcagtcagtgtaattctgtaaatgttattaatgggaaattatttcgtgctttaatacatcttgctaaaaaaaaaaaaaaaaagggcggccgctcgcgatctagaaccggacgcgtggg

SEQ ID NO: 267719 - DNA, 513 bp, Zea mays
ctctatcccagccgcctccccaacggcccaacctcaccgtggagagagagaccgattctgagagagagaccaagaggacacgggagagaggacgttcatttccgcgtcgtctccgcccgcagccggcagccccaccacccaccacatggccgccatgccgggtggggcccacggcgccggcgccgcggacccgatgcaggtggaccagccgctcccccctgccgccgcaggcacagcacacgcccccgccgacgccaagcatgctggttctatgattgaagggagtgatccggtcacaggccatataatctcgacaaccattggagggaagaatggagagcctaaaaggactatcagctacatggcagagagagttgtgggaactggatcatttggaatcgtcttccaggcaaaatgtctggagactggtgagactgttgcgattaagatggttttgcaggacatgcgctacatgaacagggagctacaattatgccatccatggatcactgc

SEQ ID NO: 267720 - DNA, 679 bp, Zea mays
gcacacgatcttccacgagcgggtgcctccagaagctatatatctcgattcacgtctgctccactattcaggaagtctaagatgcactgctcttgaagcgtgtgcacatccattctttgatgagttgcgagagccacaatgcgccgtggccaactggaccgccatttcctccactgttcaactttaaacaggaactagcaaatgcctccccggagctcatcaacaggctgatcccagaccatgctaggcggcatcttgggctcactttattgcccaccgctggaccataggcgaaggctctatggtgtttaaaccttgctctttctgattcttcgttgtgccataggcaattcaaggtgtagaatctgaccattattggaaagccaaacacgagctggcgccaatgtgttgcataaggagaggcggtatgttcgtgcagccagccttttgtcgcctgttttaatgcaaaatctgattttacttaagcagtgtgaggggaagtgggttggtgtattgttaagctattgaaggaattcaatccctggtattgtattactttctccaacgttaaatgttgtagttcgcctgtaagtgttccacatcgcctgttgtcagtccgcaatccttcctgtaaatgttattaatgaaaaaaaaacatcttgcgggcggcagctcgcga

SEQ ID NO: 267721 - DNA, 613 bp, Zea mays
  unsure (1)..(613): unsure at all n locations
taccacgcgtccgcggacgcgtggggtggtatgttctcgtgcagccagccttaatttgtcgcatgtcttaatgcaggttgccaaatggacggccatttcctccactgttcaactttaaccaggaactagcaaatgcctccccagagctcatcaacaggttgatcccagaccatgctaggcggcatcttgggctcacattattgcccgctactggaccataggcgaaggctctatggtggtgcggaaggcaacctgcatgttcccacattcaaggtgtagaatctgacaattattggaaggtcaaacatgagctggcgcgtaaggagaggtggtatgttctcgtgcagccagccttaatttgtcgcatgtcttaatgcaaaaatctgatttttgcccaagtagtgagaggagggaaggggggtggtcggtgtattgttaagctattgaaggaattcgatccctgctattgtgttactttctccaacgtttaaacgttgtagtgcgcctgtaagtgttccatatatccnctgttgtcagtcagtgtaattcttgaaatgttattaatgggaaattatttcgtgcttttcaaccaaaaaaaaaaaaagggcgggcg

SEQ ID NO: 267722 - DNA, 615 bp, Zea mays
tcgtccggattcccgggtcgactcacgcgtccgcccacgcgtccgtgctcgggtgaacgggaatcagcggccaaaagaatctccagtggcggcagccagaccatattacatgccggacaacttgttcggagacctgatcgacgtgaagagttttggcgccggaagcaagatcagcaggtctaccagcatgccgagtccaaagggtggtggccagcctatgatcggtagaaacaaataggcctctgctgtttaagatagggatgagcatatatttagctggtagccactgtcgtttggtttgatgtaaatttgctgtcttttttcacgtgtcaatttgcggatttgttactttggtcaatttcggagttgctgcatgtttaactttactagagaattgtagagaagtcattgctccagatgatcagtgacatcattatcgtggcggtttgataacgaaaaccattgcctggttcgtgttttccattctcatgtgacctgatgatgatcatgcatattaatttaatacgtgaacattttattttggaatgtacgttaaaccttttctttcttgccaaatcgctggtacaccaaagagtacccgtatatgtaattttt

SEQ ID NO: 267723 - DNA, 517 bp, Zea mays
gcaagcggtccaacactaccatgccaacacctaggtttatccaacaaatcagggatatgttccatacaataactatgtagcaccatgggcccaaacgggaccggttgcacagcctggggcatattcgactcaaacccagcaatatgtgtcgagcaatccggcacccccatgggctatgcctgcaagtgccaattcagctaatcctttccagcctgtgacataccaaacgccaaacactcctcctgctgcttctgttgccccttcagctgctccatcagcgcaacatgttccatctccagcaccaacaccggtgcaaagttacaacttctctattcctcaaacatacactggttcgaacgtggctacaaatgctcgggtgaacggaaatcagcggccaaaagaaactccagtggcagcagccagaccatattacatgccggacaatttgttcggagacctgatcgacgtgaagagttttggcgccggaagcaagatcagcaggtctaccagcatgccg

SEQ ID NO: 267724 - DNA, 308 bp, Zea mays
ggtccgttgtccccggtcggccctcgggaccagctgtattatgaagcaacgtggtgagaacttccctgataagatggtatcgtgtgcatctgagttccagagcaggatcggtttcgggatgattggtgtgggtgacaacatatatttggttggaggagtgattggacctgggccgagaaaccaatgcatcaagctgctctctcatgttgatatcttgaacgtcacaagtgtgagaccaacctggagaccagggtcgccgatgacgcattgtcgagggagcatctgtggctgcgctttgttgaggattt

SEQ ID NO: 267725 - DNA, 942 bp, Zea mays
ttcccggccccctccttcctcccacggtcccaccatcccagggccgccgcgctgcttctctttcccgtcgcacctccaacgctgccgccgcggcagattaatccaacaccgggccgggatacgtgacaggtttctgagctcgcagctctacgccagcgatgccggagacggcggcgccgatcggcctgtcatgggcgcccaagcttccttccttcgcaacgaccagcggcggcagcaagagcgaccacgcgccgaacccgagcgctgcgcagggatcgctctggaaccgcgcgagcgacctcgtggacgggctgttcgttgccccgagggaccctaggcagctgaataagctggccaggaagaacgtcaaggacactgccggcaagggctggttcgacatgcccgcgccgaccatcactcccgagttgaagaaggatctcgagattttgcagctgaggcatgtaattgacccaaaaaggcacttcaagcgggcaggaaaatccaaggcccttcccaagtacttccaagtcggtacggtcgttgagcctgcatctgagttctactcaagtacgctgagaaatagggaacgcaaggcaacattggttgacgagctgttatcagatcaatctctgaagagctacaggtatgctcatcatacttttgccattttgcatgtgcatcaatggacagtggcttgtttttcagtgcaagattttctataaaaattgcatatggtcttttgcaagatttcctggtgccttgtttcagagtccaaccatcataataattacacggttgtggtgtgtatatctaaatgggtttcactggttacaactaaggtgcatggttttaaagtcggctgactaatcgcgattagtcgcgattagtcggccttatcgcctggcatagcacgatcagcatggacgactcgatcagggcgac

SEQ ID NO: 267726 - DNA, 321 bp, Zea mays
cgggtcgagccacgcgtccgcgctgctttccccccaccgtcccactttcgttacgccgccacgcttcttcttccctgtcccgtccaacctccaaccctgccggctgccgcggcggcggattaacacaataccttggcgagagacgtaatagtttctgaactcaccgcgctacgcccgatgtcggagacggcggcgccgatcggcctgtcatgggctcccaatgcttccttcctttgcaacgaccagcggcggcagctagatcgaccacgcgccggatccgagcaccgcgcatggctcgctctggaagcgcacgagcgagct

SEQ ID NO: 267727 - DNA, 1317 bp, Zea mays
ttgtttatcccagaataccttgggctcccgagcaggagagagcaatgcaacgagccatccggatagccgcggctgcgacaaggcgagcgctgtcgtcgtcggcggcgagggcatcaccccctcctccccgcggacccctggctcctggctggggcgccactaggtggctctgcagcgggcgggaggcgctgagctacgacgtggtgatcgtgggcgcagggcccgcggggctcgccgcggcgatccggctgaagcagctctgccgcgctgctgacaccgacctctccgtatgcgtcctggagaagggctccgaagtcggtgctcatgtgctgtcggggaatgtgtttgagccccgagccttggacgagctcattcccaagtggaggcaagaggattctccaatcagagttcctgtttcatctgacaagttctggctgttaacgaagaaccaagcttggacactaccatctccatttgacaacaaaggaaactacgtgatcagcttgagccaattggtgcgttggatggccacaaaagctgaagagttgggtgttgaagtgtatccaggttttgctgctagtgagatactttatgatgaaaatcaaatagttacaggagtcgcaaccaatgatgttggtattgctaaggatggtaccaaaagggaaactttccaacctggtgtagaactaagagggcgaataacactgcttgctgagggttgccgcggttcgttatcagagaaaataataagaaatcacaagctcagagagagagggcaagggcaacatcagacatatgctcttggaattaaggaggtttgggagattgaagaaggaaagcacaatccaggttctgttattcatactgttggatggcctttggatactaaaacatatggaggatcattcctgtaccaccttgatgatagacagttggcaattggtctggttgttgcgttgaattatcgaaatccgtttctgagtccctatgatgaattccagaaatttaagcagcaccctgctgtttgaaaacttttggaaggtggaacagctattcagtatggtgcacgtactctcaatgaaggtggtttccagtctccgccatatccaattttccctggagtgtgctattattggatgctctgcaggatttctagacgttctcaaaataaatggaacccatacagctatgaaatcaggtatgcttgcggcggaagcaactttcaagtccctcgttgaaggatcttacatggaactgtactgctagaacctcatgaagtcatggatctggtacgaacttcataaagcttgtaattat

SEQ ID NO: 267728 - DNA, 1200 bp, Zea mays
tcgccagacccacctcgtccgcttcgtcctctcgtctactcgcactcgctagctgacgctgcgtgcgccaaaagcagcactgcagcagcaggtccagccgtcgccgtccccacttcccaccactgccacgcgcgcgccggatcgagggagggcacgcagacgcggaggagggatgagtctcttcgggcttggacggaaccagaagacattccgccccaagaagagcgctccatcaggcagcaagggagcacagctccgtaagcacatagatgccactctcggcagtggaaaccttagggaagctgtgaggttgcctcctggagaggatatcaatgaatggcttgctgtcaataccgtggatttctttaaccaagttaatatgctgtatggcacgctcacagaattctgcacacctgagagctgcccgacaatgacagctggcccaaagtatgagtacagatgggctgatggtgtgcagataaagaaacccatagaggtatcagcaccaaaatatatggagtatctgatggattggattgaaggccagcttgacgatgaatccatatttcctcaaaaacttggcacaccattcccaccaaacttcaaggaagtagtgaagacaatattcaagcgcttgtttcgtgtttatgcccacatctaccactcgcatttccagaagattgttagccttaaagaggaggcccatctcaatacctgtttcaagcacttcattctgtttacaaatgagtttggcctgattgacaagaaggagctggctccactccaggagctcattgaatccatcatcgttccttactgagaacacgaactgagaacacggtttgctgaacttggatacagagctcttaacgctgatgctgtgaaatttattctatttatgacagcactttactgcatagagcttattgttcccgttattagacccaaggacatgtcacatatgcgtgtatctgtgttgtttcttcctgatcatgctgaccatgcaagtactgtcatatcagctatagaacggcgatgataatgtactgcagaaagaaaaaaacacgagaaagctgagttggggctatccattgcatattggcgcttatccagtatagaacagatctgcttctctttcttcttacaaacagaattaacttgttatttttaatggaatgaaataaatattcacgctttctg

SEQ ID NO: 267729 - DNA, 524 bp, Zea mays
agattgttagccttaaagaggaggcccatctcaatacctgttcaagcacttcattctgtttacaaatgagtttggcctgattgacaagaaggagctggctccactccaggagctcattgaatccatcatcgttccttactgagactacggtgtagtaaacgtggatatagagctctcagtgcagatggctgtgaagtgtccatccgtgacagaacttcactgcatagagctatatgtgcatgtacctgtgtgtttctaaatgatcatgtattggccatgtaagtgtgcctgttatcagttatagaagggtgatgatgatcatgtactgcaaaaagagaaagcacaagaatgtgttggattgatgtatgcagtgtttattttcctcctggttgtggaaccgtcagtttgtctgcttattgctagacattctctccgttctataaattgtaggtcgttttaaaatagctccgaaaaaaaaaaaaaaaaaaaaaaaaaaaaaaaaaaggcggccgcccgggaattcg

SEQ ID NO: 267730 - DNA, 440 bp, Zea mays
ctcggctcctcgagtcctcgcagtcgctcactgcgtgcgccaaaagcagcagcagctccagccgtcgccgtctccactctccagtctccagcactgctccgcgcgcgccggatcgagggagggcaggcggacgaggaggagagatgagtctcttcgggcttggacgaaaccagaagacattccgccccaagaagagcgctccatcaggtagcaagggagcacagctccgaaagcacatagatgccactctcggcagtggaaaccttagggaagctgtgaggttgcctcctggagaggatatcaatgaatggcttgcggtgaatactgtggatttctttaaccaagttaatatgctgtatggcacactcacagaattttgcacacctgagagctgtccgacaatgacagctggcccagagtacgagtacagatgggctgag

SEQ ID NO: 267731 - DNA, 735 bp, Zea mays
gtgagcttcgttcgttcagttcatccgtgttcttgtttgcgaggtcgagagagagaggatgtcgtgctgcggaggcaactgtgggtgcggctccggctgcaagtgcggcaacggctgcggagggtgcagcaagatgtacccggacatggctgagcaggtgaccaccaccacccaggctctcatcatgggtgtcgcaccatccaaggggcacgccgagggcgggttcgaggcggccgccggagctgagaacggcgggtgcaagtgcggcggcaactgccagtgcgacccctgcaactgcggcaagtgagctaggtgctccaccctgcaggccggccggaggaagctagctaattataaagcttaataaagtatagcggcgtcgctgtgtgtgtttcgagtcagtcagtcagttgcgtgccatggcatgctctgagtctgagatgatgatgatgcctgatggcggcgtcgtgtcctgtagtcctcccctgccctccctggggcgcttctggcgagcagtgtgttgtgttgtgtgggtgccgcacgctagcaggctagccatgtgccctgctgtgttgtgtcaccatccatctataatcttatccataccccaccttttgtgtgatgcgtgtaccctttcctgatgtctgttcccgggagtataaggggggtgtttggttcctctcctaatttctaaaaaaaaacaacaaaaaaaaaaaaaaaaaaaaaaagggcgct

SEQ ID NO: 267732 - DNA, 285 bp, Zea mays
gagcttcgttcgttcagttcatccgtgttcttgtttgcgaggtcgagagagactgagagaggatgtcgtgctgcggaggcaactgcgggtgcggctccggctgcaagtgcggcaacggctgcggagggtaagccccgtccagtccgcgttgcgctcggacggagtcagatctgacggatgaacatgtgtgtgtatatatgtggtttccggccctgatctgcatgccttcctccatggctggatggctctgcttctcgcactcctgcttcgattcacatccatcca

SEQ ID NO: 267733 - DNA, 543 bp, Zea mays
  unsure (1)..(543): unsure at all n locations
ggtaaaacgtcagtttaactgttgtcccaaanaaaaaaaaaaaaaaaaaaaaaaaaaannnagtgctccaccctgcaggccggccggaggaagctagctaattataaagcttaataaagtatagcggcgtcgctgtgtgtgtttcgagtcagtcagtcagttgcgtgccatggcatgctctgagtctgagatgatgatgatggctgatggcggcgtcgtgtcctcccctggcctcctggggcgcttctggcgagcagtgtgttgtgttgtgtgtgggtgccgcacgctagcaggctagccatgtgcccatgctgtgttgtgtctccatccatctataatcgttatctatacccgacaacacagcacactgctcgccagaagcgccccagggggccaggggaggacacgacgccgccatcaggcatcatcatcatctcagactcggagcatgccatggcacgcaactgactgactgactgactcgaaacacacacagcgacgccgctatactctattaagctgtataattagctagcttcctcc

SEQ ID NO: 267734 - DNA, 280 bp, Zea mays
tgacccggttgcatttgcatctgagttcctgattgttgtatcccagtttcttctgtgagtggaatcgcgaggaagaaggatgtcgtgctgcggaggcaactgcgggtgcggcgccggctgcaagtgcggcagcggctgcggagggtgcaagatgtacccggacatggcagagcaggtgaccaccacccagactgtcatcatgggtgttgcaccatccaagggcgggttcgaggcggccgccggagctgataatggcgtgtgcaagtgcggcgccaactgc

SEQ ID NO: 267735 - DNA, 612 bp, Zea mays
  unsure (1)..(612): unsure at all n locations
attcccgggtcgaccgacgcgtccgcaccgcancgggtgctaccagatgtgcctcacggactggaacctcagcaacctgcccacggggggcgtgggcgaccgcctgctcaaccagtggcggacgctgcaggcggccggccggaccgacgcgcacggcgcctacagcttcaccggctacctgggggagtacgtcctcactgtcagctacaacaacaggacgacgcaatccaccttctcgctgtcgccgggagacgagaccaggcacatcaacgttcacatgtgatgcgccaacattatatttagggctcctcggatcggactacttattactagctgatgtagtgattgttgtggaagaagattgcacagtcaatctctgtttcttacttggtcctgtgtcaaatttagtgtaagaactggcgtccttgacagctggtatatgtaaaatagtatggccaccactattactatatataacaagagacttcacattttaaaaaaaaaatatattaatttttttttttttttattatataataaaaataaaaaaagaaaaatatttatattaataaaaattttctaaatcatttatacaaatttaaaatattatat

SEQ ID NO: 267736 - DNA, 309 bp, Zea mays
ttatctttgttaggtttctgaatgcgaaggcatgtttacagtccgaaaaaccaaggaagttcatcaggatgacgtaaagcagaacccccaggcattttaggggcatggcaggtgtgggaatcaaggtccggaaacggaagccagttgtttccagggttttctcgagaaatcttcccctcccaagcctgaaaacctgaactcggatgccctgggttttgatttgaaatttaatgtatcctatgttgcctacaaaaaaaaaaaaaaaaaaaaaaaaaaaaaaagggcggcagctcgcgatctagaactagt

SEQ ID NO: 267737 - DNA, 818 bp, Zea mays
gagaaattgtacacatattccctgcctctcgctagcgccttccctccgcaaacggaaggctctcgtgaccaccgggatgtccgccatggagaccgacatcaacgcgccgccgcccgccccagctggcgagggatcctctgcggccggtccgtcctcctccctcccgcaagcccaacaagcgcttcgagatcaagaagtggaacgccgtcgcgctctgggcatgggatatcgtcgtcgacaactgcgccatctgccgcaaccacatcatggatctatgcatcgagtgccaggcgaaccaagctagcgcgaccagcgaggagtgcactgtcgcttggggtgtctgtaatcatgcttttcacttccactgcatcagcaggtggcttaagactcgccaagtgtgcccattagataacagtgagtgggagttccagaaatatggccactagttcctgggcaccgtcatgtgatgttggggctttgctgccactcaagtgtttttgtctgccaaacagctccatctcttactgctttcgatgcttgcatctatccacctgggactgtatttggatgatccattgagaggatagtaggcccattttatcaatggtatgtggatcttcataagtgagcttgtattgtgctgtggtaccattttctgaagtcatgtttttttatacgtgcctgtcttgatgttatgaagtgggtttgcctttcggccgcatgtatataggttactgaatgttacggacaatgtcctgaaattacgttgggccctatatcctgtcttgcaatttataacctggtccccttatgttcct

SEQ ID NO: 267738 - DNA, 674 bp, Zea mays
cgcacgcctgcctccactctacagctgagccgcctcgtctctctcctctctgctgcgcccccctatcgtgcgtgattctatccaggattctagggttcgttcgcctcgtctcgcgatggacaagggcagcgtcgtcgtgcccccggcccctgccgccgccgccgcgaagaaggccaagcgcttcgagatcaagaagtggaacgccgtctctctctgggcctgggacatcgtggtggacaactgcgccatctgccgcaaccacatcatggacctttgcatcgagtgccaggcgaaccaggcgagcgccaccagcgaggagtgcaccgtcgcttggggaatttgcaaccatgcattccacttccactgtatcagccgttggctaaagacccgtcaagtgtgccctcttgacaacagtgagtgggagttccagaagtatggtcactagagagaatggcttcggcgtggagttgcttcatcgtttctcgtcgtttagcagtagtggttactgaatagattctggtgaacatgctatggatctgtaacgtttctgaagctctgccttacttgaagctgtaggcgaatactctggttatgccatattcgtctttcagggcgctgttcaacagctcttcctcaaaaaaaaaaaaaaagggcggcgcttcgcgatctagaac

SEQ ID NO: 267739 - DNA, 900 bp, Zea mays
  unsure (1)..(900): unsure at all n locations
ccgggctcggacccacgcccgtccgcgcccttctcgtcgaacctgagggactttctcgagtaggccnnngagacctacctctcgatgtctcgcgcatggcgagactcgactatctaacgcgctcgctcgcctcgcctccagctcggctgaggggatctctccnnngtggtcggnttccgtcctctctcaaatcctccctgcaaggcccaactaagcgcctttcgagatctaagaaagtggaaccgctctgtcgcgccttctggnngcatgggatnnatcgtcgtcgacaacctgcgcctatctgccgcnnaaccacatcanntggatctatgcanntcgagtgcnncaggcgaccaccaagctttagcgcgaccagcgaggagtgcactgtcgcttggggtgtctgtaatcatgcttttcacttccactgcatcagcaggtggcttaagactcgccaagtgtgcccattagataacagtgagtgggagttccagaaatatggccactagttcctgggcaccgtcatgtggtgttggggctttgctgccactcaagtgtttttgtctgccaaacagctccatctcttactgctttcgatgcttgcatctatcacccgtcaattataactagctagcagtacgtacacctgggactgtatttggacgatccattgagaggatagtaggcccattttatcaatggtatgtggatcttcataagtgagcttgtattgtgctgtggtaccattttctgaagtcatgtttttttatacgtgcctgtcttgatgttatgaagtgggtttgcctttcggccgcatgtatataggttactgaatgttgcggacaatgccctgaaattatgttgggcactaaaaaaaaaaaaaaaaaaagggcggccgcc

SEQ ID NO: 267740 - DNA, 657 bp, Zea mays
acgtgattctatctaggattctagggttcgttcgcctcgtctcgcgatggacaagggcagcgtcgtcgtgcccccagcccctgccgcagccgccgcgaagaaggccaagcgcttcgaaatcaagaagtggaacgccacatcgtggtggacaactgcgccatctgccgcaaccacatcatggacctttgcatcgagtgccaggcgaaccaagccagcgcgaccagcgaggagtgcactgttgcttggggagtctgtaatcatgcttttcacttccactgcgtcagcaggtggcttaagactcgtcaagtgtgcccattagataacagtgagtgggagttccagaaatatggccactagttcctgggcaccctcatgtgatgttggggcttacttctagtgactgctaccactcgagtgtatttttttctgccaaacagctccatcttttactgctttggatgcttgcatgtatcacaggtcaattatcactagtagtacgtccacctgggactgtatttggattgttcgttgagaggatagtagttccatcgtataaatgatatgtggattttcataagctgtgttctgaatgtgtgctacggtactttcaatactgggctcatcgtcgatccaggatctgtactctagacaaatatc

SEQ ID NO: 267741 - DNA, 459 bp, Zea mays
cggaattcccgggtcgacccacgcgtccgatcccttgccttcattgcccttccaggcactgtttggaagattgcaacagctagctagtggcgcgggtgacgttctactgggaaaagataagatacaaaaggttttactctcaaggctaactgaaacagttatcatgtggctctccaatgagcaagagttctgggatatctttgacgaccgatctgtccaactccagccttcggggctgcagcagcttattcttgatatgcacttcattgtcgagattgctgtgtgtggaaggtttccatatagaccagttcagcagcttgtgtccacaatcataaccagagcagttgcagctttctcagcaaggggtgttgatccacaaagtgttcttcctgaggacgggtggtttgtcgacaccgccaaggccgcaatccacaagctcatgctgggggtttctgggtc

SEQ ID NO: 267742 - DNA, 387 bp, Zea mays
gaattcccgggtcgaccgacgcgtccggggaactggctagagaagctgtcaggaaattacttgttctgttaaaaaatgggaactctcgcgatcagcaattcctacctctccctaagagagctagaagtatcctggtagctggaagtcatgctagcaatttggggtaccagtgtggtggatggtcaatccaatggatgggggacagtggtaatatcacaactgggacaacaattcttgatgcgataaagtctaccgttgctgactcgacgtctgttgtctactctgagaaccccgatgacagtttcatgaagcacaatgacttctcattcgctatcgtcgttgttggcgagccaccatacgctgaaacagttggcgatacaccgacct

SEQ ID NO: 267743 - DNA, 1345 bp, Zea mays
  unsure (1)..(1345): unsure at all n locations
tacaatttatattcaatattaaaaacatcttagcatgatgttctactggttagacagctggacccagtgtctttcgtccttcttccatcaggacatgggttcgaaccccacgcgtgcgtctagcctgtgccggtcgccgtttggccatctatatagacgtgcagcagattaatttgaaatagctgaggggttattttaaaaagatgacgcatgatgaccgttgaaattggtgctttaagtatagtatagaattcttggaaggttttgctattctacttatttgtgatacataaacttgcccattttttcttggtatctactatgaacttaactgatgcatttgataatatgatgatttcttttgagcctgttcattagatgtaaattaacacagtatccatttacaaccaattcttttgcatttttacaattgaccttttcattttcatataaaatattggcatgttcacaatatactgaattgtgaacttgtcaaggattcaagggcatgcaattcttgaacgttttagtggaatatgaaagtctcatctggtcatacaatatgtgagtctgagatgattcatattttatgccacttttttacattttcaaatgtctctgttgtgttgattggtcacctatatcctgctgattttgcacacatcaggagttccaagtaggtatttacaccattcttcctactagtaagttttctataatctgacaaatttcgtggtgcctatgctaatggcttgagggttatcgaccaagccctggacagctggcaaatatcaaaactaggtggctgaggttctgccaatacggtagcatttattgtagcttaagtttggtcgagaatgtgacaagagtcttgctccagatgaactctgttgacgcagcaattgatcgaagaatatcagaaagtcggctggcaggacgcatggccctatcaagaatctgggctttgctcggtagattatcccccctgcatttcaccgaaggactctgcctgcgcttgtatctcgctgtgcagcagtcggccctcttcatttagttagcgaatggagttgctgcagttaagaggaatgtgttgtttctgacttgtttgagtgtcgagcctttgttcttctatgtttccagcatcgacaagaaaatgaattagcagcacttaggagttattttggtccaactgtcgcctcattgggaatatattgatgaacacctcaatttttgcccgattgtaacctggtcatgtgctattgcccatttaacctaatgctgtgcattggctgggaaaacaaaaaaaaaccaacaaaaaaaaaaaaaaaaaaaaaaaatntattaa

SEQ ID NO: 267744 - DNA, 448 bp, Zea mays
tgtttttacaccattcttgctactagtaagggggctattatctgacaaatttcgtggtgcctatgctaatggcttgagggttatcgaccaagccctggacagctggcaaatatgtatgtatttaatttcaattgaagcattaattttattcattgccaattcactgcatgcaaatatgggtttgtagcataactcggtggctgaggttctgccaatacggtagcatttattgtagcttaagtttgcgcgagaatgtgacaagagtcttgctccaggtcagctttcatttggccagtgagcctgagatgctgctcgactcattgttttggaggcagcaaccatatctaacaccaaggttttttatttcacaatttgtttgagcagatgatctctgttgacgcaacaattgaatcgagaatatcagaaagtcggttgcaagacgcatgcc

SEQ ID NO: 267745 - DNA, 1606 bp, Zea mays
  unsure (1)..(1606): unsure at all n locations
gggtcgaccacgcgttcgcggacgcgtggggacgcgtgggccctgtcagcctnccgccgccgacacccacctntgccccgtcggcacatgtgtagttgccacttcgctttcccgttctctctcaccttacctcacactcctctccatcgattaatctcctcccccctcaacaaccgcgagatcttcagctaccgctctctccggtcgcgtttgcatccgcattcctcagatccagattcgagccccagccccgcttcgagatccagctagctctctatcaagcatccggcggagcgagcagcggggggctcggcgagagagaagatgaagcggaagacgcggaacaagatcatcgtatggacgctggccctggctgcagtggcgattctggtgggcggcacgattgcgctggtgctcacggcggggacgtggaaggccaagataaagaagtcgcaggagaagatctgtaacaaggggtgggagtgctcggggagcaagtactgctgcaacgacaccatcaccgacttcttcaaggtgtaccagttcgagaacctcttcgccaagcgcaacacccccgtcgcgcacgccgtcgggttctgggactaccaggccttcatcaccgccgcggccctcttcgagccccaggggttctgcaccaccggcggcaagcagatgcagatgatggagctctgcgccttcctcgggcacgtcggcgccaagacttcatgtgggtacggcgtggcgaccggcgggccgacggcgtgggggctgtgctacaaccacgagatgagccccgaccagacctactgcgacaagacctacacccagtacccctgcgtcgagggcgccgagtactacggccgaggcgcgattcctgtctactggaactacaactacggcgctgccggtgacgggatcaaggcggatctgctccaccacccagagtacctggagcagaacgcgacgctggcattcatggcggcgatgtggcggtggatgacgccgatcaagaagagccagccgtcggcgcacgacgccttcgtgggcaactggaagcccaccaagaacgacacgctcagcaaacgcctgcctgggttcggcgccaccatgaacatactctacggcgagtcgatctgcggcaagggatacgtcgacgccatgaacgttataatctcgcactaccagtattaccttgacctcatgggcgtcggccgtgagcactctggcgacaaccgtgattgcgccgagcaggcaccgttcaacccctccagcccgacggatgaccagaagcagcagcaatcaggaagctaagacggactcattgcgccattgccactgatcaagcttccacagcgctagattgagctacagattcttcaggatgcgtgaagctgcatgcatcgtgttgatgttgttttgaatagactgtatgtactgtctatgtgaattgcgagatttgtggttatttactaccatgttgtccatagatagtctgttttggtttctttggttctgtcagatacgttatacacatgtttaaagagaactgaacataccaggacccattaaaaaaaaaaaaaaaaaaaaaagggcggccgctcgaaat

SEQ ID NO: 267746 - DNA, 345 bp, Zea mays
cccacgcgtccggacgcctgcggacgtcgccgagaacttgacgcccaaggcacccggcggggacgccgactcgtgcctcgccgcgcttgtcgaggcactggagaaggctaaggaggacgcgctggcgaagaaggccaaggggaaggaggaggccggctccgccgatgagctcgacgacgaggagtagctggtggctgctgttgacttcttgttagttgctagtgctacatatgtagggagcccctgatctgggtgctggtctcatctcatgagcgaagaataatgctaactagactacgatttgattattactttatgttgtcagatcaaaaactaaaagaacct

SEQ ID NO: 267747 - DNA, 523 bp, Zea mays
ccggaattcccgggtcgacccactcgtccgggattgtgaggcggattcttgtaaagaggcagaaagtgattcctgcacaagcgatatggcgttgtgtccaggaagtagcactgatctgtttgacattgcacgatctccttttgttgattttcaccatcaagaaagatgcaggcaagtgaagatggcaaaggggccatgcagccttcttgattttgttctaatctcaaaggcagttgataactcttccaagcctactccagacttcgaactactttctcatcacacatgtcattgcagtgctctaagccagaaccctatatggtggcttatggaagggcctcggacaattagtcatgatttctcaaagtcttattgtgaggctaacctccaattggtcattcacaattcagaagctcataagattttggtgagagtggtcacttttgatgtaattccagagaaaactgttcatcctcatgactcaaccagtgctcaaggtggatggtatgatgtatcactggaa

SEQ ID NO: 267748 - DNA, 625 bp, Zea mays
gcgtccgcgggaagggcaagggaggacgccgccgccacaggctcggcggcagcgagtccggcggcggggagggcgggagctggtggaccgagaggctgcgtgcggcgcacaaccgcctggccccggtgtcagctggtccagaagcccatcgtgaaggtgaagctcgccgacctgatggccgccacgcaggacttcagcagcagccacatcgtggtcgccgggagctcgcgggcggggacggcctaccgcgccgtgctacgggacgggtccgcgctgacggtcaagcgcctgcactcgtgcccgctctcggagaaggcgttcagggcggagatgtgtcggatcgggcagctgcggcatcccaacatcgtgccgctgctgggcttctgcgtcgtggaggacgagaggctgctggtgtataagcatatggagagcggggctctttcgtcggtgatgaagaagaagccaggggaggaggcgccgctgctggactgggcgacacggctgatgatcgccgtgggggcagcgagggggcttgcgtggctgcaccacgggttccaggttccgcagattcaccagaacctgagctcgagcgcagtgcttcttgacgaggactacgaggcccgga

SEQ ID NO: 267749 - DNA, 459 bp, Zea mays
taccggactggaattcccgacccagacccacgcgtccgatttgctcttaacgaggcacagaaatcccttctgtcggatcacatatccctagagacttgagtaaggctcgcactgatatccatatattctgtacttaccaccacatcgcactattgttttgcttgctactagcgcacatgtaaaaaatattaaataaacaaagaagcttgcctgaactatttacatacactgtaaatacagtttttagtggtgtattttaattacttacacaaaccagtattcatctcaaaagccatgaacagctattcttatcccttccatttcattgaaaaatgaaggctttcgtagggatgaagaaacgcttcaaccttcaatatacctgaacaacctgccagacaagattccagagggtactcgtgtgctaagttgtgacccaatgctggccactggtgggacaat

SEQ ID NO: 267750 - DNA, 422 bp, Zea mays
cgacaggctgttccagctggtggcgaaggagagtggcgggagcgatggggtcacgttcgaggatttgatcatctccaaagcaacatatggaaggggaactcgtgatgaggtcgatgaattcatttatcaactatgtgatgtcacaggagatggcgccttaacaagggctgatttggaatcagtcttggcgtctgttcatgaaactgtatttgcaataaagaaggaagctgtcgaagtttccaacaatagaccattcgaagaattcctcaactctgcagtgttttcaaaggatgttgaaggggtctcagggaagtctatgtcattatcagactttaggaactggtgcactctcttgccatcattgaggaaattccttggaaatttgttgatgccccctgattcaggtagaccaggatttgaag

SEQ ID NO: 267751 - DNA, 1475 bp, Zea mays
cacaattgatctttaccaggatgagttcaagtactggttcaagattttgtcagatcattcgccggacctcgtggacaaggcagttgctagtgaaggtgggactgatgatgccaaaagacggggtgatgcatttgcacatgccttttctgctcatctggcaagattgatggaggagccagctgcttatggaaagtttggtttggccaacctgttggaattgagagaagaatgtctgagggaatttcagttcgttgatgcatatattagcatcaagcaaagggaaaatgaagcttcactggctgttttaccggatcttctgatggaacttgatagtatgaatgaggaagctaggctgcttgcactaattgaaggtgtccttgctgcaaatatatttgattgggggtctcgagcttgtgtagaactttatcacaagggaactataatagaaatctatcgcatgagtcgcaagaagatgcaacgtccttggcggattgatgactttgacatgttcaaaaagagaatgcttactgataggaaggaccaatcatacaaaagagcactgctttttgttgataactcaggtgctgatgtggtccttggaatgcttcctttagctagggagcttttacgccatggaacagaggtagttcttgttgcaaattcgttgccggctttgaatgatgttaccgctaatgaacttccagaagttatagctgaagcctcaaagcactgtggtatccttcggaaagctgcagaagctggtggattgatagtcgatgcaatggctggcatccaagatgatctcaaggatgagacagtgtcagtgccactaatggttgttgagaatggatgcggcagtccatgtattgatttccggcaggttagctcagagcttgctgctgctgcaaaggatgcagatttgttaattttagaaggcatggggcgatcactgcataccaacctcaatgcccgttttaagtgtgatgctctaaagcttgctatggtcaagaatcagcgattggcagaaaaactcttcaatgggagtctatacgactgcatctgtaaatttgaaccagttccttaacaacatggtagcgactgcggaggcaactagcagaagcagcttgattggtgtagccggtgagacagaaacaatcatacagcgtacggcataaccgatccttccatgtacggggtacaagaaacgccctttcaataaaacaataacagtgttttctgaaacgatataataaaggctctaaaggctctttccagaaatattgaagggaaaagtttgagccagcaactggagttcgtgtttaagccagaactagttagcagcctaccatggcgaaagtaacatactcgaaccaatcttggaaagatcctgtcattcttgtgccatgctcgaatcaatccataaaatgtttttcccccgccgggtcttatattaaaaaaaaaaaaaaaaaaaggaa

SEQ ID NO: 267752 - DNA, 1109 bp, Zea mays
ggtcgaccacgcgtccgggtactactccttcggtccgtcctcatttcttcctttccttggcctcgactcctcccgacgtgatcgctccagagaaaatttcgcgggtttagacaaacagcgattgggatcgagatcggggcaacatgagcaaggtgttcgagggctacgagcgccagtactgcgaggcgtccgcctccctcacccgcaaatgcaccgccgccgccgccctacagggagagaagctgaagcagaaggcggcggagatccaatccggcatcgatggcgctgaggcactgataaggaagatggatcttgaagcaagaaacctgcaaccaagcattagagctgatctcctagtaaagatcagggagtacaagtcagatcttaataaccttaagggagcgctgaagagggttactagtattaatgcacaacagggggcgagggaggagttgttggagtcaggaatggcagatacattgggggtttctgctgatcaaaggtcaagattgctcagggcaaccgagagacagaaccaaacaactgataggctcagagatagccatagaactatgctggagactgaagaacttggtgtctctatcctgcatgacctgagtcaacagcgccagtctctcttgcatgctcatgatgtattggacgaggtggataacaacgtcggcaagagcaggaggaccattggaggcatgatgaggagaatggatagaaacaagtggatcatcggtctcatcatagcagttcttgtcttggctatcctcgtgattctgtatttcaagttcgtgcactagtggattgcgttgcgtacgttgcatggacggtacgtagttttctactgcgaccagaacgaagaggacaggcagctgtgaatttgcttctatctacattttgcgatttcctgtatttattttcagttttctatttcgtttttaaatcatatttctgggggtgtgctcgtacggtaccgtatgtgttgtgtgaggaaacaagttcagtccattacacatagttttgtatatctgattggtttctatttaaaagaaaaactccccggataatctataactaaccccatttggaaattttgctgc

SEQ ID NO: 267753 - DNA, 499 bp, Zea mays
cagggcacggcaccagacgcgtccatggaccccaccggcgtcgacggcgattccgcggcggggaggggaagcggaggcggaggggggacaggggccggccggtgcgcggtcggcgcggcgtgcgggggcctggtctactaccactgcgcggtacggcgagccagcgcggtgtcccttgcagcagacgtgctcctcgtcctcctctgctcgctctccatcctcggcctcctcttccgccacctccacatctcggtgcctgtggatcctcttgaatggcagatctctcacgagatggcaaatagcatagttgcatccttagccaatacagtaggagctgctgagtctgtattaagggtggctgcaactggacatgacatgaagctgtttttcaaggtggtttctacattgtattttctagcagctttgggaagggtggtgtcaggcgctgcccgtgcgtatgctgccctatgcatcttctgcctatacatgtttgcacaaa

SEQ ID NO: 267754 - DNA, 1933 bp, Zea mays
tttaggcaagtcgtgccgtgccgtctgctccttgcctgctctgctggtctcgccgttgccggcttgccccgtccgtgcgtccatctgtttcctccttggatcctcgacaagcaatggccatggaggaggagcagacaccacccgagctgcgctacctctcgggcctgggcaacaccttcacgtcggaggcggtgccggggtcgctccccgtggggcagaacaacccgctagtgtgcccgctgggactctacgccgagcagctctccggcacctccttcaccaccccgcgcgcccggaacctgcgcacgtggctgtaccggatcaagccgtcggtgacccacgaacccttctatccgcggaaccccaccaacgagcgcctcgtcggcgagttcgaccgcaccaccaccgtcgccacgcccacgcagctgcgctggaggcccgccgacgtgcccctccacccgggcctcgacttcatcgacggactctacaccgtctgcggcgccggcagctcatgcctccgacacggatacgccatccacatgtatgctgctaacaagcccatggatggatgctccttgtgcaatgcggacggtgacttcctcattgttccccagcaaggaaggtttttatcacaaccgagtgcggaaggctgctggtttcacccggcgagatcgtcgtgatccctcaaggtctccgatttgctgtcgacttgccggatggcccctcgcgtggctatgtctctgagatcttcggcgcccattttcagctccctgatcttggcccaattggtgccaatggcttggcttcgccgagggatttcctttccccgacagcatggtttgagcaggagcaccaccctggatacacaatagtgcacaagtatggtggcgagctgttcagcgccacgcaggatttctctccattcaacgtggtcgcgtggcatgggaattatgtcccttacaagtatgatctgagtaagttctgtccattcaacaccgtcctcttggatcatggcgacccgtcagtgaacacagttctaactgcgccaactgataagcctggcgtcgcgttgcttgattttgtaatattcccacccagatggctggttgctgagaatacattccgcccaccctactaccaccgcaactgcatgagcgaattcatgggcctcatctatgggatgtacgaggctaaggccgatggttttcttcctggtggcgccagccttcacagctgcatgacaccgcatgggccagacaccaagacgtacgaggcaacgatcagccgtgctgctgccaacgagccatccaggctcagtggtacgttggcgttcatgtttgagtcttggcttatccctcgcgtgtgcccatgggctctggattccccgtgtcgggacctcgactactaccagtgctggatcggattgaagtcacacttttcacctcctgctgctgctgttgatgatgagaacgagtagctgcttacagcagcagtcttggaacggacaggcagcaaactgaaactggggtggatatgctgtacgtcgtgtcctgcttgctgtcggtttctgaagcttttagctggcagggacaggcggctgttggctttgctgattgcccaaccctctcctgtaatattaatcctaccagagaaacttaaacttgactcaaccgatatgctattaaataaataaagcaagcaagttaggatacgagttaccagagttgtcacggttccagcaacccgtagccagtgctgtcacgtatcagtgagtacgtgattgcgacaaaaacacacacacatgttaatatgtatttttgttagtcacaataatcgtgtgttgttattaatcaccagaactgtagaggacctagatggtttcatacgcatcacactcaacttgttagtcccaatatttgacccaatgacgccc

SEQ ID NO: 267755 - DNA, 450 bp, Zea mays
cggacgcgtgggattgttttgtcacaccgagaacccatacttacctaaactgtgtgtgtgtgtgcaggtgccaatggcttggcttcgccgagggatttcctttccccgacagcatggtttgagcaggagcaccaccctggatacacaatagtgcacaagtatggtggcgagctgttcagcgccacgcaggatttctctccattcaacgtggtcgcgtggcatgggaattatgtcccttacaaggtgtgttgtatgccattgtacacctgtctgccattgagatgtgtgtcgctgttcactccaccccccttctctttcagtatgatctgagtaagttctgtccattcaacaccgtcctcttggatcatggcgacccgtcagtgaacacagttctaactgcgccaactgataagcctggcgtcgcgttgcttgattttgtaatattcccac

SEQ ID NO: 267756 - DNA, 444 bp, Zea mays
gaaattgctatgtgaaaagaagctgtgtgagtgcatccatgtgggcacgatagcaaccatcctggcgctcgctgagcaacaccgctgccatgcactgaagaaggtctgcttccattttctcagctctcctgcaaatttgagggcagtcgccgccactgacggctttgagcatctgagcagaagctgcccctctgttatggaggagttggttgtcatgctcagcaacttggcgtagaaaactgctcagttgttgtgcatcctaggagattctcaatcttttggtgcttttgccagttgacttgactgcgtatgtgccgctctccaccaattcgcagcgggtgattttgttagctgctagctttgaatatccacaacaagtccgtctatgtgcttaatgtttaattctcagaagttggaatgcactatagctcttgctttcttatt

SEQ ID NO: 267757 - DNA, 401 bp, Zea mays
caaaggggggagatctgaattaccaattgatcccatcaatgagcggattgaatctgacaagactggagatgatgggaacccacatccggactatggccatctcacaccagcagagcgacgctacatggaacagaagcagaagatcgacatgcagaagatggccaaagtcgccaacaagtcgcatagagaccgcatccaagacttcaatcaggatctcgcaaacctaagcgagcactacgacatccccaaagttggccctggctaacatagccaaactggctgtgttacgcacaacaattgtgtgctgggtctatccatttatgttagcatgttacgtatcgattaaaacgatttgttgccaccagaagttgatatttaatttcaaaagcatgttccaactt

SEQ ID NO: 267758 - DNA, 555 bp, Zea mays
cggacgcgtgggcggacgcgtgggcgccgccagccgcccccgccgcgacgtctagccacggcagcaccgtcgagtcctggagcggcggcagcggcggcggcgcgcccgtcgggatcctccgcgccccggccgccgaggaggactgccgcagctactgcggctcctcctcgtcggcgctctgcgaggacggcgcgtcgggcccgggctgtggcgacgagaccgccgcgcccccgcgccgctccccgcttccgttcgacctgaacgtgccggtccccgcggccgacgagacggactggccctgcgacacgctgctgcacctgtagccgcgaacgcgaagcgagcactcagcataactgctgctatcgtgctatgtctccatagaaatcgatagcctaaattttttctctccaccgcttctttagttccactctctctcttttaccactgccaagattcggtaatacttatttgtgatagtgcgaataactgatcatgtaatccgtggagggaacctagttgaatctggcctagcaaacctttctgctttctgctgtg

SEQ ID NO: 267759 - DNA, 943 bp, Zea mays
  unsure (1)..(943): unsure at all n locations
cttacgcttgggttcgaactttcctggaccaacatctggaagcacagcttgtgtggctgtcataagaaatgacaaattaattgttgcaaatgctggggattctcggtgtgttatctcacggaagggtcaggcttacaatttgtcaacagatcacaaaccagatcttgaggaagagagggagaggattttgggtgctggtggatttgttgttgccggacgggtcaatgcaagtctgaacttatctagggcaataggtgacatggaactgaagcaaaatgacctcctgccagtggagaggcaggatcgtgacagctgaacctgaattgaaaacagtccagctctcggaggatgatgaattcattgttttagcttgtgatggaatttgggattgcatgtcaagtcaagaagtagttgattttgtacataaacagctaaagaccgaggataagatatctagtgtgtgtgagaagttgctcaaccgctgtgtggcacctacatctggtggcgaaggatgtgataacatgacggttattgtggttcaattcaagaaaccagctttagctgttgctacttctagcgctgagcagtctgctaccactgcagaagggatgcggcccaacgaggtcgatggcccagattaccccccgaagtaggcgttgagtggcacaccgtgctgtggagctctaaccggtggataatagccaaaaaaggatagtgaggtggtgtatataagaaaagggattctattcgccaatctcttatagggtttgttgcttccctctttctagtgttcagagtcgtcccaacctgtaaaacatggcatgttggggcttaaattggtttttttgtgaaatgcatttataagttgtcggaagggtagtttaccttcccaaaaaaaaaaaacccaaaaaaaaaaaaaaaaaaaaaaaaaaaaaaaaanaaa

SEQ ID NO: 267760 - DNA, 397 bp, Zea mays
attgtggttcaattcaagaaaccagctttagctgttgctacttctagcgctgagcagtctgctacctctgcagaagggatgcggcccaaaatttgagttgcctttgtgaacagcgaggtcgatggcccagattaccccccgaagtaggcgttgagtggcacaccgtgctgtggagctctaaccggtggataatagacaaaaaaggatagtgaggtggtgtatataagaaaagggattctattcgccaatctcttatagggtttgtggctcccttctttctagtgtccagagtcgtcccaccctgtaatacatggcatgtgggtccttaaatgggtttttttgtgaactgctttcttaggtggccagaccaaaaaaaaaaagggcggcccgtcgccga

SEQ ID NO: 267761 - DNA, 442 bp, Zea mays
tgctttcatgctggagcattctgctttgaagttctgcaattagagtacacttattttgagcattattgtcatgatgctttattttacccagtccctgaaacttttggcatcacaggacttgatgtaaaccagctttagaagaacatttgagatactacagcttctatttccaaaagtttgaatctgtctacacacattgtgaagattacagtggtgatgattcagaggatgtaaatattctaaatgggctggtttcactgacacacgatcatatggccctggtttggtgctatgggttctcttttgagttgagtccctatgaagggatccgtcattccgttggacaagaagataatctttaatgaagtcttgggagatctccctaatgtgttgcctcattttccatgaaaaacaggtgtatatatgagaggatcgcggtcaa

SEQ ID NO: 267762 - DNA, 857 bp, Zea mays
  unsure (1)..(857): unsure at all n locations
cttacggtcttctcttctccactaccacccgcccgcccgccttctcctccaccactgccccgtcgtggaataggggcaagttcaggcatctcgcttctgtcctggtcgaggggatcggagaaaaatgggctcggaggcggactgcgacaggatcaggggcccgtggagccccgaggaggacgacgcgctgcggcggctcgtggagcggcacggcgcgcgcaactggacggcgatcgggcgcgagatcccggggcggtcgggcaagtcgtgccgcctgcggtggtgcaaccagctgtcgccgcaggtggagcgccggcccttcacggcggaggaggacgcggccatcgtccgcgcccacgcgcgcctcggcaaccgctgggccgccatcgcgcgcctcctccccggccgcaccgacaacgccgtcaagaaccactggaactgctccctcaagcgcaagctcgccgccgcgtccgccccggcgggttcctccgacgtcgacgcgcgcccgaccaagcgcgtcagcctctcgcccgacagcccgtcggggtcggggtcagggtccgggtccgggtccgggtccgggtccgaccgtagcgacctgagccacggcgccggccaggtttaccgccccgtggcgcggtccggtgggttcgagccggcggactgcgcgatgagccgtccgctggaggaagaggaggaggaaaaggaggacccgctcacctccctcagcctctcgcttcccggcacggaccagcggttccaccacgaccgcgcccacagccagttccaggagctcccggcgtcngccgcctcgcccttcccgcctccgccgccggttctctcggcgtacccgttca

SEQ ID NO: 267763 - DNA, 791 bp, Zea mays
  unsure (1)..(791): unsure at all n locations
cctaactctctcttcgtttactcttcttcccacccccagcgttcgcttccatccaagctcatatcatcatagatcgacggactaggccacgcgccccaatactcagaactagtcttgagtaaagcatggcgtcgtcttctccgtcctgccgtggcagcggcggcaagtcggacgtggaccggatcaagggcccctggagccccgaggaggacgaggccctgcagcgcctggtggcccgccacggcgcccgcaactggtccctcatcagccggtccatcccgggccgctccggcaagtcgtgccgcctccggtggtgcaaccagctgtcgccgcaggtggagcaccggcccttcacggccgaggaggacgacaccatcctccgcgcgcacgccaggttcggcaacaagtgggccaccatcgcgcgcctcctctccggccgcaccgacaacgccatcaagaaccactggaactccacgctaaagcggaagctcgccaccgccacggcgacctccagcggcagcgatgctgagcgggcgtgcaagcgcgcaagccctggcccggggagcccgacggcgtcggaccgcagcgacctcagccacggctgcggcgccgcgcaggtgttccgtcccgtcccgcgcgccggaggcttcgacgccatcagcgccgcagacgtgcgccctccgcccccgccagcagtcgcagacgaggacccgctcacctcgctctccctctcgctgccggtgctggaccagtcgccgtcgggcttncaccacgacagcgcccggagccac

SEQ ID NO: 267764 - DNA, 472 bp, Zea mays
ttacgtcaccggtccttatctagctaatctcacaccgccagtgccagtgccagcggcagctgctaatccgtgccgtgttccagcagcgatgggagtggagtcggagtgcgacaggataaagggcccctggagccccgaggaggacgaggcgctgcggcgtctcgtggagcgccacggcgcgcggaactggacggcgatcgggcgcggcatcccggggcggtcggggaagtcgtgccggctgcggtggtgcaaccagctgtcgccgcaggtggagcgccgccccttcacgcccgaggaggacgccgcgatcctggccgcgcacgcccggctgggcaaccggtgggccgccatcgcgcgccttctcccggggcgcaccgacaacgccgttaagaaccactggaactcgtcgctcaagcggaagctcgccaccgccacggcgacctccagcggcagcgatgctgagcgggcgtgc

SEQ ID NO: 267765 - DNA, 372 bp, Zea mays
ttcatacgtgcgccctccgcccccgccagcagtcgcagacgaggacccgctcacctcgctctccctctcgctgccggggctggaccagtcgccgtcgggcttccaccacgacagcgcccggagccacttccaggagctctccccctcgtcgtccccgtcgccgcagtctactccacccgccttccctccgcaggcggctccgtctcagtcgtcgtacgcgttcagcggcgagctggttgccgcgatgcaggagatgagccgcgccgaggtgcgcaagtacatgtccggcgcggggctccgcgccggatgcgggcccggggccgtggccgaggtgtgcatgccgtatctggtggagggtgtgatgcgcgccgt

SEQ ID NO: 267766 - DNA, 881 bp, Zea mays
agcagtgcccgtcccggaggcccccgccccgatcaccgtcgtcgtcccgccgctgccgccagtcgaggtcggccgcgagccggccacgtcatccaccgccgcgtcctccgacggggcggcctcgagcagagtccaccggtgctccatctgccacaaggagttcccgaccggccaggcgctcggcgggcacaagaggaagcactacgacgggggcgtcggcagcgccgccgcgtccaccgacgtcccggcggcgcccgccgagacgtccgccgaggtcgggagctccgccgcgcgtgcgttcgacctcaacctcccggccgtgccggagttcgtgttccggtgcggcaagcccggcaagatgtgggaggaggacgaggaggtgcagagccccctcgccttcaagaagccccgcctcctcatgaccgcgtgaaaccgctgcgcgcgcgggcggcggatctcatctcatcacccgtccaagattttggtctgcagctgccgagttcagcggtggaagtggaacacactattcgttcattcatttcgtatggtgccagtagcgctattgtttgatttttgtggctgctcctcttgtacagtaccgagtgcgagaaaagatgcatagtcatcgtatacataccaatacaataccgtacctataggtcttcctattcctgtggaagagtagaacttgtatccttattagctgtcagttcatacacacttggttctaaaaaaaaaaaaaaaaaaaaaaaaaaaaaaaaaaaaaaaaaaaaaaaaaaaaaaaaaaaaaaggaaagccaaactaaaaaaggccaaaaaaacaaaaaaaaccagccacaagaacgccgcacaagcaaaaaaaaaaaagggggggggcttta

SEQ ID NO: 267767 - DNA, 760 bp, Zea mays
gccaggcgctcggcggccacaagaggaagcactacgacggaggcgccgcgacgtccgaggtggggagctccgggaacggaagctccgccgcccgcgcgttcgacctcaacctcccggccgtgccggagttcgccttccggtgcggcgccaagcccggcaagatgtgggacgaggaccaggaggtgcagagccccctcgccttcaagaagccccgcctcctcatgaccgcgtgagcctgagcctgagccgaggcgcggatctgatgttgatccgcacgagacttttttggatgttcggtggaacactattcgttcgttcattcgtgtggcgcccgccagtgctattgtttgatttgttgatgctcttcttgtacagtacagagagagctggtgtgagagatgcgtagtcaccacactcacgcatagtataccatacaatacatatagccatataggtcttcctgttcctgggatctgtatccttagctgtcagtatagtgtagtccatacatacttcgttctcattgcaagagatgattgatggattagttagtgctctgtaacataagcttatttataaatggattaagattaaaaaaagtctcgtgcggatcaacatcagatccgcgcctcggctcaggctcaggctcacgcggtcatgaggaggcggggcttcttgaaggcgagggggctctgcacctcctggtcctcgtcccacatcttgccgggcttggcgccgcaccggaaggcgaactccggca

SEQ ID NO: 267768 - DNA, 447 bp, Zea mays
cggacgctgggtttttttttttttttttgattccacagtaatcttaatccatttataaataagcttatgatacagagcactaactaatccatcaatcatctcttgcaatgagaacgaagtatgtatggactacactatactgacagctaaggatacagatcccaggaacaggaagacctatatgtatggtatactatgcgtgagtgtggtgactacgcatctctcacacaagctctctctgtactgtacaagaagagcatcaacaaatcaaacaatagcactggcgggcgccacacgaatgaacgaacgaacagtgttccaccgaacatcaaaaaaatctcgtgcggatcaacatcagatccgcgcctcggctcaggctcacgtcacgcggtcatgaggagacggggcttcttgaaggcgagggggctctgcacctcctggtcctcc

SEQ ID NO: 267769 - DNA, 282 bp, Zea mays
cccacgcgtccgcggacgctgggtttttgtggctgctcctcttgtacagtaccgagtgcgagaaaagatgcatagtcatcgtatacataccaatacaataccgtacctataggtcttcctattcctgtggaagagtagaacttgtatccttattagctgtcagttcatacccccttggttctcgttaccagagatcattggtgaattaggggtttggtaccataggcttatggtaaatgatggattggagattagtatggaatcaaaaaccccatttgttcc

SEQ ID NO: 267770 - DNA, 428 bp, Zea mays
gctcgcggctgctagagcaaacccaagagccaagcggcagcagccagctaataattaagcagccaaattaagtgcgacgatggcgtcgtccatcgccagaaccgcatgtctcctcgtgctcacactgttcgtcgtctccgcggcgatcatcttgcccagctccctgtgccatggagcccgcggcgtcgggttaggtatcggcggcggcgctttggaccctgaccgtccagcgtgcgtcggggtcggggcatgcccagttcgtgggcgcccctttcctatcgtcaaaccgtcccccccatccaacggaggggacccacatcactgatgcctgcctcggatcacgcgccctccgtcgtatcggtctgtctacgatggaacgatgcaccgtgcacgagcacgactgcatgctactagctactagctatctc

SEQ ID NO: 267771 - DNA, 435 bp, Zea mays
  unsure (1)..(435): unsure at all n locations
gcagcacagcagctagatagcgcgcgctcatcaccaaagccgagagccaagcagccagctaattaagcagccaaattcagtgcgatggcgtcgtccgtcaccagaaccgcatgtctcctcgtgctcacactgttcgtcgtctccgcggcggtgatcttgcccagctccctgtgccatggagcccgcggcgtcgctgggttacgtatcggtttggaccctaaccatcctgcgtgcatcggggcatgcccagctcctgggggctcctacactcgccttcccccctatcgcggtggcggccctgtggaaccgcttcccccaccgaacggagggaacccctgacgccgnctgcctacgatggaacgatgcgccacgcacaactgtatcttagctgtgcttatatagtatatgtgatcaataaaactggagtagtgctcg

SEQ ID NO: 267772 - DNA, 691 bp, Zea mays
taaaatgatttaattgaggccaagcttgtccatgaacagctgtgtgtgatgcttgagcagtctgagagggagcttttgggtcataataatcagtatcttccaaagattgtgtctgtttttgcagagatattatgtgcgggcaaagatctagcaacagaacagactgccagcaggatggttaatctactaaggcaacttcaggcaacattgcctccttcagtattagcctcgacatggtcttctctacaaccacagcaacagctcgctctacagtccgtgttgtcgtcatagctaacctaaaatagcctcaactgtgtaaagcatatgagtcttcacagcttgacctttcgtgttctatttatgcgcttttgagccagagccagggttcctggggtttgctttcgcgttcatgtgcccttaggttttgtacaaggggcactgcttgcatcccgtgtgtaatatcggctgcagttgcagaactgcacggatgtgtacgagactgggctctctccacatcgtcgattaagttgtaaagcagtatatcttgctcgcttagtaattttagttgggttgaaagaattgtaaattaaaacaattttggtagttgattttaatgtcgtatttcttataccatcagcatgggaaattttgtgttcaaaaaaagaagagaaaaagcagcttggttatcttg

SEQ ID NO: 267773 - DNA, 974 bp, Zea mays
accgggtaggaaccggggggggggagggcttcccgaacggtcaagggtgttgttataactatcgactaggactttcttcatgctaaagtcagtgtatgggataacatgagcgatatgcgtacttccttacaaaacatgctaagagagtacccgttaaatggatatgtggcggagccagataaatcacagttaatcgaggccctgaaatttcattccagaggtgctgaaaagatcggtgtgggagtaagagaaattaagatcgggttgaatcctagtcacccaggtacaaggtgcttcattttgctgagaaacgatgataccactgaagacttttcttaccacaagtgtgttcagggtgctgcagactctatctcaccccagctcggaagttatttgaagaaactatattacagagcataagcttatgcaacactcccactagttcatttttttaactaaaacgtggcaaataaaaaagaacggatggagtaggattttggaaagtgttcctggcaacatcttgttctgatcagaccatattaccaatttctgataaggaaactacgtgtcgcattttaaggatgaggtgaaacctgaaagggtctggcgctcagaactcagaaggtcttctggactggaggtgtatgtcaactcaactcaatgggactatgtgaaggtgggcctgagtcatgactgcggtttcatgcctgcaattctctagtcagtagtataaatactagtctgcgtgttttctaatatgaagatccatctattttattacttaaccatagcgtagatggttggtaacagatagatacattttatttactgattaaaatgcagcagcgactccccgaacttaaaacaggtaaacgggtgtggaaacttagtggctcattcaaaactgtctaaaatcgggtttgctcaaacaaagtgtcgacatggcatgtcatgttgaaatcatttgagtctct

SEQ ID NO: 267774 - DNA, 788 bp, Zea mays
gtctcaccgctgcttgcttgcttgcgatcgggtttggatttggggagcatcatggaggcctacttcttgttccacagcgggagggcgcacgagttcgcgtacgcggagcaggaggaggacatcggctcgccgtcggattccgaacccccgtccacgtccacgtcgagggagtccgcgggctcgtcggcggagctcgacgacgacgccacctcctctggctctggctccggctccggctcggaccgcttcgagatgtccgccctcatgacgcagctccctcccttcatgcggggcctgtccaggttcttcgacggcaagtcgcagtccttcgcctcgctcgccgccgtggggtcgctagaggacctgcccaagccggcccggaagcgcctcaagccgtcgcggagctgcggcggcgccctcgacgcgcaccgcggacgcctcctctcgccgcgcaggcattattgcaccaagcccaccgctaggactaggaaggcagccgcgaggagcggcacgttgtcggttctcgcggccggcgcgccgaggatgccgccggcggtggcgagggccgagggcgtggccgccaaggttctgatcgtcagttgagccgcggatcggcctgcctgagctcaacatcgacgcacacactcgcaggcacagctagtacggaccgccgcatccacccctctgcctgaagctgttcggttttctttttgtttcccaatgcgtctgtggtctgatctctttgtaatgaaaacgcgcagctcaattagaatgaacttcagttggag

SEQ ID NO: 267775 - DNA, 700 bp, Zea mays
cccacgcgtccgcggacgcgtgggcgcggctgcagctcagcagctccagacctcaccagaggcacctaccacaccgcccgccgccgatcccgtcacccgtctcctccccgctgcggagcgtctccagccctgcccggtgcccgcccagatggcaaacgcggcgtcagggatggccgtggacgacgactgcaagcgccggttcctggagctcaaggccaagaggacgcaccgcttcatcatctacaggatcgacgagaagaagaagatggtggtggtggagcaggtgggcaagcccgtgctcggctacgacgacttcgccgccagcctccccgccaacgagtgcaggtacgccatcttcgactacgacttcgtcaccgaggagaactgccagaagagcaagatcttcttcatcgcctggtctcctgacacggcgcgcgtgaggagcaagatgatctacgccagctccaaggagaggttcaagcgggagctggacggcattcaggtggatctccaggccaccgactccgccgaggttggccttgacgtcatccagggccgtgcaagctgaggatgcccagcgatgaactgcccatgccagaggatgtatgagcatcatcagttcagatgagaacttgactgggcgggctatgtaaaaactgcatccaccgcagtgatgaaatcaatctagtcaatctaccac

SEQ ID NO: 267776 - DNA, 1153 bp, Zea mays
actggctggaccgacccacgcgaacgatactcatgatcgatattgctttcatcaactcatctgtgctctctcttacggtgcacgcctggcactgttctagggaagcacgatgacgagacactccattactgcattgcgatatcaggatatatggtgcgctgtatggtgcactgttaacgctatacatgatcatgacctaaggatgtctgctggggctctacacgcttttgagactcatgtatattgtgatagcagttgtgctgtcgtcgagagatgggataaccgcacctgcaagggattacagcatccccaaatcatcgcagtcaactcgagtcttcactacgataggttccatagcagaccttgtgtttgcttacaacaccggcatgctgccagaaattcaggcaaccatcaggcctcctgtggtgaagaacatggagaaagctctatggttccagttcaccattggctccttgcctctctatgctgtagtttttgtgggttactgggcttatgggtcctcaacatcaggctacctcctcaacagtgtcacaggcccagtctgggtgaaagcggttgcaaatctgtcggcattttttcagacagtcatagcgctgcacatctttgctagccccatgtatgaattcctggacacaaaatatggaagtgggcgtggtggcccttttgagatccacaacgtggcgttcagagtagcagtcagaggaggctacctgacggtgaacacgctggtggccgcggtgctcccattcctcggcgacttcatgagcctgacgggcgccctcagcaccttcccgctgacgtttgtgctcgcaaatcacatgtacctgatggtgaaggggcctaagctgggtgccatccagaaatcatggcactggctcaatgttcttgggttcactgcgctggctgttgcagcggcggtctccgcaataaggctcatcatgcgtgattccagcacctaccacttcttcgctgatctttgagatcgatcgttttcttttctttttgttggaatgctgagccagagctagtattttttcattttcagagaattattatccatgtatgtaaggatgacgcatatatatatattgaatagatgatttaatatcaaaaaaaaaaaaaaaaaaaggaa

SEQ ID NO: 267777 - DNA, 1236 bp, Zea mays
  unsure (1)..(1236): unsure at all n locations
cgcaaataatttgttactcaagccgaaggaggacgagggcgacgggattggctaatcaaatcgaccgatctagtggctggtgcccaggagaagggacgcgggcagtgcggctcgtcgtggtcagcagcttgtggcgaccggtcgccagggaatcaatcaattcaatcagaaagttgcaattttgattgagctcgattcgtcatccacaagacattagggaatcgaaccaccacaaagcaagaaggcagtccagtgcagagagagagagagagagaccaagaagagaaagagaaagggaaagagaagcaaagcaatggatgccgcctccgcttcgtcgtcttggcaagacctgcccccgcgcctgcaatcctacgacaacagggcgccgctcctcctgcccgtcaagatcatggacgccgccgccgacgacaagccggaaatctccgacgatacggcccaccagattagcgttgatccttggtatcaagttggcttcgtcctcacaaccggggtcaacagcgcatacgttctaggatactctggatcaatcatggtccctctaggctggatcggcggcacatgcggcctcctcctagctgccgccatatccatgtacgctaatgctcttcttgcacggcttcatgaagtcggtggcaaacgccatatcagatacagagaccttgctggacacatatatggaccgaaaatttacgggcttacatgggctctgcagtacattaaccttttcatgatcaacactggctttatcatcttagctggacaagctctcaaggccacgtatggactgttcagtgatgatggagttctgaaactcccttactgcattgcgatatcaggattcgtctgtgctcttttcgccattggaatcccttatttatctgccctcaggatttggttggggttctccacgcttttcagcctcatgtatattgtgatagcagttgtgctgtcgtcgagagatgggataaccgcacctgcaagggattacagcatccccaaatcatcgcagtcaactcgagtcttcactacgataggttccatagcagaccttgtgtttgcttacaacaccggcatgctgccagaaattcaggcaaccatcaggcctnctgtggtgaagaacatggagaaagctctatggttccagttcaccattggctccttgcctctctatgctgtagttnttgtgggttactgggcttatgggtcctcaacatc

SEQ ID NO: 267778 - DNA, 319 bp, Zea mays
tggacatgttgccaccacttttaaataaataaataaatgaaaaatgatgcgagctacttttggtgttgggggaagccaccgcatcaccgtgctgtgctgcggcggcctcgtcctcctcctcctccctcctgccctttttataggccgcctccgcttcgtcgtcttggcaagacctgcccccgcgcctgcaatcctacgacaacagggcgccgctcctcctgcccgtcaagatcatggacgccgccgccgacgacaagccggaaatctccgacgatacggcacaccagattagcgttgatccttggtatcaagttggctt

SEQ ID NO: 267779 - DNA, 2342 bp, Zea mays
gtgatccgaattggttgttgtatgatggttggaatatgagccatctagtgcttccgtgactggccaattttttttgtttctcaaagttttctttgaaaaactgtttgtcgagcgtcaattcgtatttacctgaatttactaattcttaattcagtatgtcgttattttgggctaagcttgtgtaagaagggtcgtttgacattttgtactgtattaatgctgttttgtgtttctttgttcggagcagcattcaatgctccttttgttgtttgagagaatctgatatttgccatcgtaccgaaagtccgaaaccaactattcaaattgggatttcatttctttttttttctactgtttttagagttctctttttcgctgctgtgctcttgtgggtcagtacgtgcatttctctttttttctttttttttctgatgttactcttctgttgaccaaaggagttcagaattattttggccctgtatatcaatagcaaccaacaccatttattgagcccatttttagttttcttgttctgtagagtatgcattgttgcaggtcttaactgttgtcagggaagtaacgtgttcaacatgattgtaaacgaatacaattctgttgctaactgtgtaatgatgagaaggataattgaataatctttgtgaagtattactgtctgaactgtacgcaaatgctacattcattctttgtgttcgtgtaaatatcattatacataaaaatgctgcattgcattcccgtcgtccgttctaaatcagaactgacgattgctctggtggctgaagctcctgaaagaaaaggaaaaggccgaaaagaagaaagagaaaaggagtgacaggaaagctcccaagcagtgtgagacgtccaaacattcaaagcacagccataagaagagaaagcttgaagatgtcatcaaagctgagcagggtcccaaaagagtacccaaagaatcagttgagcagttggagaagagtggactctcagaagagcatggagctccttcttttgtacatacgatacgtgactctcctgagagctcacaggacagcggcaagagacgaaaggttgtcctgtccagtcctagccaacctaagaatggaaacattcttcgcttcaagattaaaagtagtcaagatccccaatcagctgttctggagaaaccaagggttcttgagcaaccattggtccaacaaatgggatcaggttcatccctgtcgggcaagcaaaattcaatccatcataagatgaatgtgagatctacctctggtcagcggagggtcaatggtgactcccaagcagtacaaaaatgtttgattacagaatccccggcaaagaccatgcagagacttgtcccccagcctgcagctaaggtcacacatcctgttgatccccagtcagctgttaaggtgccagttggaagatcgggcctacctctgaagttttcgggaagtgtggacccttcgcctgctagagttatgagaagatttgatcctccacctgttaagatgatgtcacagagagttcaccatccagcttccatggtgtcgcagaaagttgatcctccgtttccgaaggtattacataaggaaaccggatctgttgttcgcctaccagaagctgcccggcctactgttcttcaaaaacccaaggacttgccttctatcaagcagcaggagatcaggacctcttcctcaaaagaagagccctgcttctctggtaggaatgcagaagcagttcaagtgcaagatactaagctctcccggtcagacatgaagaaaatccgcaaagctgagaaaaaagataagaagttcagagatctgtttgttacctggaatccggtattgatagagaatgaaggttcagatcttggtgatgaagactggctgttcagcagtaaaaggaactccgatgctatcatggttcaaagcagagctactgatagttcagtgccgatccatccaatggtgcagcagaagccttctttacaacccagggcaacatttttgccggaccttaatatgtaccagctgccatatgtcgtaccattttaaacatctggcgaggtagatgagaattagatgagatgttgggagagagctgtgtggatgtgggagataatgggttccctgccgcagttttccagctttgttccatagtgtttctttgaggccaatagagttctggcagtacttataatgtaatattgattagttattttgctcatgtatgtgtgccacctctctcgcgtaagcttgtttctaggctgtccctgttataagacatgtctgtgttccttaattaaacaaaaaaaaaaaaaaacggccgct

SEQ ID NO: 267780 - DNA, 493 bp, Zea mays
agaagaaaaataagaagttcagagatctgtttgttacctggaatccgctattgatggagaatgaaggttcagatttgggtggtcaagactggctgttcagcagtacaagaagctctgatggtagcatggctcaacccacagtatctgatggtttagggccgtttcatccgatggtgcagcagcagccttatttgcaacccagggcaacttttttgccggaccttcatatctatcagctgccttatgttgtaccgttttaagtctgttcgtagatgagaagtaaatgagatgttgtgaaggagctgtgtggatgtgggatataatggttccctgccgcaattttccagctttgttagcaagattgtaatgtaatgttggttaactattttgctcatttatgtaagcagttgaactgcaaaatcttctttctaggcagttactgtaatacgacacgcaatatttgtttgtatccaaaaaaaaaaaaggggcggca

SEQ ID NO: 267781 - DNA, 579 bp, Zea mays
gatggaatggcagaacccgtcgaggtgcaggatcttattctgtccgggccggccgggaaaaaaatccgcggcgttgggaaaaaggtatggaggttcacagatctgttggttacctggattccggtattgatggagaatgaaggttcagatctcggtgatgaacactggctgtttagcagtaaaaggaacttcgatgctatcatggttcaaagcagacctactgatagttcactgccgatccatccaatggtgcatcagaagccttctgtacaacccagggcaccatttttgccggaccttaatatgtaccagctcccatatgtcgtaccattttaaacatctggcgaggtagatgagaattaaatgagatgttgggaaagacctgtgtggatgtgggaaataatgggttccctcccgcagttttccagctttgttccatagtgtttctttgaggccaatagagttctggcagaacttataatgtaatattgattaattatttcgctcatgtatgtaagcagttgaactgcaaaatcttgtttttagcatgttactgttttatgacccccagtatttgtt

SEQ ID NO: 267782 - DNA, 1156 bp, Zea mays
tcccacgcgtccggcgcaccagcgctgctggaccaccgcccgtctgacgcaaacccagccgtccagaaccgtcgtcgccgccgcagcccgtccttccaccacgctcgcgccgttgcgcgctctgagggctccgcagggtcgggatcgccggagatggactggagcgcggtgacggcggaggacctggtggacgcgctgcgggaggtggactggtccacgccgccgcggactgtctcggagttcttctcccggttcaccgtcccacgctcctattccaagtggaccagccgcctcaagtgcaacctctactactacaggacaaactatttcatcttgatcatgttcatccttgggatgggcttcctttggaagccagttgctatccttgctgcttttatgactggacttagcatcgcatttctcaatgatagttttgcagtcactttcaatgagaaagtcacaaggaccgtaagacagttttcaccacatttagctgcaaagatgaggccaccaataacacctgttcttcgtggtcgaccaaactcgaagagatcaattcatatttgtgggcgaccgcgcagggtgtttgtcatattcttttctgcagttagctgtatactctggttgacctcatgcagtcttctcacagtcctctgggcacttctgattgctctatttgcaactatgctccatgcaagcttcagaacaccaaatctgaaagcacgtctgaatacattcagagaggaattccgggctgtctggcggaattatagtgagctttaaggtctcatttgtttctctcatgttcattgtggtaaggaaaggtgtcttgtgcagaaacgtccatgctgtttgtgagttgcactaggagatctagttgaaggtgaaacgccattggacattactacatggattatgggaggtgggatttgggttgggttggctccgaatgcgatgttatgccttagcacgtgatcccccaagaacaataatttttctttcaggcttctccctaaccgaacattggagaggacagcatgtaaagaaatgtaaaaatgtaccggttctcgatcaaaacgtgtgttgtttgttgaaattataaataatatgaattgcatcctcttttggatcatttcgtaggtgactatcattttgc

SEQ ID NO: 267783 - DNA, 514 bp, Zea mays
gtcttctcacagtcctctgggcacttctcattgctctatttgcaactgtgctccatgcaagcttcagaacaccaaatctcaaagcacgtctgaatacattcagagaggaattccgggctgtttggcggaattatagtgagctttaagggtttcctttgtttctctcatgttcatgggtaatgaaggtgtctggtgccgttgtttgtgagctgtgctaggagatctagttgaaggtgaaacgccattgcacattacatggactacttgctctcttgggaggtgggattctggttgggttgactccgaatgcgatgctatgccagcacacgatccttcaagaacagtagttttctttcgtacttctccctaaccgagcattagagagaggacagcatgtaaaggatgtaaaaatgtacttgttctcgatcaaaaagtatgttgtttgttgaaattattactaatttgtattgcatcctcttttggatcatttgttaggtgactatcattttgcttc

SEQ ID NO: 267784 - DNA, 461 bp, Zea mays
cggacgcgtgggtccccatcccccaaggaagtcaggccctcgcgcaccagcgcgaccggaccacaccgcccgtctgaccgacgcaacccagccgtccagacgcgccgccgaccgtccttccaccaccacgcccgcgccgtcgcacgctccctagggttccgcagggccggggatcgccggagatggactggagcgcggtgacggcggaggacttggtggacgcgctgcgggaggtggactggtccatgccgccgcggcctgtcccggagttcttctcccgcttcaccgtcccacgctcctactccaagtggaccagccgcctcaagtgcaacctctactactacaggacaaactatttcatcttgatcatgttcatccttgggatgggcttcctttggaagccagttgctatagttgctgcttttatgactggacttagcatcgcatttctcaatgatagt

SEQ ID NO: 267785 - DNA, 493 bp, Zea mays
ggcgtgtcgcccgcgacctcgggctccacccacgtcgcctccttccggccgttcgaggccgccgagtggcgggggcaggccgagcaccaggaagtggtgtccgcgctcgtggccgccatcgcgccgccgcccgccgtcgacagcctcgacgacctgctcatcgacatagatctagacgacatcgcgagcttcttcgcgtgacccgcgcgttgtagcagccgatgtggcgtagtatgtgaccgagccctctggctctgcttcctgaaactggaacagaacagaggagggaagagcaccaaagctctgcttcctggggtccatgcagatgcaggatgcaggcgtaaaaacctaggagatgaacaagagtagaggctgcatttttttacccctctttttttgttaatctttttcctctttcagaggactgagggtagtgtttgtattgtattattgatttttaatgccaatgggaaaaataagatccttcgtgccc

SEQ ID NO: 267786 - DNA, 436 bp, Zea mays
ccgccgcccgccgtcgacagcctcgacgacctgctcatcgacatagatcttgacgacatcgcgagcttcttcgcgtgacccgcgcgttgtagctgaccaagggtagggaatcaaatcaaagcagccgatgtggcgtagtatgtgaccgagccctctggctctgcttcctggggactccgcttcctgaaactggaacagaacagaggagggaagagcaccagagctctgcttcctggggtccatgcagatgcaggcgtaaaaacctaggagatgaacaagagtagagactgcatttttttacccctcttttttgttaatctttttcctctttctgaggactgagggtagagtgtttgtattgtattattgattttttatgccaacgggaaaaaaataagatccttcgtgccaaaaaaaaaaaaaaaaaaaaaaaaga

SEQ ID NO: 267787 - DNA, 368 bp, Zea mays
cgcaaaaccacaaccgcgcggttttctccctcccccggctcccgcggcgcaagcgcagccgacccaagcgccatggccgccgccgcccccgacgcagacgcctacgatatcccgtgggtggagaagtaccgccccgcccgcgtcgctgacgtcgtcggaaactccgatgccgtcgcccgcctggaggtcattgcccgcgacggcaacatgcccaacctcatcctctccgggcctccggggactgggaagacgacgagcatcctggcgctggcgcatgagctcctcgggcccagctatcgtgatgccgtgctggagctcaatgcctcagatgacaggggtttggatgttgtgcggaacaagatcaagat

SEQ ID NO: 267788 - DNA, 495 bp, Zea mays
cccgacctcgtgcggcgtgtaggtggagagagagagagagagtgaccctaccgggcgggagagagccaggaagaggagggcgacgatggcgtccggctggggcatcaacgggaacaagggccgctgctacgacttctggctggagttcagcgagtgcatgagccgctgccgccagccctccgactgcggcctcctccgcgaggactacctcgagtgcctccaccactccaaggagttccagcgcaggaacaggatctacaaggaggagcaacgtcagatcagagctgctgctcgtaaggccaaggaggaagctgagggtgcccctgctgttgcagcacaccattagtctccctgtctattttttgtgttgttgttttctgttaactcatctttggttcagttatgatgctaagggcaaggcaataatctccagctgttggactacacagattttttcccccatgacttaaatatcaagactcattttgtgcttcc

SEQ ID NO: 267789 - DNA, 455 bp, Zea mays
ccgctatctcgcacgtcgctccccaaatcatcccatcctacgcccgcggccgtggcaccgaatccagaagcgtctagaagggggaggtggtcgcccatgaccgtctgaccggccgtcgccatgggatgcgctggatccactccaaagactgacgataatggtaagaatttgaagaaaccaaagccttggaagcacacccaagcaataacgccggcacaactcagacagatgcgtgatgaattttgggacactgctcctcactatggtggacagaaagagatttgggacgcacttagagccgctgcagactctgacctagcgcttgcgcaaaccatagtggatagtgctggcatcatcgtatcgaattctgacatgacactttgctacgatgaaagaggtgccaaatatgagcttccaaagtacgttctaagcgagccaacaaacttgatcaagga

SEQ ID NO: 267790 - DNA, 950 bp, Zea mays
  unsure (1)..(950): unsure at all n locations
gcgagccctgngcactacaagtacaaccgcatcaagtcatacaagacaaatgttgatgggacactggacaggcttggattggccaagaggattggggctaggtttctacttacaagcaccagtgaggtctatggtgatcccctccagcaccctcaggtggaaacctattggggcaatgtcaaccctataggtgtcaggagctgctatgatgagggcaaacgtacagctgaaacattaaccatggactaccatcgtggtgccaaccttgaggtaaggattgcccggatctttaacacatatggtcctcgcatgtgcattgatgacggccgtgttgtcagtaatttcgttgctcaggcgctgaggaaggagcctttgacagtctatggtgatggcaagcagactaggagctttcaatatgtctcagatttggtggaagggctgatgaagctcatggaaggggagcacattgggccgttcaacctcggcaaccctggagaattcagcatgctggagctggctaaggtggtccaggacaccatcgacccagaggcgcacatcgagttccgtccgaacaccgcagatgatccgcacaagcgcaagcctgacatcagccgcgcgaaagagctcctcggctgggagcccaaggttcccctccgtgagggccttccccgcatggtcactgacttccgcaaacgtatcttcggggaccaggaagggtccaccgagtcagctggtggcctttcttaagtgctcaaaacttgttgaagtgacacgtttgtatggtatatgacttgatacagttttggcgctgtgctctatacgtagttgttatatagggatataaatgtttgttaaagtacggaaaatagcctggcacgctatactatgtaacgacgtaccattttgtaatgtcattgttaacgggttatccagaatgctaatagcgttat

SEQ ID NO: 267791 - DNA, 424 bp, Zea mays
cgctgccgacctgcccgttctgccgcggcggcatcgcccggctggtggtggccacgcggacgagggccggcgacaacgaggagcggtgcaagctggagtctcccaggcactgccgagcccgccggtccatgagcctcagcggcgacgcgggcagcaccagcaccctcatgggcagcatcgcctcctccatcggcaagatgggccgccggcgaacagagagcagcgagcaggtcgacgacaaaccgtagcaaaatcattgtttcctttcatgcatccatccatgcgtaatccacatgtgaaatcggtgcgtatgataatcctgccccgccggcgtcgaacaaggcccagcttttgtagattattttttggcaagtgagctaaaaaaaaaaaaaaaaaaaaaaaaaaaaaaaaaagggcggccgca

SEQ ID NO: 267792 - DNA, 914 bp, Zea mays
  unsure (1)..(914): unsure at all n locations
taagtatgagaggcctcgatcgcagaacgaacccagcggcaaagcgagcacgcccgtctacaacgacgcacagatagctctgtccatggcgcccaagaggagcagcgaggagcgcgcggcggcggagcaggagcagccgaggctccgcggcgtgcggaagcggccgtggggcaggtacgcggcggagatccgggaccccgtgcggaaggcgcgcgtgtggctcggcaccttcgacacgcccgagcaggccgcgcgggcctacgacgccgccgcgcgcaggctccgcgggccgcgcgccaccaccaactaccccggcgacgtcgtccgagaagcgccgtgcacggcccctgctctggctgcgagcgcgagcggcagcaccgagtcgtcgtcgtcgtcgtcgtcaagggacgacggccacccgccaccgccgatgcctccggcgccgtcgtcgctcggcctgggcctcgggctcttcccggcgacggtggccacccagccgtgcctgttcctggacccggcgccggtggagagggaggaaggggagcgggagcggagctgctgctcccggtcgccgccgtcggtgctggcgggcctcgggttcgacttcgacctcaacctgcctccgcccgccgagatggtcatgtagcgttggagatagtaattctagcaaaaagggattgtgtagtaaataggaagggcaatcggtttgtgtagtagtagtgtagtactagctagccagtttgcctgtgcactagccactagccaatttgcgacttcgcaatgcaaatcaagaaatcgacgggcaaatatttttctcctgcaaaaaaattgcagtgccatgccatctcctaagactattcacagcggcttcatctaaattttacccctataccacttttttatgtcaaannana

SEQ ID NO: 267793 - DNA, 437 bp, Zea mays
cccacgcgtccgccaactcgcactcgcccaacctcgaatgccaagctagcaagagaggcctcgatcgcagaacccagcggcaaagcaagcacgcccgtgtctacaggcagctctttccatatggcgcccaagaggagcagcgaggagcgcgcggcggcggagcaggagcagccgaggctccgcggcgtgcggaagcggccgtggggcaggtacgcggcggagatccgggaccccgtgaggaaggcgcgcgtgtggctcggcaccttcgacacgcccgagcaggccgctcgtgcctacgacgccgccgcgcgcaggctccgcggtccgagcgccaccaccaactaccccggcgacgtcgttcgagaagcgccgtgcacggccccggctctggctgcgagcgcgagcggcagcaccgagtcgtcgtcgtcgtcgtcgtc

SEQ ID NO: 267794 - DNA, 616 bp, Zea mays
acccagccgtgcctgttcctggacccggcgccggtggagagggaggaaggggagcgggagcggagctgctgctcccggtcgccgccgtcggtgctggcgggcctcgggttcgacctcaacctgcctccgcccgccgagatggtcatgtagcgtcggagatagtaattctagcaaaaagggattgtgtagtaaatagtaagggcaatcggtttgtgtagtagtagtactagctagccagtttgcctgtgcagtgtgcactagccactagccaatttgcgacttcgcaatgcaaagcaagaaatcgacgggcaaatatttttctcctgcaaaaaaaaaaaaaaaaaaaaaaaaaaaaaaaaaaaaaaaaaaaaaaaaaaaaaaaaaaaaaaaaaaaaaaaaaaaaaaaaaaaaaaaaaaaaaaaaaaataaaaaaaaaaaaaaaaaaaaaaaaaggggggcccgttttaagaacccaatgttaccatccttggcatgctacttcataacctttatatagggccacctaaatataatttacttgcccctttttaaaaaacgtgaaactggaaaaaccctggctttacccaatttaatcccctttaaagaaaatcccttt

SEQ ID NO: 267795 - DNA, 790 bp, Zea mays
cttgacgctgaagctactgctttagctggccgtatttcagattatcagctgccccagtttgctttccgagactgcctaacagtagacaacgcacaaatcccagcattggcctgcagtaatcacacatgcagatcgagaagtgcacagaatggttcgccagaggtgccatcagcaaacgtatctgtggacgacacctgcagtttgaacacagcaaactccaatggcagtcagtcgagcaatcctgagggaacgaaggttgctaagagaagagctagagctggggagagtacccgacctagaccaaaagaccgacaactgatacaagatcgcgttaaagaattacgagagattgtccctaatggtgcaaagtgcagcattgatgctttgttggagcgaacaattaagcacatgctgtttctacaaagtgtaaacaaatatgcagagaaaattaagcaagctgatgaaccaaagataatcgacaaagggagcggtgttatcttgaaagacaacccagttgctggcacaaatggtggtgccacgtgggcctacgaggttgctggccaaactatggtttgcccaataatcattgaggatctttcaccacctggtcagatgcttgttgagatgctttgcgaggaacaagggctctttctggagatagctgacaacatacgtggaattggtctgacggtcttgaaaggacggatggagctctgtgatggcaagatatggtcgcggtttcttgtcgaggcaaacagagaggtcacaaggatggatatatttctgtcgc

SEQ ID NO: 267796 - DNA, 740 bp, Zea mays
agagaccgagctccctgaagttgatgcacatggtgtggaccaagagctgaagcaccatctcctgaagaaatacagtggctatctaagctcgctcaagcaagaactgtcaaagaagaagaagaaagggaagctccccaaggaggctcgccagcagctccttagctggtgggatcagcactacaaatggccttacccctcagagactcagaaggtggcactggctgagtctaccgggcttgacctgaagcagatcaacaactggttcatcaaccagcggaagcggcactggaagccatccgtggagatgcaccacctgatgatggatcgggtaccacaccaccaatgccttctacatggacggccacttcatcaacgacggcgggctgtaccggctcggctagccaccggtatctcgcttccatttcacaccccacggcctagctataaagactaatggttccaggtgtctgaagtactgaagacaggggggctagctatctaatgtttgtgccgcacgcatgagctgtaaggaggccatgcttaattattctgttgccgttgctactctatctatatgcgcctatgcctccgtgcatgaactatgctttaggtggttgctgctccacactgtggtggtgtgcttttgcttttgtgtggtcgtattgtatgcgtaacctgacagatggatccctgattgctacatgtttgaataatttgcatgatctagctagtttctgcct

SEQ ID NO: 267797 - DNA, 1079 bp, Zea mays
cctgccccgttctgaattgtgatcgagacgagacccttcgaccttcgcaacgccgccccaatccccagcaacctctgctccgccgcctccggcgaccgccggagcccgtggtggaggaggacgtggagagggaagatctcgccagatccaaggaggtggggacaagatggtgagctcctcgtcgtcggtggttaacgtgtacccgctcgccaactacacgttcggcaccaaggagcccaagatggagaaggacacctccgtcgccgaccgcctcgcccgcatgaaggtcaactacatgaaagaaggaatgcgtacaagtgttgaagcaatcctattggtgcaagagcacaaccaccctcacatactgctcctgcaaatcggtaatacattctgcaaacttcctggtggacggttgaagcctggagaaaatgaaatcgagggtttgaaaagaaagttatgcagcaaacttgctgtgaactcgccttcctttccacctaactggcaggttggagagtgtgttgctgtgtggtggaggccgaattttgagactgtgatgtatccttactgccctccacatatcaccaagcccaaggagtgcaagaaacttttcatcgttcacctatccgaaagagagtattttgctgttccaaggaatttgaagctgcttgctgttccgctctttgaactctacgataatattcagcgatatgggcctgtcatcttcaccatcccgcagcagctttctaggttccagttcaacatggtgagctcttagaaggtgtccagcagtttactcatatagtcatccaaaacattgtttttgtactatagactgcactgttcgcagagtggagtttaaatatagctatgtggatgagtaagctgctgagatagacttagggtgatgacacaagaagatagtgtggccaagacagctgttttgttgacttccgttgagatggatcttcaacatgctgagctagctgatcaacgtgccttgactggtttcatttcattgtgctggattttttttatctagacatgtatttcttattgtatttttgttgaattactgagtt

SEQ ID NO: 267798 - DNA, 651 bp, Zea mays
cgcgcgacgctgccgatgaagcactaagaacgagatgcgtcaatgttgagaatctatggtgaagagcacagcacgctcacatactgctcctgaaatcggaaatacatactgcaaatttctgggtggacggttgaagcctggagaaaatgaaatcgaaggtttgaaaagaaagctgtgcagcaaacttgctgtgaactcgccttccttcccacctaactggcaggttggagagtgtgttgctgtgtggtggcgaccgaattttgagactgtgatgtatccttactgccctccacatatcaccaagcccaaggagtgcaagaaacttttcattgttcacctatccgaaagagagtattttgctgttccaaggaatctgaaactgcttgctgttccactgtttgaactctacgacaatgttcagaggtacgggcctgtcatctctaccatcccgcagcagctttctaggttccagttcaacatggttagctcttagggtgatgatacaagaaaaccaatgtggccaaggcagctcttcggttgctgagctagctgatcaacgtaccctgactgattttatttcattgtgctggatttttttatatagactactactatctagacatgcatttctgattgtattgttgttgaatt

SEQ ID NO: 267799 - DNA, 700 bp, Zea mays
  unsure (1)..(700): unsure at all n locations
cggccggaatcccggtcgcccacgcgtccggcccccaaggccagcctgtgtgtgcgttcgattcgcttctgctgcagctagggtttagaggttttctgggcgcggagcgggcggaggcggcggcggctatggctgcggcggaggaggagatcgcggtgaaggagccgctggatctgatacgcctcagcctcgacgagcgcatctacgtcaagctccgatccgaccgcgagctgcgcggcaagctccatgcgtatgatcaacatttaaacatgatacttggagatgttgaagaggtcgtgacaactgttgagatagatgatgaaacatatgaagaaattgtgcgcaccacgaaacgcactatcccctttctttttgtccgaggtgatggtgtcatattggtttctccaccccttcgtacggcatgaagtttgaagtcagatcatgctggttgttaattatgataactggtgtatttggccacttgatggcgttgcatggagtgtatgttatgggcctagccgctactttttctgatgggatgtaggtttaacatgtgatacaatcgtgtaaacaactgcttgtgcttggattatctgtcgaatctcaggggtgcttctcagtctcagctaaagtcaattcgggccttgaagttaagggcaaaaaaaaaaaaaaaaaaaaaaaaaaaaaaaaaaaaanaaaa

SEQ ID NO: 267800 - DNA, 1299 bp, Zea mays
ggagaagggccacttgggagtgtgtattggggacaagtttgggatggttctcagatcgctgtcaagaggttgaagagtgcaaagaatggcacagaagcagaatttgcttcagaagtcgagatattgggaagaataagacacaaaaacctcctgagttttcgtggatattgtgcggatggacccgaacggattctggtgtatgactttatggcaaactcaagtctctatgcacatcttcatggaccacattctgctgagtgtctccttgactggcggaggagaatatctattgccatcaacactgctcgggctctcttgtaccttcaccactatgcaacacctaagataatccatggaagcatcaagaccaccaatgtgttactggattcagacttccaggcacatgttggcgatttcggtctgatgagggttattcctgatggaatggatcatgaaaagattaccagcgaaagccaacgaggctatcttgctcctgagtacattatgttcggcaaaccaactgcaggttgtgatgtatacagctttggaataatactattggagcttgctagtggcaaaaggccgatagaaaagtcgtgttctgttaagacatatggaattcgaaactgggtgctcccgctggcaaggcagggtagatatgatgaaattgcagactcaaaactgagcgacaagttctctgaatctgaactgagaagaatggtcttagttgggctagcatgtactcattcagaatctgaaaaaagaccaacaatgcttgaagttgtgccgttgctgaaaggcgaatcaaaagaaacccttattaagcttgaaagagatgagttgttcagctcagactcgatggtgagttcacaaggaacaccaaccccagatgggggcacagactctgtgccaaaggaagatcaagaacttgttggagcgtgaaatgtgatatgttgctactgtaggcgatggtagaatgcggatttgtgttattggttgatgtttggtttgtgcggtttgacatgaatgtaaattgtataggcattgttttctgtaaggaggtatttacccatcccttttgagagattaaggaagagcatgggggctggagatagctgtttatgcgaagtggtttttgtatgcaccgcatagaaaatgcacatgtttttcaggatgtttgtaaatttctctgaacagcccgtccccaaattatgggtcccaaaaaaaaaaaaaaaaaaaaaaaaaaaaaaaaaaaaaaaaaaaaaaaaaaaaaaaaaaaaaaaaaaaagggcggccgca

SEQ ID NO: 267801 - DNA, 2426 bp, Zea mays
tgatgacaaggatggttgggaacagaaaaggagtaagaaggataagctgatggataagcagttcttgaaagatccaagtgaaatcacatgggatattgtcgataagaaactcaaagagattttagcatctaggggaaagaaaggtactggaaggatcgagcgtgttgagcagttaacatttttgacccgtgtggccaaaacaccagctcagaagcttgaaatcctcttccatgtgatttctgcgcagtttgatgttaaccctagtctatttgggcatatgccagtcaatgtgtggaagaagtgtgtcaataatatgcttcttgtgcttgatatactccagcagtatcctaacattgtagtagacacctcgtttgagcctgatgagaatgaaactcaaaagggtgcagactacaatggaacaatacatgttgtgggtgacctggttgcattccttgagagactggactctgaatttttgaagaccttacagtgcacagatccgtacacaaaagattatgttcagaggctcagagaggaacccctgtatctggttgtcgcacagaacgtccaagattatcttgaaagggttggaaacttcaaagctgctgccaaggttgcactgcgccgtgttgaactagtttactacaagccccaagaagtgtacgatgcaatgagaaaactcgcagagcagcctgaggactgtgtggatgatgatgatgcagaggctggtgatgaacataaagcagtagatgacaatagaggaccatcaccatttgttgtgattccagaggctgtgcacaggaagcctacttttccagaaagcggtagaactttgatggatggattgatgttcttaatttacaagtatggagatgaaaggaccaaagcccgtgcaatgctgtgtgacatatatcaccatgcgatctctgatgagttttcagtggctcgcgacttgcttttaatgagtcatttgcaagatggtattcagctcatggacatatcatcgcagattttattcaacagagtcatggcccagttagggctgtgtgctttcagggctggtttgataaatgaagcccatggttgcttgactgagctctattctactgggagggtgaaagaattgcttgcacaaggtgtgcaacaaagccgataccatgaaaaaactcccgaacaggaaagacttgagaggagaaggcaaatgccttaccatatgcatataaacctggagcttttggaagccacacacttgatctgtgcgatgctgattgaagtccccaatatggctgccagcacctatgacaagcggagacctatgagcaaaacattccgaaggcttcttgaagtgagtgaaaggcagacatttgttgggccgcccgagaatgtgagggaccatgtaatggctgccacaagagccctcaacaagggtgatcaccaaaaggctttcagtgtcataaattcgttggagatttggaagcttttgaggaacagagagcatgtccttgagatgttgaagcttaagatcaaggaggaagctcttagaacctatctcttttcatactcgtcttcgtacgagtccttaagccttaaccagctcactaccatgtttgatctcagcgagcagcatgcccacagcattgttagcaagatgatgatgcatgaagagcttcatgctagctgggaccagccaacaaagtgcatcgtattccatagtgtggaccaaaccaggcttcaggagctactcttccaggttgcagaaaaaatatcggtcctggtggagacaaacgagagggcatacgagtcaagaactggtggtactcttgaggggctaccgcccaggcgcaggggcgaggctcaggattcatccaagtggcaggagagctttgtctcgtcacaggggcggcagggtggtggcaaccggtttggatactccggcagaggtgcagcatctggtcaaagtggtggtggacaccagagggacaggggcaatcagggttaccgcgggggctatggtggcgtttcaaggtttcaggatgcaaggggtcgcaaccagtctaatccatcaggcagaggtggtgatggtggtgcacgcatggtgaacctgaacagggttggtagagtttagaagtgataattttcagctcaagtaagcctgaaattctcctaaaagccaagttttgaatcactgctttttacatagtttcctgttctgggctgagccatccacctgtttcctacatttcgttgtagccttttaatttaaggggctaggaaattgaactaagagtttggtactgtttcgtgggagtgtgacttcactccaatatttgatatctatctgtgacacttgctataacctgtacttttcttgtttgtgttatgtggtttttatttggttatgaaaaataaaaaggcctgtccctgat

SEQ ID NO: 267802 - DNA, 502 bp, Zea mays
atctggtcaaagtggtggtggacaccagatggacaggggcaatcagggttaccgcgggggctatggtggcgtttcaaggtttcaggatgcaaggggtcgcaaccagtctattccatcaggcagaggtggtgatggtggtgcacgcatggtgaacctgaacaggattggtagagtttagaagtgataattttcagctcgagtaagcctgaaattctcctaaaagccaagttttgaatcactgctttttacatagtttcctgttctgggctgagccatccacctgtttcctacatttcgttgtagccttttaatttaaggggctaggaaattgaactaagagtttggtactgtgaactaagagtttggtactgtttcgtgggagtgtgacttcactccaatatttgatatctatctgtgacccctgctataacctgtacttttcttgtttgtgttatgtggtttttatttggttatgtgaaataaaaaggcatgtcgcagatag

SEQ ID NO: 267803 - DNA, 447 bp, Zea mays
gagttaagaactggtggtactcttgaggggctaccgcccaggcgcaggggcgaggctcaggattcatccaagtggcaggagagctttgtcgcatcacaggggcggcagggtggtggcaaccggtttggatactccggtagaggtgcagcatctggtcaaagtggtggactccagaggggcaggggcaatcatgtttcccgcgggggatacggtggcaatacacgatttcaggatgcaagtgcacacatggtgaacctgaacagggttggtagggttgttagtgtttagaagtgcgtaaatttttgaagcacctgccctttccataattacgaaacttctgttctaagctcagacatccaactattttctttattttcgtgtaagagtttggtactgtcggggtttgattagtgatagattccgctttaaaaatttgggctttttttt

SEQ ID NO: 267804 - DNA, 402 bp, Zea mays
gatgaacaagccttcctggatggtagaaactgatccgaaggaagtcggcctaggaatttttgtgtgagaagatcgagttgcttaaattattggggtgcttgaaaagggcagctaaatcttgggagtggtttaccatccgcgagaagttgaatgcggcaaccagcagcatgttgaagtccccagaaggttgcgctattttgtttttgaaagggttgtatatgaaccatgatggttatgaagaaaaagaatacaggtcagttacacgattttgtccaccacacaggtggtaagcttggaacttagctgtcattttttaatattaaaaacctaacgtggaaaaaaaaaaaaaaaaaaataaaaaaaaaaaaaaaaaaaaaaaaaaaaaaaaaaaaaaaagggcgg

SEQ ID NO: 267805 - DNA, 1175 bp, Zea mays
attggagggggtgacgcatgcccttcggtccagtgaatatcatgacaggaatgcacaatattatcgaatccttcaagacatggggttgaggagagtagaaatttatgaattcagccgattgaatatggtttacactcttctaagcaagcgaaagcttctttggtttgtacaaaacaagaaggtcgaagattggacagacccacgttttcccactgtccaaggcatagtacgtcggggcttgaaggttgaggcattgatacagtttatactccaacagggtgcttcaaaaaatctgaatctcatggaatgggataaactctggacaatcaacaagaagataattgatccagtgtgcgcaaggcatactgctgtgctaaaagaccagcgtgtcatcttcactcttacaaatggtccagaggagccatttgttcgaattttaccaagacataagaaatttgagggtgctggaaagaaggctacaacctttgccaacagaatttggctcgattatgctgatgcggcagctattagcaagggtgaggaagtaacccttatggattgggggaatgctattgttaaagagatcaaggtggagagtggagtaattactgaactagttggagaactgcatcttgaggggtctgtgaaaacaacaaaattgaagatcacatggctagcagatatagaggagctagttcccctttcattggttgaatttgattacctcatcagcaagaaaaagctagaggaagacgaggacttcctcgacaatctcaacccttgcactcgacgggaaatcccagcccttggagatgcgaacatgaggaacatcaagcgtggagaggtcatacagctcgagaggaaaggctactataggtgtgatgccccttttatcagatcgtccaaaccggtggtcctgtttgcgatcccagatggccggcagcaggccttgcttaactaggcatgatgaccacttttggcacatggaattcctgagatatcggagtcggcaatcaatattgttgcattatacactttgatactgtactgtgactgggcttactcatggtgcgccagatggccaggcctatcctgtcaaccaagcagcacagccattttgattttggtctattatacttttaccccagcttaaaagtatcttacccttttctggc

SEQ ID NO: 267806 - DNA, 349 bp, Zea mays
gcgtggagaggtcatactgctcgagaggaaaggctactataggtgtgatgccccttttatcagatcgtccaaaccggtggtcctgtgtgcgatcccagatggcaggcagcaggcctcgcttagctaggcatggtgaccaccttttgggcacatggaattcctgagttggcgatgagtattgttgcattgtacactttaatattgtactgtgattaggctttactcgcggtggatgtctttcaccgctagatggccagaggcatatcctgccaaccaagcagagcagccattttgattttggtctatgatacttttacctgcgcttgaagattcctaaacttctccagcc

SEQ ID NO: 267807 - DNA, 1260 bp, Zea mays
catcagtctacccatcagtatgcaaaatgataagatcatattgcatgagtccatcttcacacactggttggacaagggttattgttgaaaagccctttggaaaggatttgaacactgcagaggaactgagtactgaacttgggcagttgtttcaagaagaacaactctatagaattgaccactatttaggaaaagagcttgtccaaaacttgcttgtgcttcgttttgcaaaccgcttatttttgcctctctggaaccgtgataacatagctaacgtacagatcgtatttaaggaggactttggaactgaaggacgtggaggatattttgatcaatatggtatcattcgtgatatcattcagaaccacttgttgcaggtcttctgtttggtggctatggaaaagcctgtctctcttaaacccgagcacattagagatgaaaaagtcaaggttctgcaatcggtggagcctataaagcatgaagaggtagtcatcggacaatatgatggctacaaggatgaccctactgtgccagatgactccaacacccctacttttgcatctgttgtactgagggtacacaacgaaagatgggagggggttccattcatcctcaaggctggcaaagcactaaattcgaggaaagcagagatacgtgtacagttcaaggatgctcctggtgacatttttagatgcaagaaacaaggcaggaatgagtttgtcatacgcctgcagccatcagaagccatgtacatgaaactaacggtcaaaaaacccggactggaaatggcaaccgaacaaagcgaactggatctatcgtatgggatgcggtacaatggcgtcaaaatcccagaagcatacgagcgtctcatcttggacacgataagaggagaccagcagcacttcgttcgccgagatgagctgagggccgcatgggaaatcttcactcctttgcttcacgacatcgatggtggcaagctcaggtccgttccgtacaagccgggaacccgaggaccgcaggaagccgacgagttgagcaggaggatggggtatgtgcagacccatgggtatgtatgggttcccccgaccctttctaaggtttagctgtttgattatcagctgccgtgtaaccacagaatgacagaacgcggggaagatccctttgtaatacgtgggtcgtgtaataagagaaacttctgcttgttgtgagagtgaccctttacggtattggaataaaaaaagaatgtgatgttattatctt

SEQ ID NO: 267808 - DNA, 739 bp, Zea mays
agaacctcaaactaaggagaagaaaccgtacacaccctttccaccgcctcaacagcctagcaagattgatcttgaacttgagaacggtgagtatttcatgagtgacaaaaagaaatcagcaaagaaatggcaagagaagctggacaagcaatctgggagagctgaagaaaataaaagaaaaagagaggctgcatttgttcctccaaaggagaacactgcaggtccatccaaatctgacaagaatgccagtgacaacagtgagatagccgatatagcgaagtcattaaagagaaaggcgaaggaatttagaaagaacgaggcccaggagagtgtcatagctgaatcatatatcgcaagtaatgatgaattgcggcaaaaaaagaaaaagaaatcaactaagtccaagtagccctaatcctcatgcataatgacactggcaattgagaaggattgcatgagccatccctataattatgtcattcatgctgtgatcgtattagatgatgaaacaaaattcgaaccttccgctggtctgttgttgcaacagttcatatgcaataggtttttaatgggtaactgccatgataaccaaggaacagaaagagccctcaagcttatcattctccaaagatatatattttcatcctataggttgtgttggttggtagagcctggctggtctaggcctgttgtatcatagtacgttatatgcaggcctcggcatttggtagaatcggtc

SEQ ID NO: 267809 - DNA, 1895 bp, Zea mays
actcggttcagccacgccccaccagccagccagccagggacccgtcgctgccctctggcgatgagggatattacgggtctgccctgaccaccgcccacgcgcagccaggggtagaaacgaccgcgtcaccgtatttgacccctcaccgtcgcacaccagtgtcggcgagtccctcctgtgcctcgtcctccccctttcccctccgagtccagcccggcgccacccactcagccgcggatccgaggcgcagatccgatccggcgatggcgtccacggcggcgaggcggctgcgggagctgcaggcgcagacggggaacaagacctgcgtggactgcgcgcagcggaacccgcagtgggcgagcgtctcctatggggtgttcatgtgcctcgagtgctcgggcaagcaccggggcctcggcgtgcacatcagcttcgtgcgctcggtcaccatggactcctggaccgaggcgcagctccgcaagatggaggccggtggcaacgaccgactcaacgccttcctcacagctcgcggcgttcctaaggagacgccccacgtcgccaagtacaactccaacgccgcagccgtctaccgcgaccgcatcgccgcgctcgctgagggaaagccgtggactggcccgcccgtggtcaaggagacgcccggatctggcgcccccgcccccgctaggaagccgcccgtgcacacatctgccgcctccggcggcggcgggtgggacgactgggacgacgattttcggccggacatgaggcggaatcagtcggttggatcgttcgccgccgcgggggcgcagtcagggaggcagccgccgaggtccaaatcaacacccgacatctacacgaggcagcagctggaggcgtcggcggctaataaggatgattttttcgccaggaggatggcggagaacgagtccaagcctgacgggatcccgccatcccagggcggcaagtacgttgggttcggatccagcccaccgccgtcggctaacaggaacggcggtgctgcccagggcgatgtcatgcaggttgtctctcagggatttggacgcctttcattagttgcagcatctgctgcccagtctgctgccagtgctgtccaagttggcacaaaagaaatccaatcaaagatgagggatgggggctatgaccagaaggtgaatgaaactgtcagtgttgttgccaataaaactgcagagattggaagcaggacttgggggatcatgagaggagttatggcgctggcctcacaaaaggtagaggaatatgccaaggaaggaggagtgggtggctggggagaggattggcaacacagcgagcagaaaagtgagccttaccaaaggtttgagcatgagaccaacggcaacagttggaattcctcccaaaattcttcatcgaagaacaattccagttcttgggacgactgggacgacccaggcaagaaagatgagcctgcgaaaccgcaccagagcagtgactcctgggctggctgggatgatgggaaggatgatggttttgatagccctagttacaacaatcacagcacctccaacaaggggagcaaccaaaacgggacatccggtggcacattttggacagaaggcggcttccgctgaaaccagtctcttttccatagagctatactttcagagttgttacatgccaggaaacgtgagggtccagtggttggtattatttgggatacttaaacagtcgggtgaaagggtttgtgtgttttgtaccatgtctacaactgttattatatctagtgagatatatttctgtggtcagattccattcaacactgctcaaatgactaagccatgtcgatttgaaactgtaatttactcgacatagtccccacgcgtccgcccacgcgtccg

SEQ ID NO: 267810 - DNA, 615 bp, Zea mays
atctgatcccctgcttgatgcggccaaatcgaacttgttaaaagtcctcacattgtctacgaaacggtagaacaagagaagacctaactcctaaggaaattgccactggagcctcagagttcagacacggaagcgcggtcaccaaatctctgttctgaagtgtctcaactgccagctcaaaattgatgcttggtgcctctagtctactgctcattgctcacagagtcacaggtgtaggaagtttcagaagtgcggcttcgaagactgcatttgattttgactgagttgctgcctatatgacaatcaaagctgcacaggctccgaagtggctgtgatgtgttcttaaagagtcgcatcagcgcaggaagagcccagattttgaagttcatgtgtagctaaatttcgatataagcttgaacggcttcccttagctgatgtatataaataaatatactccaacttgaggtgtactccaagttgagcatgtgcaagttataggttcagtgttccagagcaacttatggttctgtgcggtgaaactaacagcatctaaacctcaaatttggcagcaatttcgctttggtgtctattaaaaaaaaaaaaaaaaaaaaagga

SEQ ID NO: 267811 - DNA, 1133 bp, Zea mays
tcgtccacgcgtccgccaaagccgagcaaacaaaacgatatgccgctgccctgaaccgagaccaccaccgctctgcctcgcctcgcctcacctcacctcacctcacctcgccgactagggttttgtaccgccgtggatctcgccgtccccgccatggacgtctcgcacgcgggatcctccgtcgccggcgaggctccgaccaccggggagcaccggatggggactaccatcgtcggggtctgctacgagggcggcgtcgtcctgggcgccgattccaggaccagcactggaatgtatgtagccaaccgtgcttcagacaagattactcaactgacagacaatgtgtatgtctgtcgctctggatctgctgctgatacacaagtcatttcggattatgtacgctatttcctccaccaacacacaatccagcttggacaaccagctaccgttaaagttgcagccaacttgattaggttgctagcttatcagaacaagaacatgttgcaagctggcatgattgttggaggatgggacaagtacgagggaggccaaattttctcagtccctcttggtggaacgatcttgaagcaaccatttgcaattggaggttcaggttccagttacctatatgctcttcttgatcatgaatggaaagagggaatgagccaggaagaggcagagaaatttgtggtgaaggtagtttcccttgctatggcccgtgatggtgctagtggaggggttgtccgtacagttacaataaatgcggatggcgtgaagaggaacttttaccctggcgacaagctacccctgtggcacgacgagctggaaccccagaactcgttgcttgatattcttgctgctgggaaccctgatcccatggtgcagtgaactcgccctccacttactttgtgaacttttcactgtatctgacttgttcttgattatttctccctgaactatgtcagaccagagtaatttacgaattgttgttatcgcaccttaataaattcatgtttagctgggtgattggcgttttgagttaatggttactggtaagcgtgctactgctgtagttaagcctgtggcaagtattcaaattttcagtaaaaaaaaaaaaaaaaaaagggcggccg

SEQ ID NO: 267812 - DNA, 605 bp, Zea mays
ccggtgtagcaaataatgtagagaaatagaacagatgttgtacctcgaattgatcgttgttgttttattggataataaccagcgtgtgcgccgtagttcgggcatcccacgccaaacgatacaggaatacgatacgccgctcgcctgaatcgagaccaccaccgctcccgctctgcctcacctcgccgactagagtttttgccgccgcggatctcgccgtccccgccatggatacgtcgggctcctccgcagccgccggcgacgccccgaccaccggggagcaccggatggggaccaccattgtcggggtctgctacgagggtggcgtcgtcctcggcgctgattccagaaccagcactggaatgtatgtagccaaccgtgcttcagacaagattacccaattgacagacaatgtgtacgtttgtcgctctggatctgctgctgatacacaagtcatttcggactatatacgttatttcctccaccaacacacaatccagcttggacaaccagctactgttaaagttgcagctaacttgattaggttgctagcttatcagaataagaacatgttgcacgctggcatgattgctggaggatgggat

SEQ ID NO: 267813 - DNA, 449 bp, Zea mays
gttccagttatctttatgcacttcttgatcatgaatggaaagagggaatgagccaggaagaggcagagaaatttgtggtgaaggtagtttcccttgctatggcccgtgatggtgctagcggaggggttgtccgtacagttacaataaatgcggatggcgtgaagaggaacttctaccctggcgacaagctacccctgtggcacgacgagctggagccccagaactcgttgcttgatattcttgctgccgggaaccctgatcccatggtgcagtgaatttgccctccacttccgttgtgaacttttcactgtacctgacttgttcttgatttcaaccgaagaaagaattggaacatttcctgtcgaactaatgtcgcgccagagtatttacatactgttgttatcacaccttagtaaattcatggttactactgctgtcgtcgttttatc

SEQ ID NO: 267814 - DNA, 336 bp, Zea mays
cggtggagcaaaagtggaatctatagctgaaaaagctgccaattgatttatcctataaccctctgaacaaacgtgcgtaaccggtgtagcaaataatgtagagaaatagaacagatgttgtacctcgaattgatcgttgttgttttattggataataaccagcgtgtgaattgtagaacagatatcgcccctcaatttgcagttgtttcattgaataaccagtgtgtgaataatgtagaacagatgttgtaccgcttgtttcagtgtttcatgaattcgattgaccctgtcaaaaaaaaaaaaaaaaaaaaaaaagggcggccgctccggaatccg

SEQ ID NO: 267815 - DNA, 1607 bp, Zea mays
cggacgcgtgggcgagacgccattctcaccatccacacaaagccacagcccaagagcagagtcgtcgtcgtcgtcgggcatggcggggttcaaggtgacgcggatctcggagggccccgtgaagccggcgtcggcgacgcccgaggagacgctgccgctggcttgggtggaccggtacccgacgcaccgtggcctggtggagtcgatgcacatcttccggtcgggcgcgggcgaggccccggccgtgatccgggcggcgctggccaaggcgctggccttcttctacccgctggcgggccgcatcgtggagggggagcagccggggcgccccgccatccgctgcaccgccgacggcgtctacttcgcggaggccgaggcggactgcagcctggaggacgtgcgcttcctggagcggcccctgctgctgcccaaggaggacctcgtgccttaccccggcgacgaccgctggcccgtcgagccgcacaacaccatcatgatgatgcagatcaccaagttcacctgcggcggcttcgtgatgggcctgcggttcaaccacgcgtcggcggacggcatgggcgcggcgcagttcatcaacgcggtgggggacatggcgcgggggctggcggagccgagggtgctgcccgtgtggcaccgggagaagttcccggacccgagcatcaagccaggcccgctcccggagctgcccgtgctggcgctggactacgtcgtgctcgacttccccacgggctacatcgacgggctcaagcgggagtacaaggcgcacagcggcaggttctgctccggcttcgacgtgctcacggccaagctctggcagtgccgcacccgggcgctggccctggacccggccgccgaggtcaagctctgcttcttcgccagcgtccgccacctgctcaagctcgaccgggggtactacggcaactccatcttccccgtcaagatgtccgcgccggcagagaaggtgctggcctcctcgctcgtggaggtggtcgacatcatccgggaggccaaggacaggatggccgtcgagttctcccgcttcgctggggaggagacggaccaggacccgttccagatgaccttcaactacgagtccatctacgtctccgactggagcaagctcggcttctccgaggtcgactacggcttcggcccgcccatcttcgccggcccgctcgtcaacaacgacttcatcgcctccgtcgtcttcctcaaggcgccgctcccgctcgacggcaccaggatgctcgccagctgcgtcaccaaggaacactccgaggagttcgcccgtggcatgaaggaagacctgccctgaacttgttcttcctagcttattatatactgctgatgatcatcctgagccctggctgcagggagatgatgaatggtgacgtaaacatgcttctgtttcgttgatgctgttgttacttttggttgtattttttttggggttcactttatcttggtcaatacgtaccacattagatcacagcaagcaaattcgatcttaatttgtactacaccatttgatatgagaccgagacaataaaaaaggttatactgtccctttttccgttgtttgaatgatc

SEQ ID NO: 267816 - DNA, 800 bp, Zea mays
gtcgcacagcggcaggttctgctccggcttcgacgtgctcacggccaagctctggcagtgccgcacccgggcgctggccctggacccggccgccgaggagacggaccaggacccgttccagatgaccttcaactacgagtccatctacgtctccgactggagcaagctcggcttctccgaggtcgactacggcttcggcccgcccatcttcgccggcccgctcgtcaacaacgacttcatcgcctccgtcgtcttcctcaaggcgccgctcccgctcgacggcaccaggatgctcgccagctgcgtctccgaggaacactccgaggagttcgcccgtggcatgaaggaagacctgccctgaacttgttcttcctagcttattatatactgctgatgatcatcctgagccctggctgcagggagatgatgaatggtgacgtaaacatgcttctgtttcgttggttgttacttttggttgtattttttttgggttcactttatcttggtcgatacgtaccacattagatcacagcaaccaaatacaaccaaaagtaacaacagcgtcaagtcgtcaacgaaacagaagcatgcatgtttacgtcaccattcatcatctccctgcagccaggactcaggatgatcatcagcagtatataataagctaggaagaacaagttcagggcaggtcttccggcaggccacgggcggactcctcggagtgttccttggtgacgcagctggcgagcatcctggtgccgtcgagcgggagcggcgccttgaggatgacgacggaggcgatg

SEQ ID NO: 267817 - DNA, 1659 bp, Zea mays
accacgcgtccgcagacccttgggcggacccttggttattgaaaatccataaccacccagtttgaattccccaaagtttaagttccgccaaaaaacccatttaggaaattggggttcacatttcggaatgctaataaaatacctttttgagaaatttccaaattggcaagagattgggtgccaggccattggggaccttcagattttctataaagcatccaagcataggtttgacaatgatccagaatttaaagcaagggctcaacaaggagttgttcggctacagggaggggaggagagatatcgagaagcatggaaaaagatttgtgacattagcaggagtgaatttgacttggtctacaaacgcctaaatgtggtgcttgaagaaaagggggagagtttctataatccttatattcctcaagtgttggaggaattgagtagcaaaggcttgatcaaggagagtgagggtgccagagttatatttattcaaggtcatcagatccccttgatagtggttaagagtgatggtggcttcaactatgcctcgactgacttggctgccctttggtatcggctcaatgttgagcaggcagagtggatcatatacgtgacagatgttggtcagcagcagcactttgacatgtttttcagtgctgcaaagatggccggttggctcccagatccaagtgaaaagaagtttccgaaaacaagccatgttggatttggtcttgttcttggttcagatggcaagcggttccgaacccgcagtactgaggttgttcgattggtagagctacttgatgaggctaaatctcggagcaaatcagaactactacaacggctcactgaaaatggcaaaattgttgactggacggatgaggaattagagcaaacttcagaggctgttggatatggtgctgtgaagtatgttctggaatgtcttgttttagaaagatggcacctcttgatttgactaagcaataactaagtacgctgatctaaaaaataacaggctcactaattacacatttagttttgaacaaatgctgagcgataagggaaatactgctgtgtaccttcagtatgcacatgctcgtatttgttccattattcggaaatccaacaagaacgtggaagagctgaagatgagtggagccatttctctcgaccatccggatgagcgcgtgttggggctgtatcttatccgatttgctgaggtggttgaagaggcatgcacgaatctgcttccaaatgttgtgtgtgaatacttgtacaatctatctgaaatgttcacaaaattctataccaactgtcaggtggtcgggtcaccggaggagacgagccgactgttgctttgccaagcgactgctgttgtcatgcgacagtgcttcaatctgctagggatcaccccagtctacaagctgtgatcggctgcatgtttgaagtttgatttatacattcaacatcgctttacgtagaaacccattcatcatggttgcagttttggccttgtaacctagttgaggcagttaacagactataatccatctccctgtttgaaaatagaagcaactcaaaagtttgtaacaaaatatgctctgcagagtttctattgatccattacattaaaaaaaaaaaaaaaaaaagggcggccgc

SEQ ID NO: 267818 - DNA, 387 bp, Zea mays
ccggttcggaattcccggctcgacgcacgcgtccgtgaagatgactggagccatttctctggattatccagatgagcgtgtgttggggctatagcttatccgattagcggatgtggttgaagaggcatgcacgaatctgcttccaaatgttgtgtgtgaatacttgtacaatctatctgaaatgttcacaaaattctataccaactgccaggtggtcggctcgccggagcagacgagccggctgttgctttgccaggcgactgctgttgtcatgcgacagtgcttcaacctgctcgggatcaccccagtctacaagctgtgatcggctgcatgttcgatgtttgctttctacatgtagaaaccccaattcatcatggttgcagtttt

SEQ ID NO: 267819 - DNA, 433 bp, Zea mays
  unsure (1)..(433): unsure at all n locations
ggaancccgggtcgacccacgcgttcgggccggttggctcccagatccaagtgaaatgaagttttcgaaaacaagccatgttggatgtggtcttgttcttggttcagatggcaagcggttccgaacccgcagtactgaggttgttcgattggtagagctacttgatgaggctaaatctcggagcaaatcagaactactacaacggctcactgaaaatggcaaaattgttgactggacggatgaggaattagagcaaacttcagaggctgttggatatggtgctgtgaagtacgctgatctcaagaataaccggctcactaattacacatttagttttgaacaaatgctgagcgataagggaaatactgctgtgtaccttcagtatgcacatgctcgtatttgttccattattcngaaatccaacaagaacgtg

SEQ ID NO: 267820 - DNA, 397 bp, Zea mays
caacttctttggagttctggccttgcttgtcttgatgtctactctttgaagactgaaagagatcttcacaaccctgtgcttgtaagcctttttgttgttggggactgggtcactgcaattctgtcgtttgctgccgcgtctgcgtccgcgggcgtgaccatcctgttcgagagggacgtccacttctgcaggatgtacccgcagttgtcgtgcggccggtacgcgctctcggtggtgctggcgttcatcacctggtccttcatcgcaacttctgctgtctccatgttctggttgctgccgtcgctctgatgtggcacggaaggagcctgccgtgtcgtcctgtttagacccgtttgcttagagagctggttgatcccctgggtcgctctggggttgt

SEQ ID NO: 267821 - DNA, 450 bp, Zea mays
aatagtgagatgaagaagaaaatggaggtcatgctgcaaagtgtagtaaaaattgagaatgcttgcttcagtgttcatgtgagaggttcagagtacattcctctgctagaatcatcagcagatccaggctattcttattttggtgccccggactttgatcaatgaatgttttgaagcaagaactaactgagtgttaaaggagcttagatcaatttaaggagagcggttgtgtcaaggctactcttaggtccacagttgggtgtttgattttatcgccagtttatgttgcacatcttgaagtctgtaaatctaagccccaacgtggtaatccgggagaatcatgttgcaatacaacctttttatggtgcagacttgtaatactcaaattgtaagggagaattaaaggaggaattgtctcccttgctgggtaaaaaaaaaaaaaaaaaagaa

SEQ ID NO: 267822 - DNA, 1621 bp, Zea mays
cccacgtctcttgcccacgcgtccgcccacgcgtccgcccacgcgtccgtccacgcgtccgccctcaccaaccaggcaaccaaaccttctccgatggccgcgcccgtgtcgcagccgccggtgtccgccagggcgtccacacggtttctcccccgcgggataggcgcgctcccggagtccgctcccacgtccctccggttatccgtcggccgccgtcgccgggccgccagcctagaggtgaaggcatcgggaaatgtgttcgggaactacttccaggttgcaacctatggcgaatcccatggagggggtgttggttgcgttatcagtggctgcccacccagaattcctctcactgaggcagacatgcaagtagaactcgatagaagacgtccgggtcaaagtagaattacaaccccaagaaaggagactgatacatgcaaaattctatcagggacacatgatgggatgactactggtacaccaattcacgtctttgtcccaaacacagatcaaaggggtggtgattacagtgaaatgtctaaggcgtacagaccatcccatgcagatgcaacctatgacttcaagtatggagttagagctgtgcagggaggtggaaggtcatcagccagagaaaccattggcagggtggctgcaggagctcttgcaaagaaaattctaaagctcaaatcaggagtggagatcttggcatttgtttctaaagtgcaccaagtcgtacttccagaagatgcagttgattatgagactgtaaccttggaacatatagagagcaacatcgttagatgtcctgatccagaatatgcagagaagatgattgctgccattgatacggtacgagttagaggagattcaattggtggggtcgtcacatgcattgcaagaaatgttcctcgtggtcttggctctcctgtttttgacaaacttgaagctgaactggcaaaagccatgctttctcttcctgcaagcaaggggtttgagattggcagtgggttcgctggtacggactttactggaagtgagcataatgatgagttctatatggatgaggctggaaatgtgaggacacgaactaatcgctcaggcggtgttcagggagggatatcaaatggtgaaattatttacttcaaagtggcttttaagccaacagcaactatcggaaagaagcaaaatactgtgtcaagggagcatgaggatgttgaacttttggcaagggggcgccatgacccctgtgttgtccctcgagctgttcctatggtggaatccatggctgcgctggtcctgatggaccagctcatggcgcatattgcccagtgtgagatgtttccgctgaaccttgccctacaagagcccattggctctgctagcagtgcatctgaactgtcaccaaacctatcataatgtttgtcgtggaacatgtcccagctttccttctatcgaaattctggtctttgctaagcagtttgcaattcggaacccccataaaccctcgactattgtacctagagataaagtgaacggatatcaagatagaaatgcattaatgtttttgtgatgtggtgttttactgttatttaccccttttctttttttgagagaggacgca

SEQ ID NO: 267823 - DNA, 730 bp, Zea mays
tccctcgcgtccgcaaccacttccaccgccaccggcgagcgcggtggcaccgacacgacacacgtagctgcagacctgcagtgccagcacggctgccaatccctgctggcgctgttcccggctccgagatcatttggactcggcactcggcagggatggggatggggacggaatggccgccgacgcctgcgcagcagaggaaagcggtggtgagcgccgggtcggcgctgaagctggtactgttcgtgattctcgcgggcctcgcactgcggctgctggtggggcccccagcctacctcctgccgcccaccgccgcgccagagggggccgctcgtcttttcgcggtgccggagagggaaagaaccgccggcggcggcggcggcgggataccttccgtcgaaacggatgatgcggtttttactttgaccgattcagaacctctaacagctttaggcaagaaggaaggttccccaaaaccagaagaaagttgtgatcttttccatggcgagtgggttcccaattcatcaggaccagcttatactaatgcaagctgccgcttcattgagtctcctcagaactgtatgacaaatggaagacctgacacagattatctcaattggagatggaagccatatggttgtgaggtatcaccatttgacggcaagaagtttttggatggcatgaaaggcaagcattgtgcacttattggtgattccattctttgcaacca

SEQ ID NO: 267824 - DNA, 487 bp, Zea mays
cggacgcctggtgcaggtcatctctttcataccctacacggccacacggcatgttccagggccaggtccagattccaccagccctgacctataaaaaaaacggcttgggggcgagacggagagaggggtatttccagtataagtacctttggatcgaagagcaccactcgacgatgcatcgaggactgttcttcttcttcctcaagctgtagcctgtgggaggagaggccggagaggcctcccatggagttcccccactcatcacttcttgttggtcccctgctagctgttcgttcctctcagcaggtagctagagatgatcttgctttaattttgtgctgatctcttactcgtcgtgtacgctcatattgcatggggcgacggatttgtctctgatcgttcccatgccgcctcttgtatcttgacttggatctatatatcaatgcaaataaatcatcgatgggtgacaatcgatccaagcttcctc

SEQ ID NO: 267825 - DNA, 720 bp, Zea mays
  unsure (1)..(720): unsure at all n locations
aagccttgcaggagaacagacgtcaacagcagcctgccaccacctatcctcagaagctggtggataccaacgctcaaggtcctgtggccgatatatcagatgcatttgccaaggccggccagttgaaggatactgcgaacagcgggacgaccccgaaagctgagggtgcctcagctgaaaatggatccgctgccacagccaaggttgaagggagtgcaaacctgaacacaggccctgtggagtagagtccgtttcccttctttctgctaatttggcgcccccgatgaattgcatgctgcaatgtgaatgccggaaaagtggaaagtgcaggttgatcgtgttaaatatggtcgtggctgcgtcagttgtacaacatcataggctttgttttatctccatttatgatattgaacttatataacatggcaggtccagattccagcagctctgagctatagaaaaaacggcttgggggcgagacggagagaggggtatttgcagtataagtacctttggatcgaagagcatcactcgaagatgcatcgaggactgttcttcttcttcctcaagctgtagcctgtgggaggagaggccggagaggcctcccatggagttcccccactcatcacttcttgttggtcccctgctagctgttcgttcctctcagcaggtagctagagatgatcttgctntaattctgtgctgatctcttactcgtcg

SEQ ID NO: 267826 - DNA, 879 bp, Zea mays
attattgtggctatattcaatcatgatctttgcaacaatagtgaaattaggtctgtggggctactgccgaacgtctggtgacaagattgtccgtgcttatgctaaggatctcggtttcgatgttgtcacaaatgttgtgggtttggctgctgctgtccttggtgatagattctactggtggattgacccaattggtgcaattgttcttgcagtgtacacgatttcaaactggtctggaacagtgtgggaaaatgcagtatcgctggtaggtgaatcagctcctccagaaatgcttcagaagttgacatatctggctatcagacaccatcctcagattaagcgtgttgacaccgttcgagcatacacctttggggtgctttactttgttgaggttgacattgagcttccagaggacttgccacttaaggaggcacacgccattggagaatctctccaaatcaagattgaggagctacctgaagttgagcgagcattcgttcacctagatttcgaatgtgaccataagccggagcattcaattctcaacaagcttcccagcagccagccttgatccgaacgaatcctgtgtggtagattgtcgtgcagaatctgctgcagttcttgcattggcgtcttgtgctgtatgacaaaactaagagttcaattagttttgtggcggtgagtttaagatcaggcgcatctaagactacgagagatgaaggtgccgaatgcagagatttctcgagtgtggaaccctttgtggttctgttggtatggtcttcgttttgagcgaaattaagcattttgctgttggcatcatggcatgtgattggcggcgatctagctgtgtgctatcgactacggtgatgtttagacatg

SEQ ID NO: 267827 - DNA, 1331 bp, Zea mays
ggacagccattgtcttgccgtcaccatggccggagaagtgcagagttggggccgtaaccaaaacggacagctaggccttggaaccactgaagactcgctgctcccacaaaagattcaggcttttgagagtgtttgcgtgaaaatgattgctgccggtgccgaacatactgctgcagtaactgaagacggtgacctctacggatggggttggggtcgatatggaaacttaggtcttggtgaccgtaatgaccgtttgcttcctgaaaaagtatcttctgtggagggtgagaagatggtgcttgtggcatgtggatggcgccatacaattacggtttctgactctggtaatctgtacacttatggttggagcaaatacggtcaactagggcatggtgattttgaagatcatttagttccacataaagtagaagctttgaaagatagcactatatcccagatttcaggcggctggaggcatacgatggcacttacatcagagggaaagctttacggatggggatggaacaagttcggacaagtcggagtcggcaacaacgacgaccacagctcccccggacaagtcagttttccagaggatcagaaaatctcccaggttgcatgcggatggaggcatactctggccctctccgagaagaaaaatgtcttctcctgggggaggggcactagcggacagctcggcaacggtgaaatagtcgacaggaacacgcctgtgctgatcgatgccctgagctcagacggttctgcctgcaagaagctggagtcatccacggcagccccgttcgcagccaaagtttgggtgtcgccgtcagaacgatacgccattgtccctgacgagaacgtccgtaaagcaggcggaggcacggcacgaggcaacggcgccgacgcgaacgtgccggagaacgacgtgaagaggatgcgcgtgcagtcgtcgtagtaggtcttctactaccgtccactccaccccaccccccgttaaccctactagtagtaagtactacgaagacgaaccggtgccccatctagcggcgcccgatttttgtgcgttacgttctgcctaaaagtgctctccgtcgacggacggacctcctggtgttgagatggtagcggtagcactgcctcgcggcgatggtgtgtgttgtgacgtgattcacctcttagagtagagaggtggctagcccagtcgacctgtgttgtgtgtgttgttaagatgtgtcctggatcttttgtgacattgcatggagggtacaataagcgcttcgtttctcgttacttccccaaaaaaaaaaaaaaaaaaaaaaaagtaaataaaa

SEQ ID NO: 267828 - DNA, 303 bp, Zea mays
gttcgacgggattggacactgttgtccacgaaggaggtaggaccatcgagcttgcggctggtgggctgctcttcacccgagactgctccggcgagctgaaagtgtggaggggggcgcccaaggactaggaggcagtagctgatgtgcatcaaatagtgtagctgtagcctcattgaagaataatagccactgacgtgctccatcattgtattcggttccatgtaaattatggctgctccccctgatgatgtagcacatacggccaattttgtgaggatgcaaccctggtatcatgttcaaaaa

SEQ ID NO: 267829 - DNA, 342 bp, Zea mays
catcttcaccgcccaccctgcgcctgccgccgccgccgaggaccagtagcgtgctctctcgaggaatcttcttctccgcggttcggttctccggtcctgtgggtcgcatgtctagcgggggaggtagtgacctctttccgttgtcgctgcctcacggcccatggcagcgcacgctacgtgtttgtgggaaatgtcgcactgcagagagttgactgaaagtgtttctgcgtcgtctcgagacgcatttgttgagacttcaaacttcgtgtcgcagactttaagtttcgtgtttcgggcttaaaactctaaacatcgtgtttcagacttcaaactccgtgtttc

SEQ ID NO: 267830 - DNA, 980 bp, Zea mays
  unsure (1)..(980): unsure at all n locations
agggaaggctggttcgcccgcnnggacgggcccgtaatttctgggtcgatccacgcatgcgtgaaagtgaagttttttgacgtgctaggttagaacgtcatcagaggactcgtgaacgagcggcaaaagctctggctgagaagaatgaacgtgatatgcaagttcagagggagcaggcagagagagatagaattggagacactctagacttcgaaatcaagaggtggtctgctggtaaagagggcaacttgcgtgctttgttatcaactttacaatatatactttggccagaatgtggatggcaagctgtatcattgactgatttaattactggagctgctgttaagaagcagtacaggaaggcaacgctgtgcattcatcctgataaggtgcaacagaaaggtgcaacacttcagcagaaatatattgccgaaaaagtctttgacattcttaaggaggcatggaacaaattcaactctgaagagctcttctgaagcaacctccgtgactgtgaatatgcatatatgatggacagcttaaccgcataccaacatgagtcgccggagtagcaaggcacaagtgaacaaagtgaaagctccatctcagttaccatcgttcgacagattgtgttcagttgctccccccgtccactgtgctctgctgctcccatctgtatctgttcactccatggtacttgcactccacatctacgaatatacgtacgccatctttttttgttttagtttttgcagcgtgggttggctcatacaaccaagatttacactgtatggcttcttaaatactatctcgtgtacaatggaccacacatgtcgaaactacacttgctgtctaaagcccttgttgatttctaccggaagtgatgtagtacactgtacaggttgtaccattgttgatttgaaatgtgatttggtttactcaaaaaaaaaaaaaaccaggtcccggacgcgtgagtgacccgg

SEQ ID NO: 267831 - DNA, 728 bp, Zea mays
cttcttatagagctgctgctgagagagctcagcatgaagcaaggaagagagctgaacgagctgcagtggaaagagctgctactgaggctcgagaaaggcaggcagctgcagctgcagccgctgccaccgcagcagcagctgctgcttcaagagaaaaacagagcacaccagatgatcttgagtcattctttggtgtgggttctcgtgccaacagtgcgccgaaacagagggctccaacaccaacagtggattctatgtttggttttggagctcaaggcagaggaacaactaatggatcacagagagcagcatcaacttcggctcctgtgagaaaagtggcatcagccacaagttttggtgatgatctgtctgacttatttggagctcctgcatcttctgatgtttttcaagaagttgagggagaaagtgaagaaagaagacgtgctaggttagaacgtcatcagaggactcgtgaacgagcggcaaaagctctggctgagaagaatgaacgtgatatgcaagttcagagggagcaggcagagagagatagaattggagacactctagacttcgaaatcaagaggtggtctgctgggaaagagggcaacttgcgtgctttgttatcaactttacaatatatactttggccagaatgtggatggcaagctgtatcattgactgatttattactggagctgctgttaagaagcagtacaggaaggcaacgc

SEQ ID NO: 267832 - DNA, 1381 bp, Zea mays
agcccacaagcgttttcctctccgagtcctccctggcctctcaaccactcatcatcgccttcgcaggcatcgccctctcgccgggccgtccgattccgccatggcttccgatgagagcaaaaattcaaaaccagagaagccatcttcagcagctggtgcaggcctccccaatccgtttgatttttcttctatgagcaacttgctcaatgacccatcgataagagagatggctgagcaaattgcaagtgaccctgtgttcaaccagatggctgaacagcttcagaaaagtgctcagggtgctggagaacagggtattcctgcattggatcctcaacagtatatggaaacaatgcaacaagtcatgcaaaaccctcagtttgtgtcaatggcagagcgtcttgggaatgcccttatgcaggatcctgctatgtccagtatgcttgagaacttgaccagtccagctcataaggagcagcttgaggagaggatggcccgtatcaaggaagatccatccttgaagccaattcttgatgagatagagaatgggggtccatctgcaatggtgaagtattggaatgaccctgaggttcttcaaaagattggccaggcaatgggtgttaaccttcccggagattctagtgtgtccactgtgctctctggacccgaagagactgaggaggaaggaggggatgacgatgagtccattgttcatcacactgcaagtgttggtgatgaagagggtttgaagaaagctttagaaggtggagcagacaaggatgaagaagatgccgagggaagacgggctttacattttgcatgtggctatggtgagttgaagtgtgcagaaattctccttgaggcgggggccgcagttgatgccctagataagaacaagaacactccgttgcactatgctgctgggtatggtcggaaggaatgtgtggatcttctgttgaagtatggtgctgctgtcacgctccagaatctggacgggaaaacccccatcgaggttgccaaactcaacagtcaagatgaggttctcaagttgctagagaaggacgctttcctatagagaagagaaccgccgaataaagtgtatcaagccgtcaaactattggttttgcattggtttatttatctcggtctggtatggttgtctgtagcttgtgaatttgatgttcttttcatagcgaatgccgtttttgaaccagtacttgtgtaagaagtacctaggcttgttcttgtcctccatatatgaatctttcacacttgtcaagaattgattacagttattttcaaggctaaaaaaaaaaaaaaaaaaaaaagggcggcccggacgcgtgagcgcacgcgtgggcggacgcgtgggcggacgcatgat

SEQ ID NO: 267833 - DNA, 553 bp, Zea mays
  unsure (1)..(553): unsure at all n locations
ccaagttaaacataacaattctggacaacggggaaggatcatgggccgagatgngagagtgcataggtcatggagaaatgagtcaagaacaaaatggcaataccatcatcaaggaaggagattttcgagcactcatcatagatttgaaagatccgaacctgcaagacctcaatagtgattaagggttcagggcagtgattggtaccaaccttgcagtttttgaacctcaagtagtggtggtatacatggtaattcctgcttgtcagaagtgtaacagaaactgtgtcaggctttaacgatgtttaaagagtgtaaatttcagttcattgggggtagagcgtatgctgcacataggccattttccagtgcagtgttactaattaatttggtcattgtttctctctctcccaatgagtatttttcataggaacatttttttatttgatttaatcctttttacaggtgataaggataaccaagtttagcgacaatcctctgtagtctcgtttggttctttgccttttttccccttttgctttctcagtaaagcttc

SEQ ID NO: 267834 - DNA, 759 bp, Zea mays
  unsure (1)..(759): unsure at all n locations
attctggctcataaggagtagcttgaggagaggatggcccgtatcaaggatgatccatccttgaagccaattcttgatgagatagataatgggcgtccatctgcaatgagctttccaaaacatttctcccgaagctagatacagtctactatatcccacaatttcaagggagctaaaggggaacgccttttcaggtgctaccctgagccttggaaggtcatgagaaaggcatcgtcctacagctacatctgcctgcatcaacaagaggagatgccttcgttgaaggaagtgtccctcgacatccttccttctgtttagctaggacctctcgagagttgttgtgtcaataagagagtttacgcgactagatcttcatttctcacttctttggtttatacctatgctgaccggtgactgctaagttgcatattgccgctatcagaagttttccatggagcactgtgatctatgtagggggttgccagattgaaaccataacgttcttttgtctcccctcacatgccactgtgccaccatagccttctccatcagaatcgtcttctctggtatccatgcatttctgggcatttctggaacgactctctctcttnttaatcggaaagctctgttccattaggcaccatctccagccaaatcagtggagaccaccttgatacaaaggtggagacttggctcatgaacacagtcaaaccagagctaaccccgccccattcaatacaaggaattaaatcataattt

SEQ ID NO: 267835 - DNA, 782 bp, Zea mays
ggcagtgattggtaccaaccttgcagtttttgaacctcaagtagtggtggtatacatggtgattcctgcttgtcagaagtgtaacagaaactgtgtcaggctttaacgatgtttaaagagtgtaaatttcagttcattgggggtagagcgtatgctgcacataggccattttccagtgcagtgttactaattaatttggtcattgtttttctctctcccaaaaaaaaaaaaaaataaaaaaaaatccatctgcaatggtgaagtgttgttactgttgtctactattactatccatgagatctgtttggaatatgcatcggacttgtggtgaacatgaatgactttggtcattctgagataatattagctacttacacagggaatatgccgagtgtatgcatcttccaagatattacagattttggtaattcggctatttttttccttttggggctgcatgattcatggctgatgagataagattatatcaaactatatcgtcacttatggttgaggactgctctataggtgaattttgtgatgctacattgaaacatccttttttatattattatattaactatgctatcctactttgctgtattttctcgttttgtggcaaatggtcatcaatgctaaaccagacttgtccgaattttaaattgtgtaaactcaacttatccatcgttcttctacccaaaacttgtagagcttttcaaaacatttctcccgaagctagatacagtctactatatccacaatttcaagggagctaaagggga

SEQ ID NO: 267836 - DNA, 845 bp, Zea mays
cgccggccgcgccgcgcccaactcctctgatcctcttccttgtccccaccctcttctgcgatggcgacgctgcagctcaaccacatcgcgcgggagacctccgacgtggcccgactcgccgccttctacgaggccgtgctggggttcgagcgcatcccttcgcccacctactcgggcttccaggtcgcatggctccgcctcccgagctcccccgacgtcgcgctccacctcatcgagcgggaccccgccgcggcacccgtcgcggtggggcctggcgccgagggcgcgccgccgtcgcagctgccccggcgccaccacctcgccttctccgtcgctgactacgacgggttcgtgaccgggctgaaggcgcgcggcaccgaggtgttcgataagtcgcagccggatgggcgcacgcgccaggtcttcttcttcgaccctgacggcaatggcctagaggttactagcgctggtgcagggaatgagaagtgaacagagaccatgatttgcagtctacttctgttttatcgtgcaatacctcagcaaaccctgcctacatgatgcgatcgaaaccggagacgttcctgggtcaagcttcgttccgtaaaataaataaatccgaagcccttcaaagctctacatactcgcccttgcttgtttgagacaagggcttgcgttcttgctgcatctcatccgagatgattgtaatccgaccagggtctagttaataaaaatgtcgctttgccctgaaaatgttttaccctgtaaacatcgctctgtacgtgaatggatttcctacataacaattgggtaatggagtctaaataatttccttgtcattccccccc

SEQ ID NO: 267837 - DNA, 434 bp, Zea mays
gccccccgtaccaaagtgttcattagtttcaccggatgggcgcactcaccagggctggttcttttaccctgacggcaatggcctataggttactagcgctggtgcagggaatgacgtccgtccacgcgcccggatttgcagtctacttctgttttatcgtgcaatacctcagcaaaccctgcctacatgatgcgatcgaaaccggagacgttcctgggtcaagcttcgttccgtaaaataaataaatccgaagcacttcaaagctctacatactcgcccttgcttgtttgagacaagggcttgcgttcttgctgcatctcatccgagatgattgtaatcccaacaatgtgtagttaataaaaattgtcgctttgccctgaaaatgttttaaaaaaaaaaaaaaaaaaaaaaaattaaaagatataaaataaaaa

SEQ ID NO: 267838 - DNA, 958 bp, Zea mays
cggacgcgtgggctcctctatataatcacctgcaggtggtcttcaaagaaaagaatgggaggaaaaacaggcgcaatatagcatcctgcatccaatccacagtagccgcggctactagctagctagtctgctccacgctgcagggcttttagcttaatggccgggctaagcgttctcctggagaaccacagcaagagctacaccgggaaggcggcggcggcgcagatcatcagcaaggccaccctcgtgacgacgacccacggccccaaccaccaccagcagcagcggaagatccctgtctctgcggcggctgcgggctccttcctgcagcgctgctgcctgtgccacaaagagcttgccgagggcatggacatctacatgtacaaaggcgaccgggcgttctgcagcgaggagtgccggtgccggcagatcttcatggacgaggacgccagcagcagctgctgcggcaacggtaacggagcgggcgccgccgccgccaccgtgcgcggcaggcggcgagtcaagacaagacaaggatgggaacgtgaatgggagacgtagcttaggtgcaccagatgaccagatcttcttcatggaaacatggatgggagacggagacaagacaaggatgaagatgatgaacacagtgtggaagtgtctgccagctcatcccccgtgggggtccgtcgcatgcgcagcacactagtacgtagtacgtgcgtggcatcttgctggacccactggataagatggccgcacgacttggagccgctctttgggccccacctcatgaattggatcaggatccgaccgagtaattaccgggccgcatcttcgcttcttttcctttttttgtcacgtcaaatccactccccttgaaatgcagactacctcacgcacgcaaaccttaaccgcattcgtcaacgcaacggtggatcactgcgcaacagcagtgagc

SEQ ID NO: 267839 - DNA, 1371 bp, Zea mays
ctgtcagtccggtggtgcaaacatctatagtaactacaatacgacgtcttcctctccgcagaggccaccaatacatcatctattcatcttgctctctcctctgtccaaaaaggaggcgccgcgctcctcttcttctacgccgttcactctctctctagtctctcccttcccttctccacgcctccgcccccactcgtgagactctacctagccctagcgccagcaccacccgcccaacctcccggagagagagagagagaggaggaggccttcgccgccgccgttaccgtcggccgaggcgccaggatgttcgggtaccagaagggcctcgacgtcgaggcggggacatcgggcgccgccgccacgggcggcgcgcgccagctctacccggggatgcaggagagccccgagctgcgctgggcgctcatccgcaagatctacgtcattctctccctccagctgctcctcaccgccgtcgtcgccgcagtcgtcgtcaaggtccgcgccatcccgcacttcttcaccaccaccagcgccggcctcggcctctacatcttcctcatcatcctcccctttatcgtgctgtgcccgctgtacttctaccacgagaagcacccagtcaacctgatcctgctcggcctcttcaccgttgccatcagctttgctgtgggcatgacatgtgccttcaccagtggcaaggtcattctggagtctgcaattctgacaacagtggtcgtgctcagccttaccgcatacactttctgggccgtgaataggggcaaagacttcagcttcctgggtcctttcctgttcgccgccctcatagtgctgcttgtgttcgcactcatccagatcctgttcccactgggcaagctctcccagatgatctacggcgggctggcgtcgctcatcttcagcgggtacatcgtctacgacacaaacaacatcatcaggcgctacacgtacgaccagtacgtctgggccgcagtctccctgtacctggacgttatcaacctcttcctgtccctgatgaccctcttcagggcagccgactaggcgctctgctctcatcctgtctatctacgagtcggtgcctgaatgctcccgtggttaagctccggtacccagaattccagttccaagaatagagttgtatataggtacctgcgttgcctttctactagtatggtcttattcggcttggctcggttcgatcagagtcttgatacgtagttggatcgcgaacaaatgaacctgcatggaattatggagagccatctgctttatgatcctcatttgcctgcccaccacgttgtatcagctgaaagctgaaaataacatgaatagaattgtgaaccactggagagccgt

SEQ ID NO: 267840 - DNA, 1029 bp, Zea mays
agaattctgagcttgctgctgcccggaagctgctcgacgaaatggccaacaagatgttgaagcaccgccctgccccagacatcatatcctacaacactgtcctcgctggttactccgtgcaggacgatgaggatgggtttgggaagcttttgaaggagatcagcttgagcaacctggagccaaatgttgtcacttacaactgccggatacagcggttctccaagaaaggcgagacagtcaagggggaggagctgcttgatgtgatggaatcaaaggagatagcgccaaattacgttacctacaatgctctcgtgcaggggtactgcaaggagggaaatgttggggcagctatgcgtgtgttcaagaggatgaaagtgatgaagaggcgggagggaaggagtgatttgggtgtttctgcacattcacaggtatatgtggtgctgtttaggagtttggtggagaaagagaagcttgatgacgcgctgtggatttgtaagagctgctttgcaatgaaggcagcaccaccgtttgaggctgctaagggtttggttgagggtttggtgaaggcaggcaggtcaacagaggccaaggatgttgttgccaagatggagtttcttgtgaaaggcgatgccaaacttgcttgggggaaggttgttggtgagctttcttttgaagagggatcaccgaatttgaatccatgatttgctagaggcatctgtgttacttctcattaattcatgcattttggagtttgaatgatgatggtgaagaagataagcgttcaacgtgggatccaatgttgccttcttgttgtcactggactgcattctgcaaggtttgcggttagatcaggatgtaatggatgctccgtttacttcaaaacttgcttaattttatgtcttgtaataatattcgaaatgatgttaaagtttaacatttgttgaagtgtttagggcatcatgatagatgatacatctactatctatcattgtaacatgcttgttgtaatgtgtatttcatgcctcatca

SEQ ID NO: 267841 - DNA, 931 bp, Zea mays
gctaccaacccgtgaccctaaaaccaactaaagtccagaacagaggcagctctcttggcgtgctcacctgcttgctccaagatttacccctccctcggtgcctgatacctctatcctccgcatccgtctctaaagacaaggcagtcgtcaagaaagggagtttgaccaagagcctgtggtgtccgtcggctgccatccatggcaggggaggccaagaagctcttcttcgcatccgaggttactctccacgcctccaggaaggactgctgggtcgtcatcggcggcaaggtgtatgatgtgaccaagttcttggaggaccaccctgggggagaggatgtgcttctccatgcatcagcctctggggatgccacggaagcattcgaagaggtgggacacagcacttcagccgtcagcatgatggacagctacttgattggaagcatcaaggactatgttcgtccgagtgcatcgaaggccacagatccttggagcgccgatgttctaccaaattccaggacgatgcaacgggaacaaagtcactcctaatccaaataccttcctggactttcttctcccattgtttgtgcttggcctggcatttgcagcttggtattacctaaccttcatctccaagaaccattaaatacagtgaagctgggaattatttctcactattatactgttagggttatatcagagaaaacattaagagaaggcaaaccttgtattatggtattttgcacttgaaggttgctagctagggtttccttggatgtcctttcttacatgtaacaggcatttcagtacgcagatgtatgattgaaacaatttatccttatttttccaatttgtgcttcagattcattttcttatatttttttattttttagtaaagatcccaatgatttagtacaatttgattgtacatatc

SEQ ID NO: 267842 - DNA, 926 bp, Zea mays
cggacgcgtggctagcacaccccatcgccccagaccacagcgcgacagtgagtacagcagcagcagctgagagcgtgagagcgtgcgaagcaggagggaggacaagaagaagccgatggcggttgtgagcggcagcggcgggaggctgaacccctgggcggagcccttcgtgccttccggggcgcggtaccgcggcctgcggaccgtggaggcgacgccggagcaggaggtggaggacttctcccccgagtggtggcgcctggtgtccgcctccccggccttccgcgaccgctggctgcgcgagtacggcgcgctcggcctactcgacgccgaggacgacctggacgacgacgtcgacagcttcctccccgacgacttcttctcgcctccggccccgcgctacgagagcgagcgggaggacgccgcgggcaggagggcgggccgagggcttgaggtggcggcgtggggcatcgacaggtggtggagggcgcacggtgggccgccggagaccccgaggtacgcggagaaggcgccgcggagggtggccgccgccgccagggtgagcccccgccccatccagcagccgcgctgaaggaccagatccgttcatccaccgacggcgacggctgctcagtcagtgtcacatcttggcacggggggaaaaataggcacgaaaaaaaaagagttccctttcttgaatcgatgcagtttgctttggtgttcgtctcgcgcagtttctggatctgggctccgcttcagctcgagatcgactgggatgggaagatcctctgctgcgttgtcttgtctgtgctcatccgtgtgtactgtgtaaatatgaagatgtaataacaaaaacacgcattttagctttcagttgaaaaaaaaaaaaaaagggcggccgctcgcgatctagacggacgcgagaa

SEQ ID NO: 267843 - DNA, 1176 bp, Zea mays
cccacgcgtgcgcccacgcgtgcgctcacatgcacacagcccgagctgctgcccgcccacccgcctgtagctcccctcctcacggagcaggcaggcaggcaggctgggattcccgtcgaagcagggcaggagctagggcgggtggaggagcctttgcccgggaacgaggagaggaggtggcagtggcaccccgcggctagggcagcgagagaggggcgaagaggaaggcggcgggcgcgtccgccatggctagcgaggaagtactccacaaggtccagaatcttatagagcgctgccttcagatgtacatgaacaagaaagaagtggttgatgccctctcccaccactccaggatagagccttgtatcactgaacttgtttggcaacaacttgagcaacagaatcctctgtttttcaaagcatacgatatgaggctaatgcttaagaatcaaataatggtcttcaacaggcttctccaggatcagttcgagattatgaataaagagttttcttcagggatcccttctatgtctcttcctaatggctctaattccaacctattgaagcaagattcatgctttttgccagagactgctcctggaaatgcaatgccagatggtataatgcacaatggaagttcaagtggtataataaatgacacaccatctggcgatcagttacttaatgctagtaaagacttgcatggccttcatagtcaaatagatgcttcaactagtctacagtcagaccagaatgcaactgctgtgctgtatggtgtagacaacgagacaagcgcaacaataaagaccgagtcttgctactcgagtaatgctgattttgccttctgtgggaacactttcctggaatcatgccagtcgataggtgatgcatctggtggtggatccttcagcagctcagagttgaatgggcaaccactaaacgattcaattttggatatggagtcatcatcatttagcttcttgaaccaaatgccccaaagcttcatgttttcagacctggcagatgatctcaaccaaaatgcagaaataacaccatttctcactcccgggacatatttctccgattccacagggggagaccatacaggtgattcgtgctccttccctttttcacaaccacccaagaatacagcatacactgcattatctgtgatct

SEQ ID NO: 267844 - DNA, 752 bp, Zea mays
ttctgaatgcaactgctgtgctgtatggtgtagacaacgagacaagcgcatcaataaagaccgagtcttgctacatcgatgtaaatgcatgatttatcgtactatactgagtgtgaacaactactcctcggaattcattgccaagtcagatagcgtgatgcatctggtggtggatccttcagcagctcagagttgaatgggcaaccactaaacgattcaattttggatatggagtcatcatcatttagcttcttgaaccaaatgccccaaagcttcatgttttcagacctggcagatgatttcaaccaaaatgcagaaataacaccatttctcactcctgagacaaatttctccgattcaacagggggagaccatacaggttgagcgggtcatgcacagcgtaccaaccatttgtacataggcacatgggcagtcgaatctgcattggtgaagaacttgaggaccttttgatctagcttgtttatttctctagtttttgcgtcttgatattgtggtagtttggggcttcgggtctggtgggttgtctagcccatcagaacgcgtaatgggtacggagtattggtcttccagtatgttttcagcgttaatttggctaatttcccccgcttggcttgtacaacaaattttatcagtactgagtaccatgagttgtactgctgtatatgctgcttcccactctctgaattggcagaatgattgatgagaagacactgcttggaggaaaacaaaaa

SEQ ID NO: 267845 - DNA, 430 bp, Zea mays
ctcgtcacttcgctaccagctcgtgtccatccacgcggatctgattgctccggttcgttcctttgcgatcttgctctgctctgctctgctcccgggctctgctgattgctggtacttcttgtggaagaaccccgctttggaaagaaccatgctgtatgtccctgtccaccaaactgaccaccagcttccgtatcggtatgcatcttcagtgcttctctgcagaagcaacaacaactccggtccagagtcttatattgcgctgccttcagatgtacatggaccagaaagaagtggtcgatgccctctgccaccactcgaagatagagccctgcattactgaacttgcttgccgacaacttgagcatcaaaatccttctgtttttcaaggcgtactatatgagactaatgcttaagaatcaaataatggtct

SEQ ID NO: 267846 - DNA, 731 bp, Zea mays
  unsure (1)..(731): unsure at all n locations
ataatgttatagatgcttcgactagtctgcagtcagagggggacttttttaatgtgctggggggtttaaacaacgagacaagtgcaacgataaagacggagtcttgctattcgagcaatgctgattttgctttctgtgggaatactttcctggaatcgtgccagtcaataggcgatgcatctggtggtggatccttcagtagctcagagctgaacgggcaaccactaaacgattcaattctggatatggaatcatcgtcatttagcttcttgaaccaaatgccccaaagcttcatctttccggacttggcagacgatttcaaccaaagtgcagagataacaccttttctcaccccggaaacaaatttctccgattcgacagggggagtccatacaggttgagcggggtcatgcacagcgcaccaaccatttgtacatacgctcatgggcagtcaaacctgcactgatgaagagcttgaggaccttttgatctagcagtttcttttttctactcttctcgtcttatattgcggtagtttatgggttggtcttctggtatgccctgcaatggcgtcgttatcgtgccttgtacattgccgtgcttgtgtaagaaacattaggagcggcgttgttcgcttcagcattaatttggctaattcctccgcttggcctggcttgtacaacgaattttatcaaaatattaactggattctgaaatcgagattttcgncc

SEQ ID NO: 267847 - DNA, 532 bp, Zea mays
gtaatgctgattttgccttctgtgggaacactttcctggaatcatgccagtcgataggtgatgcatctggtggtggatccttcagcagctcagagttgaatgggcaaccactaaacgattcaattttggatatggagtcatcatcatttagcttcttgaaccaaatgccccaaagcttcatgttttcagacctggcagatgatttcaaccaaaatgcaggttgagcgggtcatgcacagcgtaccaaccatttgtacataggctcatgggcagtcgaatctgcattggtgaagaacttgaggaccttttgatctagcttgtttatttctctagtttttgcgtcttgatattgtggctagtttggggcttcgggtctggtgggttgtctagcccatcagaacgcgtaatgggtattggtcttccagtatgttttcagcgttaatttggctaatttccccgcttggcttgtacaacaaattttatcagtactgactaccatgagttgtactgctctatatgctgctttccactc

SEQ ID NO: 267848 - DNA, 708 bp, Zea mays
ctatgactgctttgaggcgacgactgctttcaagaaccacaacttgccacttgcgaggataaagaagatcgtgaaggccgatgaagatgttcgcatgatctcagctgaagctgctgtagtctttgcaaaagacgatgagctcttcatactggagctgacacttaggtcgtggatgcacactgaggagaacaagcgccgcaccgtgcaacagagtgacattgcagcagcgatcactaggactgacatttatgacttcttggtcgacattgttcccagggatgagatgaaggaggacggaattgggcttcctagggctggtctgccacccatgggagccccagctgatgcatatccatactactacatgccacagcagcaggtgcctggttctggaatggtttatggtgcccagcaagggcacccagtgacttatttgtggcaggagcctcagcaacagcaggagcaagctcctgaagagcagcaatctgcatgaaagtggctgagaatattgctcagaagctatcacctgattcagagttctcattttaggttgtccaaactgcaggttttcttagtaatatcgttgggtatcaaactgaaacaggcgattctaagtagggtgtagcatcatggtagtttcatttctgcttgtggtgttagttggagggataatgattagcggctagtggattaaagttaccataccat

SEQ ID NO: 267849 - DNA, 522 bp, Zea mays
  unsure (1)..(522): unsure at all n locations
gtcaggcgcgaggcggagaaagccgagctcgaggaggagatcgccacgttgaaggcggagatcttcgccctggaggaagagttggccaggatggatgccgccgccgccgctacgcgcgcgagcgcttctcactctcgtgtttcagctaggccactgtgattggctggagctgttgtcgtagatctcggaggtaggtagatggaattccccattgcaattactgggggtcatgttctgctgaaacagctgcaacgttctcgaattttattgcccttaagcacgattggtttgggattatccaatcaaagaactgttctgcacaccttcagagcagaaacaggcgtcatgttgtggggggaggccacaagagcagtagtgtcggccaatgcagcaggaaaccaccgctcgtttggtcttttggtcgcggagcttggaaagcataatcaattgttctttatgggctgatcgattctttcggaacggaggcatagaataattcctaagccggttgnttctctgatt

SEQ ID NO: 267850 - DNA, 935 bp, Zea mays
ataaaatttccaacatttctggaagacgactccagtccatctgcagcggtccttgttgggataggtttcaaaggcatgagagtgatgagggtcaaaaatctgaacctctacgcttttggtttatatatgcaaccgacttctatccgtgagaagttgggtcctaagtatgcttcatttccaactgacaagctgatggagaaccctgatttctatagtgatcttctcagagaaaaccttgatataagggtcaggttggtggttaactacaatggccttagcgttggtgcagtgcgagatgtgtttgagaagtcccttggcctgcggctgcagaagatgaatcctaacacagactttcactgcttgaagacctttggttctcacttcacagaagatatcgctataccttcgggtacgaagattgacttctgtcaaacatcagatgggaagcttataacagaaattgatgggaaacaaattggtgctgttcggagcaaagatctttgcaaggctttcttcgacatgtatattggtgattcaccggtttcactggaggccaaaaaagtcgttgcccagaacgtggctgggctcattggaagacgctgaggatagcgagaggatggttatttcattcttctgtacagttagagaggattcatatgagcgggaaaataggccaagtatgtagagtgatctgtcttgtatagaaagcaggcaaaaaggtccaatgtatatgtggaaggtagcatcttcagttgtgctaggcctccattctttttttttcttgtttggatgggccttttgcttcttcgtagctgctgtatcatgtatgctcccattgagccaggagttgtaaaatattaaattgaaggtgcttcttccataatacaatcaccgtcacgaaaacaaagttatcagaaaaatttaaaaaagtaaaa

SEQ ID NO: 267851 - DNA, 437 bp, Zea mays
  unsure (1)..(437): unsure at all n locations
gctcaagcaggtgcacccggacattggcatctcgtccaaggccatgtccatcatgaactccttcatcaacgacatcttcgagaagctcgccgccgaggccgccaagctcgcccgctacaacaagaagcccaccatcacctcccgggagatccagacctcggtgcgcctcgtcctccccggcgagctcgccaagcacgccgtatccgaagggaccaaggcggttaccaagtttacatcctcttagggtgccgccgcacgttgctacgatcctgtttaattctcatatttaggcctgtgctaggttgcttctgcaacaatgtagaatttgttataattgctgaatgaatcagttacccctgttgaagtttctaatatattgtaatcttgctagtataatttgcttcaaacctggatggngtttccattcgtcgtttaaa

SEQ ID NO: 267852 - DNA, 672 bp, Zea mays
cccacgcgtccgcggacgcgtgggagagagaagaggctgaaaggaaagctaatcttgatgctattgctgaaaagcagcgattgagagagatagagttggaggagaaggcaaaggcgaatagggagaagctcttaaaggggtctgaggcaggtgctgctccctcttctaataaatatattcccaaatttaaaaggcaagatggtcttcctgcacgacaggatgcacccccaccccgccaagatggccctcctccgtctactgaccgctggcgtccatcaagatattcctcaacctcttcgtcaacctgggggcgggcacataactgatccttttttttttattttgctgactacatttataattttggagcttgtctcataggctatcgcaccttaccgttcactatactccatgcatattgtcggtagttgctgactgcattttatgatgtttttattggttcatatatttgttctcatgtctttggatgttgatgtctggcacgagttccgttttgcagttgggttgtgatacgggttgggttgtctaactataaagtcgtcaattatcgtatcttgtacccaaactgatggcttactttcctgagtaacgattaagacaactgaaacacgggctactactcgattaaaaaacaaaaaaaaaaaaaaagaa

SEQ ID NO: 267853 - DNA, 1015 bp, Zea mays
cccacgcgtccgcgacaaattcaactctttttttgtcgagaaggaggaggagtacatcatccgtcagaaggagctgcaggaccgggtggctagggcggccgggcgggagtccaaggaggagctcatgcgggtgcgcaaggagatcgtcgacttccacggcgagatggtgctgctcgagaactacagcgccctcaactacacaggattggttaagattctcaagaaatatgacaagagaactggagccctgatccggctgcctttcattcagaaagttcttcagcagcctttcttcaccactgatctcctgtataagcttgtgaagcagtgtgaagccatgctggagcagctccttccggttagtgaggcatctgtctcaagtgaagatggaaaaggagactctaatgatgaagagaagctggcgaagccaagttcttccttggtaaatggtggtggcatgccagagttagatgagatcgagtacatggagagtatgtacatgaagagcaccgtcgcggcccttaggtcactgaaggagatccggggcaagagctctactgtcagtatgttctcgttgccacctcttcagggcaacaatgcacaggacagctaccagatccgggcagagcaactagatgaggagccggagaggtggagcaaagtaacagtgatagagcaggcggccaaatgacagaccgaatgggcaaaacatctgatggctgaacttaaaaattttagacttggacatttgctggagatgggactgggatcccaatctcccattcagaaatttgtatgaattcaggattcctaacagctgcgaaatggtggacatgttaaatcatagaattcccagcacaaccatcggacagaattgggctgattttattcactattgtgaattgatcatgtgtttttactcatatacgcccgtattatccggcgtggtatcatattgtgaaaatgaaagaaaaatctggttttggctttagtacgatcataaactgcttcgaag

SEQ ID NO: 267854 - DNA, 664 bp, Zea mays
cgcagagtttctggctcttaacaaattcctacagaaggtatgtatgtggcttctctaatttggatctgttgcgcatttaggaattaggattagatgattagtggattactcactcagacaagcatcttctgcaacaggcaatttttctgtttcataatcaactgggtctgatatgtctcataccaactaatggccgtgagaatgttatttaggcttatataagttatacagaagatatttcgttatgataatgcacaaaagttatggtgtgcaatgaaaggtgcaaaatgtgttttccaccctggataggggtcgtggatttctaagtcttgaggaggtgtaccaggcattaatcaaacttggtttctcgttggattcaccagccttctatactgtttgtgagagctttgacaagagcaagaagggcatgattcaattggatgagtttatatcactctgcatttttgttcagtcagctcgtaacctgttcaattcgttcgatacaagcaagcaaggaagagtgactttagattttaaccacttcgtgtactgcacggcaaactgcaggatataatgtggttgtacatgggcgcccaaacaatgaggttagcagtctgaagtgctaaccgttcgccaatcaaacttcgcttctgaaccggcagct

SEQ ID NO: 267855 - DNA, 508 bp, Zea mays
caactgctcttctgccgtctagtcctttgtactgatcggcgctccggtcggctcctcgcgcttgcgggttccccgtccccaccccacgccgggggcaagagatggagaacgcggtggtgctccgggagtggtttgaccgcgtcgacgccggccgcaccggcaacatcaccgctgcccagctccagggcgcgctcgctgtcggcaacctcaacttccccatctccgtcgtgcagcagatgattaggatgtatgacttcgatcggaatggcaccatgaacttcgaagagtttctggctcttaacaaattcctacagaaggtgcaaaatgtgttttccaccctggataggggtcgcggatttctaagccttgaggaggtgtaccaggcattaatcaaacttggtttctcgtgggattcaccagccttctatactgtttgtgagagcttcgccaagagctagaagggcatgattcacttggatgagtgtatatcactctgcatttttgttca

SEQ ID NO: 267856 - DNA, 455 bp, Zea mays
cagagtttctggctcttaacaaatgcctacagaaggtatgtatgtggcttctctaagttgggtctgttgcgcatttaggaattaggattagatgattagtggattactcactcagacaagcatcttctgcaacaggcaatttttctgtttcataatcaactgggtctgaaatgtctcatatcaactaatggccgtgagaatgttatttaggcttatataagttatacagaagatatttcgttatgataatgcacaaaagttatggtgtgcaatgaaaggtatatttgagagtaatagaaatagactcattgtgctgcatccttaactgtaagtttcttgtgtgcgactcatcgtaatcgcaggtgtttcctgtttccaatttgcaggtgcaaaatgtgttttccaccctggataggtactgtatttcacttattttcgtttgttccctgaactgg

SEQ ID NO: 267857 - DNA, 976 bp, Zea mays
ggttgatgggagccagttgactgttagttgggctgaacctaagggttcaacagatgcttcatctgcagctgctcaggtgaagactatatatgtgaagaacctacctgaaaatgtttctaaagagaagataaaggacctgtttgacaaacatggagaggtcacaaaaatcgttctgcctcctgccaaggctggtcataagagagactttggctttgttcactttgcagaaagatcaagtgcattgaaggcagttaaaggaagtgaaaaatatgaaatcgatggtcaagtactggaagtgtccatggccaaaccattggcagataagaaacctgatcattcacacaggcctggaggaggccctaattatccccttcctccctatggtggtggtggctacatgggagatccatatggtgcttatggtggcggcggtcctgcatacaaccagccaatgatatatggcagaggaccagcaccggcaggaatgaggatggtgccgatggtgcttcctgatggccgccttggctatgtcctgcaacaacctggtggaatgccgcctccgcccccaccgcggaggggtagtgaccgaagagacagtggcagaggtggcgaagggcacagccggcgatatcgcccttactagcttttcccttatgggctctactcccatcatgtggtatgaagcgtttaacttatgagacgagataggagcctgtgttcttgtcccagtataagatctgcgatggcacgatgcttgtaccatctgtttacttatttttatcatgcagtgcatgtgacttgaaactgtgatggacttgtattgctttctgccttatggcacctgtagtagtgaactgatgaaggaagttcatgcggactctgaagctttgttggcttagaatggtaattttgctgtattctatttcacaggaaaaaaaaaaaaaaaaaaacaaaaaaaaataaaaaaaaaaatatt

SEQ ID NO: 267858 - DNA, 633 bp, Zea mays
gcagtacaaggcctagctgcagcatcagcaacagcagtgatgatgctgcaatacgggaacggcggagacacagggtaccaggcaatgggctacggctatggccggccaccgatgatgcattacccaatccccccgcacgcgcaccccgagccatacaacatcttcagcgacgagaaccccaacagcacctgctcactcatgtgatcagcatatcgtctcttgctgccctgttccaagtaaaacaaaatctgaaggagctcaataccgctggccgccggcggacgtccgccatggttgaagcgccgtccgtgaatcaatcataaatcagtgtgcttggttggggggatgatcgtagctagaatttgccccttttcctcctcccgtttcacctttttctctacgcttattttcgccttcctttcagaaaaaaaggaacttccttgaatgcgaagtttggtatagtaattatgaatagtttccataagggaggagatggtgggggccttcttcatagccaacccacccaatagggggtgggtgggtggttcgcttgcgtcttcttccattctactagcttcatgaaaggtggactgatggaagagcaaagttgtcaatctcagtaaaatcagtgtg

SEQ ID NO: 267859 - DNA, 971 bp, Zea mays
acgacatgatgagcattttctcaaatgacggtgtaggacgctctatagattcaagcagcagtgaaacaaggaggagtcacagaaggatcctgtgggatgcattttccaggcgtggctcaagaggttatccagaatctgatgctgatgaaatgggattttttagtacatggctagaccttggtgatgacatttttgaagagttgggggaatcaagatattttcatcgcaggcgacatggttcaatcagagtaagccagtattcaagatcccggattagggagcatcgccgtgctgtttttgatagtggtaatgaacaaagcactgctgcatgtcctttggggattcatcaaactggccgatgcacctgtgattctttcttggttgctgaagaatctagtgcccgagcaagtatatcaagaattgtcatgttaactgaagcgttatttgaggtgttggatgaaattcaccgtcaacctgcatcactttcactttccatggtctctgttcaggctcctgaatctgtagtcaattcgttgccgtgcaagagctacaaaaagctagaggcaccccaacgcagtgatgatatggaacagtgccatatctgcctaactgaatatgaggatggagaccagatacgaattcttccttgcaagcacgagttccacctgcaatgtgttgacaaatggctgaaagaaatacacagggtgtgccctctgtgccgcggagacgtctgcgaagtcgcctcgtgaagaccttggcgctgccatccctttcctcacggcaccggcagatagcgcatcccccgcctgctccgttgttgaagctggtttggtcaggcaacggcgatcacgtcccgtcaatctgggcgtccctgccgaagagcgtggccagatcctgcgaccaatgcgtcgctgttcctgccatcaactttttaagataccgagactgtatatagctcttgtagcctctcc

SEQ ID NO: 267860 - DNA, 518 bp, Zea mays
gagacaccccaatgcagtgatgatatggaacagtgccatatctgcctaaccgaatatgaggacggagaccagataagaacccttccgtgcaagcacgagttccacctgcaatgcgttgacaagtggctgaaagaaatacacagggtgtgccctctgtgccgtggagacgtctgcgaagtcgcctcgtgaagaccttggcgctgccatccttccgatgtggcgccggtggatagggcaccaccgccaggcgccagctgttccgtggttgaagctggttcggtcaggcaatggtgatccaacttggacagttgacaccgcaagagcacgtcaactttgactgtctccctgccgaagagaatggccaaaccaaccctgcgaccgatgagtcgctgttcctgtcatcaacttttaagataccgagactttgtatacagtagcttttgtagcctcccgcctcgtgtatgacagcctgtacatatttgtaaattctggaatcaaatgtcacaatcccctgttct

SEQ ID NO: 267861 - DNA, 516 bp, Zea mays
  unsure (1)..(516): unsure at all n locations
agcaagtatatcaagaattgtcatgttaactgaggcgctatttgaggtgttggatgaaattcaccgtcaacctgcatcactttcactttccatggtgtctgttcaggctcctgaatctgtagttgattcgttgccatgtgccatatctgcctaaccgaatatgaggacggagaccagataagaacccttccgtgcaagcacgagttccacctgcaatgcgttgacaagtggctgaaagaaatacacagggtgtgccctctgtgccgcggagacgtctgctaagtcgcctcgtgaagaccttggcgctgccatcccttcctcacggcaccggcagatagcgcatccttcctgccatcaactttttaagataccgagactgtatatagctcttgtagcctctccgtgtatgacaacctgtaatatatgtaatttctagattccaatgtcccattattctgtcctacattcagatcttattctcgcagccctgatgctcaaactagctttaccagantc

SEQ ID NO: 267862 - DNA, 727 bp, Zea mays
gatggcgtcgcacgagtcgctgcctatctccaagttcgtgggcgtggcgggcgcggggcccagggacgcgcgcccgtcgcacaactgcctgtaccgcgccgtggacatctacctcaagacacacccggggctggacgagatcgagcgggagaaggtgtgcagcgtcatggacccgctcaggctgtcgtaccaggcgcggatgcacgcgtcgcagaacaagcggctgccgctgcaggccgtgctcagcgtgctctactacgaccagctgaagatccgtagcgcggacggcagcggcggcacggaggaagggtgggagacacagtcggccgccgggaaggcccgtgcgcaggcgcgggcggacgtgtcgctggcaagggagaacgaggcgctgcggttggagctggcgcggatgcgagcgtacgtgtcagggatgcagcagagcagcaaggggagcgggtcgaggccatcgtcgtcatcgctggtaccaggcccagcgacggcgacggggaagaaggcaagcttcttagggtcggtgtcgcggacgttgagccggctgaacccgtttaagggcgggtgggccaaggacacgaccagcattgccgatgggcgtgacaggacttccatgcatgtggtgaagcccaagaggaggaagttctgcatcggctaattcttttgtgaaatatcgatatggaacgggtatcgcgtgtgtgacttatattaaatcact

SEQ ID NO: 267863 - DNA, 536 bp, Zea mays
cccacgcgtccgcccacgcgtccgcccacgcgtccggttattgttacctcctcgccggcgcgcgcaggacggcgttcttcgggatgtacaggaactggggccccggcgtcgacgccgtgcacggcgtctcctgggcgcgagagctcgactacttcgccgcccgccctttcctcggcaagagcttcgtcaacggataccactggctcacacctgatgtctgaaaaacacacaaacacacgcgcgagagtcaggagacacatcgattacagcaaaccagattaatttattcgtacagcataaagacagaataagacaccatttacaagccactgaatatgtatagtgatccactggcgcagaagtcagattcaagattcatttcgtctataaaaaatagtttccaaaacttcgtcatgtgcagtgtaaactagacagtgagcagtgagtctgttatgtctctgcataggagaccttggatgtgcaattcaagttgttccattaaaaaaaaaaaaaaaaaaaaaaaaaaaaaaaaacga

SEQ ID NO: 267864 - DNA, 685 bp, Zea mays
atcccacgcgcccgctcctcgtcgccgtcctcttcctccatctcacccgtccctcagcctcgttaatttttcgcccccatctttgaacgcagcggctcaacctccatcgttctctccctcctcctccccccgatcccgtccctataaattgcgcccccgccgccacagcggaccgcaagcacgcaatcacacagctcgctgctgctgccgtctccccgtgtcctgtcgttctcccgtcgccgggggcggaagagttcggcgggcggttggggattgctcgggagccccgtgatggcgaagctgtacgtgcaagcgttcccgcccgcggatctgaacaagaacaccgagtggtttatgtacccgggcgtctggacgacctacatcctcatcgtcttcttctcctggctcctcgtcctctccgtcttcggctgcacccctggcaccgcgtggaccgtcgtcaacctcttccacttcgcgatcacataccactttttccattggaagaaaggaacaccttttgctgatgaccagggaatgtacaacacattgacttggtgggaacaaatggacaatggcaaacagcttactcgtaataggaagttcctcattgttgttcctgttgtcctgtatctgatagctttgcacccacagactaccaacaacctatgctcttcctacataccct

SEQ ID NO: 267865 - DNA, 833 bp, Zea mays
agaggagtggtcgcgtcgggcgttaagcattaaaacggaagaaataagcaaaccaaacatgcgtgattcttcgtttacattgacgttaccgtggtgcatttaatttactgcacagaaaatctaaagacgccagttcccaacattatgcatgaagggaactagtactggtgaaggccggagattgatattctggatcagctacttgtcattgctgacccccgcaagaaggggctccgtcgtcttgttagcctcccacttgtgcaacctattctgtgcttcctctacctccttgttccagtcagttctcaaggtgacccacactagaatagccgtctgcatgcaggtccctccgatcatcccagcccaaatgcccttaacaccgagcttgaagaagaacccgagcagggcgccgagggggacgccgactatgtagtagcagccaatgttcacgtaggccacgaactgctgccacccgcacccaacggcgacacctgacagcacaggctggatgccgttgagaacgagcgtgacggcaagcagcgggcagagatccgccaccgcgttggacaccacctcgccctccgtgaacaagtagctgatgtagttgcgcaggcagaggaccagaacgccgagcatgatagatatgagcgtcgacagcgcggtcactacccacaccgagaaatacgcggacttggggtggccggcgccgagctcattgctcactctcacgctggcagcggcgttgaaccctactgcgatcatgaacacccacccgttaacagtcatgcatacagacagcgcgtccaatgcaagttcagggttggggagcatac

SEQ ID NO: 267866 - DNA, 493 bp, Zea mays
tgctcgggttcgtcttcaagctcggtgtgaagggcatttgggctgggatgatcggagggacctgcatgcagacggctattctagtgtgggtcaccttgagaactgactggaacaaggaggtagaggaagcccagaataggttgcccaagtgggaggctaacaagacggcggagccccttcttgcgggggtcagcaatgccaaataaataacgtacctgcgcccggatgatcggtcgatccacaatatcaatcaatctccggccttccccagtactagttcccttcatgcataatgttgggaacgggcgtctttagattttctgtccagtaaattaaatgacccccggtaacgtcaatgtaaacgaatcccgcatgtttggtttgcttatttcttccgttttaatgcttaacgcccggcgcgccccaaaaaaaaaaaacaaaaaaaaaaaaaaaaaaaacaaaaaaaaaaaaaaaaaaaaaaaaaaaatataaa

SEQ ID NO: 267867 - DNA, 1028 bp, Zea mays
  unsure (1)..(1028): unsure at all n locations
cggacgcgtgggttcaagttggattcatacttggatccttcatttatgtcaataattaaagatccagatctgcggcgcaaggagcagtgggaaaaatccgctcaagctcaaaagggatttaattatgctaggttatttggatatggggatctaggttgcccttcattatctgcagcagaggaatactcacttcattcacgatacctcactaaagcaaattctcttaatctttcagagattgctgaaatgaaaataatttatcgtggtggagttgatattgaaggacgcccggttatggtggttgttggtgcacactttcttcttcgatgccgtgaccttgaacggtttgttcttcatgtagtgaaggagtttgaacctttgattcagaagccatatacaattgtatatttccactccgcagcatcattacaaccgcaaccagatttaggatttatgaagcggttacaacaaatactaggacggaaacatcagcgcaaccttcatgcaatttatgtactccacccaacgttgggtttgagaacagctgttttggcaatgcaaatgtttgtagatggagaggtctggaagaaagttgtatatgtggataggcttgtgcagctgttcagatatgtaccacgcgagcaacttacaattcctgactttgtttttcagcacgatctggaggtgaatggtgggaggggcctaattgtagacccaagaacaaagcacatataccagaggacgtccagttgatatatgccagttctgaggcctgaagtttgttagttcttgcactgtaccattctaatgttcacttgtaatttattccacgtgttcatttctgtacctagttaagttagtctattccattcgttcgttctcctgccttgtgcaagggggatttctcatctgtatctgttgatatgtagaactgaattaaaactggtgtctactctagatgttgttcaaacttcacttgtcctgtacaaattttggcagttgatatgttcaactntatttcatgtttc

SEQ ID NO: 267868 - DNA, 596 bp, Zea mays
tgggaagcagagtcgagtggaggtctcacgttgtttcccgagtgagttgcacgcgtacgcccttgcgtttctagtggtggggttggacagcttggagtgaaattacttctagcatctgcatgtgccgtcttctaacatctatgatgacagttctctggcatggcatcataggctcacagttcatccccagaagttagtgctgcgacttcgttgctcttgccttgtgtatatacagtatattgttacctccaccggagtttttcctttcctgctgtatcgcattcagtgctgagtgcattattagatttggaacccgttttctgttatgaattagtgataatggaagtcaggaagtgtcgcgttatgaattagtgcagggggcaagaaagccagaggattatttccgtattatgtatgggacgtgaaaaaaaaaaaaaaaaacaaataaaaaaaattaacagattttaaagcataaagaataaagaaaaaaaaccttaaaggtgaggcctttttaaaaaattttgaattatgaaagagcaatcggaacacttcccttgaccgataatttataaaaaagggggggcccttttaaaagc

SEQ ID NO: 267869 - DNA, 852 bp, Zea mays
tacgggttccccggatcctggaaggggagcggcggcgggtatgggaaggaggcgcacttggccgcggccgggaagaggaggagcgacggcttcttcatagaggaggtggcggttgaagaagacgtgctgactgacaactcgtcgatcggggcgccgtcgccctcgggctcgtcgatcggtgagaactcgtcgtcggaggccggcggggacgacggggacgaggaggtcgagagcaagctcaaggagggtgatgtgctcggctgcttggacgcgctcgaggactccttgccgatcaagaagggcctctcgagcttctactccggcaagtctaagtcgttcaccagcctcgccgaggccacggcggcggcggcggcggtcaaggaggtgctggccaagccggagaagcccttcaacaagcgccgccgcatcctggccaactggtccaggagagcctcctgcagctcgctggccacggccacctacctgcctcagctcttgggccccgaccacgccgtggccgaaggggacgagggcgaggaggacgactccgacgacgacgtggagtacagccaggtgccgcaccacggcaagaacgtcagggacgcgccgacatcgccactgccgctccctagactcggcggtgttggcagcatgcagaggaggaacggccttgggagcttcagatctcctaggtccttctcgctgtctgatctccgtaatagcagtgctgatggtagtgattagcggccacagatttgcttgcagctctggcctctcctggccagtaagtagagatgtagtagccccctgctatatggttccggtgtataagatccaaatcccttgtgttcc

SEQ ID NO: 267870 - DNA, 1218 bp, Zea mays
cggacgcgtggcggacgcgtgggcggatcgccgctcgctatccctcgacctcggtagaaagttccaaacgaccacgacgtcctcttggtctcccgctgtcatcagtccgcaattccgcatttctattgtcctttttccgtcgcatccgtttcgtctctttgctcgcatctggcctcaagcccctcaggcctcagctcaccaccacgaaccaaccgacagaaagagggacgaatggcgagctctcagtgctgcgataacccgccggccctgaacccggcctgcggggagggcaaggtcgtcgacagcttcggcgggctcaaggcctacgtcgccggccccgaggactccaaggccgccgtcgtcctcgtcgccgacgtcttcggattcgaagcgccgattatgaggaagatagccgacaaggttgcttcgtcagggtactttgttgtggtaccagatttgtttcatggggatccttatgcacctgagaatgttgagaagccctttcctgtgtggataaagtcacatactccggaaaaagggtttgaagagacaaaacaagttattggggctctaaaggagaagggagtgtctgctgttggagctgcagggtattgctggggtgcaaaggttgttgtggagttggcaaaagctcatgagatccaggctgctgtgctgttgcacccttcttttgttaccgttgacgatatcaaagaggtcaagtgcgcaatttctatcctcggagctgagattgacaaaatgtccccaccggagctaatcaagcagttcgagcaggtcctttctttgaactcaggggttggccacttcgtcaagatcttccctggtgtggcgcatggatggagcgtgagatacaaccacgacgacgcagctgccgtgaagagtgctgaggaagcctttgcggacatgctcgactggttcaacaagaatctgaaataaactctgcaattgcatcctgccttgtaataatgcgtgttccagtgccctgggatcgaatctgctgtgtttgggcttttgcatggtcaggctattcagagttgtcatggacttagggttgtgttagtagattggttgcgctgaatctataataaaaacgaggtaaactaggacaatgatgatgtggccgtgtgtatttaatgtattctgttcacaattatgtttcgtgctctttttttttactccaattctctcctaccatttttt

SEQ ID NO: 267871 - DNA, 420 bp, Zea mays
atttccattgtgctttctccgttgcatgcagcctcgcgtctcttctcgcatctagcctccgccctcagctcaccaccacgacccgagggatagggagacgggagtaggggacgaatggcgagctctcagtgctgcgataacccgccagccctgaacccggcctgcgggaacggcaaggtcgtcgacagcttcggcgggctcaaggcctacgtcgccggccccgaggactccaaggccgccgtcgtcctcgttgccgacgtcttcggattcgaagcgccgattctgaggaacatagccgacaaagttgcttcgtcagggtactttgttgtggtaccagatttctttcatggggatccttatgtacctgagaatgctgagaagctcatacctgtgtggctgaagtcacatactccggaaaaa

SEQ ID NO: 267872 - DNA, 631 bp, Zea mays
atgagcccttacgttctgaaaactatgtcgactgacaacaagggtttgtgttcaacaaccttcaaagttccagatgtttatggagttttccagttcaaagttgagtaccagaggctgggatatactggtttgtcttttacaaagcagattccagtgcgcccttacaggcataacgagtatgagaggttcataacatcagcgtacccatactacactgcctcattttcaacgatgtgtgctttcttcatattctcgcttgtgtacctgtaccacaaataaaggactcacgggagcgcacaagtttctggaggctgctgatgcgacctagatctgtggccaagtgttacccggtgcaattttatggaatcatatatttgtagtaggccaacttagctagaattagacgaccgtgaccgcaatcatgggaaatttactcgtgctagtaggatgttcgatctgccccacaaattttttttgttcggatccttctgatcagcacttgtgaaaacgtttacagtctgtagcattgaaaggatgacgaagcatgtagtgattttgaaactactgctcttgctcagttcggatttgttgcccggaattaatagagcccacaatatccgatctttttttt

SEQ ID NO: 267873 - DNA, 676 bp, Zea mays
ttccacgcgtccgcccacgcgtccgcccacgcgtccgtccacgcgtccgcgactgacaacaagggtttgtattcaacaaccttcaaagttccagatgtttatggagttttccagttcaaagttgagtaccaaagactgggatatactggtctgtcttttacaaagcagattccagtacgtccttacagacataatgagtatgagagattcataacatcagcgtacccatactacaccgcctcattttcaacaatgggtgctttcttcgtattctcgtttgtgtacctgtaccacaaataaaggactcatgggagcgcacaagtctctggaggctgacgtgaccaagatctgtgggcactgaatgttgtgctataagccaagagttacccggcgccaattttatggaaccatgtttttgtactgccaacttagataacatttgacgaccgtgaccgcactcatgggaaatttactcgtgctaggatgttcgatctgcccccacttcttttttttctttcttggaccctttctgatcagcacttgtcagaacgtttacagtctatagcactgaaacgtgattttggaagtactacacccccagtaattttgcactcgtgcccagttctgatttctgatcctgggtgtgaaaatcacagtctgcctattatacttccgc

SEQ ID NO: 267874 - DNA, 1393 bp, Zea mays
cccttcctctccttgccacacttgcgctcctctccgagttgtcgtctccgtcgctgctggctgctgcgccactcccccagccccgagatctgctcaacaatggcgacgcggcgccacatcctcctcctcgccgctgccttcgtgtcccttctcgcgctcgaggctgtggagggcctcgaagaggggccccgcgggcgccggctgctggtcctgctggacgacctggccgtgcggtcgtcgcactcggccttcttcggctcgctccaggcgcgcgggttcgatctcgaattccgcctcgccgacgaccccaagctctcgctgcaccgctacggccagtacctctacgatggcctcgtgctgttcgccccctccaccccacgttttggtggatcagtggaccagaacgcagtccttgaatttattgatgctgggcttgatatgatcctggcggcagattcctctgcctctgatcttattcgtggcattgcgacagagtgtggggttgattttgatgaggatccagaggcaatggttattgaccacattaactatgccgtcacagatgttgaaggcgatcacaccttgattgctggtgatgatcttatccattcggatgtgatactagggtctgaaaagattgaggctcctgtattgtttcgtggaattggacacacggctaatccatcaaacagtttggttctgaaggtcctatctgcctctccatcagcatactcagctaacccaaagactaagttatcgttgcctccatcgctcactgggtcagctatatcattggtttcggttatgcaggcaagaaataatgctcgggtgctgctatctggatcactcgatctgtttagcaaccggttcctgaagtctggtgttcaaaaggctgatagcaaaacaagatatgagagagctggaaacgagcaatttgtggcagagataagcaaatgggttttccatgagaggggacatctaaaggctgttaatgttaggcatcacaaggttggggagaccaatgaaccaggcatgtaccgcattaatgatgacctggaatactctgttgagatctatgaatggtccggaacaagctggaagccgtatgttgctgatgatgtgcagcttcaatttttcatgatgagcccttacgttctgaaaactatgtcgactgacaacaagggtttgtattcaacaaccttcaaagttccagatgtttatggagttttccagttcaaagttgagtaccagaggctgggatatactggtctgtcttttacaaagcggattccggtgcgcccttacaggcataacgagtatgagaggttcataacatcagcgtacccatactacactgcctcattttaacgatgtgtgctttcttcatattctc

SEQ ID NO: 267875 - DNA, 479 bp, Zea mays
gcttgctgcgccactccaaacccaacccaaaacccccacacgagatctgcgcagcaatggcgacgcggtgccacgtcctgctcctcctcgccgccgccttcgcgtccctcctcgcgctcgtggccgcggaagggggcgaagaggggccccgcgggcgccggctgctcgtcctcctggacgacctggccgtgcggtcgtcgcactcggccttcttcggctcgctccaggcgcgtgggttcgatctcgacttccgcctcgctgacgatccaaagctctcgctccaccgctacggccagtacctctacgacggcctcgtgctcttcgccccctccacaccacgttttggtggatcagtggaccagaacgcagtcctcgaatttattgatgctgggcatgacatgatcctggcggcagattcctctgcctctgatctcattcgtggcattgcaacagagtgtggggttgattttgatgaggat

SEQ ID NO: 267876 - DNA, 248 bp, Zea mays
ccagaggcaatggttattgaccatatgaactatgccgtcacagatgttgaaggtgatcacaccttgattgctggtgatgatcttatccattcggacgtgatactagggtctgaaaagattgaggctcctgtattgtttcgaggaattggacacatggctaatcccatcaaacagtttggttctgaaggctcgatctaatgctcgggtgctgctatctggatcactcgatctgtttagcaaccggttcc

SEQ ID NO: 267877 - DNA, 707 bp, Zea mays
cccatctccaccgcgccacgaatccgcgccgggccctgccctccgtccgcccagccatccctgcggctccggccgaggccgtccccggcagccgcggccgccgtccaggcggagcaccagcccgcgttgaccgcggcgccgaagccacccgcgctaccgttccgcgtgggccacggcttcgacctccaccgcctggagcccgacctcccgctcatcatcggcggcatcaacatcccccacgaccgcggctgcgaggctcactctgacggcgacgtgctgctgcactgcgtggtggacgcgattctcggcgcgctggggctgccagacatcggccagattttcccggtactccgacccccgttggaagggcgccgattcttcggtgttcatgagggaagctgtgaaattgatgcatgaagcaggctacgagctgggcaaccttgatgctacgctgatcttgcaaaaaccaaaaattagcccattcaaggagacaatccgatcgaatttgcgcgacctacttggggcagatccatctgtggtcaatctgaaggccaagacgcacgagaaagttgacagtctacgggagaacatgagcatagctgctgatactgtagctctactgatgccaaagtgcaagagccacttgtgctggtcattcgatcatgctactccgatgacgatggtatctcatactggtgattctttga

SEQ ID NO: 267878 - DNA, 819 bp, Zea mays
gaattcccgggccgacgcactcgtccgcccactcttccgcccactcgtccgatttgtttagctgaaagatggcttaaaaagggtgtgctcctaattaacagagagcgaagtccaggctctaatggaagcagctgatattgataacagcggaaccatcgactatggtgaattcatcgcagctactctgcacatgaataagctggagagggaggagaacttggtttcggcattctcattttttgacaaagacggatgtggctttataaccattgatgaactgtcacaagcatgtcatgaattcggtcttgttgacgtccacctcgaggatatgagtaatgatgttgaccagaacaatgatggccaaatcgactacagcgagttcacggcgatgatgaggaagggcaatgctggtgcaacaggaaggagaaccatgaggaacagcttgcacttgaatctcggcgaactcttgaatcccagcaaaacctagcgcgttactggaaggccttgtcaggtacattcccatggcggcgcaagtttttggatgcgttgtcggtctgctggcctattctgagatgttgagtggttatcctgtggtattactaagatgctggacaatttatcgtagtgctggtggtatcagctagagaagagggatggctggcacaatgtggctactatcgccaactgcttttgtatgtgtaactgtcgatgtagattgactatggtctaaacatcagtttagttgatatttcgttctctaaggtagtgtttggttgaagagccaagtagaacggagccgttatgtcccagttttgttgc

SEQ ID NO: 267879 - DNA, 307 bp, Zea mays
attgattctgctgttctctcaaggctgaagcatttttcggcaatgaacaagctcaagaagatggcattaagggttattgctgaaagcctgtctgaggaagagattggaggcctcaaggagttgttcaagatgattgatactgacagtagtgggactataacatttgatgagctgaaagatggcttgaaaagggtaggctctgaattaacagagaacgaaatccaggctctaatggaagcagctgatattgataacagcggaaccatcgactacggcgaattcattgcagctacgttgcacatgaaca

SEQ ID NO: 267880 - DNA, 916 bp, Zea mays
agaagatactgcagcgagagtcttaccaccgctgcctccaccacctagtttgccacctttacctccaaggcctccaatgcaatctgatatgctagctcctggagtcatgagatttccaccacctccgccaccaccagattcaaggccatcgcttatggcggctggagttaacaggccccctccacctcctccaggatttccaccgtctcaaatgccaatgccaccgtatggtgtgctccctggtccgccgccgatgcttaggcctccatttttgccaggacctcctatgcaactagatgagtttgctgcctttgccccaaggcctcagttacctcagcagccatcatacgtgaagtcggctgccccaacagttgtgaagagaccattagcacagcacactcctgagctgacggctatggttcctgcatcagtccgtgtcaagagagaatctgctctccccaagccaaaaccaaaggtgcagcagcagccacaactatcaacagtatccatttcaaagccctcggtgaccctcataagaagcgacgctcggcctccttcagcggcacccaagccgccaagcatcgacgactcttacatggcgttcttggaagatatgaaggagctaggggcacttgatgggtaactcaagtagagcaaatgcctgattgcacttagcagcttaattcatggaaacctgggcatggaaccttttttttttgcaacgtgagaatcaatagtctctggtcaatcaatcggagaaaatcatgcattagtttaattaaacactgggaaaacaattgtaatctatctttttcatactaaaggctctgtggcccaactgtacaagctggagatatttgaaacttgaatatctggctctagcaaaggacaaagtagtagtgaaaaaaaaagaaaa

SEQ ID NO: 267881 - DNA, 982 bp, Zea mays
aattccgggtcgaccacgcgtccgcctacatctccgtccgcaagcgtcagccaggctgccccgggaggccgggaggaagcagatcggagaaggcaagccacggatttccttctcgccttctggaccccatgtgatctgttgtaatggctcgattgtacatcggcaacctggatccccgggtgaccgctcgggagctggaggacgagttccgcacgttcggggttcttcgcagtgtctgggttgctcggaaaccacctggctttgcgtttattgattttgatgataagagggacgcagaggatgcaatccgtgacctagatgggcaagaatggatggagagttgagttatctcgtaatgccagcggtggtcgtggaggtcgtgaccggcatggtgggtctgagtccaagtgttacgagtgtggtgagactggccactttgctcgtgagtgccgtttgaggattggttctggaggtctaggcagcggaaggcgccgaagccgtagccgtagccgcagtcgcagtcccagatatcgccggagtccaagttacggtagaaggagttacagtcctgcagcacgctctccaaggcgtcgtaagcgtctcaccagctcgtggacgcagctatagcaggtcaccacagcacaagggtgcacgtgaagaatctccctatgataatggataccgccgcagcaggagctagagccagatcgttgtatccgacgacgagcgttatgtgacagatattgggaaagctatggtcaataacctgcttgacagatccttcgtcgactgcttgactttggttaaggttctcataactttctatatacctattatcttgtgtctactttataagtagcagtaaaaccttttgatgagtgtatttgttgaactaagacctactgtcttttcttgtgtggtaaaaaggcatcgtcctgcactgcttaaacgactcggaaaaaaaaaagaaaaaaaataaaaa

SEQ ID NO: 267882 - DNA, 650 bp, Zea mays
ccctttcgttttttcacgacactgattgccttctcgccgggtggaccccatgtactttttccccctgcctcgaaaccctagatctggttgatccgtgggccgtcctccccacccctccctgggccgaattccgcgtgcggttttggtctcgagttttaagatctgtttgatttctactggatcttgagcgattcgttgctttgcttggcgtggccctcgacgctgattcgaatgttctcggtggctgtctgcctggctttgccgaaacctaactgctgtcgatatccgtttgtggcgaacgatctgcaggagatctgctgtaatggctcgattgtacatcggcaacctggatccccgggtgaccgctcgggagctggaggacgagttccgcacgttcggggttcttcgcagtgtctgggttgctcggaaaccacctggctttgcgtttattgattttgatgataagagggacgcagaggatgcaatccgtgacctagatggtatgtgatcaatgtattgctgtcaacatgttataaacctctattggtatgttgtatcagatgtttatatgacattccatatgttgtcggtgttatttgtgaagaatatctgagttggtactaaattacattcagagctctatttggtat

SEQ ID NO: 267883 - DNA, 418 bp, Zea mays
cgctcacctacatctccgtccgcaagcgccgccaggctgccccgggaggccgggaggaagcagatcggagaaggtgatctgttgtaatggctcgattgtacatcggcaacctggatccccgggtgaccgctcgggagctggaggacgagttccgcacgttcggggttcttcgcagtgtctgggttgctcggaaaccacctggctttgcgtttattgattttgatgataagagggacgcagaggatgcaatccgtgacctagatggcaagaatggatggagagttgagttatctcgtaatgccagcggtggtcgtggaggtcgtgaccggcatggtgggtctgagtccaagtgttacgagtgtggtgagactggccactttgctcgtgagtgccgtttgaggattggttctggaggtct

SEQ ID NO: 267884 - DNA, 397 bp, Zea mays
cgctcatttacagctccgtccgccagcgtcagccgggctgccccgggaggccggggggtagcagatcggagaaggtgatccgctgtgatggctcgattgtacatcggcaacctggatccccgggtgaccgctcgggagctggaggacgagttccgcacgttcggggttcttcgcagtgtctgggttgcccggaaaccacctggctttgcgtttattgattttgatgataagagggacgcagaggatgcaatccgtgacctagatggcttgtatggttgctgaggcgagtacggatggagagttgagttatctcgcaatgccagtggtggttctggaggtcgtgaccggcatggcgggtcttattcaagtgttaccagtggggtgagactggtcactt

SEQ ID NO: 267885 - DNA, 433 bp, Zea mays
aatggataccgccgcagcaggagctagagacagatcgttgtatccgacgacgagcgttatgtgacagatattgggaaagctatggtcaataacctgcttgacagatccttcgtcgactgcttgactttggttaaggcatcgtcctgcactgcttaaacgactcggccgactacggctttcagttctgtcttcatggttttgttctgcgctctacattcttcgcacaccctcgcatgcttcattcagtctgccgtgtgttaatctgcctgcgtatcttctcgaagatgctgcgcatcgcaaaagcagtaatgaccttccttctcataccatttggtaaggtttgatttgctgacaaatgcagcatctggtaagtttctccccgtaggtttggtctccgtgctgcgtgcgctgctcctggtcaggaactgcagta

SEQ ID NO: 267886 - DNA, 466 bp, Zea mays
cggacgcgtggtaaaattagctacgaagaatttgtagcgatgatgaagactggaacagattggaggaaggcgtcgcggcattattcaagagggcgcttcaatagccttagcataaagcttataaaagatgggtctgtaaaactgggtagcgagtgaggttgtagcttgctgccgatgctcttctcctccacgcattgtagtctgcctctcgggcccgctaagcagaaacccccttccgtttgctaatgattattttgtctgggatttaggtagttggagcctccctgattggtttactcgtgtaattagtatcccttttcagtatcgctgaggagcatctgctgtaggatgcacgcctgcctccgtctgtctgctcatctcctccggtgtacccgtcgctcaaatggaagtgttgtaaaatgttttggtgttgacctcaaatgcaatttgctggtttcgtgtactg

SEQ ID NO: 267887 - DNA, 666 bp, Zea mays
cccacgcgtccggacagccaccatttacagttgcgtgatgtcaaggtgcaaaacatcgagacaggcaaggttcattctgtactccatatagaatatcctgattggcccgaccatggagtggcaactaatacagatgctgtacgggaaatctggaaacgactgcatcacattccaacggaacatcctatagttatccattgcagtgcaggaatcggaaggactggtacttacatcacaatccatactacaattgagcgaattcttcttggagataaaagctcttacgatcttgccaaaactgtaaagaattttagatcccaacgacctgggatggtccaaacagaggaacaatacaagttctgctacagggcaattgctgacgagctgaaagacctgctaaattcagatcattgaggtgggtcacatgagacggacagcaacgctgttagcatttattacgtttttttagacatttctatgtgaaggaacacttaccctttagaggagtgaattagtcaatctcatttctctttaaactactgagctatgtttgttctagtcaaaatctatgtaataaaaaatctatcatatgtgaagctatgctatgtttttgactaatcgttgctattactaccgtaaaggagtacgatatgaaggcggaagctt

SEQ ID NO: 267888 - DNA, 578 bp, Zea mays
cccacgcgtccgcccacgcgtccgcccacgcgtccgcccacgcgtccgcccacgcgtccgacgagttgctgcagaggtacgagaatgtacaaagaagcttcaaaataaagaaggcgatgctatccaaccatcgaaactataggacttcatacgaccgcctctttgaacaggtacgtagactggaaaccgaaagcgatagcctaaagaaagacgccgccatctacaactttgtgcaagagcgtcttcagaagtcagcgccatacaaaatgatcatggagctgagtgcaatggagctggaggctcaagaaatatcgttcgaggagcttctggctcgggagaaggaggacactgccttctggcagcgcaacgggaagatgagatcagtctcatccaagtaggacacaatgcccctgctacttgggctcactgacgatagcagaccttcaacatcggtagtgtctaggcacgagaccctttggagcagctgctgcatgcctgcatcgaaccgtttggtgtaacgccgcggccttctgtcaagatcctgccctgattctgggcagattgagttgtgtcgtgat

SEQ ID NO: 267889 - DNA, 572 bp, Zea mays
ggccgccgcgaaggcgacggggaaggaggagctgctgccccgccggccgcagttcccgctagcctccgtggcgggcgtgctgcagcggcggatccacgcgcggtacgacgacctcgcgcgggccagcgaggcgcagtgcctcaccatcgagcaggttaacgagtttcttaactgtctcgtagatgctagaaacgagctgctgcagaggtacgagaatgtacaaagaagcttcaaaataaagaaggcgatgctatccaaccatcgaaactataggacttcatacgaccgcctctttgaacaggtacgtagactggaaaccgaaagcgatagcctaaagaaagacgccgccatctacaactttgtgcaagagcgtcttcagaagtcagcgccatacaagatgatcatggagctgagtgcaatggagctggaggctcaagaaatatcgttcgaggagcttctggctcgggagaaggaggacaccgccttctggcagcgcaacgggaagatgagatcagtcttgtccaagtaggacacaatgcccctgctacttgggcttactgacgatagcagac

SEQ ID NO: 267890 - DNA, 1455 bp, Zea mays
  unsure (1)..(1455): unsure at all n locations
cccacgcgtccgcaggaattcaattgatactgagtttgtgtttggctgatgggtttgacatgttcccaacattactagttacagatggatcatgcatgatagacaggaggatgggaatacatgggcatcctcttgaaatccaagctttattctactctgctttacgatgctcacgagaaatgcttgtcgtgaatgatggatcgaaaaacctcatccgtgccattaataacaggctcagtgcattgtcctttcacatcagagaatattcctgggttgacctgatgaagataaatgagatatacagatacaagacagaagaatactcccatgacgccactaacaaattcaacatttaccctgagcaaatcccttcctggcttgttgactggattcctgagaaaggaggttaccttatagggaatctgcagccagctcacatggattttaggttcttctctcttggcaacctttgggccatagcttcgtctctaactactccaaaacaagctgagggaattcttagccttattgaagaaaaatgggatgatcttgtagcaaacatgcccctgaagatatgcttccctgcaatggaagatgatgaatggcgcattattactggcagtgatcctaaaaataccccatggtcatatcataatggtggatcttggccaaccttattgtggcagttcacattggcctgcataaaaatgggcagaccagaattggcccggagggccattactgtggccgaggagagactgtcagatgacaagtggccggaatactacgacactcgatctgggaggttcgttgggaagcaatcccgatcttatcagacatggactattgctggttttctgacctcaaaaatgttgctggagaacccagagctggcttctattctgacctgtgatgaggaccttgagctgctcgaaggctgtgcttgctgcctgtccaagaagaggaccaggtgctcacgccgggcggccaagccacatgctgcggtgaagctgtgaagctcatgttgttctttatactgctgatgcacaatggatactacagatggagaattaactaaagcacagactcctcagctgtacattagtataggtttatattagatacccatccattcatttcctcggtgtctgctcattgggttttttttgctgagctaccactgatgggatctaccctgggtgataccggtggttgaaagaagagagcaaaaacatattctaagtttgtgctctcatgtacacagaaaaagtacctgctattatttgagcggaatgggagcgctgatgcagccctaaccattcgatgtcttgtgcgtacttcgtgttattcgcaaaccaaactctgacactatcatgtcctttcatattatggntacacccttgttgaattggattatgcttggatttgcatatgcgctatgtgtgtttgcccaag

SEQ ID NO: 267891 - DNA, 621 bp, Zea mays
caacgccacttccgtcaaagaaaggatcacagagtgggtttgggaaggagtggagacctcaaatggaaaagcgagggagaggatacaagcagttgtccttgatatgtcaagtgtggtaaacatcgacacttcaggactcactgcactggaagaaatacacaaggagttggtgtctcttggcttacagatggctatagccagtccgggatggaaggcagttcagaagatgaaagtgtcacaggtggtggacagggtaggacaggactggatcttcatgacagtaggtgaagcggtggaggcctgtctagctgctcataagggcacagctctcgcatgttgagtatgcgttaattactactattagtactcctaaggataatcccataagcgatgcggttatttgcatcctatgaaggtgttactggaaatgcttacgaaacagaaatgcatggtttgcacatgatggaggcaaaatacctatggtatgacttgactggagtggtcgtggcgagaaacaaacctgctctgggaaggacattccttgagctccacaaaaacatgtatggtgatatcttgatgatgtgtaactgtacttagtaagtaaacaagtctttttgtttt

SEQ ID NO: 267892 - DNA, 1179 bp, Zea mays
cccacgcgtccgacattattacgggaacaaaaagaaaaaaaacacgagaaaaatcaaatcaggagacggggattccagagagcccctttcgggtagggaagggaaggagaggcgaacggaggcgagatgggggcggccgaatccgtgccggagacctccatacacgaattcaccgtcaaggattgcaacggcaaggaagtgagcctggaaacctacaaggggaaggtcctccttgttgttaacgtcgcctccaaatgtgggttcacggagaccaattacacgcagctgacggagctttatcagaagtacagggacaaagacttcgagatattggcattcccttgcaatcagttcttgcgacaggagccaggtactgatcagcagatacaagactttgcttgcaccagatttaaagctgaatacccagtttttcagaaggtgcgcgtaaacggaccagatgcggcgccggtttacaagtttctgaaagctagcaagcctggtttgtttgggtcatcaaggatcaaatggaactttaccaagtttctggtggacaaagatgggaaggtcatcgagagatacggaacctcgacagctccaatggcaattgagaaggacatccagaaggcccttgaggaataattttttgtgagcttgtctcgtctcatccaccacacacttgcagcagaaataggcacttgctgaaatattccgtcgtagtaacattcagaccggacgtctttgcttatctgtagtaaaaattctgtgtaatgttaccctccttttcgccttccgttcgtgtaagtagaggttgtattaagtagccatcgtctgctagcttttgccctttctgtgtgaagaagtgaagacatggtatattgatgcaaaccttaacgttggtgaagcatgtatgttttgacgctcgttccgaatgacggactggtctcatcaaggctggtggtactggacggccatgttttgcgccatatcacactgggcgggcttgtgttactggcctgtttggatcagcttttttcggtgataaactgactatagggagaaactagctgtggagagaagttggtttataagaatctaggtgtttgataataaagaactttatcgttctcccaaaaaaaaaaaaaaaaaaaaaaaagggcggccgccccggaatccgggccg

SEQ ID NO: 267893 - DNA, 523 bp, Zea mays
tttgcgtctgaaaaaaaacacgagaaaaatcaaatcaggagacggggattccagagagccccggtcgggtagggaagggatggagaggcgaagcggaggcgacatgggggcggccgaatccgtgccggagacctccatacacgaattcaccgtcaaggattgcaacggctaggaagtgagcctggaaacctacaaggggaaggtcctccttgttgttaacgtcgcctccaaatgtgggttcacggagaccaattacacgcagctgacggagctttatcagaagtacagggacaaaggtctgttctttgcctgatgtggttcttgatctgttgttgcgcctgaaatgtgaatctctctggaagttggtgcgtagaagtgggtaattggagtagtgcacgttgatgcttgttggaacagtggttcttgtcttctgtttgaagtgggatggcaaaaaatcacgaaaaatattctcctgaaaaaagtgtgcgagtagtcttgcccaagggagattttacattgcttg

SEQ ID NO: 267894 - DNA, 602 bp, Zea mays
atcgtggagtatgatctgaaactgcagaaacagtatgttgcttggaaatattctgcaacagcataattttgctccgtcactgttcgtggcttttggtggtgttagggactccaaagtagggttgcaactgatcttacatgtaggcctagtttgggtactcttggattgaagtggtttggagggattgaagagtgtttaaatcccgatagatcaaaaactcccccaatacatctcaatccactccaatccgtctcattcctagagtacccaaaccaagccgtaggggggagagtttcccagctgatgacgcgtatggaagtaagagatcatgtagaggggcattgttttatgcaaattttgacattcttttgcgagtttcacacattcagtcgttcatgagggtgtaccatgatgtaacatatgaaaaaccgtggacggatgttggtttaacaaatcttgttccaaaagcagtgattagtgctacaaagcaaagggtactaacgtgccaagatcatgggttttgtaccgaatccctatattaagggcgcgtttggattggagggaaaacggaggaaaattacaggaatagccgttctttggcc

SEQ ID NO: 267895 - DNA, 860 bp, Zea mays
gaccggtccggattcctggtctccttgcgtccggatcacctaggtactcagaaggttgcattcatgtttgcaccaattgtcatcatctggctgctttccattggaggaattggtttatacaacattcttcattggaacccaaatgtatatcaagctctctctccatattatatggttaagttctttagaaagacagggaaagatggatggattgctttaggagggatccttctttctatgacaggcagtgaggcaatgtttgctgaccttggtcactttacgagtgcatctgtcagggtggcttttattaccgtcatatacccatgccttatgctacaatatatgggtcatgctgcatttctgtcgaagaacacatttcacatgccgacaggtttttatgatactatcccagaaccagtgttttggcctgtctttgtggtggccacacttgctgctgttgttggtagccaagctgttatttcagcaacattctccattgtgaaacaatgccatgctttgggatgtttcccgcgagtgaaggttgtccacacatcgaggtggatctatgggcagatatatattccagaaataaattggattcttatggttctttgcgtcgctgtcactattgcatttcgtgatactactcttatcggcaatgcctacggtattgcctgcatgactgctatgttcgttactacattcttgattgcttttataattaatattgtttgtcatttggtggtggggggtgtatttatttttttttatatttttgtaattattttattttataaatattatttatgttttttttttatatattttttttattttttttttttttttattttttttta

SEQ ID NO: 267896 - DNA, 1503 bp, Zea mays
cgcgagtgaaggttgtccacacatcgaggtggatctatgggcagatatatattccagaaataaattggattcttatggttctttgcgtcgctgtcactattgcatttcgtgatactactcttattggcaatgcctacggtattgcatgcatgactgttatgcttgttactacattcttgatggcattaatagtcatctttgtttggcaaaggaacataatattttccctagttttcctggttttctttggatccattgaagctgtatatctttcgtcatctctcatgaaggttcctcagggaggatgggtgcctcttgtgcttgcattcatattcatgtcagtcatgtacatctggcactatgggtcaaggaggaagtaccagtttgacctacagaacaaagtatcaatgagatccatcctatctctcggtccaagccttggcatagttcgggttcctggtgttggatttgatttacacagagctggtcacttggtgtaccctccatcttctcccattttgtcacgaatctccctgccttccatgaagttctaggctttctttgtgtgaagtcagtgccagtgccatatgtttcaccagatgagcgataccttgtgggtaggattggacctaaagaatatcggatgtaccgttgcattgttagatatggttacaaagatgtgcagagagatgatgacaattttgagaacatgttagttatgagcatcgcaaagtttattatgatggaagcagaagatgcttcttcagcaagttatgatatcgctaacgaaggaaggatggcggtcataacaaccactgatgcctctggcagcccattggccatgagggatttcgacggcctagccgactccatgactatgaggagcagcaaatcagaaacccttcgaagttcgcaatcctcctacgagcaagaatcccctagtgtcagccggcgccgccgcgttcgctttgaggtaccagaggaggatggcatgggtcggcaagtgaaagaagaactcatggcgctggtggaagcgaaacatgctggggtggcatacatcatgggccattcttatatcaaagctaggaggagctcaagtttcctgaagaagtttgctattgatgttggctactctttcctccggaagaactgcagaggcccatcagtcacgctgcacattccacacattagtctgatagaagtcggcatgatctactatgtttagcttaaggcccattgccgaagctcacatgtggatacccggtcggggcaatgcttgtgctgtctgcggattgtggtgtggaaggagttcaggcttgttcgttctgggccaagtttcagcttgtagagaagaaggcagacttctttgttaatattatttttagcctaaataaaccagcacaatgttagacggtgatgtttctcatttggcatatttgcatgcatgctctgtaattttttctgcgagctatgtgatggaaatatatgcatcatctttataaa

SEQ ID NO: 267897 - DNA, 464 bp, Zea mays
tattcgagcgaattcggctcgacatcagtcacgctgcacattccatacattagtctgatactagtcggcatgatctactagctttagcttaatgcccattgccaaagctcacatgtggatacccggtcgggacaatgcttggtatgtggtatgttcctgttggaactttctgctctccttcgtaggtggaaattaacttagaaaccggtttaagctaatagccttcgtttctgttttcccttcagtgctgtcagcggattgtggtgtggaaggagttgcttgttcgttctgggccaagtttcagcttgtagagaagaaggcagacttctttgttaatattatttttagcctaaataaaccagcacaatgttagacggtgatgtttctcatttggcatatttgcatgcatgctctgtaatttttttctgcgagctatgtgatggaaatatatgcatcatctttat

SEQ ID NO: 267898 - DNA, 711 bp, Zea mays
  unsure (1)..(711): unsure at all n locations
ttcagaatcaaggggagaggctcgggatttggctagggtccggaatacctgctttgagcaggctagacaggcttacttggttggcaacaaggctcttgcgaaggagctcagcatgaaggggcacgcctacaatgtgcaaatgaaagcggctcatgagaaagctagagaagctatttaccgacaaaggaatcctgtttcttcccaacgtgggggtggtgaccacctgattgatttacatggcctgcatgtgaacgaagcaatccacatcctgaagggtgagctcaccgccttgaagagcgcggcgagggcagcaggggagaggatgcaagtcatggtttgcgttggaacaggccaccacaccaagggctctcgcactgcgaggttgcccatcgctgtggagcagttcctgctggatgaaggcctccagtacacgcagcctcaggcgggtctgctccgagtgatggtgtactaacatctcttaggtgagacatcacggtgaggaaaaaaactccaaaaaaagagaaaagagatgtacgaaaacgcaggaaaaaaaagcgtcgttggagcacgcactgttattccgtgtagctgtatattaaaagaggcagcaggagaatagcctgacaacaggatacagtgtaaaattatacgcagcttccttctttcaattccccccccttttcaaaaaaaaaaaaaaaaaaaaannaaaaa

SEQ ID NO: 267899 - DNA, 610 bp, Zea mays
  unsure (1)..(610): unsure at all n locations
agttgaccctgatgcttcttcaagattaaataacccagattcttctaaaatggacaccaattttttgaaagaggcctacccattacacacaccaaatccatccagtgtgattgaaactgtgtatgaaccgatggccttggtgacaatctctcccccttttatatgttcagatggttngcttttggcacccgaaattaattctaggccaggaaaattttcaaattgtgaaccatagatggtcacatgctcaaacaatttttttggtaatgccgagcaatctgctaaacttgccagcagtgatgacaggccataggctttcacaatgactgagagcactacaaactgtgggggtgaacaattgacagatgccaaagaacctgtggccagtacagcaaaagaacagttatcgaaagacatcgagactatgccagataaaaagaagggtgagggggctctattctatgaacctcctcgattccctggtttggatgtcccgtttatcagttgcgatcttgtaacttctgctgatctgcaagaatttagtccccttggaattaggcagtggatgcggtcgaccatgaatgtcccaactcctttaagattatggggc

SEQ ID NO: 267900 - DNA, 1078 bp, Zea mays
tcgagccggttaattttccatcgaatcgttggagggatctcaaatttcgcagagtatttttagctgaagctaagagatcttgttgacaaattgctggatgttgatccaggcaaaaggccaggtgcaggacctgatggttattcttccttgaaggagcatcctttcttcagaggcatagactggaagaacctgaggaagacacggccacctaagctcgcaatcgatgcaaatgcaaatgaagatgaggatagccaagattcaaattggttggcacacatgggaagtgtggcagtcaaccaacagtcaaatactgttggtaataatggtgccccgtcatcatctgaagtgcgctcccatatatctaaattagcttccatcgactcctttgactcaaaatggcaagaattcctggaccccggcgagtctgtagtcttaatatcaaagctgaagaagattaataagctagcaaacaagaagatccagttgatcctcactgacaaacctcaattgatctgtgttgacccttcaaaaatggtggccaagggaaacattattttggtctgatgacccaagtgaactcagtgtgcaagtatcagattcttcacattttagaatatgcacgccaaagaaggtgtcaacatttgaggatgcgaaacagcgtgcttggcaatggaagaaggcaattgaagacctccaacgctgccaaaggaattaattttcaattcaaatcaaaactctaaaatgtcgaattaggcactgttaatacatcatatccttttcacttgggaggaacatgagggggtttatttctcctgcatcctgctccaatgcctggttgcaaggaacttgctactcgctaattcacacactgaatgatggcccccaattttttcccttcccatccatgttttcaaattagtacacaattttgtttgtcacttttgtgaaccgttggagcagatatcttcaaaacaggctccagtctggaaatattgacacccgaccctattttaacagtctgccatacttgattccaaaaaaaaaaaaaaaaaaaaaaaaaaaaaaaaagggcggccgc

SEQ ID NO: 267901 - DNA, 1464 bp, Zea mays
ccatgcgtccggttaaaccctagctcaccgtcgggctcgcctcgccaccccgcgcctgctcctttcaggcgcctaaccgttcgccgccgcgcattcgagcacacgcggaagcgcacctagtgccatggcgaagaagcggaagcgcaccgacgcccccgcagaggcggccggcgcagagaagcctgacgactccgcgccggcgcgcccggagcgcacgctcttcggcttcaaggacccggtccccgacgccgagcccgcctccgcgggcgccgaggccgcggtggcgccgttccggaacagggagaaggtactcatcacctgctcccgccgaatcacgtataggtatcgtcatctgatgcaggacgtgctgtcgctgctcccgcacgcgaagaaggacagcaaggtcgagtcgaagcagagcaaggggaacgcgctgaacgagctccttgagctcaggagctgctccagctgccttttcttcgagtgcagaaaacagaaggatctttacctttggatggtgaagtctcctggaggaccatcagtaaaatttctagttaatgctgttcacaccatggaggagttgaagcttaccggtaaccatctgaaagggtcacgcccacttcttacattttctacaaattttgatgagcaacctcattggaagcttgtgaaggaaatgataactcagatatttgctactcctaaagatcaccgtaaagcaaaacctttccatgaccatgtatttgtcttctccattgtggatggccatgtttggtttcgaaactaccagatttcggttccccacaatgagattgataaagttgataaaggtggtatggataaaatgacacttattgaggttggccccaggttctgtttgaatccaatcaaaatatttggtggtagttttggtggtcctacatggtatgagaacccatactacatttcccccaatcagatccgtgcactagagaagaggcagaaggcaggcaaatatgccaagaaggtgaaggccaaggtgaggcggaagatgcacgagatggagaacacgctggagcctgatgagtttgctgagctctggaaaggggagtaactggtctttgatcgaccctgtcaaagtcgtgaagcacccgcaactcctgccaccaagcgcggattttgtttacctgtgtggcagtgcccacgttgtggaagttttgtatgacaaggcctacgtttattttacataaaatcggattttagtgataacttatgcccatatgacattctctcttgtttgcttctagtggatgtagtgccaagtgttatatcacttatgtgattggtagctgagaatcatggggaagcgcgatcacagttcaaacctcaagatatcaatgtgatagccatagccgtgttccatatgtatactatgtacttcatttcagcaatggttttgtaaggaaaatagatcgagcttcattt

SEQ ID NO: 267902 - DNA, 332 bp, Zea mays
gtctctctctgtctagcggccgagtttaacagttaaaccctagctcaccgtcgtgctcgcctccccgcgcctgctccggtgctcccttcaggcactgacagttcgccgccgcggcgcgctttcgagcccacgcggaagcgcacctagtgccatggcgaagaagcggaagcacaccgacgcccaggcagagacggccggcgcagagaagccagacgactccgcaccggcgcgcccggagcgcacgctcttcggcttcaaggatccggcccccgacgccgtgcctgactccgcggcctcgagagtcgcggtggcgccggttaggaacagggaga

SEQ ID NO: 267903 - DNA, 1649 bp, Zea mays
cggccggattcccggtcgaccacgcctccgcggccccgtggccccgaggcccgttcgcaggtcacttctcaattctcaaccttttcttctgccggcgtgcgctctctctctcctcctcgtgcggcagctgggtgaggtttccaggtcttggtcttgtcattcgccagcgacgagactcaccaggtttgcattgatcagtatggtgactgaaaatgcagatgaagaacatgacactggtccagaaaataagttaagacacaattttcgattgggagatataacatgggttaagtacaatggctcttcatggtggccatcccaggtcattgatgaatcatgtgttggtagcaagcctaagaagaaagacaagtatgattgcctagttcggctctatggaacatgtcaatatttatatgtagacccttggaagtctaactcagaatttgaaatgatgctgaagcaagaaaacaagagcgcaatggaagcattccgtgaggtgcttgagaaggagctctctggcgttaacttgcgcagtgattatgaggatggttatgaagaggaagatgtcaactcaaaaggcggtgacaacaaagggacctcaaagaagacctcttctagaaaagccagaaaacaagaaggtctgaagcaacaatataatggagaggaagaccaaaatggtgggagcaatgcaactactggaggtgctcggaaaaaaaagggtgggcatgtaagacaatcaagtgctactcatgatgccattgataaaaattatagtggcagttcagctgaaggtttaaggaacaagagacagaagtctgctgctcaaagcgcttcggtaggcagaagggaagggttgaggcaacgatctgatgccaagcaacatccagatgcagccgagggcagtacagaaccactcgctgatgtacctggaagcgatggtgcagctcaaggttcaatgcaacatggaacttcggctcctcataccgaaataaaagcgatggtcaggaacatactgttcaaggacatcgttgacaaggagcacgatgctgagatggcttatgtggatgaagtgatcaatggcatctgtaacgctactgacagcatggtcggcggcggcggcggtgatgcttccgcgaaaggcggacgaggctccaagcagagcggcggcggagtggagggtgagtcgagcaatgccacagaaaggcgaagagatgaagcaactgagaatgccctcgccgtgaaagggaatacccctgggaacaatggcgatgacaccggggcagcttagcgcacgccaaaataggcagaacaggatcatgcaaaccctagctctgatccctccatcaggatctccgtttggcaggaatgaagaggttgcagccagccgtcaaaaactctaattcacttatgagcgccctaagaaacagtccgtgagcccccctagcgttttgcagtcctggcctcctctccgcaccatgcctagtatcgctgctgccattcagcttgcttttgggagacgcctatatatagcgcctgatctgctgaattacctagcagttgctattaatctatccagaagacttggactgagtttgattgctatgtaaccacgcacctgtgcgacattggccaatgtggtgccgttgaac

SEQ ID NO: 267904 - DNA, 345 bp, Zea mays
gtcaaaaactctaattcacttatgagcgccctaagaaacagtccgtgagcccccctagcgttttgcagtcctgtcctctgcgcaccatgcctagtatcgctgctgccattcagcttgcttttgggagacgcctatatattgcgcctgatctgctgaattacgtagcagttgctattaatctatccagaagacttggactgagtttgattgctatgtaaccacgcggttggttctgtacttctacgcaactgtgcgacattggccaatgtggtgccgttgaaccttatgtattattgtgcacccccatcaccatgttattactagcccccttcggcatttcagttc

SEQ ID NO: 267905 - DNA, 327 bp, Zea mays
cgaacctggtgttgcttgcaacttgaaggaagtggaaggagatagtggacgactgggtgcgcctggacaattccggcggtgacggcagtgcctctgttatgacagctgatggtgactccccacataaaatccaaggcagaagccaccaaagccctcgggtttcggggtttcagtattctccaagcccacagaggtttaatggttcaacttcagagatggctaacaatgggtttgagtcaacaatggatgcgaaccgtagggccaaccctgtaccagcacatcataacttcaggcagatgaacaacaatcatcattctactactatta

SEQ ID NO: 267906 - DNA, 772 bp, Zea mays
aaatgcgaggagacgactatgcatgatgtgaacaagatcaaggaaaacatccttgccatgcacgataactcactgaagctatgcaattttgccaccggcaagttcttgaaggtatacagtggacatgtgaacagacaatactgcatacagtccgcgttttctgttacgaatggaaaatacattgtcagtggatcagaagacaactgcgtgtacatatgggacctccaagggagaaatatccttcagaaattagaaggccatacggacactgtcatctcggtgtcctgccatccaacagagaacaagattgcttctggtggccttcataatgataggactgtaagattatgggttcaagatagctgatcaacttgcaggtgtggactacgctcagaccagacctaaacagcacttgcctatcaatgagaaaatatgtctgcttcccatggatatggatcgctattccagatacgtttacaacttacacaaagacattaaccatgcgagctttgttttaatctgatgtgttatcctaagttgtgaatgctgaataaatcaacatctagtcatctctaataatgttgtgatatgttatgcccaacggctgtattccaatcaatattgatttattttgcaaaaaaaaaaatatataaatttaaaagttttaataacatgtacaaataaaaaaaagttggtggggggaatattaattaatatttatttgttaaaaaaaattataatttaaggggggggcgccctggtaattttggac

SEQ ID NO: 267907 - DNA, 693 bp, Zea mays
  unsure (1)..(693): unsure at all n locations
ggctgatctattctttgttggctctggtacgaatcagagacaattaccacggcaggcgtccccacgccacggctgagtacggagaaagaatccctctagacttctctgcaacctgcgcgaggccgaaagagcagcaacggtgcggaggcagggaagcaaagcaatcccccacctatatacgcgccccgcccagtaggagagtaggagctgcaaggagtccggtctccgaaaaccgacaagacgatagcaaatcgaaggaggacacggctgctggtggccgcattcggtcgggggaggagcacgaggagccatggcctgcctgcacgaccacagctgcgaggatcacaactgcgccgccgactggtcgctctacaaccacatcgacgtccccaaggtggtggctctcaacgaatcggtgcccgggagcgtcaagtccgtcttcaagccctgggagcagcgccttgacacctcggggggttttctggagagtaatgagggtgaccctgagctacttattttcatcccgttcacatcagatgttaagatcaagagcatttctgttgttggtggtgctgatggaacaagcccgtcaagaatgagagcgtttatcaatagagaaggtattgacttttccgatgctcaaaacatgcagccagtgcangaatgggaaatagcagagaacctgcaaggagc

SEQ ID NO: 267908 - DNA, 440 bp, Zea mays
cccacgcgtccgggaaaaacaatggcgaatggcagtaaatttctacactgaagcaatataggtaaatggaaaagtggctgcatactacagcaacagagctgctgcctttctagaactaactagctaccgtcaggctgaggcagattgcacaagtgccatcgaacttgattccaagagcgtgaaagcttatttacggagaggcactgcaagggagatgctaggttattataaggaggccgttgatgatttcaaccacgcccttgttctagaaccaatgaacaagacggctggtgttgccatcaacaggttaaagaagctgtttccttgaatatgaagctgcatgaagatatgataaccatcatattttgtgcacacacaagttgtgcgtgtcactggggcgggattgaagtacctgagttcaaccgacggatgctgatcac

SEQ ID NO: 267909 - DNA, 455 bp, Zea mays
ggaatgaccggatcgacccacgcgttcgtccacgcgtgcgttcactcgtccggtcagctcaagtgacgtgattagaccgagcatgtctgtgcccgaaggcattgaaattgttggctctgggggcacatcgatgcctcaagtattgtcgattccggaaactgagccaaaccagttgaacaggatcagatccacccgaagctgacatgacttcacattgtgtaatttcgtgtgacaaagtccttggtgtacacgagttggttctgacagattgtacagttctcctgggtagaaagcaaaatctgtttgtgaacacatctcacctgaacgcgattgcttgtatggccgtctcagcttcttcagaaatgtaacttagcagttgagtagagttgacctatgttaagagttgtcaagttttgaagtggaagaattttcttaaccatttggtttatgtgtcc

SEQ ID NO: 267910 - DNA, 904 bp, Zea mays
cggcaagcccggtggcacaacggtcggcgtcggcaagggcggagtgggcgtcaacgtcaatcccggcaaaccggccggtggtgccggtacaaccgttggcgttggcaaaggcggcgtgggcgtgggcgtcaatcccgggcacggcaagccgggcggcaccacggtcggcgttggcaagggcggggttggcgttcacgtgaacccgggaaagaagcccgtccacgtcaacgtctcccctttcatctacacgtacgccgcgtcggagacgagctgcacgacgaccccagcgtggcgctcttcttccaggagacggccctgcagcccggtaagaagatgaccgtccagttcgccagcaccgggacgaccggcgccaagttcctcccgcggagcgaggccgaggccatcccgttctcctcgcagaaggtgcccgaggtcctcgcccgcctctcggtggacccggactccgtcgaggcggcggagatggcgcagacgctgcacgactgcgaggcgcccgcggccaggggcgagaggaaggcgtgcgccacgtcgctggaatccatggtggactttgccaccgccagcctcgggaccagccacgtgagggccgcgtcgacggtcgtggggagggagggctcgccgaggcaggagtacaccgtgacaggcgtgaagcgggcgggcggcgggcgcctggtggcctgccacgcggagccgtacgcgtacgccgtgttcgcgtgccacttgacgcagcagacgcgggcgtactcggtgtcgatgctgggcaaggacggcacggccgtggacgctgtcgcggtgtgccacgccgacacgttcggctggaaccccaagcacgtcgtctggacccgcggcggctgagagtggtcgccgtttgcatgcactggtcatg

SEQ ID NO: 267911 - DNA, 828 bp, Zea mays
atgaccgtccagttcgccagcaccgggacgaccggcgccaagttcctcccgcggggcgaggccgaggccatcccgttctcctcgcagaaggtgcccgagatcctcgcccgcctctcggtggacccggactccgtcgaggcggcggagatggcgcagacgctgcgcgactgcgaggcgcccgcggccaagggcgagaagaaggcgtgcgccacgtcgctggagtccatggtggacttcgccaccgccagcctcgggaccaggcgcgtgagggccgtgtcgaccgtcgtggcgaaggagggatcgccgaagcaggagtacacgcgtgaccggcgtggagcgcgctggccgcggcaccgacgacgacggccgggccgtggcctgccacgcggagccgtacgcgtacgccgtgttcgcgtgccacttgacgcagcagacgcgggcgtactcggtgtcgatgctgggcagggacggcacggccgtggacgctgtcgcggtgtgccacgccgacacgtccggctggaaccccaagcacgtcgcgttccaggtgctcagggtgaagcccggcacggtgccgatctgccacttcctgccgcaggaccacgtcgtctggacccgcggcggctgagagtggtcgccgtttgcatgcactggtcatgacgccgccgtttgcttagattatgtttgtatagtttcgaataatcagacatctctgttacttctgctagctctcaggctaagcaagcttctaattgatctccgacgacgcttgttggatctacttctctggagacatctgatgatgaattcaatgcccctcacgatcccgcc

SEQ ID NO: 267912 - DNA, 1144 bp, Zea mays
gagccatcatgtcttttgttcgaaatggccctgctggaatgtgggggatctcctcccagtgtgggcgatattttgaaacttcttcagtgccgtgtttttcgggatccatatgcttagaacagaacaaatatcaaggagtacggacaagaagaaatttttagctcttcttggcttcgaggtccttgtggttgctttctcctccgttctctggtttatgttcaaagatggctacgttgataccagcggatccagctttgaatcttggacgttcgggatgctctgggataccacagtttcgtttccttggataccagcattgtacactggggttctttctacggtgttatgcatgtgggcagagatggtggcgatgggcgatgtttcagcaaccgaaactgcagttgtttacgggttggagccagtttggggagctgcttttgcttggttcctccttggtgaaagatgggatgacgctgcatggactggagctgctctcgtattatgtggcagtttgacagttcagctatttgggtcagctcctgagaagtccaagaaagtcaaaaaacgcagcagcaatgctttagaaactccagtgaaacgacgagactacttatcgttgtctcccataccagttgattccgggaagatcataggaaggcaattagaaaggaagaacaaagcagtataggtagcccaactacaaggcaagaagaaaggaaacgctgcgatggtaggggcgcgcatgtaccaaatcattgtcctgaggcatcatctgtttggctccgtcaatatggggatgctgctcgattgctcctcatggggtttctttcctctgtccatattgaaaatggtcgtatttggatttctgttgtctcagatgaccgtgctagagtacctcatgcgtattaggaaatgaggcattggtagtggcaactcgaggagaatacttagacacatctactggcgtagtaatgacgttcagtgagataacttagtatgttttgggcactgctaaccgtaaaggttcatgtattaatatagtgggtaaatggttctagagtactgaactgagcataccattgtatagtactgaaataacaaataccacgcatggtattatttggctcccagtcaatagatccag

SEQ ID NO: 267913 - DNA, 458 bp, Zea mays
  unsure (1)..(458): unsure at all n locations
ggttcaccgccgagcaggtcctcgctcacccgtggatcgtgagcggcggcggagcgcgtggcatggagcggccaacctgaggcggcgcgcggcataccataccagcagaccatggcgggcggacgtgtattgccgtagagacacagattcggcaaggaatcccgacgttatgtgcagaggttttgttatgtgcgtacggaccagagaaggagagacggtagctgctgccggctgcagagtagcaagcatcctttgcggtgtactgtagtcgcagactcggtagcagagcagatggatcggcaagaagcttctggtaggcaggcttttggttttcctcaggcccccgggagatgctctttacctatgagcaccctntttggacgtgctggtagctggatgtgtatatacactgaccgtcnttgtacaaaccgagagggtttgataataaataaataaat

SEQ ID NO: 267914 - DNA, 708 bp, Zea mays
gtagaatgacgatgaggggtctctctgttgcggtcgctctggtcgtggtggtggccgcgggctgccttgccgcgccgcggggcgcggacggcgcgggcgagtgcggtgcgacgccgcctgacacggtggcgctgaggctggcgccgtgcgcgtcggcggctgatgaccccggatccgcgccgtccggatcctgctgcaacgcggtgcacgccatcgggaagcagagccccatgtgcctatgcgccgtcatgctgtccaacaccgccaggagcgccgggatcaaggcccaggtccccatcaccatccacaaacgctgcaacctcgccgaccgccccgttggctacaagtgcggagattacaccctgccatgagcggcggtgagttctccaggccggatttgctgcatggcatgcccgagtatcaccaaagcgcgagctcttgtgtcgagcgagtccgtgtctgtcgtcagtcagtctctatgtgttgcccatagtaaacaaagacatgcgagtaccagacatgtgcaactctagtagtatggtgcgtgttatcactaggcacgcgtactcgtatagttgtgttcagttctgggtctatagagatatgtagccctgcattgtcgaaataaatactgtgtccactcgttcgtgaaatgaaaaaaaaaaaaataatataaaaaaaattaaaaaatataaaaaaatttataaa

SEQ ID NO: 267915 - DNA, 476 bp, Zea mays
tcctctccctggctccacgacgcggcggcctgctagctctctgggcgggctactaattcgccggatggtgtcgactgctacttctccgatgccgcgcgcgcggcccgtgcggtccgctgcgcctccgtcggatgcgcaagcaggaggcggacgcgcggcccgctgtgcctccttgcgcccccatcgcccgaggcagaccgtcgtgctcgcctgctccatccggtcccgtcgtcgaggagtcctcttcgccggcgtcccgcccgtctctgtgtttcccatgtcgtggcggcgtgctcctctgcgccggcgccccacaacctcatgtcagctttcgtcgctgcgatgcccacggccggcggtcgtgcttcctcctactttcacgcccacctttcgtccgaccttcagctgcgcgtccggatgcagcgagactccagctgtttgttccgtactcttaatttgttgcttccttcgttttt

SEQ ID NO: 267916 - DNA, 829 bp, Zea mays
cccacgcgtccgcagcctgatattttgcggtcattatattctgcactccaaccatctaatactttggaagatcgaagatacatgatgcccgtctttctgatcagcagatggcggtacttcagtaccaaagagagaatatccattatctgagtgaggaggttctccgcttgcaagaatgcttaagcaaataccagagaactgctggaaccactcctcaggttgatcttgcccatcttttagcaactcgtgatcaagaactccgagcactcactgctgagatgaatcaagtgcactccgaacttcaacatgcccgtggtttgatcgatgaaaaggattcagagctccagcgtatccgtctgagcaacaaccagtatgttgaagaaaacgataggctcagagctattctcggtgagtggagtgctcgagccgcaaagcttgaacgtgcattggaggcagagcgggtgtcaaacgtcgaattgaggaaaaatattgcaaagtttagaggtcatttgtacaaagagcaggaggcctgacttcggtatgttatagctggttccagaattttacctaaggcacctgactaaaggcacaatttttggatatagaagggtatctcggtctggatccattcgaactgggattgattacgagattggcacgtaattgtagaatgcgtagtttgatgtacatgtgttcgtaggtttgagcatgtagagtatggtatccctcgaaaaaaaaggaatatggtattcatgtggttgaagactgctgagtagtgtgaacatggtagtgtcttgtggggtgtggttcgcaggagacaaggggagga

SEQ ID NO: 267917 - DNA, 1748 bp, Zea mays
gaaagtatagcgaaagaatttgggataaaaagatataactggcttgtttacatggataaaggaaacaaagaacaggagaagaggcagaaagaaattgttaaaggcgacccatctataaaaaaaatgagccgtagagaaagaaggaaggcttctcagattgagcgggaaaaggagcgggaggcagcacgttctgttggaagggtatcttatcgtgatccttatagggaacaaaggagaagcccatcatatgaagcatattcaaggggcagaagatcaagatcgagatcaagatctcgttcaccatcccattctaggcgtcatggccgtgggatacatgctgaaagcaattattggagcaagcaaaaggctcctagggttgaatatattactgaatttggaggttccgatgataccagtgaaccaaaagtttcagggatctctccgccttcgtctccaatacgaattgacatacctaaccggtcgggaaactcgacttttaatatttgcaaatatacattgggcgaacttttctctgatggagcttattacctcaatcctggtgttctgaagatgactatgtcaggaataggatagatcaagacatggtcatgatggtatctatggtgtaaaaaatagttgttttgtagataggcatgcattttatggttcgttttatttttgctaagcaggaagaagatttaacacacatatatctacagtcagctgtggagtttatgacctgtgcatctttgccatgtaaattattatggctataataccccatatttttgcaggttgtctggtggtcaaattcttgaggcacttcacagtgatcccgcctcttctttgtctgtggaacaggaaagaactgcaaaacttttgaaaccttcccccaggtttgtcatgacgattacaatgttatgaagagagcggctgtatgtgcatccaagggtgtttgtctagaaccctttactttatttttcatgggctgtctcgacttgagcatgtctctgttacttagagaaccgtcttgtatttttcatcattactgacatgtgatttctgttaacagtacatcatcagcattagctaaactaagcaaggttgcttctgggggaactggtaaaactccccagactgaaaagaaagaaacaccacaagaaagacttaagaggataatgagcaaacagcttaacaagcaaattaaaaaggacacggctgctgagattgccaagaaacgagaacaggaacgacaaaggcaggaaaaacttgctgaagttggtcgatacaagcgtcgtagccgcagtagaagtcttagccgttccccaccaagaaggcggcgatatagcagaagccgtagtaggagcagaagcccaagaaggtaccgatcccgctcgctctccagttcccggtcgccctctcgctctccaaggtaccgaagcaggtcaagacactgaaaatatccaggcagccactaacaaagtgccttgccatgttgtagttaatttattttatagactttttcattcctgcagcgatgtgtactcatgagaagcctccgtttttgttttcttagtcctattatcgacagtgtgtgttccttgtgtttcagaaggtttattctctgttcctcatggcttgcccctttcaagcaagcgtaattttagggcatgtttggccagaccagcttccaggccgaatttagtagtattgcccaccagttcttttattcaccaccccttttatcg

SEQ ID NO: 267918 - DNA, 423 bp, Zea mays
gaagatcaagatcgagatcaagatctcgttctccatcccattctaggcgtcatggccgtgggatacatgctgaaagcaattattggagcaagcaaaaggctcctagggttgaatatattactgaatttggaggttccgatgataccagtgaaccaaaagtttcagggatctctccgccttcgtctccaatacgaattgacatacctaaccggttgtctggtggtcaaattcttgaggcacttcacagtgatcctgcctcttctttgtctgtggaacaggaaagaactgcaaaacttttgaaaccttcccccagtacatcatcagcattagctaaactaagcaaggttgcttctgggggaactggtaaaactccccagactgaaaagaaagaaacaccacaagaaagacttaagaggataatga

SEQ ID NO: 267919 - DNA, 1126 bp, Zea mays
accgccacgcgtccgcccacgcgtccggccgagccttgtactgacggcggacaccaagcccaggctgcgagtggacggccgacctccacgagcgtttcgtcgacgccgtggcccagctcggcggacccgagaaagcaacaccaaaaactatcttaaggacaatgggcgtcaagggtcttactctttttcacttgaagagccatcttcagaaatacagattagggaaacaatctggtaaggagggatcagagcaatctaaagatgcttcctatcttctagatgctcaaagtggaatgagtgtgtcccctagagttgctgcccaggatatgaaagaaagccaagaagttaaagaagcactgagagcgcagatggaagtgcaacgaaggctgcatgaacaagtggagaggtccaaaagcgcgtgcagatcagaatggaagcgcttcagaagtacatcgacagtatcctagagagcgcatgcaagatggttactgaacaatttgcttcgagtggcttcagtatctctgaccctgatctcccggagatatcccctggaggggtggtcatgtgtggcggccccacggacacgttgggctcgtcggtgttcaaccagctttccgtcagctccatcggctcgcacagtccaggaggcaaaccttccccttccccatcaggcatggaatgtccgccgctgctcctccacaagtcgcatgagctcaagcggaggtcctcttgaactgacaaatcggcgaactggagggcgcggtgatggctgtctttgctagtgatgtcggatatgatggcggtgacaagggaaattggtggtccagtcttgtggtagctgactttctccaggtagcaagatattgctgtgtttgtttgatcagtcaaagcatcaaacagacagacctacgttcatgtgaactgcctcatgcatgtgctagattgaaaaaaaagttatcatattttgtcatgagactatgattctactagctagcatccttagcacacttgagatgttgttgactcgtgtcctagtgtagtgtcctctgtgttgatccatgtatgcccagtgattcatgtcgggactgggacatgttaacaccagatgtttcaagcttcgttcttt

SEQ ID NO: 267920 - DNA, 1623 bp, Zea mays
  unsure (1)..(1623): unsure at all n locations
ctcatgtgtccgcgccaatcgccattattaacagctccgcggtccctccctccctcggtcggtcggcgtcggtccctctccctccccacccagttagtcctcagcctatcccgtgcccgcgcagagcaccgcctctgctcgacccaccaccctctgtgcagagttaattaaccttgaggtttccgattgcccttcccttccgctcctctcgcccattcgcggcgagattcagcggcaaggatgcgcctgcacgcggaggtgcgggatgagatggaggaggggagcgaggtgggggctgtgacggcttcggcggggctgtcgccaccgccactcatcggtgcggcggcgccggttccccggctagtggtggggttcgccctcacgaagaagaaggtgaagagcttcctgcagcccaagctgctcctgctggccaggaagaatggaatcagttttgtatctattgatgagtctcttcccctctcagaacaaggcccttttgatgttattttacacaagattactaggaaggagtggcagaaggttctggaggactatcacgaagaacatccagaagttactgtccttgacccaccaaatgcggtcgagcatctgaacaatcgacagtcaatgcttgaagaagtagctgatttgaacctgtcaaatttctatggagaagtttgtatcccacgccagctggtcattacgaaagatccatcctctataccaacttctgtagctatggctggactaactttgcccttggttgccaagccattggttgttgatgggacgtctaaaggtcatgaactatatcttgcatatgacgaggcatccttgtcaatgcttgatccgcctctggttctacaggaattcataaaccatggcgggatcctctttaaggtgtatatcattggtgaaacaatacaggttgtccgcaggttctctcttcctgatgttaacacatatgacttactaaacaacgttggcatctatcgattgccaagagtttcatgtgctgcagctagtgcggatgatgcagatcttgaccctcttattgcagagcttcctccaaggccacttctagagaaactgggcagggagcttcgtggccggcttggtttgagattgttcaatatagatatgattagagaacttggaaccaaagatcggtactacataattgatatcaactacttcccaggttacggcaaaatgccaggatatgagcgcatgttcacagacttcttactaagtctcgcacaaagcaagtacaaaaggtacttaagcgggacatgaggtgcaaggaagtttgtgaagaccatgctactgacgagatggcatataacggtggcaggtatgcttccccaccgcgccaatgtacatttgctggagacataagcataagcgggaggcttgaggaagttggcaagtctcagtgtgtgtgttcaaaatcggtggcacatgctggactggagtaggaaataaccaaggaaacgcttggatgcgctgtactcatgttgtaaaatgtttaactgaatgaaccccttcctcgtgatggctccctccatcgtaatttggcaaccatgagaattaattctgcaaaaaaaaaaaaaaaaanaaaaa

SEQ ID NO: 267921 - DNA, 764 bp, Zea mays
cggacgcgtgggaacgtggtgaccaagtccgactctgccagggaggcggaaaggtcccggtctcaggccgcggccagtcccctggagatcgagaaccttgctgagataatagaagatttcaaaatggtgttggttgtgaggaatgatctgaagatggggaaggggaagattgccgcacagtgcagtcatgcaactcttgggctattcaaaaaactccaacagagagctccaaaatcactaagaaggtgggagcggtgtgggcaagttaaagtggttgtgaaaatagaaagcgaggaagacatgctagttttacaagggagagcaaagtctttaaatctgccaactcacataaccatagacgctggaagaacacagattgctccaaattcaaggacagtcatggctattctggggccagctgatatggttgatgatgttactggcggtctgaagcttttgtagaaaaccaccttgtcagcattttcaacttgggtcttcatagagcagtgctgggactttgcaggccacagtggtctctgcacttgtactgatgtgcggcagaagaatgaaccttggccccgttggttgacctgagtttcttgtccatgaatttatttggaaggagagcttgcattcttttttcacttgtaccgaccgttatctttggagttgtgatgttagcagttcgaattctggtgttgacaacttatagaccatcatttcttctgtaacatagataagaacatactatttgtctattgtcc

SEQ ID NO: 267922 - DNA, 411 bp, Zea mays
cccacgcgtccgcccacgcgtccgcccacgcgtccgcccacgcgtccggttcttccatgatgacagtgcccaagttcgttccacgccttacaaaagaagaaactcgggtgtttgaatctgccagagaatcgatgactggtttcaagaaatggcgagcaggtgggatgagactgcaaaaggcttccattcttggccggaagaggaagacaaagctgcctgaatgagttttaaggtgatgtgcgctgctttgatttgctagcaccgtgagcaaagagaaaagtgaatggcagattaaatctggatgtactatgatctgctgtacattgtgcacttgtgtacagcagctctgatcaggccgtcctttgtaaggaaaatgaacaccgtcttaaatcatgatatcatgtttggagc

SEQ ID NO: 267923 - DNA, 1791 bp, Zea mays
cgagactagggtttgggtttggtgtcgagctgcatcggtcggcgccctgtgagggagaaggatgcatatgatgcggcggctcaagagcatcgcctccggccgctcgtccgtctccgatccgggtggtgactctggctccaaaaggccaaaatttgagcaggatggagcaggggatattgttattgagccacacttaactgaggccaagcctgtccggatagaccaagaatcatcatcatcatctaatagggatgctgaggcaagcacatctactagcatgaagcctgttaaaactgaagaaccagtagcagatcttcttcccaaagaattgaatgatatgacaattagtgacgataaagctgatgaccataatgataaggaaggtgaaggtgttactcttgatgggaatggagccgagacaggacagataattgtgacaacaataggaggtcataatgggaagccaaagcagaaggtctcatacatggcggaacgggttgttggtactggttcgtttggtatagttttccaggcaaaatgcttggaaactggtgagacggtggcgataaaaaaggtgttacaagataagcgctacaagaatagagagctccagactatgcagttgcttgaccacccaaatgtagttcagctgaagcatcacttcttttcaacaactcataggggagaagtgtacctcaacctagtacttgaattcgtatctgagacagtttatcgtgttgccaaatactacaaccggatgaaccagcgtgtacccatattatatgttaagttatatgcatatcagatgtgccgtgcccttgcttacatccatcgtgttgtcggtgtgtgtcaccgtgatattaaacctcaaaatctactggtcaatcctcatacacatcaacttaagatttgcgattttgggagcgctaaaaaattggtccctggtgagcctaacatatcgtacatttgctcgcggtattatagggctcctgaactaatatttggagctacggagtataccactgcaatcgatatctggtctgttggctgtgtagtggctgagcttctgattggtcagcctttgtttcctggtgaaagtggtgttgatcaactggtggaaatcataaagattttgggtactccaacaagagaggaaatcaggtgcatgaatccaaattattctgaattcaagttccctcagataaaagcccatccatggcacaagctttttggtaagcgcatgccacctgaagctgttgatctcgtgtcaaggctacttcagtactcaccaaacctgcgctgcactgctgttgatgcttgtgcccatccattcttcgatgagctgcgggaccccaaggcctgcctgccgaacggacggccaatgccaccgttgttcgacttcacagcagccgaactcgaagggctccccgccgagcttgtccaccggatcgttcctgaacacatgaggaaggaagtgaattaggtggacggacgtactggggcaaaaaaaaaaaaaaaactccctgtttctctgttggttctgagagatgtgtgagggcacggatatggaggagcggtggtgtattgtaattgtaaagagggctgaaagaaaggtccctctggttgggcgtgtcaccaaagagtggccctagaggcaaaccttacgtttgctcgttgcccttggtgtgtacccagatgtgtatcgatgacataggctggctgctgtatcatcatcagggttgacgctgaacaagagaaattcaagcagggtgctgctagctcgcttcctcc

SEQ ID NO: 267924 - DNA, 744 bp, Zea mays
acccacacgtcaacagcctttgtttcctgttgaaagtggtgttgaccaactggtggaaataataaagattttgggtactccaacaagagaggagatcaggtgcatgaatccaagtggttccgaattcaagttccctcagataaaagcccatccatggcacaagctttttggtaagcgcatgccacccgaggctgtcgatctcgtgtcaaggctgctccagtactcaccgaacctgcgctgcactgctgtcgacgcctgtgcccatccgttcttcgatgagctgcgggaccccaaggcttgcctgccgaacggacggccactgccaccgctgttcgacttcacagcagccgaactcgaagggctcccaatcgagcttgtccatcggatcgttcctgaacacatgaggaagtgaaccggtggtggacgtgctggagagatccctgtttcgtgagggcatgctatggaggagcgatgtagctagcgaacgccttgctagatgtaaagagggctgaaagttccttgattgggcgtgtcaccaaggtgaccctagagggcaggcaaaccttacgtttgcttgttgcccatggtggaaatcggcttgtacctttcgcaatcgcatcttgtgtatcgacgatgacttaggggctgctgttgtattgtcaggttcatgctgaacaagagaattcagagtgctgtgctgtgcttggttcgttagctgggcaaaaaaataaattgagattttat

SEQ ID NO: 267925 - DNA, 1443 bp, Zea mays
aagaactcaggaagtcattgattgtttttccttcctatatattgtgtgctgtagcctgaccagtttatataatttacagatcaccatcgccctctactcgcagatcaaaatctcggtcgagatcacctatcaaataccgtagtagcaggcggtcccgctcctactctcccccagttagacgctcaagggagcagcgatcacgatcaccatcaaaatctcgccactcaaagtacggtagtgatcgatcgcatagggatgataaggacaggtatagcaggtccgggagaagggagagtgaacgatctcgtgatcatcattcatctagttcaaggaggaacagaagtaaaagtagaagtccaaggcataagaagccctccagagttgattctagggcacccaagaaacaaagagaggaaagtttaagcccatcaaaatcaaggtcagcaagggctggttcaagatcaccacgccatcataagggaagcaaatcatcgccaactcgtgaccgtcattctcgccatagcaggcattcaaggtccagatctcctggcagaaagcaccgtcacagtgataaaagggacagcagaaagtctgagattcaggacgacaaaagaagatctcatagaggtagcagacacgacaaagatgaaagttcagtaaaggacgaaggggaaagatctcatagaagcaatagaggtgacaaagatgaaaggtctgtaaaggatccagtggaagataaagggatggatactaaagttgttgcacataagaggagctctgaagatgaaatcctgaacaacaatggtagtaaccataagaaacatagacatgaagttggtttggaagttgatgaaggaaatgatgtgtgccctgctgtagcagaccctaatgggaaacatgaaactggagtaggtggatctttagggggcgctgcagaatctgctatatgatagctgctgtatcattcagttggctgtttgcagattgattgatgatgatggagaatgctgaactggtgtttattatctccctttctgatttaggagttttatttgcagggcatgaagatcttcggagaactcgagtgctgttcggagcgctcatctgatatattaaaatgcttatgattccatgaagagttgttggagcacatttctgggatgtcggttgaagatacaagggagtatacacttcctcaagtaaagtacacatatacaagactaataaacaactcatcttctaggcacttgcatttgaatcggaatgctttggctagtaaaatggtccaaatatgcttgtctacatacttctgatgcacttaatttgcttgaagttctgtttttatatcttgtatcaggaatggttcaaaaagtttgacttgctataccaatacttgtactttatcttttgacagtcacaatgaattgtgatgtaggttttatc

SEQ ID NO: 267926 - DNA, 1124 bp, Zea mays
ttagaaacaaagactcgaaagtttaagcccatcaaaatcaaggtcggctcgggctggttcaaggtcaccacgacatcataagggaagcaaatcatcgccaactagtgatcgtcattctcgccatagcaggcattcaaggtccagatctcttgacagaaagcatcatcacagtgataaaaaggacagaaagtctgagattcaggacgacagaagatctcatagaggcagcagacgcgacaaagatgaaagttcagtgaaggatgatggggaaagatctcatagaggtagtagacgcgacaaagatgaaagttcagtgaaggatgatggggaaagatctcatagaggtagcagacgcaacaaagatgaaagttcagtgaaggatgatggggaaagatctcatagaggtagcagacgcgacaaagatgaaagttcagtgaaggatgatggggaaagatctcatagaggtagcagacgcggcatagatgaaagtttcagtgaaggatgatggggaaagatctcatagaggtagcagactcgacaaaatgaaagttcagtgaaggatgatggggaacgatctcatagaagcagtagaggtgacaacgatggaaggtctgtaaaagatccagtggaagataaaagggtggatactaatgctgtcgcacataagaggagctctgaagatgaaatcctgaacaacaatagtagtaaccataagaaacatagacatgaagttggtttggaagttgatgaaggaaatgatgtgtgccctgctgtagcagaccctaatgggaaacatgaaactggagtaggtggatctttagggggcgctgcagaatctgctatatgatagctgctgtatcattcagttggctgtttgcagattgattgatgatgatggagaatgctgaactggtgtttattatctccctttctgatttaggagttttatttgcagggcatgaagatcttcggagaactcgagtgctgttcggagcgctcatctgatatattaaaatgcttatgattccatgaagagttgttggagcacatttctgggattgtcgttgaagatactaggaagtacacacttaagtttttcgagggggcctgcatggagtatgttt

SEQ ID NO: 267927 - DNA, 760 bp, Zea mays
atagtagtaaccataagaaacatagacatgaagttggtttggaagttgatgaaggaaatgatgtgtgccctgctgtagcagaccctaatgggaaacatgaaactggagtaggtggatctttagggggcgctgcagaatctgctatgtgatagctgctgtatcattcagttggctgtttgcagattgattgatgatgatggagaatgctgaactggtgtttattatctccctttctgatttaggagttttatttgcagggcatgaagatcttcggagaactcgagtgctgttcggagcgctcatctgatatattaaaatgtattcctcattagcttgagattcgctccttggagcaaacttctaaatgtaacgctggtgttgtaaggcgatttcatacagtgaggtagaaaccaacccatgtatttgtcgtttcaggctcatgattccatgaagagttcttggagcacatttctgggatgtcggttgaagatacaagggagtatacccttcctcaagtaaagtacacatatacaagactaataaacaactcatcttctaggcacttgcatttgaatcggaatgctttggctagtaaaatggtccaaatatgcttgtctacatacttctgatgcacttaatttgcttgaagttctgtttttatatcttgtatcaggaatggttcaaaaagtttgacttgctataccaaaacttgtactttatcttttgacagtcacaatgaattgtgatgtaggttttatcc

SEQ ID NO: 267928 - DNA, 372 bp, Zea mays
aaggcgatttcatacagtgaggtagaaaccaaccaatgttttgtcgtttcaggcttatgattccataaagagttgttggagcacatttctgggatgtcggttgaagatccaaggaagtacccacctcaagtaaagtccatatacaagcctataaacaactcatcttctaggctcttgcatttgaactggaatgctttggctagtaaaattgtccaaatatgcttgtccgccttctgacgcactttgtctgtttgaagtcctgtttttgtatcttgtatcaggaatggttcaaaaagtttgacctgatataccatacttgtacactgtcttttgacagtcacatggaattgtgaattctgatgtaagttttat

SEQ ID NO: 267929 - DNA, 449 bp, Zea mays
ggggtgcagacagaatgcaagataccagcttgagcgtttcattgtctgaagggtcttgtgctgtgctacaagatagtgtggcctctggcgttggaagcgaaggggaccggggcatcttgtggctggtgtgtatcatcttcctaccatcctaggacatctaattagtttgattagtttcttccccgttctagtggactcggttgctgcttttggctttcaccgaatcctctccaaaggtggcgctggtgctactgttccttatggtgatgattttacttctgaccatgattgttacagcggtaaggcggtcttaggatcttttaacctttaagcatggagacgactttatatacatgtcaagtacaggtgaataataaccaaaaaaaaatgactggctaagtagctggaccatatatatatcctagaacctaacagccttaatgaatagc

SEQ ID NO: 267930 - DNA, 1448 bp, Zea mays
  unsure (1)..(1448): unsure at all n locations
atcctaaaatgtgcatttgaggctgctggtcacagcccagaatatgaaggttcatttgctgatgcaggaaatccagttatagcactagcagcgtatttagctggtcttgtggaagatggtaacgccaccacttcattccgtagttcactaaaatctgtatctgatgtgtctcctgcactccaattatcaagtaggcactgttttattcttgaggatccgccagatgaactcaaagacatttgtgctagtgtaagtaagaaaaatagagatggtgataaaaaacaagatgaggatatgattcaaaattcaattgatactgagaaaaaagagatcaatgagaaagaaggtaagtctttatctgtggaaaagaaaaacaattcatccatgtcacaacatgaccaccaagaatcaggcattaagagcgtctcaagtgatgattgctccttagtggagccaaaaaccaataatgctaaggagtcaggtgattcaactgctattggggacaagagtgcaaccgaaactacaaaagacgttgttgcaggtaatactgaacaagtgaatgacttgccaagtgttgaggtggaggctcctgatgattcatcttcaaaaggtaaggatgagctcaataagactaaagatgcagtggggacaccagctaccgtacaggaacagaaacacagccaaacattgggaaatgggtcttcaaaagaacctaacaacattgaaaatgtagttgtcgatgaagagaagggctctgtagtgactgccaaccgacctgattccgtaactaggctcaaaagagcagcagctactgctgtttcagcagctgctgtgaaagctaggtttctcggtgatcaggaggaatatcaaattcgaaggctgacagcacttgtaatcgaaaagctgttccaaaaaatagaagtgaagatgtcgttgttttcagagattgagcaggtggtctttcgaacgagagagtacaccgagaagaccagaaagaagctcctgaaggaacgaaatgcgattattgcagctcggatgggcgcattgccgtctaggccaaaccagccaggtgtagccggaaacaggttaccacctgggtatggcaaccctcctgtaaggcctccaaacgcaatgcctcggcccaccagctgaagaaattccggattccggacacccagtgatctatacctacccattcttttagaagcatcccgaagacttaacctgccgcttgtgtactttttcagaaggccttgacaatggctgttactggtcttgaaattgccttccttccatctttttaccttccttaatgaatattattttttaagaacagccactgcctttgagatttctggtantccaaccaactctctttcccccctcccccttttttttttttggtttcctccaccccccccccccccccccccttttttttttttttt

SEQ ID NO: 267931 - DNA, 378 bp, Zea mays
aggccaaaccagccaggtgtagccggaaacaggttaccacctgggtatggcaaccctcctgtaaggcctccaaacgcaatgcctcggcccaccagctgaggaaattccggattccggacacccagtgatctataccccattcttttagaagcataccccaaagactcaaacctgccagcttgttgtagcattttttagaaagtacattgtacaattgtctgtataactgcttctatgaaaattcaccaaacctccccccctgttttaaacattccatcagataggaaaattacatttctctacaatgaacagcccacttgaccgttagcaagattacccccgctcaatttaaaaaaatcccatgctatatttctgctc

SEQ ID NO: 267932 - DNA, 790 bp, Zea mays
  unsure (1)..(790): unsure at all n locations
cccactcctccnattcgatgccttgcatcgcactcagaggcactttcttggggacgagcttgtcccactgagtgtgaagganttncancanctacagaaacagctcgaatgtgctttgtcactggcaagacagagaaagacacaacttatgatggagcaagtggaagagctccgcagaaaggagcgacacttgggagaaatgaacaggcaactcaaacacaagcttgaagctgaaggttgtagcaactacagaaccctgcagcatgcagcctggccagctcccggcaccaccatggtggagcatgacggcgccacctatcatgtgcatccaactgctcaatcggttgcaatggactgtgaacccactctgcaaatcgggtaccctcctcatcaccagtttctgccttccgaggcagccaataatatcccaaggagcccccctggaggcgagaacaacttcatgctgggatgggttctttgagttgctctgttaatcatccatccatcagatggatgtccaaactaataaaaggcactcagtgctaccatatgcatatccatgcttaagtgcttgatttgccacgacgtgggatatcttttaaatttatcgttctggtgtgtaataactaattaagaacggcaccttcattctatggttgtggtgtggcacttctatctatggtttttgtatttggaccacgaatgttgtaatttgtaaaaaaaatttaaagatttatctatgctgccggtcctcccgcgcgaatctggatttcacagacactacaaaatc

SEQ ID NO: 267933 - DNA, 1406 bp, Zea mays
atccggagagtgcatgcaggagcttctgaaatcatggaaagattttgaagcaactcaggaggctacaaatgttgaaagtctacaaaacggtcctactcttgaaattcggatacctgccgaatttgttacttccactaatcgtcaagtaaagggtgctcaactttggggaacagatatatatacaaatgattcagatcttgtggctgtgctaatgcatactggctattgctcgcctacgtcctcccctcccccatctgccatccaagagcttcatgcaactgttcaagttctaccaccacaagagagttatacttcaacattgaggaacaacgtacgctcacgtgcttggggtgctgggattggttgtagcttccgcatagaacgctgctgcatagttaagaaaggcggtggcaccattgatcttgaaccacgccttagtcacacatcagctgtggagcctacacttgctccagttgcggttgagcgcacaatgacgacaagagctgcagcttccaatgcattgcgacaacaaagatttgtccgtgaagtgacaatacagtacaacctctgcaacgagccatggttaaaatatagtataagcattgtggcagacaagggattgaaaaagtcactttatacttctgctagactgaagaaaggagaagtaatatatttggagacacattttaataggtacgagctgtgcttcagtggagagaagcctcggggtattggatcgagctctaatgcatctgatgcagaacctgagaaacaccagagcagtagtcaccattcgcaaaacggctctgtggagcatgaactccgggatgtgttccgatggtcccggtgtaagaaggccatgcctgaaagtgccatgcgctccactggtatcccactaccagcagatcagctcgaggtgttgcaggataacctagaatgggaggacgtgcagtggtcgcagaccggtgtttgggtggctgggaaggagtatcccctcgcccgagttcacttcctctccgggaactagcagcagctgatgttgcagccaacgaaggagctatcgtttcctgtggacaggagaggagcttgccaacattgtaggttttttttttttgctactgtataatgtatgatgcaccctgtcatgtgtacaaagaaagctcaactgttgtaggctgtttgtgttgtgtggcattctactagtagtagtcttcacattaaccatatttgttagggttgcttgctcctgcccatgcctgaaagatatattgttggttttaggtcctgataaaataattggcgatttgtaacttaagattagtattgacattaattcaaggtagtaaacaaaccataactctaattttgtatattgacatactgttctgtggatgtcttcagttgct

SEQ ID NO: 267934 - DNA, 629 bp, Zea mays
  unsure (1)..(629): unsure at all n locations
agatattctgatccaagccaagatggcgagaagggggtctatgaacgactgatgatcccggtcctgaatgatggcgcaatgtcaacaagtgagcgtattctccttcgcgaggatgctgaatgctgtatctgtctatcatcatatgaagatggagctgagtgatctgctctcccctgcaatcatcacttccactggccttgtattaccaaatggctgcgcatgaatgcgacgtgtccactctgcaagtataacattctcaaaggcagtgacagtgcatgaccaacttattctgacataacttccgtacacagcttcctttcaagtggcgttctcaaagcaatgctgttttcacagctgtgttattaagtgacagtgatctgtgttttctgattaggatgtggtgataacctgtagatggatgaaaccttatttacaattgtccttgttaatatcgcttgtaaatacctttcgagttgttttctacgtatgatggaattggaattgctgaaaaaaaaaaaaaaaaaaaacaaaataaaaaaaaaaaaaaattaaaaatctaataattttacataaaaatttaaatttacatanttatatttatatattttttttaaaaataattatttttt

SEQ ID NO: 267935 - DNA, 590 bp, Zea mays
gaaatctcttacgacgaagccaaggcagaaagtccaatatctttatcatcaggactacgaaggagatcaactcatcatgagagaaaagaagatattggagcacctataaaattggatgcagaagctcaggctcacattgagaagcataggaagcttcaagaagatttgactgatgaaatggtcgagttagcacggcaactgaaggaaagtagcctaatgatgaaccaatccgtgcaggagacagagaagatccttgattctaccgagagggccgtcgagcacagcctggcaagcgcgggccacgcaacctcgcgagccgcggaggtctactcactggcttccaagactacgtgcttccagtggctgctaatgtttgtgatggcctgcatgtttgtaatggtggttctgctcataaggatcacttgatgaaggatgagggctgtagcgggcactcaaatcgtttgtcacccttgtctttgtttcatagggaattctttgcggtcagggcattggctttttttccgagcaagtgttcccaaccaaaccagccttgctgatactggataaactggaacagcttgatgctcagg

SEQ ID NO: 267936 - DNA, 706 bp, Zea mays
cgtgtgcttctggagcttgtcaccggaaggaagcccgtagcgagttcggcgacggcgtcgacatcgtccagtgggcgaagatgacgacgaactcaaacaaggaacaggtgatgaaggtcctggacccaaggctctcgaccgtcccgctgcacgaggtgacgcgcgtcttctacgtcgcgttgctgtgcaccgaggagcaaagcgtgcagcgcccgacgatgagggaggtggtgcagatcctgagcgagcttccaaggccgccatctaccaagcagggagaggaggcctccacccggccgggagaggaggttccgaattccggcgacggctctgcgcccagccctctacactcagcaccagttgggaccaacgaagcaccagccgtcgaagcgagagaccaccagcagcagacaagctctccgtcgtcgccaccgcctccagatctcatcagcatctgagtaaccggaatcgaaaacgttaccgttcctcgcaaaaatccccgcttcagtgtagcaagcttaggtcgtaattttaggtttgcaataagtttatttggcctcctgtgctgtacatatccgagtttgtttgttggttggttgtgtccggtctgtcatgtttcatttgctggtgcggtgtggtaggagtctgtagcgagttgagtttgagtgagccacgttgctagagcctttgatttcccttctctaat

SEQ ID NO: 267937 - DNA, 382 bp, Zea mays
gaggaggttccgaattccggcgacggctctgcgcccagccctctacactcagcaccagttgggaccaacgtggcactagccgtcgaaacgagagaccaccagcagccgccgcagcagcagcagaccagctctccgtcgtcgccaccgcctccacatctcatcagcatctgagtaaccggtatcgaaaacgttaccgttcctacgcaaaaatccccgcttcagtgtagcaagcccaggtcgtaattctaggtctgccataattaagcttgtttggcctcctgtgctgtacatatccgagtttgtttgttggctggttggttgtttccagtctgtcatgtttcatttgctggtgccgtgggggaggagtctgtagcgaagtgag

SEQ ID NO: 267938 - DNA, 1014 bp, Zea mays
cccacgcgtccgcggacgcgtggggtcgacgctgcagcaggaagccaaagaggagagaatccatcgagtcgaccaccgagcacggttagggcggcggggctcgccgtggccacagctcaggaatccaatcccccactcctcaccggcgcccgcggttttataaatagattccctcgtcactgtcgcggtcgcggcttgatcggattcaactcacctaccccaccccctcgattccttcccagctctggctacttcctacgccaccaccgcccgctccggcctcggctcctcgagcaagctgccatggctgccgccgcgctgagggagcaactcaacgctctcctctcctccatgttcgcctcgggtctggtggacgagcagttccagcagctgcagatgctgcaggaagacgggggcacgccgggcttcgtcgccgaggtcgtcaccctcttctgcgacgacgccgacaggatcatctccgagctcgccgctctgcttgaccagcccatcgtggactttgataaggtggacgcctacgtgcatcagctcaaagggagcagcgccagtgttggcgctcagaaagtgaagtttacttgcatgcagttccgtcagttatgtcaggataagaacagagacgggtgcatcatggcattggctgttgtgagaaatgagttctatgatctgcgcaataaattccagactatgcttcagcttgagcagcaaatccaggctcaacaataaatcgaagcagaaagcgtagctgcatgtggcctcacatgataagtgtatctttaaagatgtagaccatgttctctgtgttcctacaattgtgacaaaatcatcgtcgttgaggtcggctcacatgcatgtaactgttagctataacaattattgtctaacgttgtccttgttactccacccgtttgtgttggattgccatcgaccatcatatgaaaactttttttttccaatcccctccaatccatgtgggatgagaataaccggttccccggt

SEQ ID NO: 267939 - DNA, 622 bp, Zea mays
caagcaatctcttcttgactgccgagatggccaatactctatctccatggccatggttcgattgcgttcgagagtgtgtgctgtggcagtttgatttattggatatatcggctcttcatgcatcgagaattggtttttcatttgtgattatactgacggaatctatcaaagtgctcaagatgctgctagtagaccaaggtgttgcaggacatttctttgtcatgatttgggatcctggtggaattgatgccatgtatcggcttgagggcaagccgaattttaagaaggggagaatgtcagcagcccgccatctgaaccatgagccactgtcactgtctcaacaaggaagctggaccaagacgagcaagtagctgatgaagatactttcagagtccggcgatagtttctgttgtgcaaaataccagtgtgcaagaggccgagcaaatgtaacgcatccaaaggcccacagtccgcttcgtcttggcccagaatagcgtgtaaaggttgcgtgtgtctgtgttgggctgtggcgctgaataagtacgcgcgccgtcaagatccttgtatcgaacaactgaacaaacaattattctctagaaatcacatatgttcttctcctaaa

SEQ ID NO: 267940 - DNA, 413 bp, Zea mays
ctgatgggaggcggacagagatcacatgtactgcttgtggaggacacttggggcacatattcaaaggggaggggtttaagacgcctaccaacgagcgacactgtgttaacagcatctcgcttaagttcaatccgtcccccgaggaagcctgacggcagatgaactcccaatctgtaactcaacaacagaataaatttggactttgtttgttgctttcacattgtgtagagagctatgagatcgagtttgtcattcctcggatcatttcgaatatgatgtaaaaaatccaatcacaagtgctggtctttgttgataaatcaatgtacctcagttttagatgaataggccaaaaataaaaaaaaataattataaaaaatattatttaaataattattttttaaaaatatataaat

SEQ ID NO: 267941 - DNA, 1104 bp, Zea mays
caacagcttgtgcaagcaagaaaagaggttgcggactgcagctgcagaagagccagttagaagagttgctgcagaaggcccaaggagatcttggatcagttcaggatcagcaccgggtgaaggtccagcagttaataaccctagtggatttcaagtcaaaggagatagacaggctactgatggagctcaaaagcaagagtgatgagttccataaccaaaaaagatgtgatgaggcaaagctgaatgctctgtcagaagaaatcgacctactcaattccaagatcgacaagctatccagtgagagaaatgagctattcgaaaagaatgagcagaaagaaaaggaattagctggaattagcgaaaaggacatgcaattgcaagacaaaactgctgagattacttcactaaataaagagcttgtattcctcaaggaccaagtgaagatgcatttggacgaactgcacagtttaaaacgtttgaagaacgagagggaggaaacaattggaaaactgcaaatagatattgggtcactgaaactccagtgtgacaacttgaaaacttcgctgtccaagaaagagtctgagaaagacagccttgcctctcaggttctgaagctgagaagatccgttgaaacccgggaaagggcgaaggcaaatggtcaaatttcagatgtgaaggacaatcagcatgctaataacaagcgcaccaagcacaataccggctccactgggagcattgctgcgctgccaggcaccaacggacagggcgaagacgatggtgactgcaatggtcatgacatgaggaacgccgcagccgacggggcagcgaaggagctggcctcgctgaaggagagcagcaaggcggtggaggaggagctgaaggagctgcacgagcggtactcggcgattagcctgaggctcgcggaagtggagggcgagcggcagcagctcgtgatgaccgttcggtcgctgaagaactcctccttgcggtgactgatgcagctccacccaaattgttgtagctaaaaggatttagacgataggtttgtccgtgacgtggttttgtccgtcagagttacagtacacagcatgtagatctcgtcac

SEQ ID NO: 267942 - DNA, 412 bp, Zea mays
cggctcgagcatcgctgcactgccaggcaccaacggacagggtgaagacgatggtgactgcaatggccatgacatgagaaacacatgaaccacggccatccgactgacagacatgtcttgccaggaacgccgcagccgacggggcagcgaaggagctggcctcgctgaaggagagcagcaaggcggctgaggaggagctgaaggagctgcacgagcggtactcgccgatcagcctgaggctcgcggaggtggaaggcgagcggcagcagctcgtgatgaccgttcggtcgctgaagaactccttgcggtgactgactcgtgctgctccactcacactgtagctacaaagattttagacgataccggtgggcgttgtacaggtgggcgagcgactggatgggctttttctctc

SEQ ID NO: 267943 - DNA, 425 bp, Zea mays
cgagtctccagccaaccgcatccagtccaccccttccccctcgaccccgacaaccccgaggcccgacccggtggcgcccaaggccgagaagaagccagcggagaagaagccggcggccgaggagaaggcggagaagacgaccgcaggtaagaagcccaagtccgagaagcgcctgcccgcctcgaagtcctccggcaaggagggcggcgagaagaaggggaagaagaaggccaagaagagcgtggagacctacaaaatctacatcttcaaggtcctgaagcaggtgcaccccgacatcggcatctcctccaaggccatgtccatcatgaactccttcatcaacgacatcttcgagaagctcgccggcgaggccgctaagctcgcccggtacaacaagaagcccaccatgaccttccgcgagatcc

SEQ ID NO: 267944 - DNA, 523 bp, Zea mays
tggaccggttgttgtgcttcacttgcgctacgaaatggacatgctctgctttgcaggctgcacacatgcctgctctggttatgatactgaggagctcactatgatgagatctgcttatccatggtggactgagaaagagatcgattcggaagtgaagaggctccaaggactctgtcccctcacaccagaggagatcactctagtgcttaaagctctagggttcacaaaggacactctgatatacattgcttccggtgaaatctatggcggtgaaaggcgcctggccgtgctcaaggctgcgtaccctaaactagtaaggaaggagaagattttatctcccgatgaactgcggccgttccagaaccattcgacccagatggcagcgctggattacatggtctctctagcaagcgacactttcattcccagctacgacggaaatatggcaagggttgtcgaaagccaccgcaggtatatgggtttccgcaagaccatcgtcttggacagaaagaagctcgtcgag

SEQ ID NO: 267945 - DNA, 1382 bp, Zea mays
cccacgcgtcctcccacgcgtccggtgccgccgaacaccctcacaagagtcggcctctcgatttctcagtccagcctcagcagtccccttccctccctccatcaggtgttgcctcccgcagatccaaatcggaattcggtccttcgtccccaaaccaccaatccgggaagtgaagtgatgggggagtgcgaggacggcaaggagtacaggtgctgggaggagctgctgccggacgcgctgggcctcatcttccgcaacctgccgctgcaggaggtgctcaccgtcctgccgcgggtgtgcaagtcctgggggcgggtggtggccggcccctactgctggcaggagatcgacatcgaggagtggagccagcagcagggcaagccggagcagatcgcccgcatggtcgagctactcgtgggccgcagcgccggctcgtgccgccggatcagcgtctccggcctgccctgcgatccgcgcttctccttcatcggagacaacgcacgagctctccggaccttggagatccccaggagcgagatcagcgactccatggtggaatccgtggcgccgcggctgccgaacgtcactttcctcgacatcagcagctgcacgaagatgggggcccgcgggctggaggcgttcggcaggcactgcaagtccctggtggggctgcggcgggtgatgcacccgatcgacctggcggacagggcgtgccagcacgacgaggcgcacgccatcgcgcgcagcatgcccaggctgcggcacctggagatggggtacatgctggtggcgacggaggcggtggcggagatcctggggcggtgccgcgagctcaggttcctggacctgcgcggctgctgggcggtggacgaccggttcctgcgggagcgccacccggggctgcgcgtcctgggcccccgcgttgtcgaccactgctacgagaacagctactgggaggagtgctccgacgactactcggacgactcctccatctactcgtgggagctcatggacgacgtcgacgacgactacgactacgccgccggcagcgacgacgacgacgacgaggccgtctgggacgacgacggccagggcctggagaacctggaggtcaggttctacggcggtggcttcggcgagaccttcgccggcttcgactggccgccgtcgccgtgacatgacacctgctgcctgcgcttgcgttgcttgcgtgggtgggtgagcctttgtgtgttgtccccaagctttggaagcttgctgtgctgctgtagtactgtgcctgcgacatcactcgatcttcctctacctcgcagatatgccatatgtgaagcgaactgctagtggtgcaatctaaaatgtagacgctggtgtttacatgaagc

SEQ ID NO: 267946 - DNA, 459 bp, Zea mays
acggaagacgccactagctctccgcagtccgctctcgcctccgcggacgcgtgggtcggccttctccttgtgccgccgaacaccctcacaagagtcggcctctcgatttctcagtccagcctcagcagtccccttccctccctccatcaggtgttgcctcccgcagatccaaatcggaattcggtccttcgtccccaaaccaccaatccggttgcattctttgggtttgctcacagcgcacacaaagccattttactgctgggaatggtggctggcactattagcgtctccggctcttgagtgatctccaagtcctttggaatgctacagggaagtgaagtgatgggggagtgcgaggacggcaaggagtacaggtgctgggaggagctgctgccggacgcgctgggcctcatcttccgcaacctgccgctgcaggaggtgctcaccgtcctgccgcgg

SEQ ID NO: 267947 - DNA, 410 bp, Zea mays
ccgctctcgcctctcggccttctccttgtgccgccgaacaccctcacaagagtcggcctcgcgatttctcagtccagccgcagcagcccccttccctccctcctccatcaggtgttgcctcccgcagatccaagtcggaattcggtccttcgtccccaaaccaccaatccgtcctttggaatgctacagggaagtgaagtgatgggggagtgcgaggacggcaaggagtacaggtgctgggaggagctgctgccggacgcgctgggcctcatcttccgcaacctgccgctgcaggaggtgctcaccgtcctgccgcgggtgtgcaagtcctgggggcgggtggtggccggcccctactgctggcaggagatcgacatcgaggagtggagccagcagcagagcaggccgga

SEQ ID NO: 267948 - DNA, 452 bp, Zea mays
cctactcatccgtgaattagctaccccgcatccttcggtggttactgatgtctcggttagaaaactctatgaggctgctcgataagaatcgcattttccttctatctgatctctcaaaatgttcgcttatctcttgttcttgcttgcctcagtctacttgcaagatctgcgttcagttgactggggtgcttctcagcttctttgatgtgaggagattgccgcacgaaatcacgtagcagtagctcttattccccactcgcgttttaacctgagctgccgctgttggcattcttcatttcactcgtatcggatgggatagcctcgttataagggcggtgcttcgcctggtacaggaaagggaagggaagggaagggaagtgatgggggagtgcgaggacggcaaggagtacaggtgctgggaagagctgctgccggacgcgctggggctcatc

SEQ ID NO: 267949 - DNA, 533 bp, Zea mays
ctcacgcgtccgcggacgcgtgggtcggcctggggcttgtgccgccgaacaccctcacaagagtcggcctctcgatttctcagtccagcctcagcagtccccttccctccctccatcaggtgttgcctcccgcagatccaaatcggaattcggtccttcgtccccaaaccaccaatccggttgcattctttgggtttgctcacagcgcacacaaagccatgttactgctgggaatggtggctggcactattagcgtctccggctcttgagtgatctccaagggaagtgaagtgatgggggagtgcgaggacggcaaggagtacaggcgctgggaggagctgctgccggacgcgctgggcctcatctttccgcaacctgccgctgcaggaggtgctcaccgtcctgccgcgggtgtgcaagtcctgggggcggatggtggccggcccctactgctggcaggagatcgacatcgaggagtggagccagcagcagggcaagcccgagcagatcgcccgcatggtcgagctactcgt

SEQ ID NO: 267950 - DNA, 1424 bp, Zea mays
ctttacaagattcttatgccgatgacccgatcgggttctttttatacggagtgttttttttttttgaaacgaagtacaggttccctgatatcggtggccagcagccgactttgtggttagtccattctcttccggcgggatacgttgcggaccacttcgctcagctgctcgcgacggcggcttgtaccctgatttgggtggggaggatgcctgatatccagctgggatgccacactataaggtcccatggtaccaaagtggcaacattacacatgtatgactggattatacttttatgtcttgctgtacttgatggactgttaaacataatcgagccctttcaccgctttgttggacgcgacatgatgaccgacttgagttatcccctcaagggcaacacaatcccattttgggctgttccactgattgcgatcgtgctacccttggttatctttgctgtcatttacttcaaaaagaaaaatgtctatgatttacaccacggcatactaggtatcttgtattcagtgcttataactgctgtgatcactgatgcaattaaggatggtgttggtcgccctcggccagatttcttttggcgttgttttcctgatggcaaacctaattttaataatataaccaccgatgtgatatgccatggagaaaagagtgtcatcaaggaaggtcataagagtttcccaagtgggcattcttcatggtctttcgctggtctaggttttcttgcatggtacttggctggaaaacttaaagcttttgatcgcaagggtcacattgcaaaactgtgcttagtttttctgcctctacttgtcgcgtcacttgtggctgtttctcgagttgatgattactggcatcactggcaagatgtctttgccggcggcatcataggtcttacagttgcttcattctgttacctgcagttcttcccatatccctttgacaatgatgccctatggccacacgcatacttccaacagctagctgagacacacagtaatggtaatgcaaactcaatcaacataagacctacagagtttgaagatgaaccagatgaccatggtgacattgtcctgagggacaccagccctatcttggagtcaatggagtctggcaggagaccatgaagaagcatgccactgggtttgtccaaggtgccctgaagcgtgatgagttttgtggtttcatcatgtagccgtccaacgtaaaaacagtatggaggtatatctaccaccacctgatgatttgatgaaccacagactgtcgtggttagctgtaaatgacagcgaatgtttatgtttctagtgacaatgtgaatatttggttttgcacggctgtgatatggaaagtttgtttcgaggttacccttcggcagtaatgaaaaagtcaccaaacctgcaggtggattgcaa

SEQ ID NO: 267951 - DNA, 673 bp, Zea mays
tgatatgccatggcgaaaagagcgcgcacgcatgcggtctcgacgaggtccgcagtgggcattcttcaaggcctttcgctggtccaggttctcttgcatggtacttggctgcactactgagcgcttttgatcgcacgggtcacattgcacaactgtgcttagtttttctgcctctacttgtcgcgtcacttgtggctgtttctcgagttgatgattactggcatcactggcaagatgtctttgccggcggcatcataggtttgctagtatttgatgctcttttgtatttagcatttcgaacacccttcacaatcaaaagtcaatcatggagtgtcattctcttatttcttttcaggtcttacaggtgcttcattctgttacctgcagttcttcccatatccctttgacaatgatggtacctttttcgcccttctctacaatatatgctgatgagatattaatacattttattacatgttcctgttcctatttatttgtagccctatggccacacgcatacttccaacagctagctgagacacacagtaatggtaatgcaaactcaatcaacataagacctacagagtttgaagatgaaccagatgaccatggtgacattgtcctgagggacaccagccctatcttggagtcaatggagtctggcaggagacca

SEQ ID NO: 267952 - DNA, 407 bp, Zea mays
ctcttcccaaggagagactcaccgcccattatccaaccctactacttgcttttgtctccactctcagtctcctctccaaatctccaaccctacttgttccagaaaagaaaaagaactatccatcccgctgtgagccaagccagcccagctccggcgactggcagatgtttcagggtccccgtccgtttgccgcaggttccctgatatcggtggccagcagccgactttgtggttagtccattctcttccggcgggatacgttgcggaccacttcgctcagctgctcgcgacggcggcttgtaccctgatttgggtgtggttcttgtagagcggtcgtgtcgtccgagcgttgatctgaaccagcgcagtttatcagggacgtagcactgtagcagtgagttggggac

SEQ ID NO: 267953 - DNA, 630 bp, Zea mays
cccacgcgtccgcggacgcgtgggaaactccaagaaattgttctacaaaagaatggagagtgaggaaggagaaagccttgatggtgaactctctagtaaaatcatacataaatgtggcggcataccattggctatcattgcaatagctagtttgttggttgaaagatcacgtgaggagtggccagaagtgtacgacaagattggtcttgggaatgaagacaatacagcaaagataatgtcatacagctactatgatctgcctccttatctcaagccatgtctgctgcaactaagcatatatccagaagactacctcattaatgcaaaagttgcaatatggatgtggataggtgaaggtctagtccatcttgagaaacaagatgttagcctatttgaggttggagaaagatacttcaaggagcttgtgaatagaagcatgatccagccgacagaggacaaatatgatcggtttgtagaagggtttcgtattcacgacattgtgtttgatctcatctgtaagttgtccaaggacgaagacttcattacccttagcgggcaacattcatctcaggatagtttaagaagagagacgaaaactcgctcagactgcagactacgtcggctggccgt

SEQ ID NO: 267954 - DNA, 434 bp, Zea mays
gcgtacctgatccacgatgcatgtgtccggaaaggattttcaggctgggaactggcgagtgtcatcttcattgctcctgtttgaatgagctatggggatggtcttgggccaacgttgtgatctgtaagtgaaaagcaaggtggtcgacaattcgggttggttaactgcctgcccctttcgaagaaagggggaaaattatccatgtgaggaaaaggctagggaaaatttgtggatagctgtacagtgcaacacttagatttgtatttaaccaactgaaatgttttgttccagttataaacgtttaaatcaatctataatgttgtttatataggtggaattttcctaaaaaaaaaaattataaattgtttaaattatattatatattatataaatggggcggccgctttagaggttccaagcttacgtactctttc

SEQ ID NO: 267955 - DNA, 480 bp, Zea mays
tgatggccagctggcccgtcagtgccccaagtcttatacattgggcgagaggggtggggctcctgccttccatgatgttggcgctgccttccgtggtgttggcgttcccttccgtggtggcctcagtgacgtgatctgccgggcctgcaaccagattggccatgcgagtcgtgactgcatggctggtgctttcatgatctgccacaactgtggcggccgtggccacacggcatatgagtgtccctctgtgagtctcattgagaggttccctcctcgccgtttctgaaggacgtccaagggctatccagatgactgttgttttcagcccattgtgtcaagaacactcatttccgttttcttttttttttccaaaccctaatggattctagatctttcagattctcaacgtgtcaggcactatttgtgattccctaatggattctagatatttcagattaataactcgtcagccccatttat

SEQ ID NO: 267956 - DNA, 734 bp, Zea mays
caaactgaaagcacaacatatatgttttttttggcaaatggatgtcatgcaaatttatttgcgcaaatttactcttcctgtccaacttgtttcaccagctgcttactttaatcgtgttaaccatgctttccctttttaaatattcatgtggtaccttagtcccctgtttctaattttacagtgaagttaatacttaatagtatttatctatttgggactacaggccgcaggagatgctacccttcaagttgaccatttcacattttcaccaagcatcgctgacaatatgagaacagcttccttagttatcagccatgcaggttcaggaagcatatttgagacgctgcggctgggcaaaccgcttatcgtcgttgtaaacgaggatctgatggacaatcaccagagcgaactagcagaagaattggctgaaaggaagcacctcttctgcgcacgcccacaaacactgggagagaccatccgggcaatggacctggagacgctggttccttacgagccaggggatgccaagccagtcgtcgccctgatcaacaggtttcttggcttcccagttgactgacgaataaatgacgatgtctccgttagggcctatccggtttttcttcaatccatgtggattagatggtattgtgtcggtttaattccataataaatcaaaatacatgccaaatccactccaatccatatggaatcatgtctaaacgaataagctctta

SEQ ID NO: 267957 - DNA, 562 bp, Zea mays
tcggtctgtagcggtcgaaactcgaaagggacaaagcagcgagcggcgccgggcgtccccctcccttcctcgcccctgatctacgccgatcgaaggccgggcggcgatgcttccttgcctgcacctctcggtccaacacacagattagatcagcgtcgaggacgtccgctgctgctccctgtggctgcggttttgcagcataagaaatatagctacacacagctcaatgcttgtcaggatcgatggcagatagggagcatcgaacagtatttgtcacggtggggacgacatgctttgatgctcttgtcatggcggtagattctccagaagtgaagaaggctgtattgcataaaggttatagtaatcttcttattcagatgggccgaggaacatatgttccattgaaggtctcacgagatgcatacccttcaagttgatcatttcacattttcaccaagcatcgatgacaatatgagaacagcttacatagttatcagtcatgcatgttcaggatgcatatttgaaacacttgtactctgcaaaccactaatcgctgttgtaa

SEQ ID NO: 267958 - DNA, 569 bp, Zea mays
ggggcgcttctttttaggtcgtgatgctaaaaaatgatcagcacgggtgcccttttgcaactcagctgttctgcatatctggatcaatatgcttttaactgcgcactcaaaagccaggccttgcgattgacaaagttttttgtttgaaatatcttgtctgcctatgttatttattgttttgtttctcaagatttagcactggcaggttcaggaagcatatttgagactctgcgactcggcaaaccactaatcgttgttgtaaatgaagatttgatggacaatcaccagagtgaattagcagaagaattggctgaaaggaagcatctcttctgtgcacgcccacaaacattgggagagaccatccgggcaatggacctagagacactggttccttatgagccaggggatgccaaaccagtcgtcaccctgatcaacagatttcttggctttccagttgattgacgaatctattcggttgttcttcaatccatgtggattagatggtattgcgtcggtttaattccatagcaagtcaaaatacatcctaaacccactcaatccactccaat

SEQ ID NO: 267959 - DNA, 1473 bp, Zea mays
tgccctctggacccttggattgccgttccagataagagcaagtatgtggatctccagaccctcaaattgcaagagaatcctgaggatgttccaactggtgagcttccaaggaatgtgctgctttctgtagataggcacctagttcagactattgttccagggactagattaactgttgttggcatctacagcgtgtaccaagcatccacaacccagaagggtgctgttggtgttaagcagccttacattagagttgtgggtttagagcaatctcgagacaataactcaaatggcccctcaaacttcactcttgatgaggaaatggaattcaaagaatttgcacagaggccagatgcatatgccaagctatgctcaatgattggtccttcaatttatggtcattctgatgtcaagaaagctattgcatgcttgttatttgggggatctaagaagaggctacctgatggtgtacgtttaagaggggacattcatgtcttgcttctcggtgatccctccacagcaaaatcacagttcctaaaatttgtagagaagactgcacctattgcagtatatacatctggcaaaggatcgtctgcagctggtcttacagcatctgtaactcgtgatagtagctcgcgtgagttttatttggaaggaggagccatggttttggctgatggtggagtagtttgtatcgatgaatttgacaagatgagacctgaagacagagttgcaattcatgaggccatggagcagcagacaatatctattgccaaagctggcattacaacagtactcaattcaaggacttcagttcttgcagctgccaatccaattgcaggacgctatgatgatcttaagaccgcacaagataatattgatctgcagacgaccattctttctagatttgatctaatctttatcgtcaaggatatcagaatgtatgatcaagataagcgaatagcaagccacattatcaaggtgcatgccagtggtgctgcagcttcatccacaaacacagaggggagtgaaggagagaattggctgaaaaggtacattcagtactgccgcgcaacatgcaaaccacggctttcagaaaaagcagctgagatgctgcagaacaaatatatcgagattagacagaaaatgaggcagcaagctcacgagacagggagggccgcagctatacccatcacggtgaggcagctagaagccatcatccgtttgagtgaatctcttgcaaagatgagattgacaagtgtggctacaccggagcatgtcgaagaggcattcagactgttcaatgtctccaccgttgatgctgcaagatccggaatcaatgagcatttgaacctgtcgccggagatcgcaaatgaaatcaagcaagcggaggcacaaataaagcgaagaatgggcattggaagccacatatctgagcgacggctgattgatggactaaacaggatgggaatg

SEQ ID NO: 267960 - DNA, 560 bp, Zea mays
ccccaagtgccccaaccccgttcgtcttccttcgtccgaccgtccctcgacagggccgaggcgcaacctagcagccgcccacacggcgcgacatccactggcgcaagcgcaatccgcaagggccaacggatcgccggccggcgcgccgccagcctcctggctcggccgccccgcggctaacccaggggcggaaaggccggccagccgcccacaccccacggctcatccggccagccaggcggaaacgaccgtaagagggaagccgcagccggccgctgactccgatcccacctctagtcaaccacagtcagaccgatcctcctcgtctgaccacgacggccatctcgcacgcctacttccactcaaccacataagtcttttctgccaggcctaacctttcccctgccccgcctctactggttttgcacagtgccgtgacgtgggaagacgtggagatccaacggaaattagatttatttcttccttcttcggtgccgaactcaaaacttcccttctatgttcctcagcttgcgtaagatccgtctgggttgtccgcctcc

SEQ ID NO: 267961 - DNA, 442 bp, Zea mays
gagataatagggtttgtggtgttttgaattcttttgtcaagcgaacatccaatggaaagcatgtgagttcattgccaccaaagcccttgaatagtgctgcagccgccgtgcagtctaagcctagtgttactccaaaggagcagtttgttactgctcggcggcaagatttgcctgtaagttcaaagcagggagcagacactaagtccgagaaggataatttcacagtattacataaggctggcaatggtcctgttgtcaaagaacaatcacttgatgcccatgcaagcaaaagtaaagctcaaaatggaaaggccttgcctagtaatgggggatcgctcgctaacatgttacgccgtgcatcaacaaaacctaagcctgcaagtaccactaattttacagctgtagcaagtgttacagctactgctgatgcacaaatttgtgc

SEQ ID NO: 267962 - DNA, 1287 bp, Zea mays
cccacgcgtccgcattcccactgctcggattgctttccccacctccaccgccaccagaccagatagcaagcaaccgacccctcctcgctgtattcgcagggaaggagaagatggagcctggccagagcgggactgagcaggcctctccacgcgggaacgattgggaggtcgtgcagctcaccgcgtccgcatacgccgccgcgcccgctccgaggaagcccgagccctccgacgaagcggaagctaagagatacggcgcaaagggggacgatctagccgccggcctactcatgtccggccacttctccgtgtctcagagcgaggtcgagagcctcctcgtaggcgccgacaccaaagaaccaccgcccaaggacaaggaggagccttgcgagcatactaagctgctggaggacgacgtccccaccatcccgttcgatgacggcaaggcgctgaaaggcatgggtctggtcggggaagagccggccgggttctcgtcgcctgtctacagctccatcacggagagcaggagtgacaagaggagcgaggagcctactactctgcatagtttcaaccccgtgactggctcaacaaaggtcgtctcacctgacgagcagagcgagcctgctgctgggtctgggtccgggtctgggtcaggcccgcgtgaagcgtggtggaagaagcagcttctctccctttacaggaacgccaaggagagcaagcatctctggcctatcgtcgccaccactgctgctttggtgggcctggcgtatctggggcggcgctggcataagggcaggctgcactttcagctgctcaagatatcgccttctaccaacaaggagaaaatcagcgacgcggttggaccgttaaaccgcatcaacgacattctcgttgctggcaaccacccaagtcacggtgtccatgggcatgcccgtgcaggctgaatgcagtcagttcgcgaacccatcgggcgtcctggacccatatactatcatgtgtcgctttgagaatcggctcaagacaaaccatcgggcaggactggagtagttgtccaaggactgaggatgtttatgcagacacaagtatgtttggtggctcgatgtatgtgaattccaaaactccatctgggtatgtaaatatttgtatgggtttagtttggttgctttttcgtttggtcatctcatgaaacctctgctggtggtttccttgtctatattactgtcttatttggggttcgttcatgcatgcatacatgtgatggggcataatatcactggattttatttc

SEQ ID NO: 267963 - DNA, 528 bp, Zea mays
cggacgcgtgggctgtggacggcgaaaaccctagatctattacagcatcaatgagaacaggatggcagaaacattcgacgtggtttcggtgcacgaccatgagctcaaaatggcgaccttcgccttctacgcaaacaaaactatcaccaaagctccgcactcaagcttgcatggccacagtaccatcctagcctacgaactggtgttatcctaattgagcttttcttttcgtcaaaacatccttggcccctcttccctagaggttggctcttacctccgtttttctggtttctcgtgccggaattaacgttcttgaccttgtaaggccctccttctatgtctacatcctcctcgcacctgatgtttctttctttcttgttacatgcgggatcagtctcatcattgccatgtttgccagactcccgcgtctacctactttctgctccattctatccctcctgagctagttgttgatcccatgtaataataaccatgtttggttgatataaaaaaatgttagttttgttt

SEQ ID NO: 267964 - DNA, 740 bp, Zea mays
agccactatctgctacaccagtggcactactggcacaccaaagggagctgtacttgctcatgagaacttaattgcaaatgtagcagggtcaagtttaggcattaagttttacccctctgatgtgtacatctcgtatctacctttggctcacatctatgagagagctaaccaggttgcattgcttcactatggtgttgccattggattctaccaaggggataacttgaagctgatggatgatttggctgttctgagaccaacaatattcgcaagtgttccccggttatataacaaaatttatgctgcaattacgaatgctgtgaagcagtctggggggttgagagaaaggctgtatcatactgcatacaatgccaagcgacatgccatgataaatggtagaaacccatcacctatgtgggacaagttggtatttaacaaaattaaagctagacttggtggacgaatgaggcttatgacttcaggtgcttctccattgtcaccagatgtcatggaatttttaagaatatgcttcggtgaagttcttgaagggtatggaatgacagagacatcttgtgtcatcagtacgatgaatattggtgacagatcaattggacatgttggatctccaaatccttcttgtgaggttaaacttgtggacgttccaaaaatgaattatacttccgaagatcaaccctatccttgtggaaagaattgggttaagggacctataataatctggg

SEQ ID NO: 267965 - DNA, 1092 bp, Zea mays
tcctcacgcgtccgggcgaggacaacgtcaccttctccagcccccgcccccgcccctgtgtaggagtaggtgtagccgcgtaagcggcgtaggcctcagctcggctcagcagccgcctcgctcgaaccagaggagccaagcagaggaagcgaggcggcgggggcggagatgtcggcggggctggtgaccgacgaggccaccgtggggcggctgtaccggatccggcgcacggtgatgcagatgctgcgtgaccgtggctacctggtggtggaccacgagctcgccaccagccgccgcgacttcctccgcaagttcggcgagtccttccaccgcgaggacctcctcatcaacaagtacaagaagaacgacccatccgaccagatatatgtcttcttccccaacgatgacaaggtagggatgaagcacatcaagaagtacgtcgaaatgatgacgcacgagaacgtctccagagctgtgctggttctccagcagaacctaactccgtttgcgaagtcgtttctcatagagctggagccgaagatccatctggaaattttccaggaggccgagatgcttataaacatcaaggaacatgtccttgttcctgagcatcaggtgctcacaaacgaggagaagaagacgcttctggagcggtacaccttgaaggaaactcagcttccaagaatacagatcacggatcctattgctaggtactacggcctgaggcgaggccaggtcgtgaagatcatcaggcccagcgagacggcgggcagatacgttacataccggtacgttgtatgacagaacgtcagaacactgaagaagaagagaaccacagatatgtcaaaaaaaaattcaagctacacataccccacgtgcttgcagacatctgtatcgctttgtagcagcagccactggtaacgatctgtggctgatgtgtaagtgtaagtggattgaataagctgagtcagagcatacgagaattctcatgttgtacacttgtgttttatgaaccgcataaacactcacgacgataaaagaagcctgtttttcggagcgacagaagctcctgcgatcgggatttcggattac

SEQ ID NO: 267966 - DNA, 442 bp, Zea mays
tttgacatggtagggatgaagcacatcaagaagtgcgtcgtaatgatgacgcacgagaacgtctccagagctctgctggagaaccagcacagctctggagacgttctccagcagaacctaactccgtttgcgaagtcgtctctcatagagctggagccgaagatccatctggaaattttccaggaggccgagatgcttataaacatcaaggaacatgtccttgttcctgagcatcaggtgctcacaaacgaggagaagaagacgcttctagagcggtacaccttgaaggaaactcagcttccaagaatacagatcacggatccaattgctagatactacggcctcaggcgaggacaagtcgtgaagatcatcaggcccagcgagacggtgggcagatacgttacataccgctacgttgtttgacagaacgtcagaccactga

SEQ ID NO: 267967 - DNA, 1858 bp, Zea mays
tgacgaatgagatagctgatgaaaccgacagagaaacaggccgttcaaagcacatatcacctgtccctatccatttaagcatattttctccatatgttgtgaatcttactcttattgatcttcctgggcttactaaagtagccgttgagggccaaccggagaatattgttcaggacattgaaaacatggttcgctcatatattgaaaagccaaattgtataattctggctgtttccccagccaatcaggaccttgctacttctgatgcaatcaagatatcacgggaagttgatcccaaaggtgaaaggacctttggtgttctcacaaaaattgatctgatggacaagggtaccgatgctgttgatatactggaaggaagatcttaccgtctccaaacaccatgggttggtgttgttaatcgatcccaacaagatatcaacaagaatgtggacatgattgctgctaggcgtagagagcgagagtattttgcaactacaccagaatataagcacatggcttctaggatgggatctgaatatttaggaaagatgctttcaaagcatttggaacaagttatcaaatcaaggatcccggggatccaatctcttataacaaagacaattgcagagctggaaactgaacttaatcgacttggaaaacccattgctaatgatgctggggggaagctgtacacgatcatggaaatatgccgtatgtttgatggtatttacaaagagcatctggatggagtgcgccctggcggagagaaagtttaccatgtcttcgacaatcaatttcctgtagctattaaacgattgcagtttgataaacaactctctatggaaaatgtgaggaagcttataacagaggctgatggataccagcctcacttgatagctccagaacaaggatatagacgccttatagaatcttgtcttattagtatcagaggtcctgctgaggcggctgttgacgcggtccatgcaattctcaaggaccttgtccgcaaggctatcaatgaaacacatgaactgaagcagtttcccacccttcgtgtggaagtaggcaatgcagcttttgagtcattggatagaatgagggatgaaagcaagaaaaatacattaaagctagttgacatggaatgcagctacttgacagtagatttcttcaggaagcttcctcaggatgttgagaagggtggaaatccaagccactctatttttgatagatataatgactcttatcttagacgaattggacaaactgttctgtcatatgttaatatggtgtgttcgaccttgaggaactccatcccaaaatctattgtttattgccaagtgcgagaggccaagcgctcgctgctcgatcacttcttcactgaactgggagcaagagagatgaagcaactttccaagcttctcgacgaagatccagcagtcatggaacgcagaactaaccttgcaaagaggctggagctgtaccggagtgcccaatcggaaatcgatgcagtcgcatggtccaaatagccctgatggctaagatatctgttcttacatgttctttatccctcgtctggcgattgtctcccctattctggggcatatatagctgatttttgtctgttgtaggtcaggtcattctctagattaccgcagctgtacggtgtcgtttagttgtgcttttgttccttgtacttgagggtctaggggacaccaggctgctgtacgcttgcatcacggacaagttcctaaattgtgtttttgttaccatgcattcttttattccatctaaaaaaaaaacaaaaaaaaaaacaccaaaaaacccacgcgtccgcccacgcgtccgcccacgcgtccgt

SEQ ID NO: 267968 - DNA, 438 bp, Zea mays
cggacgcgtgggaagagcagctcttcgcttctcagggagggaacattatcctagctcagagagagaacgaatatggtgattattatgaacaagcgtatggagctggcggcaaaccatacgccatgtgggcagctagtatggctcttgctcaaaacactggcgtcccttggattatgtgccaagagtctgatgcccctgatcccgtgataaactcttgcaacggtttctactgcgatggattccagccaaattcgccaaccaagccaaaaatttggactgagaattggccaggatggttccagacttttggtgaaagtaatccccacagaccacctgaagatgttgcattcgctgttgcacgttttttcgagaaagggggcagtgttcaaaattactatgtgtatcatggtggcacaaattttggtcgcactactgggg

SEQ ID NO: 267969 - DNA, 606 bp, Zea mays
accagcgttgtctcccactcccaagtcccaactcccacctcccccgcccgccgttcaaatctccctagcctcccgaagtaggcaagtagccctccctgttccatcgaacccagcagagcagccagccgaacaacgaagcatgccgtcgaagccgaacgccgcgtcgcgcctcgtcttcctcgctttcctcctcgtcatcagcgccgccgcggccaacgatgacgccgcggcgcggcggacgatggagcagttcgccggcttccccgcctccgacgacggcgagggcccttccagcgacttccacgtcgactccgagggcctccagcgtcagatcgatgaactggcctcgttctccgactcgcccgcgccgtccgtgacccgcgttctgtacaccgacaaggatgtgcaggctcgaaggtaacccagttgagattatccgtcgtcgtgagaacaagcgattgaacgaaagaaccgactcggcattagtcagtgtgcttgtaatcgatttggctgtaaacgtgccacgcttgagtgacctttgatgctggtgacatcaacgatcaatcttcatcgacttcagttgcaccattctgggtcagatagagt

SEQ ID NO: 267970 - DNA, 1290 bp, Zea mays
gtaggcaagtagccctccctgttccatcgtacccagcagagcatccagccgaacaacgaggcatgccgtcgaagccgaacgccgcgtctcgcctcgtcttcctcgctttcctcctcgtcattagcgccgccgcggccaacgatgacgccgcggcgcggcggacgatggagcagttcgccggcttccccgcctccgacgacggcgagggcccttccagcgacttccacgtcgactccgagggcctccagcgtcagatcgatgaactggcctcgttctccgactcgcccgcgccgtccgtgacccgcgttctgtacaccgacaaggatgtgcaggctcgaaggtatataaaagggataatgaatcaacttggccttgttgttcgagaagatgctgttggtaacatatttggccgctgggagggttccgagcctggactaggagcagttgcaactggatctcatgttgatgccattccattctcaggcaaatttgatggtgttgttggagttctgggtgctcttgaggcaattagtttgctgaaaaggtctgctttcctgccaaaaagatctttggaggttattatgtttacatcagaggagcctacacgatttggaattagctgcttgggaagccgcttaatggcagggattgaagaacttgctcaatccctccgaaaagtagttgacaatcagaatgtgtcatttttggatgctgcagaatctgctggctataagttgaatctagaggacctgcatagcgtatttttaaagaccgacaaatactctgcttttatagaactgcacattgagcagggtcccatcttagaaaaggagggtatccctattggcattgttactgcaattgctgctcctgcaagtcttaaggtggactttgaagggaatggcggtcatgctggagcagtgctgatgcctgcaagaaatgatgctggactggcagcagctgaattagcattagcagtcgagaaacatgtcctggaatcaggatcaattgatacggttggcaccgttggtattctgcagttacatccaggagcaatcaatagcatcccaagcaaatcacacctagaaattgatgtaagagatattgatgagaagagaaggaatgatgtcattgagaagattcgccagtctgcagcacatatttcaaagaaccgtggagtagagctttcagaatttaagatcatcaaccaggacccacctgctctatctgacaaatcagtccgttgacgcaatggaatttgctgcaaacacgttaaacttggtatacaaa

SEQ ID NO: 267971 - DNA, 347 bp, Zea mays
  unsure (1)..(347): unsure at all n locations
ccttggccccggccacattccggaggctggccaacgccaaccggcccttgcccggccgcaggctggtgttctgatcacccccccggccattgccgggacttgcttgcagcagagcggagggaaaataataattattgtgttttaacttaaatgatttgcgtttcgtctcttgtactgcgtcgagcgtcgtcttcaattagcgagtgatgtaaaattgtgactgctaatctggactgttaattactggtgattgcaccagccatgtgtaacgtcgatgacgatataatcatggaccagtttttcgcccacccccccaaaaaaaaaaaaaaaaaaaaaaaaaaaaanaa

SEQ ID NO: 267972 - DNA, 1572 bp, Zea mays
  unsure (1)..(1572): unsure at all n locations
tttgttgttggttgctttagtaacctgaacaccagcgagatcgaccatgctaaacctctagttatctcgcataatggtgctagtggtgactacccagactgcactgaccaagcttatgaaaaggcagttgccgatggtgcggatgtcattgactgtcctgttcaagtgactaaagatggcatactgatatgcatgagctctgttgacctaatggatgttactactgttgcaaaatcacaatttgcttcgcaagtaactaccatcaacagtctgaaggctgggtctggagtcttcaccttcaaccttacttgggatgatatttctaagaacctacagcccatgatatcgaacccaatgagcacctataaactgtacagaaatcccagaaacaagaatgcaggaaatttcatgagattatcagactttttgacgtttgcaaagggaaaggatttgtcaggaatcatgataactgttgagcatgctgcattcatggcagagaagcttggatttggagtggtagacgcagtggtcaaagcacttgatgactctggttatagcaaacagactgcccagaatgttatgagtcaggcatccaacagctcagttctggtgaagttcaagcaggaaaccaagtacaaccttgtctacatgatcgaagaaagtgtccgagatgccgcaccttcctcccttgcggacattaagaagtttgctgatgctgtttctgctggcaccacatctgttttcccggaaacccattactatttgacgaaccagaccaataagcttgttccgacccttaagtctgccggcctccaagtttacgtttacgtgctcatgaatgagtttgcttcccagccaaaggacttcttcgcagacgccacttcacagatcaatgcttatgtgcaaagtgctaaggtggatggtgtcatcactgatttccctgggactgctcacagatacaaactgaactcctgcacgagcatgggaaagaacatgccactattcatgcagcctccgcaaccaggtggcctcctttcaaccattctcccagatgcacagccaccagcagcagcgccaatgccgctcttgacggacgctgacgtcgcagaaccagcccttcctccggtcagcaacaccaccacggctgcatcgccttcgcatgccgccctcagaatgcgaacccatgtcttgatcctcgccacattgctgatgctatgtgcttccctcctcatctgaagatagtcctgctcaacatcatacgcggcgtggcgcattagagctgaggattttcacattgagctgctaatagcaattctttccaccatttatgtagcgattttttttcttgttctgtccggtgttttgaaggatggatggatgttcagcttgatacctcaacggtgacacttgtgtgtgctgccgctgcctctaggtatattttggtacatatatgtggtgatacattgttcaggtcatcttttctactgccaaaccctggcccggagggcaaaaatattcactgcanactgttgtaactgatgttaggcatacacanaatcatctcaaacatan

SEQ ID NO: 267973 - DNA, 665 bp, Zea mays
ccgggccgaccgcacgcgtccgggcatcactggtcctccttttacaacaccattatactaactgaactccagcacaaccatggggaagaacatgcctgcaatcaggcgaggcatcctttaccagattgccgatgattaaaccatttcccctagcctcacacatctccaactacaagacctatgacgctcttgactgacgcatacgtggcaaaaccagccctttctgctgtaagcaacaccactacggttgcatcgtcttcacatgccgccctcagaatgctaacccatgtcttgaacatcgccacattgctgatgctatgtgcttccctcctcatctgaagatagtcctgcttcaacatcatacgcggcgtggcgcattagagctgaggattctcacattgagctgctaatagcaattctttccaccacctttatgtagctatttttttcgtgttctgtccggtgttttggaggatggatggatgttcagcttgatacctcaacggtggcacttgagcgtgctgctagctgtctctaggtacattttggtacatacgtgtggtgatacattgtccatgtcaccgtttctactgccaacctgcctgtggagggcaaaatattccctacaaacatacagtttagtaaggctgtcaggggttctatga

SEQ ID NO: 267974 - DNA, 667 bp, Zea mays
  unsure (1)..(667): unsure at all n locations
caacagcaagagcgaccattctaaaccacaggccagctcgcacaagggcgctagcggngaccacccagactgcactgaccaagccnatgaaaaggcaggcgccgacggcgcagacancaccgcacggccggcncaagggaccaaaganggcagacggagacccaggagcccggcggaccgaagggacggcaccaccgccggaaaaacagcancgacttcgcaagcgactaccataaacgatctgaaggctggacctggagtcttcaccttcaaccgggcgtgggatgatatttctaagagcctacagcccatgatatcgaacccaatgagcacctataaactgttcagaaatcccagaaacaagaatgcaggaaattttatgagattatcatactttttgacgtttgcaaagggaaaggatttgtcaggaatcatgatatctgttgatagaagcttggattttgagtggttagacgcagtggtcaaagaacttgatgactttggatatagtatacagactgcccaaaatggtatgagtcactcaaccaacaacttattgttaaaaaagtttaagcacgaaaccaataacagtcttgattacatgatagaagaaagtgtcagaaaagccgcacctttatcccttgcagactattaatatgtttgctta

SEQ ID NO: 267975 - DNA, 451 bp, Zea mays
gctccgtccaggacgctgctaccgatcggccagtccaggtgcatcgagtacttccatttcttgtgatgagcttccgggaaggcaagctggggctcgggcactgcagcttggtgtctgcttgtttggagtggcaagtggagtttgtatctggagctggaggcgaaggcgaaaatgttgctgccgtcgtcctggcctcctggcctgaactacacaggccgggcggggcccaatcagtatactgactgacctgcattgcattacatacagagactgcctgctgcttactgtactgtacatctttgcatttgggttcaagccacgttttggtgcttggatgatgtgaagaatggtattggactgttggggtttctttatctagcaatagcgtacatgatttgatacgacgtacaaaatgactgcttgccagtgaaaatatatccatttgttgttt

SEQ ID NO: 267976 - DNA, 364 bp, Zea mays
atgatctactcgtatgccttgggcaggagcaaacgaaggtcgagaagctgagcacaaggctggcagagctcggggaagatgtggatacccttctgcagggtattggcgatgacactgccattccggatgatgacgatgaagatgatgaagagtgattggtttatgtaacctgcaggtctgctggtgtaatctaccttcatgttgggtcatgatattccgatggtaactggaaaatgtacagtggatgacaaatgcaccgttccaagtttaagttatttctagagaatgtgactaaatagcctcttgttaaatttgattgtctgaataactttttatattacccctgataaatagccccttgttg

SEQ ID NO: 267977 - DNA, 1246 bp, Zea mays
gcggtcgcgcgccaagtcgtactcgttgccttttcacagccccgcgccgccgcctgtggcccgtggccaaggaggaatccaagaaggagaagaagaaggccaaggccaaggtggccaatggagccgccgccgccgccgccgccccggtccctggcgcgagggccgcggtggtcgcctccgtcgccgccttcctcgagtccgctgggctctcgcgcacgctcgtcgccctccaatccgaggccggcctcgaggccggtgcgtgggggtcgtcacaggtgaacttggaggagctggttgccagattcttagagtcgagcaattcaactcgggcggctgccattctgggaagcgatgagcaagaccaggaaaatgatgatatagcaggagaagttggcaaggaaaaaaagaggagcggcacagaagccggtgagcctgagagcaaggcgatcgagcctttagctgaggaaaagccgactgaaaatatggacggtgaggctaaagagaagaaacaaaagaagaagaaagacaagggtgacccttcagctgcgaatgctgctagcgagggaacaactgaaattgtgaagaacgccgaccagaaggacgatgaggccaaggagaagaaacagaagaagaaggacaagggtgacccctcagctgcgggcgctggcagcggcgaaacaactgaaacagtgaaggaggatgatcataagcttgatggcaagaagaagaagaaaaacaagaagcagggaaaggatgatgatgtcgaagctaggctggaaaaggcagaattagcaatacttaacaagtttgaggcagcagaaaagctcaatggaagagaggtagaaccaaaaggtcagaatgacagtgctgatgactgcagtggtgctgtggaaaggaaaaagaagaagaaagagaaatcatctgccgggacttcagagaagactgatgcaggaagtgcacctgctgaggctgatggtgccaagggaaagaatggtgctgtagaaacagtcaaggatgataatgagaaaaaggccaaaaaaaagcggaagaagtctaaccctgaagaaactgttcatgtggaaggtaaagaggctgcagggaaagattcaatcccaaaacaagatgatgcgaacaagagtgtaatggagattgaagaaggtaaccaagggaagtcgtcaaatgaaaatgcagttgctggcaaaaaacggaagctagaagaaattgagggaacatttcccctgtgact

SEQ ID NO: 267978 - DNA, 476 bp, Zea mays
atagaatgatgagatggatggagcgagcacagaaaggggtagaagtcgcgaagaagacaaagaactggctcttgggccggcaaggcttgatccttgctattgtcatgctgatcctagctttcatccttcatcagtttgggtttatcggcagatgatgggggtgacttgggtggctgcatcagcatggaaatagattattcgatggcgatgcagagttccctcttgctaacaactgcttaaaagcgctttgggggaaggccggattacgagaattctttgtatccgtatcttatgaaagtgtaactctgtccataaagctatttcatcctatttttaccagcaaaggtagtagaaaggaatcgagccgaaactgttgtgataacaagacgacatgtaatatgataatatccttgtggtgctttcagttttaagtagcagttttgtttaataaagcatatgcaaaggtgaagtggacc

SEQ ID NO: 267979 - DNA, 1410 bp, Zea mays
cccacgcgtccgccgcggagggggcagacagagagtaaaggaggcaagtaggcgactccggcgagagaagtgcgggtgcggccatggcggacaagccgagccgcgcgctggtcgtctacgccgccggccacgccgcggcgctcatccccccgccgggctccgcagccgcggggagccacctcgacgcgttcgcctcccgcgcctgctgcggccttctcaccctacgctccccgccgacttcccatcctacgaccggcaccgaggataatagcagcacgattttggaactggcgcactgctcgacgtttacgatcatctctaccccggaaagaatgcggaaagtggtcaagaagttgcccaagtggatccacaggagctcgtggttcccaagctgtttgagaggtttatgggcctgagagctgccttggtcaccagttgcccccatgtcagctccttcgcagcgaatcttggtttccatgtttttaaaaccaatgattttgccccacaatctggctcggccagcattactaaagaggatggattaatcaaaagagcatttgatcttctaggattctcggatggggatgtgcaggaaacatctgaattcgatctagtcttcatgcatgttgccatggagaacacaagcagcaagttaggaaagttaggaatgaagacagatatcaatcggctcgacaaattagttggtgcagtcttggaatctgcgcctgttggttcagctattgcttcgcgtattcatgtatctgtgattttgagctatgggtctgcttctggaaataaggatgagttttcccttttaacctcttcaaccgaaacagattcagacttgaatctactgcgtccacgccagagctacacaatgaaaacagggcgtacattagatgatgtcagacttcatcatccaattttgctggcacagtggcaggacagagtaacacgtgttgatttggctaaagggttctcttttgaggagtttatgaagcgtggtggaaaccttgccatgcttgctgagcgcttcctgcacgaggtggcatttaagctctggaaagcgcctaaatatggggcttgaggagggtatccagcgttgactgacttggcgtcgcggataaataatcgaagcaccagatgagttgtcgctttgtaacggaaatgacttgagtgatgccagacattgtggcatgtgagctttttatgtgaagtgtaacgtggacaggccctgatgcgataaactgtttggacatcgttactggttcagccaatgagaacctgtagcaaaacaatatgatgttttcttatggtagtttggaatggatggagttacatgcattgagcactgtaattttgataatataagactgtctccaacagcctctctattccactcactatttc

SEQ ID NO: 267980 - DNA, 331 bp, Zea mays
cagacgttcaggttcgtctcgaagtacagacgctacaagcgcaggacgggccatgacgcgtccaagatggcgaaagggtcaagcgaggcaaagcagcagtaacttagtactagtagtttagcacgcaaaaccaatggcgcccttctgaaatgagtagccttggaagggacaggaggaaaacttgtagattccattagcagtttagcacccaaaaccaatggtggtctctgctcacagttccattaattgctagttgaacgggttcgttggagcccacaattaggttggttccctgtgagtaatttgggtaatcattaagacattctcgtac

SEQ ID NO: 267981 - DNA, 784 bp, Zea mays
tcaaaaagagatgcttcagactgtatgggaaagaaggctacccactggtagatatcatgattcgcgaaagtgaaccatcgcctaaggcaggagacagaatcctctgccgccatccattcattgaatcaaagagagcatatgttgtcccccagcatgttgaggagcttctacagtgctattggcctgggacatcagataaacctagagcagagctgccctccttggagaagatcagaagccgctgcatgcagcagcttgaaatgctgcgcccggatcacatccggcggctaaatccaacgccctacaaggtgagcgtgagcaccaagctgtacgatttcatccaccgcctatggctgaacgaggcgccagtaggtgaactgcagtagatgatgatcatataaaagaagtcttgggtcatctgcgatacagcagcaattcatcgaagaaaattagagctcttctgcacaacatcaacagttgagcccatggcaggattttgctccccaacttttcatctctaggcaccgggatagaggcaggttaatcaggttggctagtttatacgtcccttaattggtgggatgctatacacatcatcatcagaaaagaaccgaaatcatatggagccaaaaatgttactaggtcgtccggtgtttgtgctcgacggtgtcacatttgtttttctagccgatcgtgcatatggtcatataaaacactgcactgttgattgtactgtttatatagtgaaatttgaaatgatagatggaataggagatagaatgga

SEQ ID NO: 267982 - DNA, 318 bp, Zea mays
acgaactggctgccgcatggaacgtgctgactccgataatccatgagatagatcagaacggagtagttcctgagctctacgaggctggggacagatggcctatcaatgcttaccatcttgctgctaaacatggggtgcgatgggatgacgactggtgagtcgatacatggcaaagattctcgatgcgcaacgagattcattaccaatttttgtcgttgtatcgcagtcagctgtacaatatgccttctgtaatcggcctgatcaaggactttcaaggagacatgccttcatggtgttatgcaaacatggtttctttcc

SEQ ID NO: 267983 - DNA, 730 bp, Zea mays
gtgattactatgagtactttggccctgattatactcttcatatccaaccaaaaagtgttgaaaacctgaataccacaaaggacttggagaacataaagaacatgatattggagaacctgtcaaagatagaacatgttcccagcactcaattccatgacagaccgtcagaccctgaagctccagaggagaaagaggaggacatggacaagaggccacctcagcgcagcagattatggagcggaggagcttacgactctgatacagaggatcctgacagcctgaaaagcgagggtaaagacgtaactgctaacttccagatgaaggatgaaccaaaagatgatctgtagaagtttcagaagtgcccccaaagttactgagttgtcaatgggatcgtcgacatgcatgttgaagagtggggacgcatctgaacctgtccgtgctgatatctgccgctgtgcatctgtaacagactgaacgttttgctggttccagctttcctgcgtgttggtaactagactagatatatggccctttggtgggtcccaaactgttgagctggagaaatgaagtgattattctcgcatgattttgtagcatgcatgtaatcattacccattagttcattaggctatcaacagtagtttactcatccccatattcaagcttccctatgtgcgcaaacagtgatttgattgaccatatgattaaactttgaagatggtctttgggt

SEQ ID NO: 267984 - DNA, 908 bp, Zea mays
atgctggatttttggaggggacatgcacttgtgctgctgtgggacgacgtctgaagtctcacaaacgtccatggtatgatccacatattatgaagcctgcacataataaggaagcaaagcttacaagacataccagacgtttatccgagattgagcaagggcggagttcatttgctaggttacatcttttgaagggtagaaacagtgacacgtcaactgtggagtcaggatctgaaattgatgatcttggtgctccgatcatgagaagcacagtggggtgtagtcgattggccccagttcgcgaagagatgcagatgagagcacgagactctgcagcttattgcagctgcggcgatcactttgtggtggtggacaaaacagttgactatggtcgaggaggatcaccgtcagataaaagcagtgcttcagaagtaagaactcatgttcggccactggatgctagcacagcagcccacgtggcaggtccctcaagtaacaggcgagctacagttgtgcctgaagaggtttcagatgaaggagtgttccgtcgctttgtcagactacttctggccttcattgtcaaagtctttgccttctttcacatagtacgtagtcagcaggaaacgagggtcaacaacctactacctcctgccgaaccagaactgatttctgacgatcatccggcagtagagactttcaatgtagaccacatcagtcctgtcatagagcgccttcagagacttgaagggaaggtcgatgagcttggcagcaagcctccagcgattcctgtggagaaagaacgatccctcttggagtcatgggataggataaaatgcatcgaatctgacctggagcgaacaaagaaggtgctgcaagccactgtgaggaagcaactggaaagcgctgag

SEQ ID NO: 267985 - DNA, 1117 bp, Zea mays
ggacccacacatgctggggaattattggctgtaactgttattgggcaacaaatccgcttgttttattcaaatgttacccagaacgaccaacagcgaacacaagacaactacgcgaccagaaaggcaggaacacgacgccagagcgcggacagacatgacgcgacggctgcactgcacccgcgcggcatttttccggtccggagcacgcaagcgcaggcggcaggtgtgagacgccgtgccgcccaaccgtctggttgctttctttctcctcgcggttcgttcgctcgcccgcccgctcctcgcctcaggcggtgatggagacgggctccgcctgcggcgcgtcggcgggcgcggcggtctccttggcgaggagctccgacaccctcgcggcgaggctcagcttcgcggccggcgacacgccgcgctccccgatgatggactccagcacggcctcgcagaggcgcttgttctcgatcgccacgccgccggctgctggcaccgacgagtccttggagaaggcgacggtgaggactccggcgggcgagtgcgtgaagaggatggaggcgcccggcgcgaaagtctctggcttgaacacctccctgaacttctccacggcgacgccctcggcgtccgtgtacaggccggcggccttccagaacgccacgcagttctccgtcactttctccgcgtactgctcgcccgtcagcgggaggatcatcgtcaccctcgtgaacttctcgaagtcgcccgtgacgacgtcgcggaagaaggcggcgtcggaggcgagctcgtcggccgtcttgccgccccacttcttggccagcgcgggcacggccgcgtcctccaggtacacgccgatggccgtgaacttgatgaagttgcctccgatctcgaggcctcgcacgcctgcgccgccgaggaagtgcgagccggcggagcccggcgggcgggccaccggcgggaagacgacgccgtcgaccaccacctccggcacggccatgttaaattccgcaccgcgcgagggaaccgggcgcagcgcaacggacgaagctgcaggctacggttgtggcacttggcaggccggggttgttgcgataaatatgcggggacgacccgc

SEQ ID NO: 267986 - DNA, 1108 bp, Zea mays
cccacgcgttcgcccacgcgtccgcccacgcgtgcggaagcagccaccaccctctccactgtgactccgtgacctgcctgccctgctgcacagcacagcacacacaccccgcacaccgcaccagctcagctcagctcaccaagacaatcaatcatggctcgcccgcgcagtgttgctgccgctgccgctgcccccctcctgctgctgctcgccgccgccgcagcggggctcgtgtccgccgcgtcgccggcagccagcgacttcgtccgcaagtcgtgccgcacgacgcagtacccgtcggtgtgcgagcagagcctggcgtcgtacggcgggtcgccgccgccgcggagcccgcgggagctggcgcgcgccgcgctgtcggtgagcgcggaccgcgcgcgcgccgcgtcggcgtacgtgggccgcctgtgcggcgccagcaacggcaaaggcgcgaagaaggggtcggggtcggcgtcggcgtcggcgtcggcaggtcccgtgcgcgactgcctggacaatctggcggacagcgtgggccaccttcgcgacgcggcgcatgagatgggcggcgccgggatgggccgcgcggggacgccggcgttcaggtggcacctcagcaacgtgcagacctggtgcagcgccgcgctcaccgacgaggacacctgcctcgacggcctctcgtcccgcgccgtcgacgccggcacgcgcgccgccatccggggcaaggtcgtcgaggtcgcgcaggtcaccagcaacgcgctcgcgctcgtcaataaggtcgggcctgggtactaacacggtgaggggacccaagatccaggcccaggcccaggccagataccacacccgctactagtataatactaggcgcctccacacctccacggcgttgggtgtttctcgttcgttaatagctcggtttgctttgcttgtgtttgtgtaagatatacattagttaagggcaataagcttgtactattatgagtggcggccgaggagtacagtacgttctcctctgtccgatcatgccatcattaacattaattaatgtagaaaaaaaaaaaaaaaaaaaaaaaaagggcggccgctcgcgatctaaacaagt

SEQ ID NO: 267987 - DNA, 1158 bp, Zea mays
atactcacgacatggagggaaaaactggatcaaggcaatggccatgacagcatcacttttcccatttatgtgctttggaatcggcttggtgcttaacactattgctattttctatggatcgttagctgccataccatttggtacgatggtggttgttttcatcctgtgggccttcatctctttccctcttgcacttttgggaactgttgtcggtagaaattggagtggtgctccaaacaatccctgtagggtgaagactattcctcgccctattcctgagaagaaatggtacctcacaccatctgtcattgcgcttatgggaggactgcttccttttggtagtatctttattgagatgtactttgtcttcacatcgttctggaactataaggtctactatgtttacgggttcatgttgctggtctttctgatactcatcattgtcaccatatgtgtaacaattgtcggtacatatttcttgctaaatgcggagaactaccactggcaatggacttcattcttctctgctgcttccactgcggtgtatgtttacctatactccatatattattaccacatgaagaccaagatgtctggattcttccagaccagcttctatttcggctacactctaatgttctgcctaggcttaggaacactatgcggtgccgtcgggtatcttggatcgacattgtttgtgaggaggatctacaggaacataaagtgtgactaagtgaagataatatcgccccattttgggtcagcgcagagaaaatgtatggcagagccttatttgattgagcgatcactgattctaaaaccaagaacgcaggtcattttgtgaaatatgatcgttgcttggcgccgagctgaaagccatgtttttctattcttgtccttctcgtttctctctgattccttctggacttggacaggcaacaaattttcatgttgaattagttatatatttaccggtggttgtcagttgttgacgtagttctgtagtatataccacaattgttatccttggccccaatgatacctcagattgatgggtataaactgtaacatttacattacctgatgtttgacgatgaacacagttccaaataatcatgttcggtactggaggatcgagatttttgagaggcaacatcc

SEQ ID NO: 267988 - DNA, 590 bp, Zea mays
gggtcgacgcattcggactgctggataatatatgaaacaaacatctcgtcttaccccttaacttgtaatagcctgtgcagtgtaaaaataagtattaaaccagccgcttagaaccatgtttgctttgtgaccctagaaaccagctaggcacaagcagcacctcggccccctcctcggcgagacgtctactttctcgaggcgtacagtgaccgctcacctctcgggcgtgcctagctcgtcatcggtctccaatgccacgttcgtgctactactccaatcgttgctgacccgggtgatctccactgacttccgcaaggagtgcgggcaccttcggtcccatccgatgttaaggcttacctcgcttatggtgttccacagagtgacatgaaactgtaatcacttatgcaaaagttgctagaccagcggcagagcatgaacatatggcgctttgtacatacaatgaatactgttgggaccatgcttcgtcgccgaaggtcctgcaaaaagaaacagcttcggctgaaggtgcttgaacatgctgccgaagacacagttcacgaagcttcggaactacaacatatccaaagacg

SEQ ID NO: 267989 - DNA, 431 bp, Zea mays
cggacgcgtgggcgaacaagcacttgaatcaccagaattcatgatctggactgttttgggttagaccaataaccgcaggaaaatgttagctcatcttacttaggggtaatttggtaactctatttttccaggacatttttatttttctaagagagaattaactaatttttcttagtaaaatagaaatcccttagaaaaatgaggttgccaaaccagctcttaaaaatttgcctacggactctgttcctctgttatttcctgcttgctatcggtgtgatcggtataccttaaactgattgtaagttatgctttagagtgattgtttatgaacaaaactagctaaataaataatataagtggaatataatttataaattataattttataatttatattatttttttaattattatttatattttatttaatt

SEQ ID NO: 267990 - DNA, 406 bp, Zea mays
ggaatgggccgggtcgactccacgcgtcggcccacgcgtccgacactcccctctcaggtgtttgtggataagattgagctgaatggttgccaggagaccgggtttgattgctttggttgatgttgatggaactcttacagctcccaggaaggtggtcacaccggagatgttgacattcatgcatgaactgcggaaggttgtaactgttggagctgttgggggttctgaccctatgaagatatcagagcaacttggcagcacagctaccaatgactatgattatgcattttctgagaatggtcttgcggctcacaaggtaggaaagctcattggaactcaaatcttgaagtcattccttggtgaagaaaagctcaaggagtttattaactttacaccttattatatt

SEQ ID NO: 267991 - DNA, 430 bp, Zea mays
cggacgcgtgggcgagcactcgccgccactcaccagcaaattcccgagccgccccttccccatctctttcgcgacccatttgatcgattcctgatggcgcccaaggccgagaagaagcccgcggagaagaagccggcggaggagaaggccgagaagaagccaagggcggagaagcgcgtgccgagcaaggagggcggcgagaagaagggaaagaagaaggcgaagaagagcgtcgagacgtacaagatctacatcttcaaggtgctcaagcaggtgcacccggacattggcatctcgtccaaggccatgtccatcatgaactccttcatcaacgacatcttcgagaagctcgccgccgaggccgccaagctcgcccgctacaacaagaagcccaacattaccttccgggagatccagacctcggtgcgcc

SEQ ID NO: 267992 - DNA, 538 bp, Zea mays
cagcaaaaaatacgaaaaaacagccgacaatcaagctgagagggcaaattggtggaggatggcatctggcaagcctaatgtgcttactcttgattatgttaacatcagtccattttcccttccagcaagaaggacaaaggaattaagagctttgattggatggaggtattacttcagcttattcttagagttgtcagatattgccatgcccttcataagggttgctatcagcaaagtgagctctgcggtgtcctacttctgggtgtcaatgattggaaggtctcttgggctgattttctcagggattagacaatcactaggctggaaataagcttatacggtcatacctgttgagttttgagtctgacttctgcgactgaatgaatgtctgttaggttatgcattgtaaatctttgagatggcggccatttttctccgcgttctttttcatctaagcgtgtgagaaagtccattgattttgtggacggaatatgttaatctgtggattactgaaatccatccacacccagtctttctc

SEQ ID NO: 267993 - DNA, 706 bp, Zea mays
cccccccgtccccggtcccgccggccgtcctgacctcggctccccgggcagcggcgcccggcgcaccacacaggctttctccaactatccgccctcgccatggccatgaccgtggcatccgcctggcttccgtcgaccgcctctcgccggagaatcttatcctctccgctcccttcgttcgcggctcctatctccatccacatgccacggcgggcgccgcctcccagtcccttccctcgaaagccgcgcctcttcgtcgcctccgcgcagctcgatttctccagagctgttcaaacagcatggagggtccgtaacgatgctgtggatgcaggaagtaatcgtgtcgcaggttcagttccacgaccaattgccaggataggtgttgcctttgctgctgtgtcggtcgcctttttccgtgtcaaatccattgtgtccactgcattatttgttctggcaatgatgggcctcatatatctcagcttcctggctatgaacccaaaggaggcatccggctctaggctggatgaagcaatgggcaacccatcggaggaccctgttgaagaggcccgtaggataatggacaaatacaagtacttaacctgtgcaaaggtgctgtactctcagaggtatgatttgtctgtagcgcttccttgcgtgacgtgcagggtgatggatgggtggatctgattttagcatactacactac

SEQ ID NO: 267994 - DNA, 814 bp, Zea mays
ctgaactagacctccacaatacgcaaaatggcttttttaggtataatgggtccagtgcatcaatagatgagcatctgagctatgaaggcataagcagtggccatgatatgcaaataattccacttgatggggctgattctggttttgaagggcaccagacatcttacagagaaataccagtggagcctcctgagatgtttcttgcaggcttaattgttcacatagtgcggcaaagaagaagtctctttcctctttggaaatgctggagcatccaggaaactgaaccaccatacaaagctgttttagcgaaaagggagaacttcagggatatagtggttactccttacatgtttacagatcacttaccatggaggtgccactttgctatgcagaagattgttgaagctcaaacgcctatgagacgtgcgcattccgatccacccgtacaacaacatttggtctgaccaggacaaaactgctgctgcccatgtacagaattgcgtgaaggacagaaaattatgatgatcacatttagcagcatggtctattgcaggctggaccgctggaggcatatttcagtccttcaggcagccagaatatgtccgtgacagacccaaaatcttgacgagcttattgacattcatatgccaccgagacatgatcactggttactgtacaccaacagtatctaatcagtctactcaccctggcaacctgcgcgtcaattaattaattcatcgattgttctcttcaattaattaattcatccattgaatcattgttgttcaaccccttctatttcccattttttttt

SEQ ID NO: 267995 - DNA, 462 bp, Zea mays
cagaaactgctcgtacgatctcaagaacgccgcctccccggttcccgcaccccgtcgccgcgccggtagtctgcccgtcgccgtctcctcctccaggtgaagccgaaggtgaagcagcaggatgggtcggaaggccggtgctttgtacataaacccaaagaagtttggtgctatggcgaagccctgcatgccagaaatggtggccttcctcaactgtctggccttaaacaaacagaacgatgacaagtgtatcaagcagaaagatcttttggttgcatgctctcaggctcagaatgggaggccaaagaacgcagccaagaccatcaattaccatctccagcgacttgggcgaggcaagttcctctagtcgctgtgtgagatcatttcctcatccagctttatgccttgtaccgaagtaaaattgctgaaatggggcattaatgtgtttgcttagattggaca

SEQ ID NO: 267996 - DNA, 612 bp, Zea mays
atggatcagacaagtttctactccgtgatgtcttggatacatagtgtctcagccaggaccaagtagttttggcatccaagttggaaactgcaccagtaaccaatgttgatgttgatgtcaatgcatcagagcttctaaaagaaaagggaaatagcgctttcaaaagaagacagtggatcaaggcaattgagttttactcagaggccatcagtttgagtgacacaaatgcaacatattactgcaacagagcagcagcttatctggaactgggccgttttaagcaggccgaagcagattgtgaccgggccttactgttggatagaaaggtaatagatttttgtagatgcaatattcctgtgctgctacgggtgacatgtctgaagcattgtctaccctaagagaggagttccaaaggtttattggatagtcctggatggttctgacatcgttaccatcttgtgctgttatggcaacatcaaatccttactgtgaataccgtctgtggctccaatgccaaagcatgcctgaaatcttgaagtgcttctttgtaattcaaagttacttcccttgcaaaaccacgccgtagatatgctttaacattctgatgcaaca

SEQ ID NO: 267997 - DNA, 673 bp, Zea mays
  unsure (1)..(673): unsure at all n locations
tccgaggtttcccaaaagttaatgttcctgtatttgctgcatcggatgaggaacctgaanttggggtaggtaataaggaatgtcggcggttggccacatccggtgtgccttttttttttccattaaccaaggtgggtcggcactacatcgttgatgccacctcagaggaagaatcccagatgagttctgcagtgtcggtgtcagtcaacaggcatggccagatatgcgggcttaccaagaggggaggggcacggctggatccaagcgtcatcttcgacatgatatctgtcgccaagcatgtgagccagcagttcatctccctcttggattcagagattgccccccccgaagctgaagaagaggctcagtgattgatgaaaaggaaaaaggcctggttgcgtaaatgctcgtgtgttccaacttcaaccaaatgctgtagaaatcttcaggaatttggttccatttttatgttattattagtagtagtaaacaccgaggatttggatcctgggaacgaacgacgtcgtgttggctttggctgggctcagaggaacgaatactgaatacttgggtctgatgatactgatcctacttgtgcccccaatccgatgataaatttggcccctctcacaccaaaccaaacactatggatttcctcaaaaaaaaagaaaaa

SEQ ID NO: 267998 - DNA, 558 bp, Zea mays
ttgcaattgatgtgtcaacttcagttgagagcattggagctttgaggtccaaaattaaagggtacttggagagcaaaccaacgcattggcacccagtccacactgtaaatctcaaggacatcttggatgtgaacaagattaacatgtctctctcagtccagcacaccatgaactttcaaaacatccgggagaagaacatcaggaggtctgagctcgttatggagttgaagaaaatattcgaggagatgtccatccggtaccaccttctaccccagaaagttgaactcacctacgtcgactcgaacccactgcccatgggtccttctcatacaagatagaagatgggtgaagacttttaagtctcatactgacaacttgatccgtttcatgggatctgacaactgatggctagctgtgcagtctgttctgaagttactaaaactctgcatagtagatattagctcgtagaataatttgtcagataatgcatttgtaagcggtgatggtactggtgatcaatgctttgggattggccattacaccccttggttttctccc

SEQ ID NO: 267999 - DNA, 599 bp, Zea mays
aatgaattctttgattgggtgcaagtgaagcataaatgcctgatcctgtggggagaggatgatggaataataagcagcaaactagcatatcggttgcatcaggaactcccagacgcgattctgaggcaggtccggcagtgtggccatatccctcacgtggagaagccgagggaggccgcaaaacatgttcttgaattcctcgcaagaaacacgtcaaacaagtcagaccagtctccttccgagccgtcagtagtcgtgaaccgctgagcagatcacagatccttgaagggtaggctgtacaaagtggaatgtttggccatgagatgatggatacagtcgctaactcgctatgctcagccaagctgctgctgctgaaggctgaagctgaactcggcgatggttctcagcgacactagaagataggttgttggtcagttaggactaactgtactgtacggtagcactgcaatgcaagggacttagtggatgggagcgtgccaattttggccgttgccagtactgtaaattagtccctctattttattttattttagtctctaaattgataaattcagaaactaaaatatgtcgcatttagc

SEQ ID NO: 268000 - DNA, 440 bp, Zea mays
tactcgagccgaatgcggctcgagggtaggccgcaaaacatgttcttgaattcctcgcaagctacacgtcaaacaagtcaccccagtctccttccgagccgtcagtagtcgtgtaagctaccatgattactattctgctggatgcttcactgttcgtgcattcagtcgtgaacaccgttgtaccgatttaatcgctcaatgttcatatgcccggaaacggtacaggaaccgctgagcagatcacagatccttgaagggtaggctgtacaaagtggaatgtttggccatggatgatggatacagtcgctaactcgctatgctcagccaagctgctgctgcggaaggctgaagctgaactcggcgatggttctcagcgacactagaagataggttgttggtcagttaggactaactgtactgtacggtagcactgcaatgca

SEQ ID NO: 268001 - DNA, 659 bp, Zea mays
actaaggttagctcgtctgtttcttatgatgcaacaagtatgaatgaattgagaaaatggaacgagcagtatggggaaggtggcagcaggactaaatcaccatttgggtttggcaactgacactacagtagagtgttaccaatactgtatctttgtaacatttaggctgcctcttgttggtagattagggagtcagttccattttttttaccatgagcttatttgaacaacctcgtaatcaccccgtgcaaacaaaaaagaatctagttaaacgccaattttgcctactagttaatggtcggaaataccagtgtagaatcagaaatcggctacacactacaaaataatgtatctgagctactctgggtaagcattaagctttaacaagatgtaaacggcttaagaattttcagttaattcatactagttctcagcatggaattcagtagaactaatttagtattgatagctagtcgatggctggaatcttcaggatgtctcctattgcccagaaactctgttcgtatcaaaagaatggaagagaatagcttgctagtagtattgtatttttggtccttacatgtataaaatgtgtcggttacttttccttcacacatgcgaatcatgtgtagaaaaaaaaaaaaaaaaaaaaaaaggaa

SEQ ID NO: 268002 - DNA, 1314 bp, Zea mays
agtgtatttacgaggataaagagtttacagagttcaaagcttttgatcctctgtttcctaacaggccacaagaggaacactgcgaaatgcatgccccttgggaagaaaccaaaaaatctcagccatggtggcaagtagctgatgtcgatggtttggcttcccttgtcgctgaaagagcaatggaaaacattgtcaacaatgatctgccaagacccactcagacagtccgggttcatggacctcaagtgaagggccctgaaaacaaggatgattatgggatgtctgttgtttctgggggccaagagccagatcctgtacatgacactatggagtgcagctacagtgtttcaagcaccaccaatgacatgaattcttctgacgggggacgttggcagcaccacgaaagaaataatgtgtccggggatgcacggggttcttatagttccaccaacagtacaccgggcagcaagccaacatatcaggatgcttctgagagagccaagctgctagatgctctccggcactcgcaaacacgtgctagggaagccgagatagctgccaagaaagcgtatgacgagaaggaccatgtcatcaagctactgttccgtcaagcctcacacctcttcgcatgcaagcagtggttgaaaatgctgcagctggaaaacatatgccttcagctcaggttcaaagaacaccagatagcaaccattgttcccggaccttccatggatgttggtgaaggaaaaggtagcaccgtctcaagagcacaatgaaggggctaggaagaaaggcaaaaggccaaacaggaaaggtggcctctgcgatgccgttgcatttgctgttggtgttggtatcgttggtgctggattgcttcttggatggactcttgggtggctactgccctagctggaggttccatcgacttccatgaccgtaaaggtgacaggataaatgcctcctgtgctcactagattgaatggcattccattgcatggcaataggtaagttccaagtgtgtgcttcatggagagtgagatggggcatcctttttggtattcttccatgatcctctgttgatttggtgatgatagcttgatgccttatgttggttcctgcatatataggcaggatctggtgtacgtactgccagaacctggatacctaggttggtagtgtgggtgtggatccgatggttgtctgtgtgctgtacatatgggtcagtgctggtctggtggacagatgaaatcagccgccctcaccaacaaaaaaaaaaacaaccggacgcgtgggcggacgcgtgggcgacgacgtggg

SEQ ID NO: 268003 - DNA, 446 bp, Zea mays
taagttccaagtgtgtgcttcatggagagagagatggggcagctttttgggattcttccatgatactctgttgatttggtgatgatagcttgatgccttatgttggttcatgcatatataggaaggatctggtgtacgtactgccagaaactggatacctaggttggtagtgtgggtgtggatgcgatggttgtctgtgtgctgtacataggggtcagtggtggtctggtggaaagatgaaatcagccgacttcaacaacacatgtgctagtactgtaaatctgtagcttttatttgcttaatgtagcccgaattgtcctaatccgcttgctgtaatgtgtggaacgtatttgcatgtcttgtttacttctggtggatatggacccagtatctatttatcattctgtggattcaaaaaaaaaaaaaaaaagggcggccctcgcgat

SEQ ID NO: 268004 - DNA, 1631 bp, Zea mays
gactttttcagcatcagttcctatgctcatgcctccatcttgtgaaggatccttttgcccagcagcaagcccttttcagtatactgacttttttcttggtctttatctgattgccctgggtactggtggaattaagccgtgtgtctcgtcattaggagcggatcaattcgatgatacagatccagctgagcgagtccagaaggggctctttcttcaattggctctatttttcaataaacattggtgctctcatatcaagcagctttcctggtttgggtgcaagacaatgtatgatggggactggggtttggcattccgactgtattcatggggctggcaatcataagcttcttctctggtacatcactttataggttccaaaaaccaggaggtagtccaattacacgagtatgtcaggtgattgttgcctctttgcgcaagtggaatgtgcctgtcccagaggatagctctctcttgtatgagctacctaatggggtatcaacaattgaggggagtcggcaaatagagcacacagatgaactcagatgtttagataaggctgctacagttaccgaagttgatgtgaaaacggctgacttcaacaacccatggcggatatgcactgtcacccaggtggaagaactgaagatactagtaaggatgttccctgtctgggcaacaacaatagtgttttctgctgtatatgctcagatgtcaacaatgtttgtggaacaagggatggtgcttgacccatccttgggctctttcaagatccctccagcttcactatctactttcgacaccctaagtgtcatcatatgtgtcccgatgtatgattacatcgtggttccaatagccaggagattcaccggcaatgagaggggctttacagagttgcagaggatgggtattggcctggtaatttccatcatagctatgtcggtcgctgcagtccttgaaatcaagcgactagccgttgccagggaagcgcacctggtggatcagaatgtcccggtcccactgagcatattctggcaaatccctcagtatttcctgattggtctagcggagattttcacattcattggggcgctcgagttcttctatgaccagtcaccagacgccatgaggagcctctgcagcgcgcttaatcttctcactactgcgtttgggaactatctcagcgcgttcattttgacaatggttgcgtactttactacgaggggaggtaaccctgggtggattcctgacaacttgaacgaaggccatcttgattacttcttcttgctcatcgctggcatcagttttctgaacctgattgtttatgtcctctgtgctggcaaatacaagagcaagaaggcagcttgagttgtgaaggccaggggctggatggcgtgctgcgcgccatgttatggtggacacttcagttcaacatctgtatatatgtttcccgcattaaccaccctagctgaagcaaccatctgcaattgttgcaaagtttatattcttcattgtgctggactaagttgattatacattcgtgcttctactttgtgtatgtatatatctgacctaaagttgctgaacatagacaatttcacttgcctctggtatccacggttttgattaag

SEQ ID NO: 268005 - DNA, 591 bp, Zea mays
catgccatctcgtcatccggccatggcgcatggtcagactgcgtcgactcgtcgagagacatgcagagcgccggcaggctcctaataccacgtcaggtgcttgtccctggttcactgaaggacgctccttcgtgtggtctagcaggcaacggccaggacgacggagggagccggaaccagagctgtgggctcgtggtgcctgagggaagggttcacggtggagggctgatgtccatgcttggagttggaggcaacctgggaagcaatcctgatggttcgaaagcctgaaataccaaggatgagacgtagaagcacataatttaggttattttgcatgcctctgttatgattcttgcaatggaacatatacatgaatcttcaaatggccattgtgtagctatagtgcttgccaattggccattgtagtatttgctatgtacaagagtggttttggcatctagtcaatgttgtgcatagagctgagaactgcatagttacttgggttcagaaattatgcggaagcttgtaagttgtttcactccgaatttaacacatgcatgcaacgaaatagataatttatagtgtaactct

SEQ ID NO: 268006 - DNA, 1417 bp, Zea mays
cccacgcgtccgccgtcttcttcttcttctttcttaccagtctcctccggtgcgggcgagggagacgacgacgacggcgatggcctggctgaggcggacggagacgctggtgctgctgctcgtggtgcttctggcctccgcttcaacctccgcggcggcggcggcggcgggagaggaggaggaaagagtgatcaggctgaagcacagtgacggtggctattcttataaccatactctggctcatattcttgtcgaatacgcgtctgcggtgtacacatctgacttgacatcacttttctcatggacctgtccaaggtgcaaaggccacacaaagggatttgaggtcatagagatcatagtagatgtggagaactgcttacaggcgtttgttggagttgcacctgaccctcgatccataatcattgcttttagaggcactcaacagcacagtgtctcaaattggatcgaagatcttttctggaagcagcttgatgtgacatacccaggcatgccggatgcaatggtccatcatgggttttattctgcatattataatacaactctgcgatatgagatcctgaagtctattaaatgggcaagaaaaacatatggaaatctacccataaatgttgtgggacactccatgggaggggctttagcttcgttttgtgcccttgatctatctgttaaatttggatcgcaggaggttgaactcatgacctttggacagcctcggataggcaatcctgcatttgctgtatactttggtgaacaagtcccaagaacaatccgtgtgacccatcagaatgatattgtgccgcatttaccaccgtattattattacctaagtgaatggacataccaccacttcgctagagaggtttggcttcatgagagcatagatggaaatgtagttgccagaaatgagattgtatgtgatgattctggtgaggacccgacctatagcaggtgggtcatgggatgagcgtagcagataatcttgagtactacagtgtcacactacatgttgactcaaggggaacctgtcagttcgtgattggtacagccaaccaagtatacaactacattcgtgaagttgatggatccatcatcttgttaagatatatatgcaagaaccatgagctctagaatcaatgtgactttgtatgccacgaaatgcacccttgtacaatatttttattttcaatttgtgtacagctcatgaaatactgttgtgtacaactcatgaaatactgggctactccagagggtaaggactaaggagagactcacctttttaaatgcacccctttgaccaagtgacattcgatacattgtaagctccataagattgccgcacaattcaatttgtgtatatcagtaaaaaaaaaaaaaaaaaaaaaaaaaaaaatcaata

SEQ ID NO: 268007 - DNA, 971 bp, Zea mays
gccagtacgatttcgctgcagcaggaggcgtcgagtgtcttcaaaggtcctacagcaatgcacaacggcatgcagctggaagcggccaggtccttcctgggacctaaccaagttcaattccagcaccacccaccgtcgtcgtcgtttcagcagcagcagcaaaacagtttccatggctttggtgtcaacccgcagtaccagcagcatgtcctcaaccagcttctgcaggaagttaagaacagtaacaaccgctcgaaagcgcagcaaccgcctctggatgcaccaccgccgaatgcgagcggcgggggtctcgcgccaggagttgctacccccaacgtcattgctgctactggggagcaggggcagcatgtcaataacagtagctctaaccataacggcacggtaaagggtgctgctggtactggccctagcaatgtcatcaacaatagcacagccagcatggcttcggccagaaacagcagcttcaagtcggtgagcagcagtccagctgctgctggcaatgccgtgagctcgaaggtcgatgactccttcatcaactggaggaccccgacgacatgatcgctaacgaactggtggaaaacgggctgttcggtgcaggacacgggtggtagtacgctactgtggtaaagccaagcaatgagatataagcctaagcctgattggtgctggcaagtgcttttgccgccgccacccttctctttctgtagagctttatgtattgacagttttccgatgatgatcatatcatacactggcgtcgctccagatgtgtgtgagttgagatagtgggttggattggatttggctgatagttagcgtgtgtatggcatgttgctgaatcaaatgatgtgatcatcgcaaggtcacaaacagcctctttgtcatgtacatcgttttccatcatgctatagtgtttgtcagttataatcaaaaaaaaaagaaagagaaaa

SEQ ID NO: 268008 - DNA, 517 bp, Zea mays
tcggtacctgagaattcatggacagtgcctgaggttccctctacaccaacagcctcggggctcaactggcacgggaatttgtgtttccctgcgtatgacagcaccatgttgttcctgaaattacctcccttcagaactccgaaagtcacttcaccgtaccttccagtttcaagcgccggagaagagagtactgagaggcgacaagaagatcactagacaccactgtccggtctaggctatcttgagaaaggcttcttggtgggctaaatgacgaaagaaaatatccaggactgggtggtcattcaaacatcaactgagctatccagtagccaggttttaagtgtgttgtaatgcttcaatgtgtttcattttccaaagacctgagcttcgcttgtgatttgttccgagctgtacggtgtcgattttgtgtatataatataatataacgaaataaagggtacccagtatgacgttatattatattatatacccaaaataaagggtacccagtatgagt

SEQ ID NO: 268009 - DNA, 538 bp, Zea mays
tcgtatagttgatataccaggcgggggtgtttaccccgagctgtggtttctaccaaggataaccaacgatcaaaacgtttggttcaaaattatattgcttcatccgatccgggcaaattaccaaagcatttgacggttgacacattgcaatataaaggactagtaaaaaaaattctagataggaagtgggtcggtctcaaaataaatgagttgttagttgtagaatattattctcgccagacttgaacttaacgaaaaaaggaaaggttcatagaatttttttccccttcccctttccccgaactaaatcgacctaaggctcttaattcgtattttcccgttcacctagcagaaatagattaaccctaggatacttttttcttttttgttatttcctcgatgtgtattttacataccacagtaatttgctatagagaatttctattaattaaaggtattattgctggaataaattgttatttaatttgatacattgtgatcgctaacattgatgaattaagagaaacggaaagagagg

SEQ ID NO: 268010 - DNA, 508 bp, Zea mays
aagcgcgaccgtggagaaagataaccagcccccagcaatggcgaatggtgtgagatcgccccgttcacccgctgctgcaaaatgtgaatcaaatggtcacagcagccaatgaccaagaacggtgtcacgctccattgatgcagaccgatactgatatattgtaggtcgagtgatgttagcaacatctgtgtttagagggaggggttgttaagctccgggtgtctgatttattgacacttgcggtctgtaaggtgattaaatgtgtcttataaagttcgatttgtagggctttgcccctgtaggttcttgatatggtaacttaagttgcttcattagaaggcgcgggttcccggttgtatatgtagtagaaatatgacagtaaaacaacttgaagagtcgattaaccgacatagatgttaaaaaaaaaaaaaaaaaaaaaaaaaaaaacattaaaaaaaaaaaaaaaaaaaaaaaaaaaaaaaaaaaggaaaaaaaaaggggggcccca

SEQ ID NO: 268011 - DNA, 424 bp, Zea mays
cccacgcgtccgcccacgcgtccgactacttcaagtcatatttatgctgggttacagaacggcatgctattagtctttgatatccgtcaaacttctgcacctttgcattctagcatgggtctatcaacacacccagttcatacaatacactgcgctgtagatggcagtggttccaggaaggttttttctgcttcttctataggaccctgcgtttgggatgccagcgaaaacaggccgagtttggtaagtgggatggaaaaccaaggggtctgcatatctcttgcgtgcagctctccatcaagtgatgtcctggtggcttcatatcgcccgagagttgagctgccagacgctatcgccacatctcaagcgtctacaccacaatcaccggcacccaccggttcaggaaaactaggatgccacacac

SEQ ID NO: 268012 - DNA, 503 bp, Zea mays
cggcctgcctcagagagagaaaaagcggagattagcggcggcgatggcactcccggcgtcgagctccggcctcttccgcttcatctccccgcgcagcgcctccagtccaccgacatcgtggctgccgcctcctggggagtcttcgccggcaccgccggcctctacctcgtccagccatttgactggattaagaaaactttcttcgagaaaccccaaccagaggcataaaaggcttgcaagtctgcaactttggtacttcacttttatccgggatggttcctgactgaagagaacttggataactcagcaaataatacgagaccccctcgtgtttccttgtttgtttttttattattcagatgtaggcaatccccacgagggagacagggaacagagaaactgtttggttcacctgtgtctatataatactcctgtattatccaacatgcatgttttaaaacctgtggcaaacccctcttgctgattaaaaaaaaaagaagaaa

SEQ ID NO: 268013 - DNA, 775 bp, Zea mays
cagacgcgtggcggacgcgtggggagaggagacctacactgccttcgaaaacatctatcctgtactgtcagagtttagaaaaattcagcaatgatgacatgtgatgtgaaggtcacgttcttcaaattacaagcttcctcgaggattctcgtgtgaccatgaattctaaatgtacataaaagtctggcggaacttatagcatcctgtaatctctgtgagccgcggtctgtcagtattgggtgggcttgctgtggtaactggtggacatgtcgagttcatccatttgggtaggccttggtgaacacggacgccccacatcatgtctcagtttgagtagtttgtgtgaactgaagggtacgtgcttctcccatgtggttgcagcgttaacttgagtcaagtgctaacaagagtagataaaattttgccccagttcgtctttgtgacagtcttttaaagtcttttttctgagtatctttcaaagtgttttcagagtatcttccagtgtgctactgctgtgcgatgatgagaaggctggccctgtatgtaacgggggcaacgtgaccggttgtaagttatgtattgtagttgagatgctgtagcgcctagggcactgggattgaacttgtggagcacccagtcagtcgcccgttctattagtgtggccttttgctactgacaaatgtggccctgtccgaatgtcgccgcgattttcgatttcttttaccctgttgatgttgcatgttaagttgcaagggtcaagattttggttgccccc

SEQ ID NO: 268014 - DNA, 1061 bp, Zea mays
acttgatacacctggatgttcctacatcaccggggggtatttaaacagtcaatcctgtttattctgcacaagcagctcaaactgcagctccatctggaccaaatgctaaccctctagacctctttccccaagtaactcccctctgtgcatgcagactgacatttttgcaactagttgactttggatctcatattcgtcattgtctgaactgtagtctcttccgaatgcttccgccaatgctggcacaggaaaccttgatgttttgcgcaataacgtacaattccaaaacctgcttggtttggtgcaggctaatcctcagattttgcagccattgcttcaagaattgggtaaacaaaatccccaggttatgcagctaatccaggaaaaccaagcagagttcatgcggatgatcaatgaaccacttgagggagacgaagagaatgaaatgatgctggatcagatggcagatgcaactgagaccattgcagtcactccagaggagaatgaagctatacttcgtcttgaagggatgggctttgaccgggcactcgtcctggaagtgttcttcgcctgcaacaagaacgagcagctggccgccaactacctcttggatcacatgcacgagttcgacaacgatgacgggctcggagggcctccattgtgatgcgatgcgaaggctgtggacagaaaataggaaaacgttttgggatttgtctcgtctgtccgctccgctccccctacatttctttgctgtttagtacataattctagatttacagaaaagacaaagtttactcttttctggatcatatgttttgtgctacttattgctgttctggccgcattgggccagcatgcagttattcacgggttcaacctgacaagcgctggctgcagcagcgaggtgtttgtaggtttcgcggtgattcgtctacccaaatctggaaccgtactgatactgaagaccgtactgatactgaaggcattatccggcgtgaactgctaattcaaacattattacacgaatgcataaggctgagcacggcttttgggcttgaact

SEQ ID NO: 268015 - DNA, 485 bp, Zea mays
agcgaagagaatgaaatgatgctggaccagatggcggatgcagctgagaccattgcagtgactccagaggagaacgaagctatacttcgtcttgaagggatgggctttgaccgggcactggtcctggaagtgttcttcgcgtgcaacaagaatgagcagctgaccgccaactacctcttggatcacatgcacgagttcgacaacgatgacgggctcggagggccaccgctatgagggcgctctcgatccctacatcatgcgaacgaaggctgtagggcagtagtaggaaaacgttttgggattcgtcccgtctgttcgctcactctacatattcgtttggctttgctgtttagtacagaatttctagatttacggacttactacttgatatcctgatatagaggtcacggccaagcttactccctttccccctggatcaaaaaaaaaaaaaaagggcggcccggacgcgtgggcggacgcgtggg

SEQ ID NO: 268016 - DNA, 527 bp, Zea mays
ttggttacaccgaccagcccatcccggatccatccatacatggaccaaacgcagcggcggctcgatgaccacggccacgcgctcggtggtcagtgcccacgcccagcaggccggtccagacaagagccggcagcaggagcagccgccgccgccgccttcttcttcgttgaaccagacggcggcgaggctcctgcgcgaggccaccgtctcccgcccggacggcgagacgccggcgcccgcgacaggctcctcggacatcctggccttcgcgcgctccgtcgaccgcgtggactcgcctctcgagtagcttttttttggcttgcccactctcagtcagctactggctcactgtgctttgtttcttttcttctccatcttgtgttcgcaccgtaataaaaaagggtcaacagtagtcaacactttcctccgtatttcgatcgtcaagttgtttgtcattcctgttaaggcgagggattactgcaggcttgtcattccattttcgcgattttgaaaaaaaacctcacatt

SEQ ID NO: 268017 - DNA, 612 bp, Zea mays
gaaagcgctcagggatttcgtgactgggttccacaagcggaagaaaaagagaagaaaggaggcgcagaagattttgcaggagaaggagaggaagaagaaaatacaagaccgcaagatcaggaaagaagagaaggagattgctctgtatggtagagtactgacatcggataacagtgatggtgctggattagaaaacgaagatatcggcgatgatggtgaggatatggaaaatgacaaacctttgtctgaaatcaaaacctacgaagatgatgggaccagaactgtagtcaccaccagtgaaattactcctgaagaagatgacattgtcccgaaaactgtcggccccgtggcgacgagcctcaccagcaagaatcctagctcttttgccaagaagaacagcagtttaggtgtgaagaggaagccaccgaagagaacgttcaagagcaaggctagagcgaaaaggggtgacaagaagcggggtgctgcaaagggtaaaaggaagggcaagggaatgaagtagtgttttgtgaaccctctgtaggaagaattatgctgtcactggctgtggacctgtggttaatctcgcatcacctgatctgcagtttgtttggt

SEQ ID NO: 268018 - DNA, 422 bp, Zea mays
cccacgcgtccgggccttcggaagcgtgataagcacccctaagtgcagctgaaagacggcgcggcagttgtattttcattcagcacaagcggcagctgagcatgctcaatgatgtctaatagcagacgacctgtcctgacacctgagtccaatgtcatcttcatgcagcgaacgttttgctcatgagttaggctatgaggtccttcagctgcgtaacattatgttacttggtctggttgtatcacttattattgcatgtgcacctcttttttccctccttcggaccttgcctcctagtcatcttcagattttaagctaggattatcccttatttacagttgagttattattagaatctattgtgcctgaaaggatcaatctgaactatcaatctgaacgagaggggtgaattagttttttct

SEQ ID NO: 268019 - DNA, 716 bp, Zea mays
agaagccgtggattcgggtttgtgaccatgtcttcggtcgaagaggttgaggtggctggtgaccagtttaaagttgaggtgcttgatggaagaagtttgagggtgaactctgggccgccaccacccagagatcggtcatcaccgtcaccgcaaagacccaggggtgatgccaacagggtctacgtgggtaacctttcctggggagttgacaattcagctctcgcaaacctgttcagtgagcaaggtgaggtactggaagcaaggatcatctatgacagggagagtggaaggtcaagggggtttggttttgtcacgtacggttccgccgaagaggttgagaatgcaatatctaatctcgatggcgctgacttggacggcagacagatccgtgttacggtagcagagtcgaagccacctaggcagcaatactgaaattcctcttgagatttttgtaggtgtaccggtagcccaaactctggattatagtgacgccagtcctggatttggtctcgagattcattgaagttaaaaagccctcatgtatatggctcactatttatatacatgtaatattggattcccgtgttcagtgtccttttgtatcaatttggctgcatagtgtcttgtggcacttcaaaggacatagattgttgacggccaaccaaacctcaagaaagtatcttgtattgtttcttgtctcgtgtggtttgttcact

SEQ ID NO: 268020 - DNA, 457 bp, Zea mays
gacacgcgttgcatctaactcgtacatgtgtatgcatatactccgacgtgcgagtatatatatacatcgattggtatttgtttagtgaggtcaggccatatggcgaggaggagcaagcataccgaccatgccgtattcgcggaccgtatttatacacacgacaccgtacactacactcgcgtgatagcaatggttatactgcaaggggaaggtaaggatggcatttaagtgcagagcggagagggtgggtgcctgggtggtctccggccatcagtgcggcggcaggaccggcagctagctagctgcgccggcgcggcacacacttcgaggccaattcaattcaactgtttcaattcatgtaactggcactctggcagcgggtgtttgctgctgcttgctgtgtttttttgaagacgtgaacatgaaatacaaaactgagcttgttttgtccatggct

SEQ ID NO: 268021 - DNA, 371 bp, Zea mays
agctccaagctgtctgacacgcacagaccgagtctctcgcacgatattcttttttgcagctcgtcctatatatagattgttctttttcgtcggtgcactggatcaaaacaagtgcgcttgtcggccagtgccgtgtaaatttctgagagttggtcttgtgttattaccaggttttgttcgtttctttcgttttggagagagtggtgctaccagcactactacactagactactctgtgtgaacggaatactactgtactttgtctcttctactactactacagaaacagaatacaacttccttcgttagattcagattaatacaatggtgaggttgtaagtgtggcagctagatctgctgctcctgccttc

SEQ ID NO: 268022 - DNA, 403 bp, Zea mays
actcatgcgtacgaagaaggaggagaggggacggtccgccaatcctgcctagccttcgccgccttcctgcgctcgagcggctcgccgaggtgagcgccgggtagctcgccctcagctctcgctctatgctgctctaacttactggagagggggactagaagttcgagcgcctttttttgggcttgtacggaagattgcttgcttgcgtgcttgttgttgtatgctcctagcgatgtggtgactgcgcgagggacccccgatcacgcggtacgtagaggaggttttgctccgcgtgatcgttagtttggagcctggaagagccaatctcagactacgggtctcgcggcttgctctggggccgttggagtgggtgggatatcgggtgcgtcttgtgggtgcatgc

SEQ ID NO: 268023 - DNA, 716 bp, Zea mays
cttgcgataaagcagatggacttgagcactcacaactttaaaagcatcaacgtcggtattcaagaactcaaagagcaactgaagatgctgaagatggaagaccaaaatgacatttgtggagactattctgatacattgtcaagcgacgagttcgattatatgaacatctcaatatatcgaaccatggaagagcagttgtctatgtttaaggatggggaggacagagatttctcttatgtacaggacatgcttgctagcgcgtgcgacttgccagagcacctagaagattggcaagtgagctcagatgtgttcctttgtcttgaaaacaagtacagcaagctggttctgtggtcgaaatccgatcaggaaacttctgtttgatcttgtgaactcaattttggctgacatgaccattccagacattggcttgtgttcaaagctcatgatgaagcgctggcctgaaatagatcacggacagttaactgaaatcgtcaggcaaatggtgcagaagcgaagtaactgtgggcactttttcttggaggatgttcagcctttgccattggaccatggttctgaggtagagctggttggaacgaagattgccatgatgatccatgatgacattatgacagattttatcgtcggaatcatgtcctaggagaacctccttgttatcagctaatgtttaagggctgtagttgtttagctagattgtt

SEQ ID NO: 268024 - DNA, 610 bp, Zea mays
caagggagacaattaaagctgttatatacaccaactttgatacagatgaacatttggatgatgaggatgacaaaagtggcacagatgaggaatctttcaaaccactacttcagatggttgtcactattaaaaaaccagaaggtccaatcctagaatttgactgcaactttaatgatgatgaactaacaattgaaaatatgagggcgctgaaccgtgataaccccgatgctaagaatgtgtatgaggggccacaattttcggacctggataagagcttgcagaaggccttgcacaggtaccttgaggtcagggggttcaaacattcactacatgattggctgtacgaatacatgatgagaaaggatgagaaggagtatgttgtttggctgaagagcatgaaggagttcatcggcggaaattgattgtttgcgctttaagttttatctgcattgtgagaacgagacctgtactcatcatgaaatactagcatcataattgcgcgaagatacctggcatggctttacatcctgctggtgcaagagtttttgttgaaaaaaaaaaaaaaaaaaaaaaccataaaaaaaaaaaaaaaaaaaaaaaaaaaataaaa

SEQ ID NO: 268025 - DNA, 930 bp, Zea mays
  unsure (1)..(930): unsure at all n locations
tcgtaccggtgcgccatgtccgaattgacggatggacccacgcatcgacacccttccccacaccagcagtcgagctgagcacgacacaaagccggctggggccgcctcgccatggcgatccggatgagcaacaacgtgatcggcgcgctgaacctggtgacactcctgctctcggtccccatcctcgtctcgggaatctggctgcggtcgcgcgccgacggcaccgagtgcgaccacctcctgtccaccccggccatcgcgctgggcgcggtgctcatggccatcgctgtcgcgggcctcgccggcgcctgcttccgcgccacctggctgctatggctctacctcctcaccatgctcgtgttcatcgtcgcgctgctctgcttcaccgtcttcgccttcgccgtcaccaacaggggcgccggggaagccgtgtcgggggtaggctacagggagtaccgcctcggggactactccacctggctgcggcgccacgtcgaaagccgcaaggactgggcccggatccggagctgcctcgccgacgcgcacgtctgcaggcgcctggaggagagggagagcaaggacgcggcgggtctggctcggctcggcctgtccccggtcgagtccgggtgctgcaagccgcccacgagctgcaacttcacgtacaccggcggcacggagtggaccaggacagcggcgggctccgcgcccgccggccgggactgcagcgcgtggggcaacgacgaggacgacctctgctacgggtgccagtcgtgcaaggccggcgtggtggacgcgctcaagcgggactggaagcgggccgccatcgtcaacgtcgtcatcctctccttgatagtccgcgcttactccctcaaaagctcccccttcaagancagccgccgggacataaaancctgccgcagcggccaaaaa

SEQ ID NO: 268026 - DNA, 673 bp, Zea mays
ctgcacgcctgcgcgaccgcgccgtaattcccgcgacccccgcacgcctgcggttattcgttgcccatctctacaataagatgtgtggagtgcttgaagagagtggtgcttatgcgctcagttccttctttggagacaagtccgcatattctactttggccaatagccttcgacagtttgaaactgtgtgtgagaatgtcgtcgaggccttacgaccacaccaaaatggtactggcagtgccatcaaagaggaattggtagatgcagccaccaaagcagcagcagcagcagctcctcaacaagattcaggccatgatgcaccgcatgggcagtcttcgacagccaaggcggacatggaaatcgatggttgatttgtaggttccagagtggtaagaaagggaatcccctctaatcattatgtatactgtggtcagaatgtgcgctatatattgtaacatcaaagaaagcacctccaggcctgagggtgttactgctaatgcgtttggtttacttgttgtccttgtaatatgcatacacatttagaactcatgcagccattttgtgtgctcgaaccggtggatcgctgccctgttgtgttgtactgtgtttagggcctgtttggatacgaatggccccctttagcccggagctaaagataagtccgattagcttt

SEQ ID NO: 268027 - DNA, 1382 bp, Zea mays
cggacgcgtgggcggtcgcgtgggcggtcgcgtgggctatagccgcgagcctcgtaccggcgcagccatggcggaggagcccgccgttgtcgtggcctcctccagctacgaggttgacctcgggaacctcatggcgtacgatccgtcgcatcacgtcgccaccgcctccagggaggagctgagacaggagtgcctgcggaagggtacagagctggcgcaggcggtggccgacgtcctcttcgcgctgccgcccaacgaggaccgcgacggccccattatccacctcccgccgcccaccttcagactcccgcgggagaagcatctacccaagcccaagccaccgaccaagtgggagctgtttgcaaaggcgaaaggaattaccaagcgcaaaaagaacaagcgtgagtgggatgagcaaactcaatcctggaagcggactcatggctatgaccgtgttaatgatgacaaagacattccaatcattgaagccaaattgactgacgagcctggtgttgatccatttgcgcaaagaagggatgagaagaagaagagggttgaaaagcaagaaaaaaacagactggataacttaaagaaagctgcaaaggttggcgctttgccaagtcatatacagcttgctgcgaaggcgttgcccatcacaggaacaaaagctgaccttccaaaaaaatctagaaaagaggatcttgagagtgttgtcggcatggcttcatcagcaacagcaagtggtgggaagtttgatgagaagttgcctggcgagaaacctccaaagcaccctggcaaacacagaaagttcctcccagttgccgaagggaagggaatgggcagcctggagaaacagcagaatgacaaaatcctgaactctctacttgccagaaactctgatgaaccacttgatgtcggcaaggcaattacaatgtacaaggtgaaaaaggagaagcagagaaggaaagagaaaaatatgccatcaaaatctgataagcttaagccccagaagaaaccccacaagaaatcatcgaagaaaagggcttaggtccacgtctttcagttgaccacagttttgaaagctgaagcaaggaggcctgtcacatattggattgtatttgtgagctttgaatctctgggagaaatattgttattccgtctaatggttatgatacaaaaacctgaatgctttgccatggtatgcgcccatcttgtacttttcaaattatgtttgggatgtggtttgtagcttggtaagagtccctccctttggttctgaaacctgttcaaaggagctgtcctggaaacagtaccaatgaagctactgtctagtgtcgatggtactgatctgttgttggcctctgagtttactctccgatgtg

SEQ ID NO: 268028 - DNA, 346 bp, Zea mays
  unsure (1)..(346): unsure at all n locations
ccaatatccttaaagctgagaagtataagttgaagaaaatggcnaangcaaaatgcaatctttatctgatatatgtgaacaatccagtagttaactccgtcagtagagatggataacttcgtcgtgaatcaaacaagatgatggataacttcattgtgaatcaaacaagatagcctttatgagggagtgcaggttggaagtttggttcacagcgctactttacacatcacaagattattcacgatgttttcaacctttttgttcgtttcaattttgtagagaactactgtacgtaatgtgaccacatatatgtttatcttgagtggaaacccgatagtattttttt

SEQ ID NO: 268029 - DNA, 1141 bp, Zea mays
cgttgacagatcctgatccagtgtgatatttgggctgctcacaggacaattgggtggggtggggcccaatcgggacgcggaggaagaagacccggagctgcatcttccttacgtttcagcaccgcgcgcaatcggcctctcatcccctcttcctatcgcccgccgccgccgccgccgccgcccgtccgcttcagtacgacgtcgagcaaggggaggtaaaagttcgtttggcgtgcgccatgtttaagaagttctcttcagaagatatatctggacagaatcaagttaaggcttctgtacaacgaaagattcggcaaagtatcgctgatgagtaccccagccttgaacctttgctagatgacttgctcccaaaaaagtcacctatgattgttgttaaatgccaaaatcatcttaatcttgtagtggtgaataatgttcctctatttttcaatatacgtgatggtccttacatgccaaccctgcgtcttcttcatcagtatcctgatatcatgaaaaagttccaagtggatagaggtgctatcaaatttgttctatctggcgcaaacataatgtgtcctgggttgacttcacctggtggtgccttagacgacgaagtcgaggaggaaacaccagtggctataatggctgaaggaaaacaacacgccctggcaattggatatacaaagatgtcagcaaaagacataaggaccatcaacaaaggaattggtgttgacaatatgcactatctaaatgatggcctatggaagatggaacggctcgaatgagtagaattctctgaggggttcataacttgcggcagatcgtattgatggacatatgaaaccagcaggaccctatttgcacagctggtatcgttttaaagatgaagtactaagaagctttatttacctgaggcaacttgagcttactccgaccctttggtgtggagtgcatgtcagaaacaggattatgaatgctgtgttcagtgcttttcacaaattgttgtattttcaccagaacaatttgccctcaattggaagtgaggaaatccataacgatctataagttatttgatcaaaaaaaaaaaaagaaaaaaaaaaaaaaaaaagaaaaaaaaaaataaaaaaaaaaaaaaaaagta

SEQ ID NO: 268030 - DNA, 1537 bp, Zea mays
tcgctccgccagcgctagggttttcattttcacgcgctgttgctggtgctgcttgttcgggacgggaaccggaggtggggttgcgatggcgctgcagtacgtggaggcgcagcggcagttgcgcccggacctctccgactggtacgcctccctcgccgacctctaccagcggaagctatggcaccagctcaccctcaagctcgaccaattcttacagctccaggtcgcacagaccggagacactatcattcagctctacaacaatttcatcgtcgactttgagaccaagattaatctgctcaaacttgcccattttgcggtgataacttctcgccagtaccctgataaggatgctgcaattagtttcttagagggggtgatcacaaagctgcgtgagacaagggagtcgcggatcaatgaaccaattctctatgtgaagatgcaaattgcagctattaatcttgagaaaggaaacaaaaaagagtgcaagaatttgttggaggatgggaaaaccactctggatagtatgactgatgtcgatcccacagttcatgctagcttttactggatatcatctcaataccacaaggcctgccaagaatttgcagagttctataagaatgctcttctctatctggcctacacaactgtggagtctctatctgagtcattcaagctagacttggcttttgatctatctctagcagccttgctgggtgataacatttacaactttggggagttgttagctcacccgattatcaatagtcttattggaaccaaggtggagtgggtttatcatatgttacaagcattcaacacgggcaaccttgctttctaccaagaactttgcagggttcacaatgctgctcttactgcacaaccagctttggtgcaggatgagcggaagctgcttgagaaaatcaatattctttgtctgatggagataatctttagtcggccatctgaagatagaactattccattaagtgttattgctgagcagactaagctttcaatcagtgatgtggagtatctccttatgaagagcctctcggttcatcttattgagggaataattgatgaagtggacagtacagttcatgtttcgtgggtccagcccagagtgcttggaatcccacaggttaaggctttgcgcgaccgcctggatgcctgggttggaaaggtgcatactacattgctttcagttgaggcagaaacacctgatcttgttgctgcctaatttagcacctgttacacttccgcgagaggcttggtcagcaaggtgatgagatgcattgtgacacttgtagtcattttctggataatgaacctgctgccctgagcgtttgtcagcctgcgtcctgatcggggcctgtaatttcttttttgatgtcctctggacatggatgggtacaacttcacgcagtgtcacggaaacgggaccaaatgattgaaatttttatactagtagggtgtgactgttcaaagacccattcaggaggtgcaacaacattcttgtggtcggcggttgtaa

SEQ ID NO: 268031 - DNA, 638 bp, Zea mays
  unsure (1)..(638): unsure at all n locations
cgcaccgtcgtcgggcttccccgctttcttgcactttcagtcgagtccagacctgcggaatatagatctaccaatcgaccgacccggatccttcccttccgtctgacgctgcagtcgtcgtagcagatcttatctcaaaccctaccgaccaacagctgcttgctcgggacgggaaccggagttggattgcgatggcgctgcagtacgtggaggcgcacggcaggcgcgcccggacctcgccgactggtatgcttccctcgccgacctctaccagcagaagctatggcaccagctcaccctcaagctcgaccaattcctacagctccaggccgcacagaccggagacactatcattcagctctacaacaatttcatcgtcgactttgagaccaagattaatctgctcaaacttgcccattttgcggtgataacttctcgccagtaccctgataaggatgctgcaattagtttcttagaagggggtgatcacaaagctgcgtgagacaagggagtcgcggatcaatgaaccaattctctatgtgaagatgcaaattgcagctattaatcttgagaaaggacacaaaaaagagtgcangactttgttggaggatgggaaaccactctggatagatgactga

SEQ ID NO: 268032 - DNA, 533 bp, Zea mays
cggacgcgtccgcccacgcgtccgacggcaagtatcacccggttcccctcttctcctgccacacctccgccagcgctagggttttatttttgcattgctgttgctggtggtggttaccttcttctctctctcagtcgtctccctcgcagctgcagtcgtcgtagcagatcttatctcaaaccctaccgaccaacagctgcttgctcgggacgggaaccggagttggattgcgatggcgctgcagtacgtggaggcgcagcggcaggcgcgcccggacctcgccgactggtatgcttccctcgccgacctctaccagcggaagctatggcaccagctcaccctcaagctcgaccaattcctacagctccaggccgcacagaccggagacactatcattcagcttctacaacaatttcatcactgattttgagaccaagattaatctgctcatgcttggccattttgcggtgatagcttgtggccagtaccctgataaggatgctgcaatcactctcttagaggggggtgatcac

SEQ ID NO: 268033 - DNA, 362 bp, Zea mays
cctaatttagcacctgttacacttccgcgaaaggcttggtcagcaaggtgatgagatgcattgtgacacttgtagtcattttctggataatgaacctgctgccctgagcgtttgtcagcctgcgtcctgatcggggcctgtaatttcttttttgatgtcctctggacatggatgggtacaacttcacgcagtgtcacggaaacgggaccaaatgattgaaatttttatactagtagggtgttactgtagttttcccagttgaatttaatttgtaactgagtttgtactctgctggacatggatgcaggagaatcttgctggaaatttagttgtgcttgatgtttgcatgttgcattgccccc

SEQ ID NO: 268034 - DNA, 558 bp, Zea mays
attgatgaagtggacagtacagttcacgtatcatgggtccagcctagagtgcttggaattccacaggttaaggctttgcgcgaccgcctggatgcctgggttggaaaggtgcataccacattgctttcagttgaggcggaaacacctgatcttgttgctgtgtaatttcacagctgttacacttccgcgagaggcttggtcagcaaggtcccatttgcaaaatgtgagatgctttgtgtgacacgtagtcattttctggataatgagatctgctgctgccctgagcgtttgtcttcctgcgcctactgatcaggacatgtaatttcttttttggtgccctcaggacatggatggttagaactgcacgcagtgtcacggagacgggaccaatggattgaaaatttcatactagtagggtgttactagtagaacacgatgcaggagaatcttgctggaacatgagttgtgcctgatgtttgcatgttgcactgcgataagacgtggatcatcattaacacattagctgttttacagcccccaaaaaaaaaaaaaacaaaa

SEQ ID NO: 268035 - DNA, 307 bp, Zea mays
cggacggtgggcggacgcgtgggcgtgttggtgcgttcgccccgtagcagccgtcgggcttctctgccttgtacttgcgatcgagtccagacctgcggagatagatctactagtcgaccgatccggatccttcccttccgtctcacgctgcttgctcgggacgggaaccggaggtggggttgcgatggcgctgcagtacgtggaggcgcacggcagttgcgcccggacctctccgactggtacgcctccctcgccgacctctaccagcggaagctatggcaccagctcaccctcaagctcgaccaat

SEQ ID NO: 268036 - DNA, 276 bp, Zea mays
gtatcttccctcttcccctctgctcctgccaggctgccacacctccgccagcgctagggttttcattttcactcgctgttgctggtggttgttacccttcctctctctctcagccgtcaccctcggagccgcagtcgccgtagcagatcttctcttcaatcctatcggtcaacagctgcttgctcgggacgggaaccggaggtggggttgcgatggcgctgcagtacgtggaggcgcacggcagttgcgcccggacctctccgactggtacgcctc

SEQ ID NO: 268037 - DNA, 729 bp, Zea mays
ttaatcagcccccttcctccacggtcgcgtttcacgggcgtagagagagagagagagagagagagcgcgagcgagcgaagagggcgtgagagaggagggaggccaagccgtacgcgtcgtctcctgctgtttctccccatccctttcctgcctcggcttgcaccttcaaccttacttaaagctctgacctcaaactgaaagggacctgcgaagagttttttttgcggcagtacaatggaggtatttggcaaatctgtgattgctgagcccagcaatgtgattttcttgtccgcgatccttaacacagaagggtcaaaccctagtcacaagtgtgacaagaggtgccagagcgagcgcattttggggaacatgtaccgttgcaaactgactgaaaccactcacatctgtgacaaaaactgtaaccagaggattctatatgacaaccataactcgctctgccgagtgagtgggcagctttttccgctctctccactggagcagcaagcagtgaggggcatccgcaggaagcatgaagtggacagcagtgaaggttgctgctttaagcgcaggcgcggtgcacagctgcatccttcccccttcgagaggtcctactcagctgtgtctccaatcccgagccaggttggagatggcatggacctgagctagagctaatgaggactttgttttctttcgccagccacctatttcgtctgtctaccctttttccta

SEQ ID NO: 268038 - DNA, 512 bp, Zea mays
cggacgcgtgggtccgtgtttaacgggcgtagagagagaaagagaacagagcgagagagggggaggacgaagccctccgcgtcgtctcctgctgttccatcccacatctattctgcctcggcttgcaccttcgacctcgctgaaagttctgacctcaaactgaaaggggcctgtgaagcgtttccttgcggcagtgcaatggaggtatttggcaaatctgtgattgctgagcccagcaatgtgattttcttgtccgcaatccttaacacagaaggatcaaaccctagtcacaagtgtgacaagaggtgccagaacgagaacatttttgggaacatgtaccgttgcaaactgactggaaccactcacatctgtgacaaaaactgtaaccagagaatcctctatgacaaccataactcgctctgccgagtgagtgggcaggtttttccgctctctccattggagcagcaagcagtgaggggtatccgcaggaagcacgaagtggacagcaatga

SEQ ID NO: 268039 - DNA, 604 bp, Zea mays
gagagagagagagagagagagcgcgagcgggcgaagagggcgtgagagaggagggaggccaagccgtacgcgtcgtctcctgctgtttctccccatccctttcctgcctcggcttgcaccttcaaccttacttgtgaacatctctgattccattttcatctgttgggtggcaagaaactaatcaaggagtctctctcttctcattctctgcgtggaggactgtttagctgtagctgagtggcatgctttccagaacataaattggtggaagagaagtttgatgctaccactttgcgagaaggaccgaaccaacacaataacatcaagcttagatactgcagtttaccaactttttcaatattgaagattgaagagcagcaagatcagcctcttccatatgcagtttgaagaaatcctttttaaggtctattagactagaatccttccggcaatcttgccttcaccccaagcatgctgcataccttgtaatgagtgtggtacttgacgactgttaccaaagtttttttgagggtaacactgttaccaaagtagtggatgcttttctttggcacgaatttctttcatatccacctagtttgtctgt

SEQ ID NO: 268040 - DNA, 649 bp, Zea mays
tggtccgtgtttaacgggcgtagagagagaaagagaacagagcgagacacggggaggacgaagccctccgcgtcgtctcctgcggttccatcccacatctattctgcctcggcttgcaccttcgacctcgctgaaagttctgacctcaaactgaaaggggcctgtgaagcgtttccttgcggcagtgcaatggaggtgaacatctctggttctattttcatcgtcgggtaacaagaaactaatcagggagtctcttcccatttcttgcagtggaggaatgtttagctacagccgcgcagcatgctttccagagcataaattggtggaagagaagtttgatgctaccactttgccagaagaaccgagccagacccaataacatcaaactgagtctgagatactgcactttacaaattctttcgatattggcagattgaagaccaacaagatttgaagagctgcaagatcagcttgcacctgcagtttgaagaaatcctttcaaagaagactgcttgcggcaatcttgccttcactccacaagcatgtgctgtgttatgcgtaccatgtaatgattgtagtacttgacaactgataccaaagtagtggatgcttttctttcgcatgaagtcatgttgatttttgtacgttc

SEQ ID NO: 268041 - DNA, 349 bp, Zea mays
gttgcatatctgattgcatgcatagatacgcacaaaaatcccgtttccggcgggccaagcacacatgagccatgctacgctcatccagctatccaatcaggtgcaataacatcaactgagatactgcagtttaccaactttttcaatatggcagattgaagagcagcaagatcagcctcttccatatgcagtttgaagaaatcctttttaaggtctattagactagaatccttccggcaatcttgccttcaccccaagcatgctgcataccttgtaatgagtgtggtacttgacgactgttaccaaagttttctcgagggtaagactgttaccaaagtagtggatgctt

SEQ ID NO: 268042 - DNA, 393 bp, Zea mays
ttctatgctttttgctgttccccctacggtgtggatcaggccatgccgtcaaatcgtcttggaaatgtttcgtcttcttataaactatattgctaactattttcattcgtggattatttcgcctttctttggtttggcaggggaacttcgtctggttccattggcatctggcgggtggcaagaaactaatcagggagtctctctctcccctttctctgcagtggaggactgtttagctgtagctgagtggcatgctttccagaacataaattggcggaagagaatttcgatgctaccactttgcgagaaggaccgaaccaactcaataacatcaaacttagatactgcagcttaccaactttgtcaatattgaagattgaagagcatctagat

SEQ ID NO: 268043 - DNA, 554 bp, Zea mays
  unsure (1)..(554): unsure at all n locations
cttgatcagttggcgcggcaggacaacggcagccggagctccagtgcgcggcaccggcaatggcggccgtcgctgcaaagcatcgacgaggccccgacctgagatgtcagctccatacagccgtagcgccgtaatcattgaccaccggtgggcctgtactttcggcgatcacctggcctcggtcagttcatcgcaagggttgctatgtggcctactgctacgattgccccctgtggagtggagtgagttgggagcttgacaccccgggatgagagggcactgcttcggatgcagcatgtagcctcggatccgtgtaaattttcaggtcttggtcaggagtttgttagtcagactcccttgcttcttcgtcgtcttcttatttgctctcgatccatgcggtttgcacatggaattatatcagtaacggattagagtagcttgctattagattgacagccaggcatgtcatgtgctggctgctactctcttgcagatcgcactcgagcgtgtagccttttgagagtnaanaaaaatataaaaataaaattaaatat

SEQ ID NO: 268044 - DNA, 1444 bp, Zea mays
cgtcgagccgcgactgccgactgcgaccgatagaattctctatccggtccccgtccggtttggttagagttcgcactcgtgattgggttggtcgcttggttcttccctgccggaagatacctttcgttcggtgtcgccaactcgccattcttgggaggtcttggtcgggaccggtgctgatggaggagaggtacgaggcgctgaaggagctgggggccggcaacttcggcgtggcgaggctggtcagggacaagcggaccaaggagctggtagccgtcaagtacatcgagaggggcaagaagattgatgagaacgtgcagagggagatcatcaatcaccagtcgctccggcaccctaacatcgtacggttcaaggaggtttgtctaacacccacacatcttgctattgtcatggaatatgctgctggtggagagctatttgagaaaatctgctcagcagggcgattcagtgaagatgagtccaggtatttcttccaacagctgatatcaggggtcagctactgccattctatggaaatttgtcaccgtgatcttaaacttgagaacaccctccttgatgggagtccaacacctcgtgtgaaaatttgcgactttggttactcaaagtctgctttgctgcattccaaaccaaaatcaacagttggaactccagcatacatagcccccgaggttctttccagaaaagagtatgatggaaaggtagcagacgtttggtcctgtggtgtcacgctgtacgtgatgctcgtgggatcatatccatttgaagatcctgaggatccaaggaacttccggaaaacgatcagcagaattcttggcgtgcaatactccatcccggattatgtgagagtgtcttcagactgcagacgccttctgtctcagatattcgttgccgatccttcaaagaggatcacgatcccggagataaagcatcacccgtggttcttgaagaacctcccgagggagatctcggagagggagaaggccaactacaaggacgcggatgccgccgagccggcgcaggccgtggacgagatcatgcggattgttgaggaggccaagacccccggtgacatgtccaaggtggttgacccggcgctgctggccgagatggcagagctggagagcgacgaggaagaggcagacgccgatgacacctactgatcgctcctgcatgcagctcagcagctgctcagtcatggtgtccagtcctttgtgctgcagacatggcgccgccgagcgcccgagcttaacccgtgcgtgtgatgacggatgttgtatttgcactctttacgctgtttgtataattaaagtctgtacaacgctgtacaattgcagattgccttgtacagatgaactagcgtgcagtgatatactcagtcccaaattctatgttccaaaacggtttagataattggattttttac

SEQ ID NO: 268045 - DNA, 1642 bp, Zea mays
caattctgggaaggagtttcacctgtcgagttcggaacattaccggcccttcaggacgcattactgttgttggttatccaattggaggagatactatatccgtgacaagtggagttgtctctaggatagaaatactttcatacgttcatggttctacagaacttctaggattgcagatagatgcagctattaattcaggaaattcaggtggtccagcttttaatgatagaggcaaatgtgtcggtatagcatttcaatctcttaaacatgaagatgccgagaatataggctatgtgataccgactccagttattacacatttcatcgaggactacaaaaattctggaggatacacagcgctttcctatacttggagttgaatggcagaaaatggagaatccagatctccgcaaagcaatgggaatgaaaccagatcaaaagggtgttcgtgttagaagggtggagcccactgctccagaatctggatgcctacgaccatctgatattattcttagtttcgacggtgttgacattgctaatgatggaacagttcctttcaggcatggtgagcgcattggcttcagttatctggtttctcagaaatatactggagagaaagctcttgttaaagttctgcgtgattcaaaagttcatgaatttaaaataaggctagcaactcacaaacgactcgttgcggctcatgtgaagggcaggccgccgtcatattacatagttgctggttttgtttttgcagctgtttctgttccatatcttcgatccgagtatggaaaagattatgaatatgatgcacctgtcaagttgttggtgaaccatttacatgcgatggcggaatcacctgatgaacagctggtggtggtatcacaggtgcttgtatcagatatcaatataggttatgaagaaatagttaatactcaggtacttgctttcaatggccagcctgttaaaaatttaaagaacttggcgaccatggtggaaaattgcaaggatgaatttttgaagtttgatctggagtatgaccagattgttgtcctcgagacgaaaactgcaaaggctgctacccaggacattctgacgacgcactgtataccttctgcaacgtcggatgaccttaaggcctagtgggagaagggagcatgacgcagccctgggcctgggccagggccatcaggtgggccaatagtttgggccacaatttcggctgaattgattagcgcagcgtacgatccgtgatgaagaggaaccccaatgtttatctgtttaagttaaatatcttttgaggggttgtggatgtgagagtgctggctggtgtctaaagctccgccattatagaaggtttgagggactgtcactgtcagataacaataaactggagttgttacagacagagtcatcgtgaaaacgatagtgtctagtaagaagctgagtttgttttttctttacatgatttcattacaactacaccaaattattgacggggaaaggaatcataattggtccgtgatttcattaaaaaaaaaaaaaaaaaaaaaaaaaaaaaaaataaaaaaaaaaaaaaaaaaaaaaaaaaaaaaaaaaaaaaaaaaaagggggggcccccccgtttatttccccccccccccgg

SEQ ID NO: 268046 - DNA, 750 bp, Zea mays
attcaggcccggacagcagaagaaggtgtttgtgtacaggcttgtagctgccgattctgatgaggtaaaggtccatgagacagcattcaagaaagaggtcataccgaagctgtggttcgaatggagcgagcactgtactacggaagacttcaaacttggtcaaattgatattgatgactctggtgacgaactgttggatactaaagcaatccgcaaggatatcaaagcgctgtatagaaggtaggtaacaagctttgtggccactggacaccatgtacatattgcagtgctgaccgtcgagctgatccttaaactgaagaaagaggtgacgggtgttgcggtggctacattgcgcggtcattcccagctatatccgtggaatggcggcttcttttgttcgtagtatgtgccaacttggggcagcagtcagctgatccccagacacatttctagactcttttttaggctcaagtttctgagaattaacctgctatggcgtttagccttaagtaaatatttcgttcgcaacaataataacccagtaaacctaatttgttcttgtgcgtttgtggtggtggttcttgaaatttacctggcgccttcttcctgggctagatgctatgcaggtgtcacaggttggtttgttggcatgtagaatcgggaaatgctaatctcgaaagctcgtagtttccttttcccccccgggtgacatgtttattcacctcttactagttaccacgtccatttcca

SEQ ID NO: 268047 - DNA, 1184 bp, Zea mays
cccacgcgtccgcccatcccccctcccaaagctcgccccgctcccagctagggtttcctcttcccatccacagccgccggggcgccgccgacgaggacagcgccgccacgatgttggagttgcgtctggtgcaggggagcctcctcaagaaggtcttggaggcgatccgcgagctggtcacggacgccaacttcgactgctccgggaccgggttctcgctgcaggccatggactcgagccacgtcgcgctcgtcgcgctgctccttcgcgccgagggcttcgagcactaccgctgcgaccgcaacctctccatgggcatgaacctcaacaacatggccaagatgctccgctgcgctggcaacgaggacatcatcaccatcaaggctgacgacggctccgacaccgtcactttcatgttcgagtcgcccaagcaagataagatcgcggatttcgagatgaaactgatggacattgatagcgagcacctcggaatcccggattccgagtaccaggccatcgtccgcatgccttctgctgagtttatgaggatctgcaaagatcttagcagcatcggagacacagtcgtcatctcggtgactaaggagggcgtgaagttctccacatctggagaaattgggagtgcaaacattgtctgcaggcagaaccaaactattgacaagccagaagaggctaccattatagagatgcaggagccggtttccctgacctttgccctgcggtacatgaactccttcaccaaggcgtcttcactgtctgagcaagtcactatcagcctgtcgtccgagcttccagtggtggtcgagtacaagatcgctgagatgggttacattagattttacctggcccccaagatcgacgatgacgaggagatgaagccctgatggcctgtgacgacataatgctcgtgttgcctgctcttccttccagccgttgtttgcttagctactctttgcaagcgaagaagggatgtgatgtgtatctcttaggctagactgcttcagctagttttctgtgactgcttcatgaatccatggattactgatttactgggcttgtgctttgtgtatgatgctgccatctggtctcccaacaaaaaagggatgtggtgtgtatctcttaggcctggttttcttttttcttggcataagtgtcatccttccccc

SEQ ID NO: 268048 - DNA, 519 bp, Zea mays
atcgcccacgcgttcgtagagatgcaagagccggtttccctgacctttgccctaaggtacatgaactcgttcacgagaggcgtcttcactgtccgagcaagtcacgatcagcctgtcgtccgagctaccagtggtggtcgagtacaagatcgctgagatgggttacattagattttacctggcgccaaagatcgaggacgatgaggagatgaagccatgattgccatctgtgctcgtgctgccgactttttctcgtcttccatccatggtttgcttattagctattatttgcacgcaaaggaaaaaaaagatgttatgttttatatcttaggccagactgctttagctacttatttgtgactgctgtgtgtccatggatttatagtgaatctagattagtgggcttgtgctttgtgcatgccgctgctgtctgcccatttttctattcagacatgaaattctttgttgggagcttgataagctgcatgataagaagccctttttaagtattgactagtt

SEQ ID NO: 268049 - DNA, 501 bp, Zea mays
ctcgagccctcgcccctctcaaacctccgcgctcccgcccagctagggtttccccgatctcccctcctcctcaaccgccgccgtctccgagagcgccgccacgatgttggagctgcggcttgtgcaggggagcctcctcaagaaggtcctggaggcgatccgcgagctggtcaacgacgccaacttcgactgctccggcaccgggttctcgctgcaggccatggactcgagccacgtcgccctcgtcgcgctgctcctccgcgccgaggggttcgagcactaccgctgcgaccgcaacctctccatgggcatgaacctcaacaacatggccaagatgctccggtgcgccggtaacgacgacatcatcaccataaaggccgatgacggttctgacaccgtcacctttatgttcgagtcgcccaagcaagataagattgcggatttcgagatgaaactgatggatattgatagcgagcacctcggaatcccggattccgagta

SEQ ID NO: 268050 - DNA, 1409 bp, Zea mays
agaagctggaaaaagcccaaacaaaaagggcattgtctttgtccgcgtggacgcggctgacttgcgaacccaccggaccaaccaggacttggagcgtgcggcgtcggagttcgccggcggtgaggagcagaagaggaagggaaccaaagatgggctgctccatctcggggctcaacgcgctctacgatgcggccacgggcggcggcgacgtctggatcaacgagcgccgcttccgcgtccttcgccagatcggcgagggcgggttcgccttcgtctacctcgtcagagagcaccagcccgcctccgatgccgcgttcgctaggcgtgaccccgcccacgtctcagaggatggaacgtatgccatgaagaaggtgctgatacagagcaaggagcagttggatctggtgagggaggagatccgtgtgtcgtccttattcaatcaccccaaccttctgccgcttcttgatcatgccataatagccgtgaagagtcaacagggagattggagccatgaagcatacctacttttccctgttcatctggatggtactttgtttgacaacgctaacatcatgctgtccagaagggaattctattccacagctgatgttctgcaaatattccagcagatgtgtgaagggctgaaacacatgcacagctttgatcctccatacgctcataatgatgttaagcctggtaatgttcttataacctggcgtaaaggacaagcacctgttgcaactttaatggattttggaagtgcaaggcctgcaagaaaggaaatccgttctcgttctgaggcactacagttgcaggaatgggccgctgagcattgctctgctccttaccgggcccctgaattatgggactgcccaagccatgccgatattgatgagaggacagacatctggtctctaggatgcactctttttgctatcatgtacaatgtttcaccatttgagtatgctcttggtgaatctggaggaagtctgcaacttgccattgtaaacgggcagttgaaatggccagcaggacccaaacctccttatcctgatgagcttcgccattttgttatctggatgcttcaccctgaagctgtaatgcgccctcacatttctgatgtggttcttcatgttgacaagctcattgcaaaatacttgccctagatcaccctggagttcctctcatttctttgttatccagtacagagccaatattatgtaaaattggcccatgcttgacgtcattcagtccttggataggctcaatattgattcttttgtagaactttcaggatattaccccagtctaatgtctgtggatctttgatacccagggagtcccggtgtcatgtaaaaatgtcaaactgaacatcaaagcagctatatgatatccttgcccttgggctc

SEQ ID NO: 268051 - DNA, 989 bp, Zea mays
  unsure (1)..(989): unsure at all n locations
ttggcttttcaatcattngnnttggcannatttaccctgcgggatgaggttgcgtgagtttttcttcaattcgagagggaagtgaggcatgccctttaattgnngccgggccattngnnatgatcatganncatgcatacgagtcctnntgaatttctgaagnntctgatccgagttgtagaatgcctccctttatgatttgcacaagccgagggttgattgtggccaaggtttttttaggattcaagggctgaaattgatttcaatggagttgttctggtacaaaattatttggaaaggactggacgtgggagttgggcaaaacagttccgggaagcttgcaatgtcccaagggatgataccggaattgctaagggtcatggccaactacggggaggatgtagttgaagctctgggatatgaagtggatcggctggagtctgagatccaaaagcttgtgcctgggattaaacatgttgacatcgaggcacacaatcccgaaggacttgctcttagagcagaagttttgtagattacctgtgtacattgcatttgattaacactgttgctggtcgctgccagtttgatttgggtccaccaccattcgataagattgtcttccattggcaatgtaagaatcagatggctgttgttgcgtagcgaggcggtatttttatttggaagaagacgtggtcgcgccccacatggaaggctttatgttcaaggttggcatcagtatgtatttttgccttgcgatgcagtcccataagtattactccctccattctaatttttataatttgtttaacgttttcaatctcaaatttgaccactcatcttaacaaaaaattatgaaaaaacgaaaattttcattgtagttttgtttattatcaattatactttatatactttacatatggctttttttttgttttcttaagatgagtggtcaaacttgaggttgaaaaagtctaaagaattatattttc

SEQ ID NO: 268052 - DNA, 285 bp, Zea mays
atttactggggctggttgctatttttctcattcagaggaataggcatgctttaattggccgggccattgatgatcatgacatgcagcgagtccttgaatttctgaagtctgatccggtcgtagatgctctttatgattgcaaaagcgaggtgattgggccaggtttttttagattcaaggctgaaattgatttcaatggagttgttctggtacaaaattatttggaaaggactggacgtgggagttgggcaaaacagttccgggaagctgcaatgtccaaggatg

SEQ ID NO: 268053 - DNA, 632 bp, Zea mays
gtcttggggttggactgagtgcgctcgtcctgtgaatctggatcctgggcaccagtcgggttggtgtagctggagcctggagccggaaaggacacacgatgaatcaggaggcgaaggactcgaggccctcaaggtctcccagcgagccaaacctcttcctgcaatggggcagccggaagaggctgcgatgcgtcaaggcgcgtgacgatggctcgccatcgccgtctgtgaaggtctgggacgcgccataccccgtgctgctaggcccctccttggagctgacattgcggcattccggcgccctagcacctttaaccgcaggaaatcagattcactagtgaacgagtacaggcactcgatggcgctatcgctggagaaggacaagtattacacaacgaggggttcaccgttcgatggaaacgggttcgactttggtagcatagctgacgagaagggaaccaccgcgttgcctagattcttcgtagcattgtcgaacaaggagaaggaggtagcacttcatggcaatgaagggctgcaagctgccacagaggccaaagaagcggcccaagctgatgcataagtgcttgcttatggtgagcccatgagcttggttatcagatttgtcgcatgag

SEQ ID NO: 268054 - DNA, 455 bp, Zea mays
gtcagtcctgtctggtgtgtgcaccgcgcgtccgcgcccccgcctggctgccggcgtctcgcccagaacgcgtaggcgcagcaacaaactaggaagcaacacccagctgcctcggcgcaacccgtcctcttctactccagaggcacctcggcatccgccgaccggtttccgagaggtttgctggagtgcaccagcggtggggcagcaaatctgtaactgacacacgatgaatcaggaggcgaaggactcgaggccctcaaggtctcccagcgagccaaacctcttcctgcaatggggcagccggaagaggctgcgatgcgtcaaggcgcgtgacgatggctcgccatcgccgtcgccgtctgaaggtcttagacgcgccataccccgtgctactaggcccctccttggagctgacattgcggcattccggcgccctagcacctttaaccgcagga

SEQ ID NO: 268055 - DNA, 321 bp, Zea mays
cagaagcgtagacgcacgcacagcccaggaagcaacacccagccgcctaatcccgcaacaactcgccctcttctacccccatcggctcctctgcatccgcataccggtggcctacaggtttgctggagtgcagtgcacgggcggtggagcagcaaatctgcaactgattcaggatggatcaggaggcgaaggactctaggccctcaaggtctcccagcgagccaaacctcttcctgcaatggggtagccgtaagaggctgcgatgtgtcaagacgcgtgatgacggctcaccatcgccgtcgccgtctcaaggtcttaggc

SEQ ID NO: 268056 - DNA, 1450 bp, Zea mays
  unsure (1)..(1450): unsure at all n locations
cgcacgcgtccgcagacgcgtgggcggacgcgtgggaaaatctgataattgaaacgtagtgagtgcatnagagtaggattcttaagcaccgggttgccttgccactgagcccttcatccaaatttcaaacagctggcactgaattcctgcaagcatgtacaacgcccacagaaaattgagctgaacacaacccacgcctacatcgggaagaatggcgcaatggtccgtgacccctgtgcttcctagctttatttatcaagacgtcataaattcataaatacgcatctcgctatatatggttgtgaaaccagcatacacaatcacagaggacacatgcctctcaagtcatcatatttattcgccagtgcctgggatggccgagcaacatgatgccggaacccatctcaatccgacggcatcacaaagaacttggtgcacacaattccaggggcattcagcatgcctcactggctgaaaccgtttcctctgcaattacgtcgagtcactgacgtttggggccacgccacggccggccccggatgtcagcgacacatctgcagctatgtccacggatgtaactgcagaggatccggccaggcactggctacaccgctttgattggggtcctggggctcgaaggaataccaccaaacctgttgaccaggaccttgaaacaagggaacgaaacggcgtacagcacggccagtacaattggtgcagcaataagccaacccagcatcgcatggacgatgctcattagcacatcctttgaggcatgaccggtgagaacattcttcaatgcgtcggctgtcaaggggaagtgcccgctgccagtgacggcttcacccaaacgcaagaaagggacgatcaagcttagttcaattggagtggcggccaaatttagaaccataagagtaacagcattgcaacgacttcccaacattgctacaacaacagcaccaagaataacagtggtcccacatatcggaaagatcccaatcgtgacaccgagggcagcagagaaggccagttgcttgggttctgctccccttctgatgacctgcagcacgggatcaacgatcttggcctggagccatggcaggacgccagtcctggtgagaagagagcccattcaattaagccgggggcatcacctggtgggtgctcgtcgcctcgctggcgaaggatccgacgaagacctgcgcacctggcgtagggcggcggcggcggcggcggcggtcgcccagttgttgtcgcacgcacgagacaagagcgccagagaacgcgtgcaggggtgaacaaaaggcagaggtgaacgcagtccggggctctcgtggtccgaccagggacgggggcaggagacggacgggcgagagggccggaatggaggaggaggaggaggaggaggagaactggaggacgcccacccacgcgtccgcccacgcgtccg

SEQ ID NO: 268057 - DNA, 416 bp, Zea mays
ccagtgatggtttcccccaaacgcaagaaaggggcgatcaagcttagctcaattggagtggcggccaaatttaaaaccataacagtaacaacattgcacggacttcccaacactgctacagcaacagcaccaagaataacagttgtcccacataccggaaagatcccaatcgtgataccaagggcagcagagaaggctagttgcttgggttctgctccccttctgatgacctgcagcatgggatcaacaatcttggcgtggagccatggcaggacgccagtcctggtgagaagagagcccattcaattaagtctagggcatcgcctggtggtggagttgaaggaagcaggggcagggccgacgaagatctgggcacctttggtgctcgtgctccgacgagggagggcgcgatatgg

SEQ ID NO: 268058 - DNA, 530 bp, Zea mays
tggcggccaaatctagaaccataagagtaacagcattgcaacgacttcccaacattgctacaacaacagcaccaagaataacagtggtcccacatatcggaaagatcccaatcgtgacaccgagggcagcagagaaggccagttgcttgggttctgctcccctgcacagcattccaacagaaggttgtcaacaacctcattcaaggagcaggtggagccatggaggagacgtgcatgcaaaatcaggggcactgccgagcttctgatgacctgcagcatgggatcaacaatcttggcgtggagccatggcaggacgccagtcctggtgagaagagagcccattcaattaagtctagggcatcgcctggtggtggagttgaaggaagcaggggcagggccgacgaagatctgggcacctggcgtagggcgggagcggcggtcgcccagttatggcacgaggggtgaacaggagaagaaaaggagagcaaaggtaagggcggtacggggacctttggtgctcgtgctccgac

SEQ ID NO: 268059 - DNA, 493 bp, Zea mays
acgcgtccgcccacgcgtgcgcgcataacaagatggatttcctgcctaagaaagagttcgatacgtacggctgcgcgtatgagccctacgagcagtgtcccagatcagattcaagagctacttacagttcaagagacgatgacttgtggagcaagaattcacgctttggctcgaatctactctgctggagagccccaaaacagtccatgtaatggaggaaagaacgagtgaactgggtggaacaaatcgattctgctacgagattttaccaattttgcccgaagctggagacatggacaccacccgcagctgcggggacaaattttgaagggaagtctgggaggggtctgtgctattcttgatcttggtaggcagctgaggattgaggaactatttagtgatgttttcttggaaatgcagatcctttataatgctagtgggcagttgtacagcgcgccacgacgaaaccctgtgaattgttctgttattctga

SEQ ID NO: 268060 - DNA, 588 bp, Zea mays
cgggtcgacgcacgcgtccggccatatccaaggcccacgccatacctttcctgatcgacttgctgcggtcaggccaggcccgcaacagggagaacgctggcgccatcatactcgcgctgtgcaagagagacgccgagaacctcgcctgcgtagggaggctgggcgcccagatcccgctcgccgagctggcgaagaccggcacggaccgagccaagcgcaaggcaacctcgctcctggagcacctcagcaagctgcaggtgctctagtagtcccacccaccactgtccatccacagccacaccactctgtgcgcgcgcgtgcgttttcgacttttccacgccacggtgtatgcgtacaaatgcgagtagtgtagcatcatcatcatcatctgtcgtcgagtgtgatttcggtggggttggtgataagttcgtttcagtcagaggagcaagaccaaacgcttgttcgttctgtcagctcatgtctgcgtgtagtttgattcgagctttttcaaaagctcgcggtgtgggaattacctcggtcgccatcgaaattttctacttatattattattatgactccttcgtcttc

SEQ ID NO: 268061 - DNA, 361 bp, Zea mays
tgttggccgggtcggggttcatcctgtcacaaggtagagaaaatgctaaaagagagtggggtggcttgtaagataaactgaacaagaaaatttaaaagtaatgtgccgtatgaatcgctgcttgatgctagatccaactgttcaaggatatatatagtgatggttctctgtggattactttccccttgtaaatatcttgagctcttgaaaggttattaggttacagggctggtgtgttcatgttaagtttcatgattctgatgtcttgtatgtgtgttaatgtccatttaagtgtctggaaatagtttataaaacgtgattggaaatataacacataaagaaaacattggtatgaccttct

SEQ ID NO: 268062 - DNA, 850 bp, Zea mays
ctgacaatgtgcagcggaacaaggacaagccgtcatcttccgaagaaaaggaggaccataagacctcaacgagcccggtttgccaaaccagccagcttggcgaatccaaagccaacattggtggattgatgagctttagtggagcgccagcctgcggcttccacaacgatgtcaaccccgatgacagcttcatgagcctgatgctgaaggcccagagaccgggcgaaaccgatggcagcggtctcctccatgatgccgtcgctcatcactccgatgagagcgcgcggttcatggcgtaccacctgacagagtttgggaggtatgggaacaacaacgtctcactgactctggggttgcagcacgccgagaacacccagccgggcttccccggcgtcagagaccaagacatctacaactccacagctcctctcaacgtcacctccacatcttcagagtatgattcggcgagccaaatagatcaacaacaacggcagcggtttgaggtgtcacctctgatgcatgatttcgtggcctgaatttcagctgacgcactggaaaacgtggggaagtgacttgtcatttgtagtgccaggacgaacaatatgcctggactgaattttcaggcgtggaaatgtagctgtagttgtaattggggtacagaatcgacgaggtatatagcataaatgttatgtaaatttagtgggggcaggggtgatagtggttaagaaatcctgtaaagatggaatacattttatacgtgtaaaatacgagtatttaagggccacgctgtaaaaatagatttacctgtaaaagataatgaacatatggtcctacttttaccaaaagaaaa

SEQ ID NO: 268063 - DNA, 504 bp, Zea mays
agtcccaccaaacactcagccaggcttccccggcgtcagagaccaagacatgtacaacgccacggctcctcctctcaacgtcgcctccacatcttcagagtatgattcggcgagccaaattgatcagcaacagcaacggcagcggttcgagccgtcacctctgatgcatgatttcgtggcctgaatttcagctcgcccactggaaaacgtgggggaaaactactgccaatttgtagtgtgtgccaggacgaataacttgcctggactgaattttcaggcgtgggactgtagctgtagttaacgattggggatttggggggtacagtacaggaggtatatagcgtaaatgtgatgtaaatttagtgggggtgatagcggtaaaaaaatcctgtaaagatggaatgcatttatacgtgtatttaagggccatgctgtaaaaatagatttacctgtaatgagcacttatgatccaggtaatatatatactgtgcacgctgttgaagc

SEQ ID NO: 268064 - DNA, 263 bp, Zea mays
caaatgttatgtaaatttagtgggggcaggggtgatagtggtaaagaaatcctgtaaagatggaatacattttatacgtgtaaaatacgagtatttaagggccacgctgtaaaaatagatttacatgtaactgtaacgagtgtttgtaatgagtgtaaagaactgccacatgccatattttcgatgggtgagaagatatagaaatattattttctttgttaaaaaaaaaaaagcaagaacaaaagaaaaaagcatgaaaaatg

SEQ ID NO: 268065 - DNA, 744 bp, Zea mays
gaaaacccggggcgaccgacgcgtacgcccacccgtccggaaagtgcaagctaagttcgaatgctccagactttgtacctgtctcacagcgtacaaaagatgagtctggcgctgagcagagagaatccagcagcgtacttgtagacaggacatctgggatacaaaatgcggctgagaagccccacgataccaaggtgatcaagcctcaggatccgtgcgtctccgaagagcaggctagcgaggccgagaaagagaatggacctcagggatgtcgttgcagcggcaatcagggccaagaggaggcagcgaaaactgcaactaaccacccgccagcttcaggcttgaaggcggcaggtgtggaggggaagcagcagcagcagcgctggaagaaggtcgaaaatccaaagcagcatgcggacagcgtccctgcccagtgctcacaggaggaagcacctgagaagcggttaaatggggtcagcggctgttcgagcgcagttcaagagggttgcgaggagcagagggccgctgccaaacttgcttctctcaagatcggttccagggcggcagtggaagctgaccgtaaaactagcccagttggtgtggtgacaataggctcgatgcctgtccgggttaactgttgtgacgtctagtagtggcccatccggagcttttttttttggtctcacccacagttttttccctttttgcccttttgggttaatcttttacccccccctgtctgcc

SEQ ID NO: 268066 - DNA, 562 bp, Zea mays
  unsure (1)..(562): unsure at all n locations
ggctgctcaagatgaggagtttgaagttatggatggtgaggatgacgatgatgaagacaatgatgatgaagacgaagatgacgaggatgatgatgatgatgatgattacgattcaaagaagaccaagggaactgccggaggggaagggcagcagggcgaacgacctgcagagtgcaagcagcagtgaggtgctgcacaatgaatgttggcaggcattgtttgtggagcaattagtttggttctgcttgatgctcaaggtcattgagttggtttgtggaaccttcgagggggcgcttgttggttttatggaattggttggggaatttttctgggacatggcgttatatcattatatgtgggtagtttcttcactttctgtattgggtttcagatattatatatgtgttcttatgcttggagtgaagatggttgccactctggaatgtcttattgngcataccacaggcatagtgtgctgtctgtactttcattaagcgtgccttgccgcttaaaaattttgctcttgggaaaaggttagctttttacctgaaattgttatgcg

SEQ ID NO: 268067 - DNA, 430 bp, Zea mays
cgagccggcgtccgccatcgactccatgatcggggcgctcaggcgcctcaagggctcggacgtcagggccaggggcatccgctccagcctgtccgggcgcaggctgtggacggagatgtgggcggacgcctcggtggcggccgacgaggtggaaaggggcgtggaggaggctctgctgcacgaagtggagaggaagcagcagcagcagcttggagctgggagcgccgcccctggttttccaggcccgtcatcgcacgtgcaaaacgtgttttgacacgcgaagaaacatgaaccccgagcctcatttcttgattctttttttttaagaaccggatgcgcaaaacgagcatccgcgtctctggctctattgatttgtttttaatagaaatcggtcttgtttgtgtaaaaaaaaaatttaatatttattaat

SEQ ID NO: 268068 - DNA, 314 bp, Zea mays
ggaagaatcggtggagactcttctttgagtgaggccggtgagctttattcaaggaagcttgcgagctttgtggagaagcgactgaaatccgagcggactgcctctatatggactagcacactccagagaacaatattaacagcacatccgatcattggttttccaaagatacaatggcgtgctcttgatgagatcaatgctggggtctgtgatgggatgacatacgatgaaataaagaaaagtcaacctgaagaatatgaatcacgaagataagacaagctgaggtatcgttatccgagagggagatcctatct

SEQ ID NO: 268069 - DNA, 310 bp, Zea mays
  unsure (1)..(310): unsure at all n locations
cacggaacctgtggatgtggttccgtatcgttctgttggatctgcctgtcgtgtgctagtagtgtgcctgttgtcacctgtgcggagggcggcgttaaatttgcgttttgcttcctcttctcgggaataaacagagttgacagtactcggctcaaaaagttcagatcgactcagttgttgttgcttttttttttttgccttgatttttcatctcgctcagctcgagtgagcacgttctgttgttaggttgcctgatcttggttatcaccggacgtaatgaaacaatggaacgcagtgcncnnnnnaaaaa

SEQ ID NO: 268070 - DNA, 420 bp, Zea mays
  unsure (1)..(420): unsure at all n locations
gnggaggggaggatcgcaaaactagctgcagactttttggtttctccttgactgaagagatcttgccagcagatgatgatgacgtcaaggaagtgagctatgagactgagtgccagaacccacggatgctggacctgttcgggtacaactgctcaacaccgagtgccgctcttccagctctgtgtgctgccgccccctttggaatgtgatgctgcttcgaatctttcgataactttgctccatgtactcttagaagttttactttcccagtaccccagtgtagtcataagctgcttttgacatcattccctttggtctgccccaagttaagcaggcatttgcccaagtaaacgaaggttcgttggtgaccccaaaaaaaaaccccaaaaaaaaaaaaaaaaaaaaaaaaaaaaanaaaaa

SEQ ID NO: 268071 - DNA, 237 bp, Zea mays
gctccatgtactcttagaagttttactttcccagtaccccagtgtagtcataagctgcttttgacatcattccctttggtctgcctcaagttaagcagtcatttgcacaagtaaacgaaggttcgttggtgaaccactcctcgacatgcctcaccctgtcacccaaactattgtggttagtctcaggatacccagagacaccacattgtaacttatgtcgatgatccttcagaactg

SEQ ID NO: 268072 - DNA, 680 bp, Zea mays
gccattattgagtgccgatccatctatcatctcccgcgatcttgaaccaaatgactgtttcatcatattcgcatcagatggattgtgggagcacctcagcaatcaagaagccgttgagattgttcacagccgtcaacgtgctggaagcgcaagaagactcattaaagccgctctacaagaagcagcgcggaagcgtgagatgcgttactcggatcttacaaagatcgataagaaagttcgcaggcatttccatgatgacattactgtcatcgtcttatttataaactatgacctattattgaaaggtgctccgcagggacaacccctctccatcagatgtgccctagattattgacagtgagctagttcacccactggtattcaagctcctgcgggcagccatatccagagtcagctgacatggtcaaccggttgtgaaaagcgcacaacctccggcaccagtttccttttcgtttccccttttttgcacataaaattgacaagtcgctgaaattgccagttttcccctcttggattatgtcggataaaatgcgtatactcttcggttttggagatatatgtctagactctagagcgtgagggaaggttataaagtcttgtatgtctttgttctcttgcagtcttgcttacagttacagctagctcttttgtatgtaaca

SEQ ID NO: 268073 - DNA, 2049 bp, Zea mays
cgctcggctctactgggcagatgcacccatctgtttcgcggagaagcccgtgctcgacggagactcggagtgtagaggactagaggggcgaagcgatccgaactccgagaaccccagggccagggctcagtccacagcgtgagcagagaacgcagcggcctgccggcctccgccccgcactcccgcagccatggccgccgccgccgccgtggttgccgagcccaagaccaagtacgatcgccagctcaggatatggggtgatcaaggccaggctgcactggagaaggccagcatatgcttgcttaactgtggtcctaccggaaccgaagcattgaagaatctcgtgcttggaggcataggaagtgtgactgctgttgatggctccaaagttgaagcatctgacctggggaacaattttctgttggatgaaggctgtttggggcaaccaagagctaaatctatatgttctttcctacaagagcttaatgacgctgttaaggccaagtttgttgaggagtctccagcgcatttgatagatactaatccttcattcttttcccagtttactgttgttattgctacccagctcccagagagttttttactgaagctggattatatctgcaggaaagcagatatcgttttggttgctgcacgttcatatggtctaaccggtttggtcagggttagcataaaggagcattgtgttatagaatcaaaaccagaccacttcttggatgatttgcgacttcacaatccatggactgaactaaagcagtttgcaaaatcaattgacataaacgataaagatcctgttgtccacaaacatactccatacattgttatccttgtgaggcttgcagaaaaatgggcagatgcacatgatggtaacttgccttcaactaggcaagacaaaaaggaatttaaggatctaattcgagcccatatgcttaatgtagatgaagaaaattacaaagaagctgtggactcttcatataaagtatcagtcactccaggaatcagtaatgagattcgtcagataattgatgatgactctgcggaagtcaattcctcatcgtcagatttttggattttagtggctgctttaaaggagtttattgcaaaggagggcaacggtgagctacctctggagggaacaatacctgatatgacttcccttactgagtattatgtaagcctacaaaagatttaccaagctaaggcagaatttgactgtcttgccctggagcatcatgtaaaggaaatcttaaagaggattggtagagatccggattcaatttcaagagcatatatcaaaacattttgtaaaaattctagaaaactaagggtttctaggtatcggagttttgaggaggaatttagctctccgcttgtctctgagattcagaggtatttcaccgatgaagactacagttacgcaacgaacttctatattctactacgtgctgttgatcgattggctgccaattatagcagattgcctggaatcttcgacagtgagattgatgaggatatccctaggctgaagactgttgcggcttcagtggcaagtgagatgggtttgaatggagcatccttatccgaagacctgataaccgagatgtgccggttcgggggtgcggagattcatccagtggctgcttttgtcggtggagttgcttcccaagaagtgattaagctggtcaccaagcagtttgtgccgttgccgggaacattcatatttaatggaatcgacctcaaatctcaagttttgatgctataacatggatgtggaacgttgtctgtgtggactggatttgagttggcccagattttgtgccagggcacaacgctgcaaatggaatctgtttgcccaacgcgtagccaaatatgtgttgcatgatattttagagcctgtttgtttcctcgcaggattatataatccagcttactttatatagattatataatcccatttatataattttgttagggatggctgtttatccaaaaaaaaaaaaaaaaaaaaaaaaaaaaaaaaaaagggaa

SEQ ID NO: 268074 - DNA, 416 bp, Zea mays
attgaggggttggcccagcttcgcggagaagctacactaccatactacctcttctgctccgtcgctatattcctcgccggagtgtaccggggcgaagcatccgaacttccgaaaagcccccagcggcctcccctccgccccgcagccatggccgccaccggcgtggtcgccgagccgaagaccaagtacgatcgccagctcaggatatggggtgatcaaggccaggctgcactggagaaggctagcatatgcttgcttaactgtggtcctaccggaaccgaagcattgaagaatctcgtgcttggaggcataggaagtgtgactgttgttgatggctccaaagttgaagcatctgacctggggaacaattttctgttggatgaaggatgtttggggcaaccaagagctaaatctat

SEQ ID NO: 268075 - DNA, 575 bp, Zea mays
agaataccttgcgagtaccagaacaggaacctgtctgtacgcatcgacgaggaagggagccggcacccggcgcacctggccatcaccttcctgtaccagggcgggcagacggacatcgcggccgtcgagctctcgcacgcgcacgcgcagccgccgtcgtggcggcccatggcgcccgtgcgcaggcgcggcatcgtgacgtggcgcacctcaagcgcgccggcggggccgctgcagctccgcctcgtcgtcacggccggcgtcggcggcaagtggctgcgggccggcggggacgtgctgccggcggactggcggcctgggcaggtgcacgacacggggctccgggtccgcgacgtcgccctgagctcctgcgcccgctcctgccgcggcgccgctacagccggcgccagcgaggagctcaggtagtagagtagattagatgtaggcatggcatacaatggcattgggctggaggcgagcgagattagcttgctgcttgagtgcccatgaaggatgctcgtgctcgtccattgaggaaaattaaaagcaaaccagcagagagctgatctatgatg

SEQ ID NO: 268076 - DNA, 714 bp, Zea mays
gatctagcaaacattgttaatgagtctgctctactagctgcacgaagaggtcggaatactgtgtctcgggaggatattatggatgcaatcgagagggagaaatatggggtcactgggaggcaagaatctgattctgaacaggcaaggcctcaccaagttatttccatggctatctaaacctggaaataaaccatcaagccctgatgatttccgaggactgatgggttatcacacattaagctaacttagtagctcttgcaacttgcaagaactgagaaagaatataaagtgcaactaaatctggggaactgttgcctgtacttttatgtacatcagccgatatacttgtcgatattatgtacgaagtatgctgcaaattgcaaccggtggctattgggactttgagaagaaagctattacaaactacatgagggcggtttgcgaatacaaaattccaacaattttcctagcttaagagtcagtttggataccaagggctaatcagtttcgtgcttcataattttgttagaaacacgactcaagtttcgtcacataccctgtaaagctagtggcgctcctgcttctttacacagaccaatcattcctctgattcttcccaactagaagtctggatgtgcaacgctgtgcaagtttacaaatgcagtgtcaaatgcggcgcatgggaactgaatctgcagcgaatgtgcaagaaat

SEQ ID NO: 268077 - DNA, 442 bp, Zea mays
ctcacgcgtacggcaaactctgtgagcttctaggccatcagcggcgaacctactgaaacgacagagattgagctgcagttccatggctctcggcatgacaagttctccattgatctcatggctccccctcctgggaagctgtctgatgatatagatgcctcctccgtccctgatgcagataagaagggattggattctgagatggacatgttggggagaggaaattcggaaaagaaggatggtgaatggactctgggagggctggatattgatttggaggaccagaaggtgcaaagaattccagccgatgagtccacgcccaagaagctcacactgcagttggatttggagaagcccagtcttggtgatgaaaaatcaccatcacagcgactgcagccgcatcaacatccacaacaattgcatcagctgaagccctcaaaag

SEQ ID NO: 268078 - DNA, 858 bp, Zea mays
caaatcgccaaccatatacagtgaactggctgaagatagcaaatcctgtaaacaacatgacttgagcattcctgtggacagaaaattggttgatgaagctagtaaagacttgttagtgatggctgctggcctgaacaactcagcaatgcaaccatctgatttgggcattactacagagaagcattctggaaatcctagccagggagatgaaaataacacagtggacagttttcttgaaggaagaaagacgaataatgtatgtgcattgtatagtagttcaggaaaaggcaatgagatgaaccttaagcagcctgcaatgctcttactttctgcactggctgagactggccttgttactctaccatcacttttgactgctgtgttgctccaggcaaacaacaacaggtcatcatcagagcagacattggcgattcttccatcaaattttgaagatccggccactggtgtattgaaagttttgaataatatggcacgtttggatataacccttttgcggcacatgctgtctagatcagatctaaagatggagttcttccatttaatcagcttccttttgagtcattgcatgaacaaatggagagtgccaaacgatcaggttggtttgctgcttctagagtctctgctacttcttggctacttttctttgttccatgctgggaaccaagctgttcttcggtggggaaagagtcccactatacttcacaaggtgtgcgacctgccatttgttttcttcagcgaccccgagttgatgcccatcttggctgctgctctgatcgctgtttgctacgggtgcgatcataaccctttgcgtgtacagtaagaaataagcacggatat

SEQ ID NO: 268079 - DNA, 1276 bp, Zea mays
cagtgagcgccacctatgtgaccgcgttttcgacggcctcgcccccttcggcgatctcgccttcatcgccgccgtgcgtacccaggctctgcagctcatatcgttcggtgacgctatctcttcctcaagccgcgcgccggagcgcctcttccgcgtcgttgacatgtacgaggctgtgcgtgacatcctccctgaccttgatcctgtgttctctgacccatactccgctgcactccgtgcggaggtctccgccatgtgcaacacactggggtcctctatcaagggtacacctatggagttggaaaatctcatccgccgtgaccctgcccgaattgctgcccaaggtggcgtcatacatcctatcactcggtatgttatgaactatctccgagctgcgtgtggatcgcggcagacattggaagaggtgatggaaggtgactttggggctaatggaggtgcgcctgtggctgttgatcctgaccgtcccacatcatcccttgctgtgcacattgcttggatcatggatgttcttcaaaagaatctggatatgaagtctaagatataccgtgatccatctcttgcttctatcttcttgatgaataatggcaagtacatcatacacaaggtgaatgacagtgagttgggtgttttactcggtgatgagtggataaagcagatgacaaatagagttcgacgctggagcatggattatcagcgggcaacatggggcaaggttacaactgtgctgcaaagtggtactccaggcattggtggactcccagccaaggcaatgctgcagaaactgcgaatgtttaatacatactttgaggagatctatgcggcacagtcagaatgggtgatagcagatgaccagctaaaggttgacattagggcagcggtggaggagacagtgatgccagtttacgcctctttaattgccaagttgaagtcttctcctgaaactgggcgtgatttgtacatcaaatacaccccagaggatgttgtagcccacatccagcacttggtttgaaggagcagcaaagtgataaatgatatgtatccttgtagcctgttatactgcagcttctgctcttctgaacttgtgaagatgctaccatggattctccatttgtggttaatgtcttgtactcacatatggcgatgctgttgctcaaattacaactgtgcatcactgtatttgtcctccatgagtatcatgatcatgttgtgacatacatctgtccagagtgatattaagctgtggcctttcaaggtg

SEQ ID NO: 268080 - DNA, 519 bp, Zea mays
  unsure (1)..(519): unsure at all n locations
aattgccaagttgaagtcttctcctgaaactgggcgggatttgtacatcaaatacactccagaggatgttgtagcccatatccagcacttgtttgaaggagcagcaaagtgataaaggatatgtagccttgtagcctgctatgctgcagcttctgctcttctgaacttgtgaagagcctgtcatggatgctcctatgcgtggttaatttcttgtactcacgtaaggtgatgctgttgtctcaaattacaactgtgcattgctgtttttgtcatccatgaggaagttatgcagttcggcaaatgttgtatatgtgtgtaggtgtatctgtatcaatgaatagcatgattattttgtaacagtattaggattccatctctgtttcaagcactactttaatttaaccccattatgttatgcgtggagatcaatatttatttcaagcaanatttatttattttatctttatataatatattatttttaatttttttatttatttatattattttttaattttt

SEQ ID NO: 268081 - DNA, 421 bp, Zea mays
gtgatgccagtttacgcctctttaattgccaagttgaagtcttctcctgaaactgggcgtgatttgtacatcaaatacaccccagaggatgttgtagcccacatccagcacttgtttgaaggagcagcaaagtgataaatgatatgtatccttgtagcctgttatactgcagcttctgctcttctgaacttgtgaagatgctaccatggattctccatttgtggttaatgtcttgtactcacatatggtgatgctgttgctcaaattacaactgtgcatcactgtttttgtcctccatgagtagcatgattattttgtaacaatattaggattccatatctgtttcaagcactactttaatttaaccccattaagtgttaaaaaaaaaaaaaaaaaaaaaaaaaaaaaaaaaaagaaaggg

SEQ ID NO: 268082 - DNA, 531 bp, Zea mays
cccacgcgtccgcccacgcgtccgcccacgcgtccgcggacgcgtgggcggcaccacggcgcagtaggatggcggcggcggccccgacgagagcagaggtgctgtcgctcttccgttccttactccgcacggcgaagaagttctcggactacaacatccgcgagtacacgcgccgacgcgccgcggactccttccgcgaaaaccgcgccctcgccgatgcgtcggccgccgccgcggcgttctcggaggggaagaagcagctagaggttgcgaagcggcaagcggtgatttactcaatctacgcccccaaggccaagagcgtgatggagttgaaggtgcagtgatggacgaggtgctgcgcccttttcttcctcatcgttttcctttccgaattcgtttcttttctgtgacgatgaaactataaactgttgcattatcacgtttgctggatgattgtcatgatatagcttcttactgtgcaataaattactaaattttattgctattatctctgacaatcgtctgcaacgc

SEQ ID NO: 268083 - DNA, 480 bp, Zea mays
tctcggacgcggtgaccaactcgcagccggcctctccgcctccggctctcccctcctcgagcgttttcggcaccgcagttcggtacgatggcagcggcggccccgacgagggcagaggtgctgtcgcttttccggtccttactccgcacggcgaagcagttctcggactacaacatccgcgagtacacacgccgacgcgccgcggacgccttccgcgaaaaccgcgccctcgccgacgcgccggccgccgccgcggcgttctcggtggggaagaagcagctagaggttgcgaagcggcaagcggtggtttactctctctacgcccccaaggccaggagcgtgatggagttgaaggtgcagtgatggacgaggtgctgcgaccttttcttccccaccgttcccgttccagattcgttgcttttgtgtgatgatgaaactataaactgctccgttgtcgcattttctggatgattgtcatgg

SEQ ID NO: 268084 - DNA, 756 bp, Zea mays
aaaatggaagcgaacatggatgtactagaagatgaccatggcaaggaaatgcttgaacaagtggtgagcaatcctgctctgcaacgtcacactgaggtcatggaggaaggatcactgtcaaaacaggaacttggtgatggcatagaggggactattccagcaactataggatctgggggtctggatgcacctccagaaatttcacttccccaacctgaggtggtggtggcaacaacagcaatcacacagtttaacaaggacatggaggatgtgttgcctccagcaattgaggatggtgcactacaagcaaccctcgaacatgctgttggcataccggaagttacacccgctgatgtcttgctggatgttgcaccttcttcaggtgatgacatggagattatgccctctgctatgacagaacctcgactaggcaaagaaactgctcctgttgctagccctcctgacagtcaagagaagccatccatcatgcatgattctgagacaggtatggaggttgataaagttatcgatgatattcatggggatggtagggtgagctctattcttggcaccaaacttgatgttgctgcaagtgatggggattctgaagctttgttggtggaaagtagggtaaatttaagtcggatacctaattccccagaaagtacacattgaacaccttttattccattttaatttctttttgtctgagggtcttctgccctcagcctagcccgagttgccatattttgtttt

SEQ ID NO: 268085 - DNA, 1073 bp, Zea mays
taaacccttgcaatctgagaggcaacaattaatctctgtttccaataggcggcttgaaagagcacggcttgatcagagtcaaccaaattatcagacagatgcggcacctggttgtgcacagtctgcagaactctttccagtgacgtcaatgatgtttaatcacgcacctattgattctgaaccactgaaaaatgagttgcacaaattacgattacacatggacacactcaataaagtccatgaaatgaagaaaacccaacttcagaccgcatgtagccaagaactagagaaggtaaagagaaaatatgatttgttaattaaagaacatgattccactcatcttcagcaaaagaaggcacttggtgatttttaatgagaaagttcagcgcaaccaatcgctggctgaggattttcgggccaaattcatatcactgtctgcagcacaaggtgcagcaaaaggccatacccctccagttcgtcacacacctcaggctacccaagtggtgtcctccacatcatcaattgccctgtcatcagcttgtcgaccagcagtgccgaggcctagggttcaagctccacaggtggaccaaccattattgtcattgtcgcagttctcccgtccgtctttgcaagtggtccaacctcccaacctggaactaggcaatcttttcagagcaacgtcaacgactcttagtcatatgccacctcaacgtgggagctatggagttcagagtgaattggctcctcgctcacctgctcctcatcttcagttcagatcgccacgggcacattccatggcacctggaaatcagcagcaatcgccagcaattagtgtggatgcaatgtcctcaaggacacaaccagtgctggcggcaagcacatccccatcagatatacatgtgggacccctagcagcctcagccttgtcaagtttacacttctgttctcccttcaacctcattaccctcaagcttgcattctagtcacctggcacaacgtgtgccaccaactccttacccaactttacaagccggggcacccaaaggctcgaatgcaacaatgccttccatccc

SEQ ID NO: 268086 - DNA, 926 bp, Zea mays
gaattcccgtgtgggccgacgcatccgcttggagatgccactggtatacttctatggtcacccaaatccaagtattaatgcgggtgtttacaaagttcttatgaaggagctagctaaaacattggagaaacagttctctggcaatgctgaatctagggcagcaggaatggttatcaatacaatggggtgggttgaaggccttgggtatgagttacttctcaacgcaattgaaaccttcaaggccaatgtagtactggtactgggacaggagaaactctggaagatgttgaaagatgcagttcaaagcaagtccaacattgatgttgtaaaacttcataaatcagagggtgttgtcctcagaaattcaaaatatcggcaaagaacgagaagcttccgaatcaaggaatacttttatgggattgcaaatgatcttgcaccgcactcaaacattgtcaatttcagtgatgtctcggtgtataaaatcggtggtggccatcaagctccccgttcagcattacctatcggtgcagagcctgtggcagatcctactcgacttgttgctgtcaacatcagcacggatatgatccatacagtgcttgcaatttcctatgctaaggaacctgaagaaataatatctagcaatgttgccggattcattcatgttactgatgttgacatccaaaggaagaagctgacgtacattgccccttgcccgggggacttgccaagcaggttgttgatcgcgagttcacttacatggtatgaagcgtgatcagtctaagttagatgggccatatgcccatacgcatgttgtaaagccaggacatgtgacgttgggactgagcgttcgatgtctactgctaaccaagagaaccgatgcaaggccaaaaaaccaaaaaaaaaaaaaaaaaaaaaaaaaaagagaa

SEQ ID NO: 268087 - DNA, 1467 bp, Zea mays
tggtgtggtgatcagggtctcaagctcaagctgatttcagattcacgagtcaagatccgttagagcattttgacaacgagatgtaatctccttcagttatccaagattctgctggagggaactctgtatttttgtcagtatttcgaatactgaggtggcctagtgatgcctgatacagtgaagttccatcgacatcttctgattctggactgatttcgccagtaaatttcaatgtgcagacaatgttgataccagttaatgtgtgcccagcactggaagaaacagttgctttgtaaaggacccaaccgtggttatctggagcgtgtagctccaccttatcggctttaacatatgatccatacttgtgattttgtttctttctggtgaatgttgctatgtcctatgcttaaatacaccagagatcaagttcatctgcaagcctatacggatttcaaggctgaaccttacagtggagggaattgtttgacagtcaaaggatctcttcagcagaacattattttctcagaacagctttttaatggaggacttgccatggaagatggacctgttcatctattttattcgataagagccaatgcaagttctgctttagggttgtccctggatctgtcttctagaaacaagcagggtacttcaaaaattctggttgcagaggacatagcaacattcaccagaaagaaacaaaatcacaagtatggatcatatgttaaagccgataaggtggagctacacgctccagataaccacggttgggtcctttacaaagcaactgtttcttccagtgctgggcacactttaactggtatcaacattgtctgcacatggaaatttactggcgaaatcagtccagaatcagaagatgtcgatggaacttcactgtatcaggcatcactaggccacctcagtattcgaaatactgacaaaaatacagagttccctccagcagaatcttggataactgaaggaggttacatctcgtggtcaaaatgctctaacggatctgaactcgtgaatctgaaaatcagctggaagctgaagaaccctgatcaaccacaaccaccattcagcaagtacaatatctatgtggagaagttaacggcagattcagacttgaaagttcccagtcccaaaagctatcttggagttgctagtgtcgatgccttctatgtgtcgggcttagaggtctccaacgaagtcaccggtctgaaattctttatccaagcgtttgcacacgatggaagctggcaagaacttgaggaatgtccaaagttctttttattccctgttcactctgagtgagtgacattcatttactctggtgcgcttcattctgttacctttgacatatgttaaaggctcccacagaataatctaatgttatcattacagaaataagaaggggaaaaacaaataatattgcattaaaaaaaaaaaaaaaaaaaagga

SEQ ID NO: 268088 - DNA, 1676 bp, Zea mays
cacgcatccggactcatcgccccctgcacggtcacggattactgagtttcttattgccaccagatcgaaaaggggggaggaattaaattgtggagtcgggtggtgagatctgatttatagatggaggttgattagcccggttggtagcagcagtcggtggtggtggtggtagtggtgcaagagcaagaccctgaccgacggcctctgcctccttgcatctctgttcgggtttgtgaagcgcgggctctataaatacgactcagatctgagaggccttctcctcgtccgccccagtctagtccgattcaaacccgcccgttccccgtgtccgagccacgcaagccgagctcaatccccagaggccagagccagctgctcggcgctccacgcgatggcgcagaaggagaccaatggcagcaacggcgagcacatctccacccgcccgccgccgaccccgtcgcccctccgcttctccaagttcttccaggctaacctgcggatcctggtcactggtggggcgggcttcatcggctcgcacctcgtggacaggctcatggagaacgagaagcacgaggtcattgttgctgataactttttcaccggttcaaaagataacctgaagaagtggatcggacacccaagatttgagctcatccgccatgatgtcaccgagccacttcttgtggaggttgaccagatctatcaccttgcttgccctgcttcaccaatcttctacaagcacaatcctgttaagaccatcaagacaaatgttattggtaccctgaacatgctgggacttgcaaagagagttggagctaggattttgttgacatcaacatctgaagtttatggtgatccacttgagcatcctcaaaccgaggcctactggggcaatgttaacccaattggagtcaggagttgttatgatgagggtaagcgtgtagcagagacgctgatgttcgactatcacaggcagcatggcattgaaatccgaattgccaggattttcaacacctatgggccaaggatgaacattgacgatggccgtgttgttagcaacttcattgctcaggctgtgcgtggcgaaccccttactgtccagaagccaggaacacagactaggagcttctgctatgtcgccgatatggttgatggtcttattaggctgatgaatggaaacaacactggaccgattaacttggggaacccaggtgaattcaccatgctggaacttgctgagaatgtgaaggagttgattaacccagatataacagtgacgatgaccgagaacactcctgatgatccccgccagaggaagccggacatcaccaaggcaaaggaagttctagggtgggagcccaagatcgtcctgaaggacggcttggtgctcatggaggatgatttccgggagcgcctggccgtgcccaagaaaaccaaggcctaaactgccctgcggtgggcgaagaatatccacgggggagcatactcatagttggcttgtcattattcgtggccacatttcattacggaatttgagttccaataaacggaatataccttcgtcgatcaccttgaaggattgtatcattagaattttcatacagggctggccttttgagtctctgcctacgcacgcaattatttttaatattaatatctatttttaaataaaaatt

SEQ ID NO: 268089 - DNA, 1457 bp, Zea mays
gcgggcttcatcggctcgcacctcgtagacaagctcatggagaacgagaagcacgaggtcattgttgctgataactttttcactggttcaaaagacaacctgaagaagtggattggctcatcccctctaaaacggcaattcttgttggccttcatccgtcatgatgtcaccgagccgcttcttgtggaagttgaccaaatctatcaccttgcttgccctgcttcaccaatcttctacaagcacaaccctgttaagaccatcaagacaaatgttattggtaccctgaacatgctaggacttgcaaagagagttggagctaggtcagtgttcatcatgccattgattcttccagcgcctcatgtgaaaaactcaattacagaatttatttttgaattgcaggattttgttgacatcaacctctgaagtttatggtgatccacttgagcatcctcaaactgaggcctactggggcaatgttaacccgattggtgttaggagttgttatgatgagggtaagcgtgtagcagagacgctgatgttcgactatcacaggcagcatggcattgaaatccggattgccaggattttcaacacctatgggcctaggatgaacattgatgatggccgtgttgttagcaacttcattgctcatgctgtgcggtaatgctttgttgaatgtctttattttctcctcagctactgcagatagattggcggctaatcttttcacaatctttagcggtgagcccctgactgtccagaggccaggaacacagactaggagtttctgctatgttgccgatatggtttgtcttccactgcattctcaattggtttgttgttggtcagaagactgtcagtgcactatatcaactatgccattcattgcaggttgatggtcttattaagctgatgaatggaaacaagactggaccgattaacttggggaacccaggtgaattcaccatgctggaacttgctgagaatgtgaaggagttgatcaacccagatgtgacagtgacgatgaccgagaacactcctgatgatccccgccagaggaagccggacatcacaaaggcgaaggaagttctgggatgggagcccaagatcgtcctgcgggacggcttggtgctcatggaggatgatttccgggagcgcctgaccgtgcccaagaaaaccaaggcctgaattgccctgaagttggggaagaatatccacacgggggagcatactcatagtcgggctcgtcattatttgtggccacatttcattacggaatttgagttccaataaacttaatattcctttgtcgttcaccttgaaggattgtattattagaattttcatacagggctggccgttcgagtctctgcctacgcagatcttgtggtacttgtgtttgtagccaatgtgtgagtaaaagtcgattatagcaatgttgatgccattttgggctt

SEQ ID NO: 268090 - DNA, 496 bp, Zea mays
cggacatcaccaaggcaaaggaagttctagggtgggagcccaagatcgtcctgaaggacggcttggtgctcatggaggatttccgggagcgcctggccgtgcccaagaaaaccaaggcctaaactgccctgcggtgggcgaagaatatccacgggggagcatactcatagttggcttgtcattattcgtggccacatttcattacggaatttgagttccaataaacggaatataccttcgtcgatcaccttgaaggattgtatcattagaattttcatacagggctggccttttgagtctctgcctacgcacgcagatgttgtggttcttgtgtttgtagcctatatgtactccctgagtcgattatagaaatgtttatgccattttgagcttaactgaaaccaaataatgaattattactatcttgattcacacacacacaaaaaaggaagcccaatccaattccaggttcactctggtcctgttgacttgaggg

SEQ ID NO: 268091 - DNA, 532 bp, Zea mays
  unsure (1)..(532): unsure at all n locations
atcgccgggtcgacgtcacgcgttcgcggacgctttaatgttaacccatttgttgtcaggagtggtcatgatgagcgggggcgggtancagatacgcggatgttcgactatcacaggcagcatggcatcgaaatccgaattgccaggattctcaacacctatgggccaaggatgaacattgacgatggccgtcgcgttagcaacttcattgctcatgctgtgcgtgaccggtgagccccttactgtccagatgccaggaacacagacttggaatttcttctatgttgcccatatggttgatggtcttattaagctgatgaatggaaacaagactggaccgatttacttggggaacccaagtgaattcaccattcttgaaccttcttagaatgtgaaagagttgatcaacccaaatttgacaattacaattacccaaaacacttcttattacccccgtcagaagaaagccgatattacaaaaggcaaaggaggtcttggattggaagccaaaattcttcttggggaccggttt

SEQ ID NO: 268092 - DNA, 780 bp, Zea mays
cggacgcgtgggcgcttcgttgcttgcaatcaacgcgatcgtctggtctcgtcttgttccagtgtgtcatttctctctgacgggtgagatttggtttggatctggtcggaccaggtgctccacgcgatggcgcagaaggagactaatggcagcaacggcgatcacatctccacccgcccgccgccgaccccctcgcccctccgcttctccaagttctttcaggctaacctgcggatcctggtcactggtggggcgggcttcatcggctcgcacctcgtagacaagctcatggagaacgagaagcacgaggtcattgttgctgataactttttcactggttcaaaagacaacctgaagaagtggattggccacccaagatttgagctcatccgtcatgatgtcaccgagccgcttcttgtggaggtggaccagatctatcaccttgcttgccctgcttcaccaatcttctacaagcacaatcctgttaaggtatactagttctctgctctgagagagacagtgcgttgtttcatagatattgctggtattctatgattttggtgtttggaatttcctgtaacagaccatcaagacaaatgttattggtaccctgaacatgctgggacttgcaaagagagttggagctaggtcagtgttcatcatgctattgattctttcaccgtctcatgtgaaaaactcagttacagaatttattttgaattgcaggattttgttgacatcaacatctgaagtttatggtgatccgcttgagcatcctca

SEQ ID NO: 268093 - DNA, 331 bp, Zea mays
ctcgagccggtccgattcaaacccgcccgttccccgtgtccgagccacgcaagccgcagctcaatccccagaggccagagccagctgctcggtgagcgccgcgcccttcgcccccctcaggccctcacgcttcgttgcttgatcgtctgatttctctgacgggtggtttggtttggatctgggcggaccaggcgctccacgcgatggcgcagaaggagaccaatggcagcaacggcgagcacatctccacccgcccgccgccgaccccgtcgcccctccgcttctccaagttcttccaggctaacctgcggatcctggtcactggtggggc

SEQ ID NO: 268094 - DNA, 1336 bp, Zea mays
atgatatcaagggtgacgaaaatatgatcgctatgagttacaagaaactgcctgttgacgtgaaggctggaaatgtcatactctgcgcagatggtactatctctctggccgttctgtcttgcgatcctggtgctggtccggggcggtgtaggtgtgagaacactgcaatgcttggtgagagaaagaactgcaatttgccaggaattgttgtggatcttcctacattgactgagaaagataaagaagatattttgggctggggtgttccaaatgacattgacatgattgctctatcctttgtccgtaaaggatcagatttggtgactgtcagacaggttcttgggcagcatgccaagcgcattaagttgatgtcaaaggttgaaaaccaagagggtgttgtaaactttgatgagatcttgagggagactgatgcttttatggttgctagaggtgatctgggaatggagattccagtcgagaagattttccttgcgcagaagatgatgatctacaagtgcaacattgctggcaaacctgttgttactgctacccagatgctcgagtcgatgatcaaatctcctcggccgacacgtgctgaggccactgatgttgcaaatgccgttcttgatggaactgactgtgtcatgctcagcggcgagagtgccgctggagcctaccccgaggtggctgtgaagatcatggctcgtatttgcatcgaggcagaatcttccctggaccacgaggcagttttcaaggccatgatcaggtccgcgcctcttccaatgagccctctggagtcccttgcatcatctgctgtgaggactgccaacaaggccaaggctgcactgattgtcgtcctgactcgcggtggcaccacggccaaactggtcgccaagtaccgccccagggtccccatcctctccgttgtcgtacccgtgcttacgaccgactctttcgactggaccatcagctccgagggcccagctaggcacagcctgatctacagaggcctcattcccctcctcgctgagggctccgcgaaggctacggattcagagtcgacggaggtgatcctggaggctgcgctcaagtcggccgtgcagaagcagctttgcaagcctggtgatgccatcgtggctctccatcgtatcggcgtcgcctccgtcatcaagatctgcatcgtgaagtgatcaccgtgacttgactcctaagtcccagggggtgtggttctcaccgctgggactccatgaaacagcttttctgcctcctttttaactgcatttttcggagacagataattactgtatgttgtaagtccgcttctgttgtttgcagc

SEQ ID NO: 268095 - DNA, 407 bp, Zea mays
caagcctggtgatgccatcgtggctcttcatcgtattggcgtcgcctcggcgtcacgcgtgggtcaagatctgcatcgtgaagtgatcaccacgacctggttctcactgctgggattccgtgaaacagcttgtctgcctcctttttactgcatttttttccggagacagatatttatgttgtaagcctgcgtctgttgtttgcagttgcggaatgttttttgttcacgtagttatttagctggtaaatggggagggagaggactccattgatgttagtggtaataagatttgtgtctatggagttgagttgaaagggttttttcatgctaagccccgagacactaggagatggagatcgaggttgagatgagataagcaataagtgaaaccaatgttgatttgcttt

SEQ ID NO: 268096 - DNA, 361 bp, Zea mays
tcatcgatctgtcgagcggctcgagaatttggaacttgagagttacttgtatgatgacttgcctgatagagatgagtctactgaattggataaatatatggctgagccacttatcaaacaagatccgtttgacattttagcatattggaagaaccaaacagataagtatccaattctttcccaaatagctcgtgacttaatgtctgttcaagtgtcaacagtagcatctgagtcagcatttagtgctggtggccgagtcattgatccatatcgtaatagacttgaccctgaggtggtggaagctctaatatgcaccaaggattggataaatgcacttagagaagattctaaaagcgttctt

SEQ ID NO: 268097 - DNA, 468 bp, Zea mays
cccacgcgtccgataatggagcggcagactcgattcgtcctgctcgtcttcgccatcggggctctcctcgccagctccgccgccgcggacttgtcggcggctgctggttccctgcacgcgctgccgctgcggcgcgtggaggacgacgacgcaagcagcttcgtggaggaggcggcgtacccgccgaggagggcgctgtacgggggcgggtccatcagctacggggcgctcaccgcgaacaaggccgtctgctacggctcgtgcgccgctcgtgggcaggcgtatacccgcggctgcctggccatctacgggtgccgaggtggccgttaattaaccagaagcagcgcgtagctagcagtcgatgtctgttaattacatgtctgtttcttgtgctgcttctcgtttttcttctaatccccttctcttgcttcaaacaagccaagatccgatccatatatacatgttgtc

SEQ ID NO: 268098 - DNA, 882 bp, Zea mays
gcctcgacgccgacttcgaggcccacgtcgcggacttcggcctcgccaagttcctccggggcaacgctggcggttcggagtgcatgtccgctatcgccggctcgtacggctacattgctcctgagtacgcctacacgctgaaggtggacgagaagagcgacgtgtacagcttcggcgtggtgctgctggagctcatcgccgggcgcaagccgtcggggagttcggcgacggcgtggacatcgtgcactgggtgcggacggtgaccgggtcgagcaaggagggcgtgatgaagatcgccgacccacggctctcgacggtgcctctgtacgagctaacccacgtcttctacgtcgccatgctgtgcgtggcggagcagagcgtggagcggcccacgatgcgcgaggtcgtgcagatactggccgacatgcccggctcgacatccacgacgtccatagacgtgccccttgtcatcgagccgaaggaggaggactggggcccggagaaaaagcagcagcagcagcaggaagggccacacgactcgccgccgcagcaggatcttcttagtatctagaagcgcagttgcgagagttggtcgtactgatggtacttggtagcatccctgcctgccctgttctttgagtgaagcgttggaacgtggcgtgtgtgtagtgtaactgtgtatgcaggcggtgatttatatgcatgcttcctttaagtagattgccagtagtatttgcgtatggtgagctggtcggtccttaatgtctgtccccaatgtacaaaaccagatcaagatgcttgggcttccggttgagtttacgccttaggtgctgtttgtttaccctcgacattatataatccagcttaaataaatcaagagtt

SEQ ID NO: 268099 - DNA, 338 bp, Zea mays
gttggaattttgcatgagcacagtggtgcctttaagttttgccagtgagcatttgcagggcgtaaatgggtggaatgaggcttctcctggcattagattgcaatgagattcctcagagccagcgggattatggatgacttagaaactatatatagcagtgatcttgagcttcctgtgaggtgtgagctgaccaagtgagcaatcaccggtttaggctgtatgcccagcttcggtgcagagttttgtataatgttcaaatcccttttgttctttatgtttgtatttattttttaaatagtgctaattcccttaaaaaaaaaaatcttttttataaaaag

SEQ ID NO: 268100 - DNA, 1081 bp, Zea mays
tttcccgcaggagcttccaatgctggaagtggtgctggtggtggaccacttgattttcttagaaacaatccacagtttcaagcagttcgggaaatggtccatacaaatccacaaattttgcagcctatgctcgctgagttgagcaagcagaatcctcaaattctaaggttgattgaggagaatcatgatgagtttcttcagttactaaatgagccctttgaaggcggagagggggatttcttagaccaacctgaggaggatgaaatgcctcacgccattagtgttacaccagaggagcaggaggccattggacggcttgagtccatggggttcgacagagcacgcgttatcgaagcattcttagcctgcgataggaacgaggagctagcagcaaactatctccttgagcatgctggtgaggaagattaagcgggagtagttttcatacggtgagaactctgctatcctctggttggttaccctccttaacatatatggcaagtggctcactgtggggtgatttcctttttttttcttcttttgaaccttgtctctcgtcgacatctgaccgacattgatcaagattttttttagtaccgagtgacgaagagttgatatggagctgacgatcatttgaattgatttcgttgtgcaagacttgtattacataaacatttaaatacatgtagctgaacatttcagtagaaatgctacggttgtggtctcccatcgttgactttcattagcgtggtggtaaacatcggttctgctcctgtcctgtattcatcggacgcaagtataacacaagcttggcttgggaggaggaagcacaaggagctattgccacctagcaaaaggataaaagggaggatgacgaattggcgatgtgtttgtgacacgctgccctcaagtgtggatgatgagtgcagatatgttggtgactgtgccaaggctgtcaagtgtgtaaacgaacgctgccttcgtagttctgacaactgcgactgttctgtagctaaacctatttgctatctttatgataaagttatctaaatgggacggtccttgaccgattaattgcccg

SEQ ID NO: 268101 - DNA, 1080 bp, Zea mays
ggtgacgatagcgctggacccgtctctgtacccagagaatccactcatcatctgggagaatgcacgggcagctgcccagcaggaagggtttgaggtaaagaggaaaggggataaggagtttgttgcaaacattcggctggagatgaactacagccctgagaagttcaagttatcacagccgcttatggaggtgcttggggtggaggtggacactcgtgcacgggtgattgctgccctctggcagtatattaaagcaaagaagcttcagaacccaaatgatccttccttcttcatgtgtgaccctcaattgaagaaggtgtttggggaggacaagctcaagtttgcaatgttgtcacagaagatatctcagcatctgtctgccccaccacccatcaatttggagcacaagattaagctgtcagggaatggagcacatagcagtgcttgctatgatgtgctcgtggatgttcctttcccgctgcagaaagagatgatggcgttccttgccaacacagagaagcacaaggacattgaggcttgcgacgaggtgatatctgcttcgatcaagaagatccatgagcaccgcaggaggagggcattcttcctgggtttcagccagtccccagtggagttcatcaatgcattgatagcttcccagagcaaggatttaaagctggtcgccggcgaggcgaataggaacattgagaaagaaagacgtgccgacttctataaccaaccatgggttgaagacgccgttataagatacttgaaccgcaaaccggctaacgagggcctaggtggtggtgctggtggttcttgaggcgtggatttctcctagctattttagtgtataaacaaattatctgttctgtattggcagtaaatttcaggcgtattagtgaagataattgttcagtgttgtgaaatgatgttcaggctagtcattgtatgtttatgttgtgttctatattgtcaagtgctgaactgaaccgtaatgttgcttggtgtggccctgaaaatagtaagcctaaatcacattctaaaaaactggaatgcaggatttgatagtagcctttccat

SEQ ID NO: 268102 - DNA, 609 bp, Zea mays
aaaaaataatatatactaaataatcacaaaaaagaacaagaacattaaggcatagaactagaagatattagcttcaatcaaaaagatccataagcatcgcagaagaagggccttcttcatgggttacagccagtccacagtggagttcatcaatgctctgatagcttcccagagcaaaaatttaaagctggttgctggcgaggcgaataggaacattgagaaagaaagacgtgccgacttctataaccaaccatgggtcgaagacgccgttataagatacttgaaccgcaaaccggctaacgagggcccaggtggtggtgctggtggttcttgaggcatggatttctcctagtgcggttttggtgtagaaacaaattatctgttctgtattgatagtaaaaatcagatgtatttgcaaagagaattgttcagtgttgtgaaaggatgttcaggctagtggaggttgttatgttcctgtctgattattgtggaagtataatgccaagtgctgaactgccccataatgttgcttggcgtggccctgaaaatagtaagcctaaatgccattataaggaaactggaatgcaggagtatgagagtagcttttcc

SEQ ID NO: 268103 - DNA, 397 bp, Zea mays
gccaggagtggggcacggctgctccgggtatatttgcatcacttaggaaggtttctgatgggggtcatgaagcttcggagtacctggcagagttctacggtgttccccataacgagagagaatattaaataacaccacagttgaagaaccaaagagtttcatatgccacgagctgaggacaaaatatttgcaagagttttcttgcttctttttactcctgtgcaggaggacaaataattgttgagctgttgagttttccatgtggagatgctctcaaggcatattagcaacggaagcaacatttagaacagacaacaatttccagaccagtcgcatgttgtacactttctgttgactgattgacagagatgatgaatgcagacgatttacgtttaaa

SEQ ID NO: 268104 - DNA, 476 bp, Zea mays
caaaatggaaaggctcagaggtgatatattttggtgaccatcttttgagtgacttgagaggaccttcaaaagctggtgggcgaacagctgctgtaattcgagaacttgaggatgggatagaaatccaaaacggtgacagctaccgattccaacaggcaaaattgagtataatacatgatctacttgggaaagtccatgcagctgttgttagcaccgagaaaggccaagtctatagagcattgctcaatgagttgaatgcagaaagacgtcaatgccgatctgggatgcgagatttgttcaatacctcttttggtgcaacatttcttacagacacgggaagggaatcatcattttcctatcacattcatcaatatgccgatatttacacgagcaagcttgagaactttttatcatatgcccctgaatcttggcttcatccacctcatgacataaagatcatgccacacaatgcgaaa

SEQ ID NO: 268105 - DNA, 924 bp, Zea mays
caaagccagaattcaggctgcacaggggcaatttagagaagcggttgaaacatacacccaacttcttgctatcattcaacttagaacgaaaagtttaactgctggagtttgcttgccaaagggcaacaaggatgataaaggcctggaaacagagacctggtatgatctagctctcttatacctaggtatggcacaatggagggatgcagaggtttgtgtattgaagataagatccatcagtccttattctgcattggcttggcatgctacaggaaaaatatatgaagcaaaaggtcttagaaaagaagctttgggagcttttttcagagccttagatcttgatcctaaacatgtcccaagtttaatatcaactgccactgttctacaacaacttggtgacaggccattgccttctatacggtgcttcctgactgatgcattacaactggatagaactaatcatgttgcgtggttcaatcttggccttctttacaaagaggaaggtggcaggtcagcagctgaggctgctgaatgcttccaagctgctgcttttcttaaagaaactgcaccttcagaacctttcagatgacatctacaggggctatagatgtaagctgctgtatgtatttttgatatatttcactgatgaaatagtggattacagagttctaaaaatgatcttcttgggagatcacagcattggaaactgttggaaaaaatgtttaacaattcaatctatagttccaattgttgcctgtatagcaacaaaaaagacgatgatcttcgccttgtgtaggaacagtgcttactgtgatatatatatatagatagatggccagtacattgtgtatcttgagtaaaatggtttcacatataaggtatcagactactctctccgtttgttaagaatttagtccagatatt

SEQ ID NO: 268106 - DNA, 742 bp, Zea mays
atttcggatttcgggttggcaaggctcctaccacccaacgcgacgcatgtgagcacccgagtagcaggcacattaggatacttggctcctgaatacgcaatccgtggtcaagtgacaaagaaatccgatatctatagttatggtgttcttcttttagaaattgttagtgggagatgcaacaccaacacaagattacctagtgaagatcaattcctccttgagaggacatgggcactctatgaggaagggcgtttagaagacatcatagatattgacatcggcgatgacctggatgttgatgaggcatgcaggttcatgaagattggcctgctatgcacacaagatgcaatggcgcgtcgtcccagcatgaccaatgtcgttcggatgctctcaggggagaagagaatcaacgtagaccagatcactaggcctgccatgatcactgattttgctgatctcaagatcagcaacaaggagcaaagaccaggcgacacacgctctcccacgacaactcctacgacgaaatcattcaccaccaccgaaccattctcgtcgtcagacacgcccacgcagtcatccatgtgaaagtgtgggcgtaagaagcagttttttttgttgttgtttctagtttgtatagtgtgtgactgtggtagatgggccaggttacatgaattttttttgtcgagtttattgtttgttttgttatgaggaacatctcataggtctcttattgcatccttgt

SEQ ID NO: 268107 - DNA, 808 bp, Zea mays
cctctgagaaatttctttctaatccctgaaaactatcagcatagcaaatcaccattagttcatcgttttggggaattgacacgtaagatttggcatgctaggaacttcaagggccaggttagtccacatgaatttctgcaagcagttatgaaggccagcgacaaaaagtttcagattggtgtacagtcagatccagtggaatttatgacatggctcttaaacacactgcatgcgaaactaaaaagttcaaagaagaaaaacagaagcataatacacgattgttttcagggagaacttgaagttgttaaggaggttcataggaagcatataatggaaaaaagagaggatggcggtgagctgaatggtgaggcaggttcagtggtgggaactgcagatggaattgttactgaaacatccaaggtcccattcctgatgctcggtcttgacctgccacctccacctcttttcaaagacgccatggagaaaaatatcattccacaggtaccattgtttaacatactgaagaagttcgatggtgagacagttacagaggttgtccgaccttccattgcccgaatgaggtaccgactcactacactgccgaagtatctgatccttcatatgcgaaggtttaccaaaaataacttttttgtcgagaaaaaccctactcgagttaattttcctgtgaagaacttggagttgaaggactacattccattacctaagccgacagagaatcataagctacgttcaaagtatgacctcatagcaaacattgtccatgatggcaaacctggcgagggatgct

SEQ ID NO: 268108 - DNA, 1266 bp, Zea mays
tccacgcgtcccgcgttcacgagccagaagagaagagaggctaaccaccgcagcagctgcgacctgcgagtgcgacaacctccgcggaggagttggagccggcggcggggatatttgcttgcccggctggggttgcggcggaaggagggagagacaaccggcgatggcggcgtccgcgaggcccggggagagggcgaccagcttcgccgtcgcgtgcagcctcctcagccgcttcgtccgccagaacggcgtcgcggctgccgagctaggcctcaggatcaaaggcgaggtcgagcagcagaggacgccggcgacaactaactcgctccccggagcggagggcgaggaggtcgaaaggaggaaggagaccatggagctgttcccgcagagcgtcgggttcagcatcaaggatgctgctgcccctagggaggagcaaggagataaagagaagcctaagcagctcacaatcttctatggcgggaaggtgctggtatttgacgatttccccgccgacaaggcaaaggatctgatgcagctggccagcaagggcagcccagtggtacagaacgttgttttgcctcaaccctctgcagctgctgctgtcactactgacaaggccgtgctggacccggtcatcagcttggccgctgctaagaagcctgctcgcacaaatgcttctgatatgcctattatgaggaaggcttctcttcaccgcttccttgagaagagaaaagatcgcctcaatgcaaagacaccatatcaaactgctccttcagatgccgcaccagtcaagaaggagcctgagagccagccatggctcggattaggaccgaatgccgtggattccagcctgaacctcagctagtacacaacaacacagccataataagacggcacagcaacggcacccaccatgacctggaatttgctttgccactagatcgagttcagaaaccataaatattcttagttatcgtgttttagtgttcgcttatgtcgtggttctacgccctcttgtcgcatagttctggatgtaaagaaaagtagccagtcatgaccatcaccgggagtcgaagagaagtttttggggggtgttaacacacggcgactctgaattggccatgctaaggaaaaggatagtgcaatgtgaggtatatgtattttctgaaagccagatcgtttgggtctagccctgatgtatgcagaacaagtgattattgtaatggatcctgattatcctcatcatcctattattgttttctggtc

SEQ ID NO: 268109 - DNA, 405 bp, Zea mays
gatttgggtggaagtggaaaccgcgccgcgggggtcttttaagcgcgtgggggcgcggcgtgctcacacgaggcccgcgctcacgagccagagaagggagaggagaggctaaccaccgcggcagctgcgacctgcgaccgcgaggagtggcgcacgacgaccagcgcggaggaggtggagccggcggcggggagatttgctcgcccggctggggttgcggtgggaggagggtaggaggcagagacaaccagcgatggcggcgtccgcgaggcccggggagagggcgaccagcttcgccgtcgcgtgcagcctcctcagccgcttcgtccgacagaacggcgccgcgcccgcccagctaggcctcgggatcaaaggcgaggacgagcagcaaaagacgccggcgac

SEQ ID NO: 268110 - DNA, 395 bp, Zea mays
aggtgctggtgtttgacgatttccctgccgacaaggcaaaggacctgatgcagctggccagcaagggcggccctgtggtacagaacgttgttttgcctcaaccctctgcacctgctgctgctgtcaccgacaaggccgtgccggtccccgtcatcagcttgcctgctgctcaggctgatgctaagaagcctactcgcacaaatgcctctgatatgccaattatgaggaaggcttctcttcaccgcttccttgagaagagaaaggaccgtctcaatgcaaatgcaccataccaaacttctccttcagacgctgcaccagtcaagaaggagcccgagagccaggcatggctcggattaggaccgaatgccgtcaagtccaacctgaacctgagctag

SEQ ID NO: 268111 - DNA, 278 bp, Zea mays
acggacgcgtgggcggacgcgtgggcggacgcgtgggcggacgcgtgggtgggagtcgaagagaagtttttggggggtattaacacacggtgactctgaaattggccatgctaaggaaaatgatagtgcaaagtgaagtatatgtattttctgaaagccagccagatcgtttggctctagccttgatgtatcatgtatgcagattgcagaaccagtgattattgtaatggatcctgattatcctcatcatcctattgttgttttctgatcacatggct

SEQ ID NO: 268112 - DNA, 611 bp, Zea mays
atcttgatagacaagaactaccgtgcaaaggtcgcagattttggtttaacaaaacttacagaagttggtaatacatcactacccacacgtggaatcgtgggcacatttggttacatgcctcctgaatatgctcggtacggtgatgtttctccaaaggtcgatgtttatgcctttggcgttgtcctctacgaacttatttcggccaaagacgccattgtcagatcaaccgagtcttccagtgattcaaagggattggtttatctgtttgaggaggctctcaacacaccggatcccaaggaaggccttcaaagactgattgatccggcgctcggcgaggattaccccatcgactcgatccttaagatgaccgtcctggcaagggcctgcacgcacgaagaccccaaagcaagggccacgatgagatacatatagggggcgctctaaacactcgtgttaaaacgagcgatttctgacacatgaacgctacccaagaaaaccaaggtgtcgagaaccttatgttcgggagatgacttctgtccctgtgggctgtggtatatattattgtacgtgctacctgacttcccctgggcaattgtacattaaggcataat

SEQ ID NO: 268113 - DNA, 305 bp, Zea mays
accgagtcttccagtgattcaaagggattggtttatctgtttgaggaggctctcaacacaccggattccaaggaaggccttcaaagactgattgatccggcgctcggcgaggattaccccatcgactcgatcctcaagatgacggtcctggcaagggcgtgcacgcaggaagaccccaaggcaaggcccacgatgagatccatagtggtggcgctgatgacgctgtcgtcaaccagcgagttctgggacatgaacgcgacccaggagaaccaaggtgtcgtgaactcatgcccggaatgatctgt

SEQ ID NO: 268114 - DNA, 398 bp, Zea mays
agacagccttacctgatccttgacaattctgctccctcgccgccgccgccgccgccgccgcccgcccgtcgtcgctgcgcttcggtacccgcgaagcaaggccccgcctcccgtgtacccgccgccgaagaagggagaggagcagatgaaggcggggaggaagaacctgcggcgggcgtgcgacgagggcgccgccgtcacgctcgccgagggagagagcatcatgcaggtcctcacgctgcgcggctccaacgtcatcgaggtgatggacggcgtgggcgtcaggtccctggccttgttccccgccaagttccagaagagcttctggatcaagaacgggagtttcgtggtcgtggatgccagcgggagggaccaggcgctggaatcggggagcaaga

SEQ ID NO: 268115 - DNA, 1241 bp, Zea mays
aaggcatgtggtctcacacaaggtaggatggttgtttcaagggaagaagcaattatgcacataaaagctgctgtggatgccaggaatggagagtggctctgatgttgtttttggggcaaaggacagattctcgtcaagctttgtctcttgatgaagcattatggagagtgcgggcctttgctgacgctggagcagatgttctattcattgatgcccttgcctcaagggaagaaatgaaggcattttgcgctatcgcgcctggagttccaaaaatggccaacatgttagaaggtggtggtaaaactcctattctgagccctgttgaactggaagaaataggttataaaatcatagcctatccattatctctaattggtgtatcgatgcgtgcaatggaggatgctcttattgctataaggggtggtcgcatacctcctccaagcagcttgccaacatttgaggagatcaagaatactcttggcttcaaccactattacgaagaagacaaacgatatgcggtgacaccagcccaaccattgtacgggactggctatgataattatacaagtgaaccgaacagtccgggagattccaggtccagggctaaaaaaacacaagaacctgttattgacatattgcctcagctctatgatattggttccagtgacagcagaggaccttcaactggaatgtggtctcgaactcttcgactaaagattacaggaagagatgggatccagaaaattgatgccaggatacctgctgggttcttagaagggatgacaagaattattccaggcttggctggagctaatattatggaaaggcttcggaatgctcctgttgatacagacaacccccagaatggtcaaatactgcttgattttgaggacgccatgggagataggatccaggtgtttattgcatgagctgacggtgtctttgctagaatgctcgtgcacagcaaactctggaagcatggtcgtttcaagtagcatcagggtacatgcatcttgctattggcgcaaccctatctagtagttgaattagatatcttggcgaactagtatttccaaatgacagacttgttcctattcatcgaggctgggtgtacatcgttgggattccattaaaacacagctggggactgcgggataagtttttctccgtagcgttgtttctgtgttgaaaaaaaaaacctgaagttgaatagaaataaagaagtaaactcttgttgagtt

SEQ ID NO: 268116 - DNA, 486 bp, Zea mays
agggatgacaagaattattccaggcttggctggagctaatattatggaaaggcttcggaatgctcctgttgatacagacaacccccagaatggtcaaatactgcttgattttgaggacgccatgggagataggatccaggtgtttattgcatgagctgacggtgtctttgctagaatgctcgtgcacagcaaactctggaagcatggtcgtttcaagtagcatcagggtacatgcatcttgctattggcgcaaccctatctagtagttgaattagataatttggacatcgattatatcttggcgaactagtatttacaaataacagacttgttcctattcatcgaggctgggtgtacatcgttgggattccattaaaacacagctggggactgcgggataagtttttctccgtagcgttgtttctgtgttgaaaaaaaaccctcaagttgaatagaaataaacaagtaaactcttgttgagttatg

SEQ ID NO: 268117 - DNA, 439 bp, Zea mays
gggatccagaaaattgatgccaggattcctgctgggttcttagaagggatgacgggaggtattccaggcttggctggagctaatattatggaaaggcttcggaatgctcctgttgatacaaaccatcagggcacagcagctgcagcaactcgtgctacctgtgatcaaccaagtagctctggcaaacctttctccctactctcagcaacaacaatttcttccattcaaccaactgtctacactgaaccctgctgcttatttgcagcaacaactattaccattcagccagctagctactgcctactctcagcaacaacaacttcttccatttaaccaattggccgcactgaaccccgctgcttatttgcagcagcaaatactactaccatttagccagctagctgcagcaaaccgtgccttcttcttgacacagcaacag

SEQ ID NO: 268118 - DNA, 508 bp, Zea mays
  unsure (1)..(508): unsure at all n locations
accacgcgtccgtccacgcgtncgtgaagcatcagcctctaacagtgaagcaaataagtagggtatttgccaaataaaggaggcacatgaagtcaagcgtgcagccataaatgacatggcaactatggagaagcaaggaggtttttggaccaagcctctgatggtagagaaaggggcagcatattggaagttagatggttactgtgataactcagcaatattgcttcaacagtatggtggcgatgaattaatggcaaataaagacaagtggtttatgtttactgaagacgaggagaaaataattgaaaaacatttagccactaggtaatgagtttgtcttgccacgtttggatgtgtttctacctttccaatgatggtgaacttctcttttgttgcttgtatatcatgaaatttatctgttggaaaccctatctgtattttcttctgttgttgatcctccaactattgctatcaaaaaccattttatgtaaaaaaaaaccacggtccg

SEQ ID NO: 268119 - DNA, 409 bp, Zea mays
cacagctggcatactaggaattgaggcgcaggctgctcagaacaagactaagaaggtgacgatcctcttcatccagtgcgagaaaccagtgtacagagcgtaccagcttggcctcgcagctgcagtgctcctggtagttgcccacgcggtagccaacttcctcggcggctgtgcctgcatctgctcccagctggagttcatcaaggcgtccatcaccaggaagctggcagccaccaccataattttttaatggatcgccctgattgccggattctcgctgctgttcgccggcgccatgtccaactccaagtccaagacgtcgcgcgggttcactcacggacacaccttggccctcagagggaacatgcgctttgtacacggcgggatcaccgtcgtattatacgtcacc

SEQ ID NO: 268120 - DNA, 380 bp, Zea mays
  unsure (1)..(380): unsure at all n locations
cgccaaagccggccgtcggactcgcttcaacatcatctcagggacttcgatgtcatgccctcacatcagcggngtggcggcgctgatgaaggcggcacacccagactggagcccagccgccatcaagtcggcgctgatgaccaccgactacaccgtggacaacacgaactcggcgctccgggacgcggcggacggctccgtcgccaacgcgttctcgtacggcgccggccacgtggacccgcagagggcgctttcgccgggcctcgtgtacgacatctcgacgcacgactacgccgncttnctctgctccctcaactacagcgccccgcacgtccaagtgatcaccaaggcgtncaacgtctcgtgcggccccccgaaca

SEQ ID NO: 268121 - DNA, 715 bp, Zea mays
ggctgttggagttacaaagagagcagtaccggatggagcaggtctgaggttcctgtgccccttgtagagagtgattcggttatccgtggtgctcgacagacagtagtatcagtggataccaagtcatcgacgcgttggacgcttggaatcaacaaagatggaatcgatgacttcacagttcaagtggattcggagaagatagtcctacctggtgataagagcgagatagatgggtggcatacaatccagtttgcagggggcaagaactcgccgacgaagttccagctgacgctatactggtcgtctagcaaaccatctgagagagaagctaaacaagcagcggacgctcctttgctggtgaaactaagaacagatgtgaatagagtcacaccgcaggtggcaagggtggtggagaagctgccacggtggtgcacgcccttcggcaagtccacctctccgtacacgctagctttcttgacggccctccgtgtcgatatttagtcagtcagcagcatttgtttcccatacataggcgtccagtccagcacctttcgttttgaactgtattttagtttgatagtagcaagttataggcccatagaattgtacacaaaagctgccaagggcggtctggtgtaaacgtgctttgcacttgctctaatttgccctgtatcaaagaatcaaacctagtttgtggtaaaaaaaaagaaaataa

SEQ ID NO: 268122 - DNA, 770 bp, Zea mays
gctctgcgcaatctccacctccgcaatctgcacctccctactagtagtactcttcggtgcagtgggcatcccgacatctgacccactcacaaaattcacagctccaatcctggtgcaagcgcacagtagcggagcaagatgcggggaggagaccggccatcggcgtcgctccagctcctctcgctggggctcgtgctcctctacttcttcacctcaggcagcaccgttggtctcgtggagggacagaagacgtggtgcatcgccaagccgtcggcgtcgaacgagatcctggcgcagaacctggactacgcgtgctcccaggtgagctgcgccgtgatccagaagggcgggccgtgctactacccggacagccccgtgtcccgcgccgccgtcgccatgaacctctactacgcctacagcggcaggcacccctggaactgctacttcaacaactcggcgctcgtggtgcagtccgatcccagctatggatcctgcacctactactgatgtctgtctgatgctcttttgtagcagagatcggtcgatgaaaggaaatataatccctgtgtatgctgtgctgtgttgtgtctagagatgacaatagggacctgattcccccgtggggaatttcctattgctatccctagttgcgtcctagtagaagtgtctcttgttccatccagttgatatgcatgataacatttggagatgcatgcatgtgattttgtattagaggatatggtgtgatcgcaaatgaccaaagtgatgca

SEQ ID NO: 268123 - DNA, 477 bp, Zea mays
cgcagagtactccgtctgatctcggtgatctgtctccacgacaaggagtgcactgtcagctctagcttgctgcagaacaagggcaagatggcaagaggtggtcggctactgatcctctccctggggcttgtgctcctctacttcgtctcaggaagtgttgctgctgctgctgcacagaaaacgtggtgcgttgccaagccgtcggcgtccaacgatatcctgtctctgaacctcaactacgcgtgctcccaggtgagctgcggcgtgatccagaagggcgggccgtgctactacccggacaacctggtgtcgcgcgccgccgtcgccatgaacctctactatgccgccaatggcaggcacccctggaactgctacttgaacaactcggcgctcgtggtgcagtccgatcccaggtatggatcctgcacctactactgatgctcttttgtagcagagatcggtcgatgaaaggaaata

SEQ ID NO: 268124 - DNA, 406 bp, Zea mays
cccacgcgtccggcgttgccaagccgtcgtgcgtccaacgatatcctgtctctgaacctcagctacgcgtgctcccaggtgagcggcggcgtgatccacaagggcgggccgtgctactacccggacaacctggtgtcgcgcgccgccgtcgccatgaacctctactatgccgccaatggcaggcacccttggaactgctacttcaacaactcggcgctcgtggtgcagtccgatcccagctatggatcctgcacctactactgatgtctgtctgatgctctgctgtgctgtgttgtgtctagagatgacaatggggatatccctagttgcgtcctagtagaagtgtctcttgttccatccagttgatatgcatgataacatttggagatgcgtgcatgtgattttt

SEQ ID NO: 268125 - DNA, 415 bp, Zea mays
cgcccgagctccggggcctgctggcgtcgctgggcctggccaagtcggaggccgaggcgcgcgacatgctggcgcgcgccgacgccgaccgcgacggccgtctcagcgtcgaggagttcctggacgtgatgaacgccggggagctcggactgggcgcgctcggggcggtgctgcagtcggcgctccccacgctggaggccgcgggaggcgcgctggtcggcgcggacgagctcgcccgggcgctcggcgccctcggcagcgctagcgccgaggactgcgcggctattggtgagtgcctggacggcgacggcgacggcgccatcaccattgaggagttcaggctcatggccgacctgctctaggtctagcttggagctagcccaggctgcgcacgtacgcacgcgtggaacaccat

SEQ ID NO: 268126 - DNA, 574 bp, Zea mays
gtatttaagcgtggcgcattcagtgtcgccgcaaagacaggagctcctgtgatagctattactcttatcggaactgggaaattgatgccttctggaatggaaggaattctcaattcaggttcggtaaaggtgattattcaccgacctattcaaggcaatgatgcagaaacattatgttccgaagcaaggaatgtgatagcagacactcttcttctgcatggttatggagcccattaaagcaagtggggtgctttggtctgttttttcttctgaacgagtgctttggtctattctttagtggacttttcagagcacaagacttgagagttgagacaaagctcgttgcagatgtaatcctgtaaaggcaagagggaggaaaatggcgtgaattggcggttgtaacatgtggtcttcaatttgttgtaaaccctacttatttttgttggtttgatagtacaaagaaatgtaaaaggcagaggccatcttcattggatggaaaatgaagctcacgtgatattttgccattttggcctagtttgtgccccctattttttaagggtccgtgctaaatttt

SEQ ID NO: 268127 - DNA, 903 bp, Zea mays
gttcttcgcgtacacgtggacggtgatgctggtggcgaacccgatccgggtggagcggatgctgctccccatcttctggggcctcatgacgctcagcacgttcggcaacctggagagcacgacggagtggctggagatcgtgttcaacatcatcaccatcacgggcgggctcgtcctcgtcaccatgctcatcggcaacatcaaggtgttcctgaacgcgaccacgtccaagaagcaggccatgcacacgcggctgcgcggcgtggagtggtggatgaagcgcaagaaactgccgcggagcttccgcggccgggtgcgccagttcgagcgccagcggtgggccgccacgcgcggcgtcgacgagtgccagatcgtgcgcgacctccccgagggcctccgccgggacatcaagtaccacctctgcctcgacctcgtccgccaggtcccattcttccagcacatggacgacctcgtgctcgagaacatctgcgacagggtgaaatccctcatctttcccaagggagaaaccatcgtgagggagggcgacgtggtgcagcggatgctgttcatcgtgcggggccacctgcagtgcagccaggtgctgcggaacggcgcgacgagcagctgcacgctggggcctggcaacttcagcggcgacgagctgctgtcgtggtgcctgcgccgcccgttcctggaacgcctcccgacggtcgtcggcgacgctggtgacgctggagagcaccgaggtgttcggcctggacgcctcgacgtcaagtacgtcacgcagcacttccgctacaccttcaccaacgacaaggtgcgccgcagcgctcgctactactcgcccggctggcgtcctgggcggccgtcgccgatcagctggctggaggaggtacaagcacc

SEQ ID NO: 268128 - DNA, 1137 bp, Zea mays
ctcgagccgaaacatttttgtgaattttaaccactttgttcttctgaacttcagagaaatcgtgattctgtgctacccaaactgaaagacttgcaggccaatcctccttctttgcatgtctcagtatataatgagatcaagagttctcttggagaggcatcaaaatctcctgggtttactgtgatcgcgggagaaattgactcaaatgttgctgctgctgatgatattgattgggacatttctgtggatactaatgaaattgattgggacattggtgctgtggaacaacctggtgaagaatctggcgatggctttggatcgtatgaaattattgatgctaatatagagctggccggttctgaaaatcataatgttggtgtctcagacacatcaatgaacaaagaagatcttgcatcatctgagtctggtatttgctgggacatcactgctgatagttctgaagaaattgctagtatacagaattcttcatctgtattagagcaatctcagtctcaaatgatagctgaagatagaagtttgttgctggagaaagaatataggaataatattctggatgatttactcgaggtaaaatcatttttgactcaacgcttaggggagatgaggaatgcagacacatcatctctacagcatcaagtgcaagctgtctcaccttttgttctccagcagcatgctcctgacagtttggagaacatgcttgtagagatctcgtcagcaatctcattgctaactaatcagaagactcttgaccttataatgatccttaactctaaaaggtttctggatagattagtttcaagcttagaagagaagaagcatcacgaagtaaaactacgggaaggtttaggtgatttatctgttaagcgtatggagctgcaaaacgcactgtcatcatcatggccaaagcaagaggcagcaattacaaaaacaagggaactaaagaagctgtgtgagtcgacactgtcgtctgtttttgatggaagaccagtgtatataattggagagatcaatactttactgagctcaagtgttagtcaattagctggatgactgtatttccgttcctcgaccaaataagattgcaaaaatattatcttatggtatatacttctgaat

SEQ ID NO: 268129 - DNA, 682 bp, Zea mays
  unsure (1)..(682): unsure at all n locations
ccaggcccaattcggttttaatggcaaaggctgatggcgcgttggaccctcgggaaggaggaaggaggactgaatgaaaaatctgaaaaagaagcagaagcgcgagcatcaccatgatgctggtgctagtcaaattggcatgggtgtaactgcttaccctggtgtttatggggctccacagctcacccagatacctatagcaggaggacaaagggtcatgatgccagagattatcgtaccaaacaacatcttgtttgtccaaaacttgccacacgagacgacgcccatgatgctccagatgctcttctgccagtaccctggcttcaaggaggttcggatgatcgaggcgaagcctgggattgctttcgtggagtatggagacgagacccaggccactgctgccatgaacaaccttcaaagcttcaaaattacaaaagaaaaccagatggtcatcacatatgcgaagaagtaatgagctcccgagcaatgtttacctgatgtgtgagatgttgtattccgagttttacacaactggtaaatttccttcatgtgttaggtagacagcatcctgaacaacctgttaattgtacccactgggctgcagctatgtgcacttcaggaacggagatgaaatgcaaactgttattatttggtcaaaaaaaaaaaaaaaagggcggccgcn

SEQ ID NO: 268130 - DNA, 1401 bp, Zea mays
tctcactcccacggtcccactcctcaggagcgtccagagtttaggtgctcgtggagtcgtggtggaggtggtaggtgtcgatggccttcaagctggccaccaaggccgcggcggcgtcgcccgctgctgctcaccgcgggggtctcgcccgggggccggagggtacgagccgcgttgccttcggaccagcgcccagaaacaaggggctccgcgcggccaacaactccgcaacgcccatggctaaggaagagagggttgatcgaagtgaaatattgacattggatagcatcagacaagttttgattagactagaagacagcatcatatttggccttttggagagagcacagttttgttacaatgctgatacatatgatagcaatgctttccacatggatggttttggcggctctttggttgaatatatggttagagaaactgaaaagctccatgcacaggttgggagatacaagagcccagatgagcaccctttcttttccaaggatctgcctgagccccggttgccacctatgcaatacccaagggttttgcatcccattgctgattctatcaatatcaacaaagagatttggaaaatgtattttgatgaacttcttccaagattggtgaaaaaaggaagtgatggtaatgctggatccagtgctctttgtgacacgacctgcttgcaggcgctctccaaaaggatccactatgggaagtttgtggcagaggctaagtttcaggagtccccggaagcttacatgccagccataatagctcaagaccgtgatcaactcatgcaccttctcacatatgaaacggtggagcgtgctatcgaacacagggtggaagccaaagccaagatcttcgggcaagaggtgaacattggtgctaaggacaacggcagcccaccggtctacaaaatcaggccgagcttggtcgccgagctgtacagctacagaatcatgccgctaaccaaggaggttgaggtcgcgtacttgcttaagaggctggattgagtgtgtttacgtagctgtaaaactgccagatccgaactcctggtattaaaccataacatcggtaagtacccatttctgtgaagaggatgatccgaactcctgtcattaaaccagaacatcagtaagtacccagttttggggagaggatggaaaatataccatgtgtggcaagcaacatgcataatatcatgtggagttgtcgagtagtcgcgcctcgtgcgtactgccaatggacaatgtttgtagactgtatggaatgatgggtcacttcctttggcgggtgcccttttgaaagggagtaaaattctctcattgtcgttgaaatttatacagatccgctcaagtgccatcgaaattttcaacttaaaaaaaaaaaaaagaa

SEQ ID NO: 268131 - DNA, 446 bp, Zea mays
ccctcccatttcatcccggcattttccttgcccaacgtgctctccctcccatttcctgcgaggtggttggtggcgatggccttcaagctgatcaccaagcccgcggcggcgtcgcccgctgctgcttactggggagatctcgcccgggggccgcagggtacgagccgcgttgccttcggaccagcgcccaggaacaaggggctccgcgcggccaacaactccgcaacgcccatagctaaggtagagagggttgatcgaagtgacatattgacattggatagcatcagacaagttttgattagactagaagacagcatcatatttggccttttggagagagcacagttttgttacaatgctgatacatatgatagcaatgctttccacatggatggttttggaggatctttggttgaatatatagttagagaaactgaaaagctcca

SEQ ID NO: 268132 - DNA, 451 bp, Zea mays
ccaaagccaagatcttcgggcaagaggtgaacatcggtgtggaggacaacggcagcccaccggtgtacaagatcgttccgagcttggtcgccgagctgtacagctacagaatcatgccgctaaccaaagaggttcaaatcgcgtatttgcttaggaggctggattgagtgtgtttatgtagatgtaaattgccagatcagaactcctggcgttaagccagaacattggtaaataccggttttggtgtcaggatgcaaaatgtaccatgtgtggaattgtgccaacaaacaagcataatatcatgtggagttgtcgagtagtcgcgcctcgtgcgtactgccaatggacaatgtttgtagactgtatggaatgatgggtcacttcctttggcgggtgcccttttgaatggcagtaaaattctctcattgtcgttgaaatttctacaaaacaa

SEQ ID NO: 268133 - DNA, 386 bp, Zea mays
cgctctccctcccacttcgtgcgagcgtcccgaactaagttgctcgtggtggaggtggtttgtggcgatggccttcaagctggtcaccaagcccgcggcggcgtcgcccgctgctgctcactggggagatctcgcccggcggccgcagggtacgagccgcgttgccttcggaccagcgcccaggaacaaggggctccgcacggccaacaactccgcaacgcccatggctaaggaagagagggttgatcgaagtgaaatattgacattggatagcatcagacaagttttgattagactagaagacagcatcatatttggacttttggagagagcacagttttgttacaacgctgacacatatgatagcaatgctatccacatggatg

SEQ ID NO: 268134 - DNA, 876 bp, Zea mays
cactccgccaacgtgatccaccgcgacctcaagcccagcaacctgctggtgaacgccaactgcgacctcaagatctgcgacttcgggctggcgcgcccgtcctccgagagcgacatgatgacggagtacgtggtcacgcgctggtaccgcgcgcccgagctgctgctcaactccaccgactactcggcggccatcgacgtctggtccgtcggctgcatcttcatggagctcatcaaccgccagccgctcttccccggacgcgaccacatgcaccagatgcgcctcataaccgaggtgatcgggacgcccacggacgatgagctcgggttcatccggaacgaggacgcgcggaagtacatgcgccacctcccgcagttcccgcgccggccgttcgtcagcctgttcccccgggtgcagcccctcgcgctggacctcatcgagcgcatgctcaccttcaacccgctgcagaggatcacagtggaagaggcgctggagcacccgtacctggaacggctacacgacgtcgccgacgagcccatctgcacggacccgttctcgttcgacttcgagcagcaggctctgacggaagaccaaatgaagcagctgatattcaacgaggccatcgaactcaaccccaacttccgatactagctagctagctagttcggacacacatcttaattatacgtatgtatgattcctcgtacgtggtttgtaaatagaagatcgagccggccgccggtgttattagactgaacgttgcatttgtttgttcgttgacgtgtcccgtccccgcaggtttcaggctgtgtagtctgctgcaggtttcacgtgttcgtgtaatgagctgtatcaagaataaaatgctttggagtc

SEQ ID NO: 268135 - DNA, 752 bp, Zea mays
ctccccgcgctcggcgaccccagctttgcattccaagaagcgctcgacacctgcttccgcgtgccagcggggcgcccgccgccgtcggcgaggctcccgcccgtgaccctgctgttcaatggcgcggagatgtcggtggccggggacaggctgctgtacaaggtccccggcgagcgccggggagccgacggcgtgtggtgcctaacgttcgggaacgcggacatggtgcccctgacggcgtacgtgatcgggcaccaccaccagatgaacctgtgggtcgagtacgacctggagcgcggtcgcgttgggatcgcgcctgtcaagtgcgacgtcgccagcgagcggctcggcctgatgttgtgacgtggcctggcgaaccgtaaccgctctggctcgggggtttgttcctccagactccagtggccatacccttaacctgccaaacgtttctaagtttagaacttgtttatccttttttttcatgtaaggaaggaaaactttaaacttgcataaccttgatcgtgtgtgtgtggcatgtacaatgtttagcgtaaactgtaaagtaagtgtagtgcagtgttgtgcttctttattttactgaacacgtagtggtttaacatgttctaagtagtggtgtactactgtactgctgtatatggtatgtaaatattagcatgttgtatatcaacttaacgtgccatgtacattatccataagatgtgcatgatcaatgctccaaagggttttagttt

SEQ ID NO: 268136 - DNA, 1078 bp, Zea mays
agaacaactttctccttcttccgcgctgtcgccgtcctcctctcaccccaatctgctcggactctgatcgcagcggacgcgcatccaaccagctcggggtctgcctctctcccggggaaaggatggagttcgggaggaagcccttgagccttgtggagctctgcgtgcggaaggccatcgacaacctccgctacatgggcagcgtcgacggcgtcgagatggatctgctccagcgcatcctgccgcactgcacgatggagcagctctcccgcgtagagaacagcaccgagatggatcttagcttggtaactgatccgctgtggaggcgattctaccagcgagaattcggtcaggagcatacgagcaaagtcatcgcaaggctgaaggagcttgggcaaaaaacgccgtacacatggagggagctcttcgcggcgaaaaaagagaaacagaaggaagttgaggataagatgcttgacaaattcacaaagaagtttcaggcagagagagctgagaaacaaagcaagcaaatcaaactatgtacaaaggtgcctccaagcagcaaaaggagtttctttggaggaagtggacctagcagtgtatccagttccagctacaagagccctatactgaagaaggctaggatagaggttaacagtcgagcaagattgcagtctgctatgcaaaagaatacttttgcgaggtcatctcagccagtaaggacgacctctgttagtggacagccagtgagaacaactaccattcataggcccaattcaaccgtcaccatcaccaaaccgatgggaaaaagcaggcaaattcagaacagcaggcccaaattctaggaaacggtttgctgcgctatcgcaatttcaactccagagctcatatgtcctctgaagaaagcgcctcctttgtacaaaaggagtagcacaccgtactcattttttttttttggcacaggacagacgtgccaattgtaacgtaaaaggcgttaccaatggttgtaacaaacgatttcttggattaaagaaaaaagggtttgtttcaacaactaaacaacacaaaaaaaacacaaaaa

SEQ ID NO: 268137 - DNA, 961 bp, Zea mays
aaatttcccaaatccggtgcccccacaccggcatcctcacctcgtcagcgccgccggccttccttccattctccatccccgctcagtcggataggcgccggttggggaaaattctgttcggactgttcatcttgtcggcatgtctcattatcacagcgccgattttgaagagatggaggatgagtacgacatgaacgagccagtcgatgacatggagggggaggatgagtaccaagagctcgtgattagggactctgatgcggaggatgaagacgatgcggaccaattgcataagctctccgacacttcagcagcagatgcaagaagtgggaaagatattcaaggaataccctgggagacgatagaagtcacaagagaaacgtacaggcaggcccgactagagcagtacaagaactacgagaacatacctaattctggagtagcagcaatgatggcatgcaaatcaaccgagaaaggaagaacatattatgaattcagacgaaatactagatctgtgaaatccactatctctcactttcagctgagaaatttagtatgggcaacatcgaagcctggtggctacccggtattgcattacctctggagcttcactggtcggccttaaatggtgtggatacagaaattatggatgtacatggacatgttgcaccgagtgagaagcacccaggaagcttattagaaggttttttgcatactcaaattagtaccatggcagtgaaggataatttgttagtagctggtggttttcaaggagagctaatatgcaaacacctagatcgagaaggaataagcttttgctgcaggacaacatatgatgataatgcaattaccaatgcattggagatattcaatacatctagtggagctcttcacttcattgcatctaacaatgactgtggggtaagagagtatgatatggaaagatatcagttgtttaagc

SEQ ID NO: 268138 - DNA, 1545 bp, Zea mays
aataatggattgactacctgaagaataaagatgactctgtttggtcgatgggtgaaatagcccatactttgactaacaggagatatactgaaaaatgcatcgcatatgctgagagccatgatcaggtaccctgcattatataataactttataaggaagtatagttggatgcagcaaagtattttatttccttgtggggtagacaacacatggggcaagtatcttttaatcagacagtactatatttcatcacatttctatcctgattgctagtaactggattagttattcataaaaaattaggccctcctaagcatgtttaagaatttgcaatcacatatgacctgtttatcttatactggaaattaaaatcatgcaatttttcagtctatgggtggcgacacaactattgcatttctcctgatggacaaggaaatgtacactggcatgtcagacttgcagcctgcttcacctacaattgatcgagggattgcactccataagatgattcacttcatcacaatggcccttggaggtgatggctacttgaattttatgggaaatgagtttggtcacccagaatggattgactttccaagagaagggaacaactggagctatgataaatgcagacgacagtggagccttgtggacactgatcacttgcggtacaagtacatgaatgcgtttgaccaagcgatgaatgcgctcgatgagagattttccttcctttcgtcgtcaaagcagatcgtcagcgacatgaacgatgaggaaaaggttattgtctttgaacgtggagatttagtttttgttttcaatttccatcccaagaaaacttacgagggctacaaagtgggatgcgatttgcctgggaaatacagagtagccctggactctgatgctctggtcttcggtggacatggaagagttggccacgacgtggatcacttcacgtcgcctgaaggggtgccaggggtgcccgaaacgaacttcaacaaccggccgaactcgttcaaagtcctttctccgccccgcacctgtgtggcttattaccgtgtagacgaagcaggggctggacgacgtcttcacgcgaaagcagagacaggaaagacgtctccagcagagagcatcgacgtcaaagcttccagagctagtagcaaagaagacaaggaggcaacggctggtggcaagaagggatggaagtttgcgcggcagccatccgatcaagataccaaatgaagccaggagtccttggtgaggactggactggctgccggcgccctgttagtagtcctgctctactggactagccgccgctggcgcccttggaacggtcctttcctgtagcttgcaggcgactggtgtctcatcaccgagcaggcaggcactgcttgtatagcttttctagaataataatcagggatggatggatggtgtgtattggctatctggctagacgtgcctgtgcccagtttgtatgtacaggagcaggtcccggccagaattaaaaaaatctcgctgaggggtttaaacaagacatctaga

SEQ ID NO: 268139 - DNA, 751 bp, Zea mays
caagactcctattttcatgcgggagatagaggttatcataaactttgggatagtcggctgttcaactatgctaactgggaggtattaaggtttcttctttctaacctgagatattggttggatgaattcatgtttgatggcttccgatttgatggggggacagcaaggccgtatcatcaccatggtatcaatgtggggtttactggaaactaccaggaatatttcagtttggacacagctgtggatgcagttgtttacatgatgcttgcaaaccatttaatgcacaaactcttgccagaagcaactgttgttgctgaagatgtttcaggcatgccggtcctttgccggccagttgatgaaggtggggttgggtttgactatcgcctggcaatggctatccctgatagatggattgactacctgaagaataaagatgactctgagtggtcgatgggtgaaatagcgcatactttgactaacaggagatatactgaaaaatgcatcgcatatgctgagagccatgatcagtctattgttggcgacaaaactattgcatttctcctgatggacaaggaaatgtacactggcatgtcagacttgcagcctgcttcacctacaattgatcgagggattgcactccaaaagatgattcacttcatcacaatggcccttggaggtgatggctacttgaattttatgggaaatgagtttggtcacccagaatggattgactttccaagagaagggaaca

SEQ ID NO: 268140 - DNA, 1619 bp, Zea mays
cccacgcgtccggcagagtgaaggggcaagatgttgcttttgagccagcaaagcttctctggcttatccagagggatttcctccaaggaaaatctgttcaacaaatggtcaatgaagcccttcaacgggtgcctaatgataatggtgacaaatatattgatgaggtcaatcaaatacgagattcgttggcagttatggggaacaacagcactgcttttagcttgcctcagccgcatcttcaaagaacaaaattatgtgatatggaggacaaagaacttgaacccttatatgtaaaacggcgggagcaattaaagcagcttgtttcgtctattgtaaaaccaaaaattgtgcagggcagaactctaaatgggaaggactttgtgtctttcttgcagcagattcttgaggctttgaataaaggcgaaattccatcaacagggtctctagttgaaatttttaacaaagccattcttgatcgctgtctgaaggtgtacagggagaaaatggatggcttaggcctaccagtaccggtagacaaactgcagaaacttcatgagatgacaaatggtgaagctagaattctctttgataagcagcactttggcaaacatcatgctgctcagtcggccctcaagcttgaagatgagattaaagaggtgtactgtgcctgtacagaaacttccttctagctaatgaatatcaatcgtcaaagctatgtgaagctcgcttttctgagtgtgaagataagatggatcaccttcaagtcttgaaacttccttcaatggcaaaattcaatgcaggctttactcactgcaaccaaagtttcgtaaaggactgcgtgggacctgcaaaagaaagctacgaacgtagaatgtcaaagatgcttgccaagtctcgtgctcttttcatcaaggagtacaataacaagcttttcaattggttggtgaccttctctttggtcatggtggtcatcgggcgctttgtcatcaagttcttcctacttgaaatcgctgcctgggtgatgttcatcttcctagagacgtacacgagaatgttctggtcagcggaatcgctgtactataatccagcttggcacatcattgtttcttcctgggaaaccatcgtgtacagcccaattcttgatctggacagatgggccgtcccaattgtcataatgctattatttggggttctttactggagatgcttcggtggtagaaggaagcggggaaggggttcgctcctcccattgtacaagaattcttataactcgagtcgtcgctcgagatcagactagttatacacgcaatgttcaagtttttttcttttaaagaatggtacaaaatatctgcctgtagaagaggctaaactgccgaatgtggatcatctgtaagtgcttttggatgggcatgttttgatggtgccctgccaatgtatctccaattctttttggtggatgaagagaggcggtgaagctgctagtatggggcggggcacctgcacaaagcctcatttgtaattcataccagggtaccttttctgtagctagattatccttacatgtcccggtcccaattgacccattattgttttaaaaaaaaaaaaaaaaaaaaaaaaaa

SEQ ID NO: 268141 - DNA, 1351 bp, Zea mays
cagaccgtgggcgcgccccacagctcaggaatccccacagctcacacaggcacacagctcctcttggcggcgcctctgacttcgtcgcccttctcctttttcgtcgcccttctcctttttcgtcgccttcgatcggcggctgcctccttcctccacttccgtcccttcaccgagccgccgccgccactatgaagggacccggcctcttctccgacatcggcaagaaggccaaggatctactcagtaaggactacacttacgaccagaagctgaccatctccaccgccagcgcctctggactgggcctgacttccacagctgtgaagaaaggagggctttattctcttgatgtcagttcagtttacaagtacaagaataccactgttgatgttaaagtggacactgaatcaaatatctctactacattgaccgtgttggacgccttgccatgcacaaagcttgtcacttctgtgaagctgcctgactacaattctggaaaggtggagctgcaatacttccatgagaatgcaacttttgctactgttgttggcacgaagccgactcctgtgattgatctttctgggacagtaggtgctcaaggagttgcatttggtgcagaagctgggtatgacactgctacaggaaaatttaccaagtacactgctgcaattggtgtaaccaagccagactaccatgctgcattcattctggcggacaaaggtgacaccattaaagtgtcaggtgtttatcacctggatgagaaacagaaggcctcagctgtggctgagctaacccggaggctttcaacaaatcagaacacactcacagttggtggactgtacacagttgattctcagacagccgtgaaggcaaggctcaacaacaatggaacgcttgccgcgcttcttcagcacgagcttaaacccaagtcactcttgacgatctctggtgaattcgacaccaaggccctggacagaccccccaagtttggcttggcgcttgcactgaagccctgatcagatcatcccacagcgattgctggtgaattttgaattctttggttgtttttcgcaaagctgtagccaataatccgttccacgaaccttttctgttattctggcaaacgtttggagcactgtggcttagatccggatgggtcgtctacaggaattttacctgcctgcttttattgttggaagcatctggccgtcggtagatgtacattgtgctcgcttctttagcacctaggcctctgccactgtgttactgagtagacgctacggtaactcttttgcatgcaggattagcatgctaattatgtccggcgtttgatttaccgctctttacggtt

SEQ ID NO: 268142 - DNA, 409 bp, Zea mays
ggcaagactcaataacactggaacgcttgccgcgctttttcagcatgagcttaaacccaagtcgctcttgacaatctctggtgaattcgacacaaaggccctggacagatccccaaagtttgggttggcgcttgccctgaagccctgatcagatcatcccatgttgattggtggtgaatcttgaattcttgttttttttttgcaaagctgtagccaataattcgttccacgaaccttttctgttaatccggcaaatgtttggagcactgtgggtaggatccggatgggtcgcctacatgaaattttacctgtctgcccttattgttgaaagcattggcgcctggtaaaaaaaaaaaaataaaaaaagggcgggcccttttaaaggtcccaggttaccgacccctgcctt

SEQ ID NO: 268143 - DNA, 414 bp, Zea mays
cgcgtccgcccacgcgtccggtggtgtctggcatggccgaggtgataccatttgtttagggagcaacggtgcaggaaacaaggctttcgctgccctgaacaaggcctctctcgtgcctataaagtccccggggctgtgtggcatggatagatcgtcaagcgcagccgacgagcagcagccgcttgtcccaccggaccaactggagcaggtttaggtattctctgtcgccacgacctctgcactttcctagaagggcttggacagcgccgacggaaaaaaaaaatcgtcctctgccggattattaggcgcctgcatctgcatccattggtcccgagaactggactttgcaactaccgtacatgggtgatgggcgcagtcgacctgctgctgctgctgttgtaaaactcagtgata

SEQ ID NO: 268144 - DNA, 526 bp, Zea mays
attttggggaacacctgaaggggatgtttttcatcctgttgaatgcatgcatgagttgcttgatacagttcggcgccacaaagtcaacattgatggcaacatatgtactgtaatggttaccattttggtccttgaggggtggcaacgcaagctggacccaggctttgatatcatgcaaacgttgaagactttactgctagagaaggacataaagcaaccaattgattttttctcataaacaaaacctgtcagatcgttcttatgtatagaagcagtggaagatgatgccctaccaatataatcagaaggcgaaacatctaatctaactcgaagcaacctgacattaattgagcagatatattatgcactatgttctatctgtcctttctgatagtagaagtagcagaaactgtctgcactgagtttcattttttactacgtcagtatgaaaattttgccgaccacgaccacccaggcgggtccagccatggtgttctttaaaattattggaaagttcctgtcctcc

SEQ ID NO: 268145 - DNA, 442 bp, Zea mays
aatcatcaattgatgaatctgctaggtactatctctttatttcacacactggatatggaggtgttgcttatgcgatggccattacctgcctgggactgagtgcagatgcaaagtttgtaatggaagaaacagcagaaacacactttgtatcaacatctcttgcgaaaaatgtgtccatcagaactaaaactgacatagcacttaagcagggtgactaccgtgacatattaaacctcactagagtgttggtacatgggcccaagagcaaagaagaggttgacacagttattgacaggtgttctggtgctggtcatctgcgcgaagatattatgcattacaggaaagcactgcaagattgttcacatgacgacgacgacgactgtgatgaggaacactcttatctcactgatatgggcacaaaagctttgaggcgttacttttt

SEQ ID NO: 268146 - DNA, 912 bp, Zea mays
acatattggacgatcatcgcacccaaatggaatctcaaatcatcatcaatcaccaggaagtattactgaaaacagtgtagtgagtgctcacacccatagggtttcaggtcctcccgacgttgaaaatccgaatcgaaggggacatagcagtagtgacgagatgctcagtgcaagtagtagagcagacgatagtagcagcagggacgctagatcccttttgaatggtgaggatggttacaaatctcggagtgcagtatctttgcccagcaaccaagttcaggctgagtggattgagcagtatgaaccaggtgtatacataacactgacaactcttcgtgatgggacccgagatctaaagcgtgtacgcttcagtcgaaagcgttttggggagcatcaggcggagagctggtggaacgagaaccgcgacaaggtctatgagaagtacaatgtaaggagctccgaacgagtctcgtcggcatcatcgatccggtcaggtcgatgaccccttcccccggtccacactaaccctgcagtagtcatcagaaaacttcaagtgggagcgcagagccaaagtcagagtggcaagggtgccgaggaattcttttttgtccgtgtaatgtcgataattcttgttactgttgttatgaaattgagtcagtgggacttgttaggttgtcttgttcagatgtaatgcacatagagttgtggaacaccgaaacatgttgtagggggtggggcggtagcagagggtggacagtaacagtagcgcgcccagccctctacggcctacccttttgaaagccttggttgtagccaatgcagctagctgtaaagaagtggcattttttttttttgtctccaaaaggtgccaaaaaaaaaaaaaaaaagggcggccggcacgcgatctaaaac

SEQ ID NO: 268147 - DNA, 563 bp, Zea mays
cccacgcgtccggacgcggtccggttcacacggcggcagcgggacgcgatcgctaagctgtggaactcgatcaaggagcagcagatccggcggaagcaaggcaagtcggtgagcgggaagctggacgtgaacgccttcgagtacctccaggagaagtactcccgcgagaagatgagcatccggcacagcgtgggcggcggcggcgatcgtcgcgcgacgcagtggctgggctaggccgtgcgtgtgtgtgatggtttgtgcctttggcttcatcagcgacacggcgtgggagttgtttgtgcttggtttttcgtagaggagaggagagagttgacatgatcttccccgtagcatgtgatgggtggctcttggtgtaacgttacgtactagctgcactgaactcgttgcatgtctttatcagtactggaactggaagcagcagctgaaactgctgacaacgacatggcagtgcagcacagtgcggctgttgggggcaaaatgctttgtttatgccggcacccggcagcccgaaaaaaaaaaaaaaaaaaaaaaaaaaaaaagga

SEQ ID NO: 268148 - DNA, 933 bp, Zea mays
atcaaccagcagcactctccatcgaatcttgttggcaaagccaataatcaatcaccagcgacatcaattccttgcccgcccgcccggccgcgcgtcgaggaaccgccgcacagttccatgggcaaggtgcgctccttcttctgccgcgcccgcagcggcaagcgcggcggctcccggccaggctcgtcgtcctcgtctctctcgtccccgtgcccctccgcgaggagggcgtcgccgccggccggggacgagacggagcgcgtcttccgcaagttcgacgcgaacggcgacggccagatctcgcggtccgagctggcggcgctgttcgagagcgtgggccacgcggccaccgacgacgaggtgtcgcgcatgatggaggaggccgacgcggacggcgacggctacatcagcctgcccgagttcgcggcgctcatggactcggcgtccggcgacgccgacgccgtcgaggaggacctgcgccacgccttctcggtcttcgacgccgacggcaacggcctcatcacgcccgccgagctcgcgcgcgtcctgcgcggcctcggcgagtccgcctccgtcgcccagtgccgccgcatgatccagggcgtcgaccgcaacggcgacggactcgtgtccttcgacgagttcaagctcatgatggccggcggattcggcaggatcggtgcctaggaacaaggattctgccctgctccgctccccacaaaaaaattggattcatttcattctatgtacatatatgccctatagatcacactggaatcccggagatgtttcctaggcccagattatttacacgcccagcggcagcacataaaaagcccccattttatttgctagtttggatgttcaaacggattgttttggcttcatcaattgcaatattgagtttgcgcctcatttgtggttgcaaagtga

SEQ ID NO: 268149 - DNA, 587 bp, Zea mays
  unsure (1)..(587): unsure at all n locations
cggaattcccgggtcgaccgcacgcgtccggccggcgacggctgcttaaccctgcccgatttcgtcgccctcatggagtccgcgtccggggacggcgtcttcgtagaggaggacctgcgccactccttcatggtcttcgacgccgacggcaacggcctcatcacgcccgccgagctcgcgcgcgtcctgcgcggcctcggggagtccgccaccgtcgcccagtgccgccgcatgatccagggcgtcgaccgcaacggcgacggcctcgtctccttcgacgagttcaagctcatgatggccgcgggcggcggcggcggattcggcaggatcggtgcctaggaacaaggatcctgtgcctgtcctgctctgcctctgctttgctccgctcccacaaattggatttctctcattttatgtatgtacatatactacactggaatcacacggacagcgccacgtanaaaagacccctttttcatttggtttatgtgtactatacaatgcaaatctgcatccatggtactgctatggatgttcaatggaattggttcggctttcatcaatngcagtctgctagtagttcgaag

SEQ ID NO: 268150 - DNA, 414 bp, Zea mays
agcgaaaccgcagccgtgacggatccagccgaaccccctcgcagtcgcagccccctcacgccacgcgacatgggcaagatcaggatgcccgtgccgtccctgttccgccgccgctcctccaagccgccgccgccgcagccgcagcagcaggcgcctgccgcgggcgacggcgacggcagcgggtccccggagcgggcgacggcggaggaggagatggcgcgcgtgttccgcaagttcgacgcgaacggcgacgggcggatctcgcggtcggagctggcggcgctgttcgagagcctgggccacggcgcgtcggacgacgaggtggcgcgcatgatggccgaggcggacgcggacggcgacggcttcatcagcctgcccgagttcgcggccctcaacgccacggtggccggcgac

SEQ ID NO: 268151 - DNA, 454 bp, Zea mays
cggacgcgtgggtcctcatcaaccagcagcacctccatcgaatcttgtaggcaaagccaataatcaatcaccagcgacatcaattccttgcccggccgcgcgtcgaggaaccgcgccgcacagttccagttccatgggcaaggtgcgctccttcttctgccgcgcccgcagcggcaagcgcggcggctcccggccaggctcgtcgtcctcgtctctctcgtccccgtgcccgtccgcgaggagggcgtcgccgccggccggggacgagacggagcgcgtcttccgcaagttcgacgcgaacggcgacggccagatctcgcggtccgagctggcggcgctgttcgagagcgtggaccacgcggccaccgacgacgaggtagcgcgcatgatggatgatgccgacgcggacggcgacagctacatcagcctgcccgagttcgcggcgctcatggac

SEQ ID NO: 268152 - DNA, 414 bp, Zea mays
cccacgcgtccgcccacgcgtccgcaccagtgcctccaccgaatcttcaacaggcaaagccaatcaataatcaccagccacatcaatccattccctttcctctcccgctccacttccatgggcaaggttcggtccttcttctcccgctcccgcagcggcaagcgcggcagcgcccggagggcaggctcgtcctcgccgcactcctccgcggcgagcgcgccgccgtccccgtccccactcccactcccgaggaggtcgccgtcgtcgtcgtcaaccacaaccagggacgagacggagcgcgtgttccgcaagttcgacgcgaacggcgacgggcagatctcgcggtccgagctggcggcgctgttcgagggcgtgggccacgccgtgaccgacgacgaggtgtcgcgcatgatg

SEQ ID NO: 268153 - DNA, 504 bp, Zea mays
tcttttaaagtcaaccaacccttccgccgcgcccaaacttcgaaaagttccggggtttccacaccctcaagccgaccagcatgagttccaccggaggcagcggccgtgggaaggcgaagccagcgaccaagtctgtgtcgcggtcttccaaggctgggctccagttccccgtcggccgcatcgcgcggtacctcaaggccggcaagtacgcggagcgcgtaggcgccggggctcccgtgtacctctccgccgtcctcgagtacctcgccgccgaggtgctggagctggccgggaacgctgctcgggacaacaagaagaaccggatcgtgccgcgccacattcagctggcggtgcggaacgacgaggagctgagcaagcttctgggcactgtgacgatcgcggccggcggcgtgatgccgaacatccaccaaaatttgctgtctaagaaggctggtaacaagggggacattggcttcggcttccatgagtttttaacgccttttt

SEQ ID NO: 268154 - DNA, 489 bp, Zea mays
ggaaggtgaaacaactacaacggaaactacagagaaagatgctgttgcgaaagactcctgccctgtatgttccgcatcaggtatcacaaggaattccgataatatgaaacctccaaagctggagtccaagtgcaactgtataatcatgtaagtaacttcacgtccaaggtcgaaggagttgtgatattggttgggacgaaaatccatgctttctggtttcatgtcacatgcaacttgaagcatgcctacctgcttggttaacccgctgtcagcagcaacgatggagttcaaggcagtggatcttccactagattattttgcagaagtgcatttgctgtgttttttaggtgacagaatgcactgcgagctattcttttgtaaagtcttttcttctctggtgtggaaattttctgcttgtcgtgaggtctattgcggtttggccaaagtgtgaaagactactagaggtgtgctgatagcgtatttacttgc

SEQ ID NO: 268155 - DNA, 505 bp, Zea mays
ctcactccaccccgttaaaatcacgacgcggtggtgactggtgagtccacactccccactccattttctaccatcacactgacacgttcatagctagctagtcttcagctagtaacttacgacgggataatctcgatctgggagcgagggggaggacgacgacaatgaagatgagctccgtgcccgcggcagcggcggtgatggtggtggtggtggtgctgctatctgcagcggcgacgactgtgacggggcaggcgcttgtgccgggcgtgatgatcttcggcgactcggtggttgacgcaggcaacaacaaccggctagcgacgctggtgcgcgccgacttcccgccctacggccgcgacttcccggcgacgcacgcgcccacggggcgcttctgcaacggcaagctcgccacggactacaccgtggagagcctggggctgagctcgtacccgcccgcgtacctgagcgaggaggcgcagagcaccaccagagcctccttcac

SEQ ID NO: 268156 - DNA, 751 bp, Zea mays
ttgagctttttcttcaattgccttcaacgaggttgtcccagttgtggatggaaatgtgatacgagtcatttccgggctttacaccattgctgacaacccaaaggaatcctcaacagtgaagagatttctgggacctcgtagtgtcaaatggttgaccctttgagaccaggagacttcaaccaagcgatgatggagttaggagcaacattatgtagcaagacaaagcctggttgctctcaatgcccagtctctagcctctgccaagcgcttgcgctttcccgtgaaaaatcatcggttcaagttacagacttcccacgagtggttccaaaggccaaacctcggagtgatttcgctgctgtttgtgtggttcagattgcacaaggcttggaggaagaggcggcagacccaaagggaaatgaccatctctttttgctgatcaagagaccagaagagggcctgcttgcagggctctgggagttcccactggtccttgtggaccaagggataaccgatttgctgaacagaaggctagcaatggacaagtatctgtcaacgttgcttagcatcgacatggctcggaaacctgacgtgatcctccgtgaggatgttagtgagcatgtccacattttctcccacattcgcctgacaatgcatgtggagctcatggttattaatctcaaagatggtgtggatcgactatgcaaaaagggtgctgatagcacaaagttgagacttgtcaacgagtcctgcg

SEQ ID NO: 268157 - DNA, 1349 bp, Zea mays
caagactccaaacacaacgaacagtctatgtggttacaagattgttactgggcaaccatcagatagacttggagaggacttctcagagcattacaaagatttcacagagaggttaactggaacagaagacacggtacgagcagcctcaaagcgactaactcaggggatggcagatttcaacaaggcaatatcttcagcaaaaactgacgaggaaaagactaaaattaaaggcgatcagcaaacttcaacaaggacaatgaggtcatataacaatatattggcaatgacacagtcattgcattcaaaatcccctttatttatcggtgataagaaaatcactctgtcatggatggagcagcccaacaaagcagcagctacgaaagcaggggggaagaggtcacaacctagtacaaatgggaatgaccctgcaaacaagaaggggagaggaggaatgcaaaaccagctagtgaacagagcttttgaaggactgtctcatgttggaagaggcagtggaagagggcggggcaggggtggccgaggaagaggaagaggatggagtgggtaccactgagatgacctggaaattctgttcaaacctgacaagggatgagctttctgcttccaccagagagtaaactccaaggtcgatgttttattggtgtgcattactgcaacgcgttgaaatggatcaaggcacacaacagcagaaatgcgtacacagagaaaggatgctaagaaatgtctgcaagtttgtgcatctttcttatccatttaccatctcatcgtgttctttgccaccctaaccgtcgtgtcacctgcgttggctggctgtttgatgaactgggcagttcgatatctttgttctttattttattttacagtgtttgaagagacgaccaagcttgtgctgactttgtttgagttcgttttatgtttcgtccttgtactgacacagatgtattagtgatgtttaacttttatgtaacgattgatctagctgtaatataagttaagcatttaaaaaaaaaaaaaaaaaaaaaaaaaaaaaaaaaaaaaaaaaaaaaaaaaaaaaaaaaaaaaagggcggacgataaaaagggtggaggcttaagaaaggaaaatgcgaagcatatgtttctatagggacatctaaattaaatgaactggacgtaaatttacagggtggtgactgaaaaaaccctgacgggaaaaaacttaatggtaccgaagtaaatccccttttagaaaattggctttaaagcaaatagggcaataccgattgacttgacaaaaatttgccttccctaaatggggaatggtacacgccctgtagggacgcattaagagcg

SEQ ID NO: 268158 - DNA, 491 bp, Zea mays
caaccagtcgtacccccaccgaccatgcgtacgcgttgagtagatccagagcagtggggctgggaagtgcccgaggtgagatcaggcgaggtgatcaggtccgcttcctcctcttcctccgttggcttctacacgctccaggacgaggaggagtagggtgatgagggccgcgtccttgaggcatgggagcacgcatacgccgccctaggccaggtgaccagcttttggccgggcccagggctggcgacgagaatccaatagtgaagctttctatgtgttggcagataaactgagcagtgaggggtcttgacggtagcagagtaggtcctggctgtgttggaaggtaaactaaacagtgaggggtcctgacgtctgcaaagagcactgagaaaaggcacatgaggggcagtaagaggacagcaagtcctactgttgttggaaaataaattgagcaagtgctggtggcggctatagaaaaaggcacgaggggt

SEQ ID NO: 268159 - DNA, 766 bp, Zea mays
ctcgagcccggcagctgagctcggccccaacattcagattcttcgaggcgcggcgacggcggtcggcgacatggaggccgcggtgcccagccgtgttgcgctctccgcggcgagccgcctcccaaatccccacgccgtgacaggagatagatctttcatttacaagggaagatgccaaagtcttgcaattcctatggctttgtcagcagctgcgccaggcaaaggtggtggtgtgcttgatcggccagttgagaaaactactcctggtcgtcagtccgaatttgatgtgaagaaatcccgcaaaatgacgcctccattccgcgtcatcctgcacaatgacaaccacaacaggcgtgagtatgttgtccaggtcctgatgaaagtgatccctgggatgaccgtcgacaacgcgttgaacatcatgcaggaggcgcatgtgaatgggttgtcagtggtgattgtctgttcccagtccgaggctgaggagcactgcacgtcactcaggggcaacggcctccgaagctcgatcgagcctgcgagtggtggctgctaaggttctagaaatgggtgtatcttgttttgccaagtatagtttgtaaatacccagcatatcaatctaagctgaaactgaaacgggttggttacatgcagttatcgatacaacgaagctaagtacctcttgggtaggtgtaaatcttgtaagggtaacctgtagaagaagaaacatagtatttttgggtatgatttataaaatatttagttgctc

SEQ ID NO: 268160 - DNA, 652 bp, Zea mays
ttttatattttttttttttttttgagcataaacaggactcgcagggatttatcatagccctcagcattgcaagttgtgtagataaacttctataacagttcacagctatccattgaaatcgctctacaaggttcctctctgatagtcacttgctatccattgaaatcgctctataaggctcctctcttggtggcctctgttttcttggttatggtagtaccaacctagttgaaggtgcggtacagcttcccaaaaacatggagcatagcgacaacagcgatgaacccaatgctcatgatcagaacggtgtttggtgacattttgcggcccgcagcctcatcggtgtaaaactggagcatcgagctggcaccacctccgccagcagcagcaccgcttgtggtcctacgcctgcgcaggcttgcagctgccgccgcactccctctagcaggtgcgtcgccattcgccaccatcttgtcttaacacactctgacctgacgcctggcggtgatgaatccgctgttctcttctccctctcgtccttgtacagtcccgggccgacaccgctgtctcgggtattgtacctgccgggcccagtggctggcggagtcgggggcacgagggagcaggccgtcggggtagacaaacgcggcgt

SEQ ID NO: 268161 - DNA, 611 bp, Zea mays
gcacgcgtgcggcggcgcccttttttttttcttgtttttttttagccctcaacattgcaagttgtcgggaggaacttctataacacttcacaatctgatagtcacttgctatccattgaaatcgctctacaaggttcctctctgatagtcacttgctatccattgaaatggctctataaggctcctctcttggtggcctctgttttcttggttatggtagtaccaacctagttggaggtgcggtacagtttcccaaaaacatggagcatagcgacaacagctatgaacccaatgctcatgatcagaaaagtgtttggtgacattttgcggcccgcagcctcatcggtgtaaaactggagcatcgagctggcaccacctccgccagcagcagcaccgcttgtggtcctacgcctgcgcaggcttgcagctgccgccgcactccctctagcaggtgcgtcgccattcgccaccatcttgtcttaacacactctcgcaaccaccggcagaagagcgggtggagggaaccgccggcagaagaagagcgggtgaagggtggctgacggatgtatgcgcacgcacctgacctgacgcctggcggtgatgaatccgtt

SEQ ID NO: 268162 - DNA, 412 bp, Zea mays
cggcgatgaacccaatgctcatgatcagaacggtgtttggtgacattttgcggcccgcagcctcatcggtgtagaactggagcatcgagctggcaccgcctccaccaccagcagcaccgcttgtggtcctacgcctgcgcaggcttgcagctgccgccgcactccctctagcaggtgcgtcgccattcgccaccatcttgtcttaacacactctgacgcctggcggtgatgaatccgctgttctcttctccctctcgtccttgtacagtccgatgtcccgatggccgagcgagatccgtgtacgccgtccggtccgcctcacccgcgttattcacatgtatatacgctggcttccggctttgcgtctggccggcgtctggcccgatatggtacccggatgacgtgcaacgcg

SEQ ID NO: 268163 - DNA, 1220 bp, Zea mays
cggacgcgtgggcttacgtttgggttctgtctaaagggcaaggtctgatctcattggtgtacatgacagatttgagctccccgtggcactgctcgcccggccagccaccatcccggtcttgcgctcggcggcgtgcatggcgtgctcgtccctgacagtggctagcttctgttttcttaattgatggctagcttctgttttcttaattgatgatttgttttttccttttctgatcgtcaatagggaagagacgacgataacatggacactgttttctaaatggatcagtatttttggtatatacacatgcttttactagtagaggagtatttattttcatttgtagcagccacggaacttgtgcattccttatgaatcatgagaagaccatgaagatgcacacaaatttgcttgacttctgaccagtaataattagcgaaagaaagaaaatccagaaccatgaatcagcttgatagcagtaacaaatttgcttgacttctgacgagtaagaaattggcagcaagttcagcaggggccagactaataaatcagcttgatagcatccttgcagcggtgccttggactttggcggttagaagaggtttataattttatatgatgaaattatgtgcatcttcagttgtttttgcctcactgctctgtaaggacatataaaattggtatttgtactttctaaggttctccttggaatggtagagttttacagggaaccttccatcatcagttgctgacatagctcgaactcgacgtttcttcttcgccagttgcggctctggataaactcgaagctgacctatccaagttcgacgacgggcccttcttcctaggccaattcagcttggcggatgtagcgtacattacgattctggaaagggttcagatatactattcccatcttaggaactacgacatcgccgaaggcaggcccaacctccaggaattcatcgaggagatgaacaagattgaagcgtatgcgcagaccaagaacgatcctctgttcttgcttgaccttgccaagagccatcttaagattgcctgaagatgtgacaaagcagcattagtccgttgatcggtggaagaccactcgtcagtgttgagttgaatgtttgatcaataaaatacggcaatgaagtaagggttgttttttatgacattgaccacaccctgttctgttcagttgtggagaaaattacttaagg

SEQ ID NO: 268164 - DNA, 1453 bp, Zea mays
gtcgtgggcgtggccgtcggcggcctcgtgctgctgctgctcgccagcttcatctgcctctactgtcaccgcaagaagcgccgccggcgccgccgccgcctcagcactacggatacccgctgtccccggcgccgttcaaggaggatccatgtgggggaacgtaccagagttggcagcaaaatgcgcctcctgctccaccccctgaacatgtggtcaagatgcacccttcgcctcccccagcatatgccaatcgtcctccacagccgccagcgccgccaccaccagcgatgctaaatagtagtggtggatctggttctaattactctggtggcgagatcctacctccaccatgccctggtgctgttcttggcttctcgaagagcacattcacctacgaagagctgttgagggctactgatggattctcggatgctaatctccttggacaaggtggttttggctatgttcacagaggattgctgcctaatggcaaagagattgctgtaaaacaactgaaactgggaagtggccagggcgagcgtgagttccaggctgaggttgagattatcagccgagtacatcacaaacaccttgtgtctttggttggctattgcatttctggaggcaagaggttgcttgtctatgagtttgtccccaataacacattggaattccacttacatgcgaaagatcgaccaacaatggagtggcctgctagattaaagatcagtttgggtgctgccaagggtttagcttatcttcatgaagactgccatccaaagatcatccatcgtgacataaaggcatctaacattcttcttgacttccaatttgaagctaaggttgctgactttggacttgcaaagttcactactgataacaacacccatgtttcgacaagagtaatgggcacctttgggtatttggcacctgagtatgcagcatctggcaagctcacagaaaaatccgatgtattttccttcggagtcatgcttcttgagcttattactgggcggcgaccaattgacacaacccaaacatatatggatgacagcttggttgactgggcaaggccattactgatgagagcgctcgaggatggtgaatatgatgctttggtggatcctcggctcggaaaggacttcaatcctaatgagatggcaagaatgatagcctgtgcggctgcgtgcgtacgccattccgcacgtcgtcggccacgaatgagtcaggtcgttcgggctctggaaggcgacgtgtctttggaggaccttaatgaaggtgttcgacctggccatagccgcttctttgggtcatatagcagctctgattacgattccgggcagtacaacgaggacatgcagaagttcaggaaggcggcgttcaataacaacacctacaccagcagccaatacagcgcgccaaccagtgaatactgccaggtgccgtctggatc

SEQ ID NO: 268165 - DNA, 469 bp, Zea mays
  unsure (1)..(469): unsure at all n locations
agattgcctgaagatgtgacaaaagcagcattagtccgttgatcgngtggaagacccactcgtcagtgttgagttgaatgtttgatcaataaaatacggcatgtggttgctgactttggacttgcaaagttcactactgataataacacccatgtttcaacaagagtaatgggcacctttgggtatttggcacctgagtatgcagcgtctggcaagctcacagaaaaatttgatgtattttctttcggagtcatgcttcttgagcttattactgggcggcgaccaattgacacaacccaattggcactgcttgctataagcacatatgtacttccatttgcatgttgtataatactaataccaattgcaaaattatagttattttttctacccttgttagttaataagcatatttctggtcaataggttgtattctgattcttgtaaccgtgttaattaatgttatgga

SEQ ID NO: 268166 - DNA, 633 bp, Zea mays
cgcgtttccaacaggccagtcccctcccactcccagtcccatctcgacgacatggccgcagccgcagggccatcaagctctgtgaaggagacgctcccgccggccctcggctccacctcccagccacctcccgtcttcgatggcaccaccaggctgtacatctgctacttctgcccgttcgctcagcgcgcctgggtcaccaggaacttgaagggtttgcaggacaagatggagctggtggccatcgatctgcaggacaaaccggcttggtacaaggacaaggtttacgcacagggcacggtgccttccctggagcacgacagcgaggtcaggggcgagagcttggacctgatcaggtacatcgacagcaactttgacggccccgcgctgctcccagaggatgctgcgaagaggcagtttgctgacgaactgttcgcgtctgccaacgcgttcaccaaagccctctactcgccgttgctgtcccacgcggccgtgtcagacgaagttgttgcggctctggataaactcgaagctgacctatccaagttcgacgacgggcccttcttcctaggccaagtcagcttggcggatgtagcgtacgttacgactctggaaagggttcagatatactat

SEQ ID NO: 268167 - DNA, 894 bp, Zea mays
  unsure (1)..(894): unsure at all n locations
cctatgcgtccggtccagtgccttgtcaatctttggtccacgagtaagtgttttggatattcatgttagtgtacactgtaatcaacagagctggttttctttaacagttttgttatgaaatcatggaactggcaacatgatagaatttggcgtgcctttcaagggaaacgctcggcggcgaagctaaagcagagcttgcgctacacgcgctgcgagcagtcttctgtctaaagggcacaggtctgatctcatcatatttgagctccccgtggcactgctcgcccggccagccaccatcccggtcttgcgctcggcggcgtgcatggtgtgctcgtccctgacagtggctagcttctgttttcttaattgatggctagcttctgttttcttaattgatgatttggttttttccttttctgatcgtcaatagggtagagacgacgttaacatggacactgttttctaaatggatcagtatttttggtatatacacatgcttttactagtagaggagtatttattttcatttgtagcagccaaggaacttgtgcattccttatgaatcatgagaagaccatgaagatgcacacaaatttgcttgacttctgaccagtaataattagcgaaagaaagaaaatccagaaccatgaatcagcttgatagcagtaacaaatttgcttgacttctgacgagtaagaaattggcagcaagttcagcaggggccagactaataaatcagcttgatagcatccttgcagcggtgccttggactttggcggttagaagaggtttataattntatatgatgaaattatgtgcatcttcagttgtttttgcctcactgctctttgcggctctggataaactcgaagctgacctatccaagttcgacga

SEQ ID NO: 268168 - DNA, 425 bp, Zea mays
atgatagaatttttcaaggaaaaaaaggtaatatattaattgtgcagcgtgccaatctaatatgagttatattaattgtgcctagaacctgtctagacaatctggagtaatatattaattgtgcagagctgtctagaacctgccgaaacaatctggagtaatatattaattgtgcagcgtgccaatctaatatgagttatgttctttttggtgttcctttcaagggaaacgctcggcggcgaactgaaagcagagcttgcgctacacgcgctgcgagcagtttctgtctaaagggcaaggtctgatctcatatttgagctccccgtggcactgctcgcccggccagccaccatcccggtcttgcgctcggcggcgtgcatggtgtgctcgtccctgacagtggctagcttctgtgttcttaattg

SEQ ID NO: 268169 - DNA, 307 bp, Zea mays
aggcaggcccaacctccaggaattcatcgaggagatgaacaagatttaagcgtatgcgcagaccaagaacgatcctctgttcttgcttgatcttgccaagaaccatcttaagattgcctgaagatgtgccaaagcagcattagtccgttgatcggtggaagaccactcgtcagtgttgagttgaatgtttgatcaataaaatacggcatgttgtaagggttgttttaccctatttataatacaatgtactgttcagttgttgaactctattttttagtcatgccaagtgcttttcttttttgaatcc

SEQ ID NO: 268170 - DNA, 868 bp, Zea mays
cagagcggaccacatccgtccagaagccgcagcagcgagcaggtcaggtcggcagagagctcgacctctcgctgacggcgacgttcggggccggcggaggacaggaacaggacgatggccgagggaaagaggtggcggttcgcgatggtctgctcctcgaacatgaaccggagcatggaggcgcactcgcagctgggccgcgcggggctcgacgtcgagtcctacggcacgggcacccacgtcaagctccccggccccatccctccacgagcccaacgtctacgacttcggcaccccctacggcgccatctacgacgacctccgccgcaaggaccccgaactgtacaagaggaatgggttgctgcctatgctgaagaggaacacctcggtgaagctggcgcctcagcggtggcaggacaatgccggcgacggggtgtttgatatgataatgacctttgaggagagggtctttgacttggttgttgaagatatgaataaccgcgagccgaggttgatgaagtgtgtgctgataataaatatggatgtcaaagataaccatgaagaagctggtgttggggcaaagcttgctgtagagttgtgccagaagcttgaagcaattgatggtgactgggaggacataattgatgacttgattactgcatttgagaagcagcacaagcggagacttgcatacagcatttcattctactaacttgtatagtcccgtttggacagagatgttgcagtggatggttggtaacttggcattgtagtaagcaactgcatatgagtgaagcatcatgtcgtggcagtgttgcttgaattcttccacgcttacatttgcctgtgctagcctgttttttaaaaa

SEQ ID NO: 268171 - DNA, 827 bp, Zea mays
gtgacgctggcgacgcggtggcggggccggcctcgggcctccctgccagtgctcgccacgtcacgtcttctgccgaagtcaccgtggcagcgtactcgtgcggcgaagccccgtccagccgcggctcctccccgtggcttgccgtcccggcgctaccgccagtgcagagcgcacccgtgctgccatgacgtggatccgaggccgtgccatcacgggcacggctgctgcggccaccacggcaaaccggagtgcagcagctgccgaggatactgctgcaggcccagagcgctggagccgtccgcgccgcggaagcccccggcagccaaggtagcccaagcgtgcggctgccgccccgctaccactgccggccagtactgaagggcgcgccgctcatcgtgtgctccagctgcttcaagctggtgcaggtgcccgccgactttgccgtctcgacaggatggtgcgcaggatgcggtgcggctcctgctccaccgtcctctcctactcctacagggacccggccaggaagaaagcctaccaggactcggtcaatcggtgcagcacagacggctccgagctgcacggcggcacaggcgaccaacggccggacccgttcgcgccgttcatcgacggcttcggcctcagcagctactcgacggaggacgagcggcggctgcccgtctcgaggaacacgtcgttcgacaccctcgacgggaccaaaggcgtgggacgcctgcaacggctgatggggtacgggtcggctagcgagctgctgcgccactcccctgacctgtacgagagcttcagcgagcggacgacgcctgacgtga

SEQ ID NO: 268172 - DNA, 600 bp, Zea mays
cgcgccacgcgcgcgcccacctcgtcttcccaaacaagaaggctacgtgtcccgcgcggcggcggcggcggcctcggtcctccctgccagagcgcgtcacgccgccgctgctaccgacggttaccgtggcagcgcagctcgtgcgctgaagcgccgtcaagccgctcctcctccttcacgtggcttgccgtcccggcgctaccgccagtgcagagcgcacccgtgctgccatggcgtggagcccaggtcgtgccgtcacgggcacggctgctgccgccaccacggcaagccggagtgcagcagctgccgagggtactgctgcaggcccagagcgcaggagccggccgccaaggaccccaagcggcgcctggcgccccggaaccactgccggccggtgctcaagggcgcgccgttcatcgtctgctccagctgcttcaagctggtgcaggtgcccgccgacttcgccgtctcgtccaggacggtgcgcaactccggtgcggctcctgctccaccgtcctctcctactcgctacagggacccggccaggaagaaggcctaccaggactccgtcgaccggtgcagcacagtcggctccgagct

SEQ ID NO: 268173 - DNA, 494 bp, Zea mays
ccacgcgtccgtgttaatatattaaaatctggttatagtaaatatacataatatgctgtcatctagatcaatacacatatatgcctttgagacataaatatgtgtcatgattcaactttcatgaatagtttttctcaacgtctcgcatactaatgatattagcaaattatgtaagataataaccatgatatacaacttatataaattattatgttatatttgtacattttagctaaactatttgacatctaatataattgtaagttcataagcgtagatatattttctagatatgagcttagcggtaggtaattttgcttatctattaccgtaataagcttgatgactgaggtagacatctgatttatatttaatctaactgtttctctatgtgaatggatacatatattaactcaggtagcactacaactagcaatgtatggatgaattgaaggaagtaaaagaaggcagacaatcttataaaaactctgcat

SEQ ID NO: 268174 - DNA, 317 bp, Zea mays
agccgattcggccttccgctctccgtgttgccgagctgcggcgggcgttgcgcctccctcgcctcgccagtcccctcgcctctttctcgtttgcggcggcgtccacagcatctgcggctcctgccaccacgtttcggctgcgaccccttcgcccgaaatacgaatgatgagagcaggataagataagcaaagcaaattatgcgctgcagaagtcctttgcattgcagttttccactggaaggttgtgatgcaaggtacaaagataaacttgtagacagaaaccataatgcctgaccctgcttattcgatctcaatta

SEQ ID NO: 268175 - DNA, 426 bp, Zea mays
gcgtccggcagctttagctgaacagcagcatatgcatggacagtcttctagtgcatcggcttgccaggcaacaaggtttgacatccttagcagatcagacagatcctttacggaggatctgagtgtagttgggaacagttcttcatactccagagtcgacgaaccgtctagcagcagtacgcaccgaacagtagagggttcaaacggctggtggtccgaggtggctgaggctggaaccaggatcgctgaatctgatgttacagtggaggctggtgttggcaattcgtccacttcagctgtgtccaacattggctcgggcagtgttcctgatagcttccaggagcagatgatgctagccatggctctttcgctggtcgatgcgcgtgctagggcaggttctccagggttagcttggcggtagcgttt

SEQ ID NO: 268176 - DNA, 982 bp, Zea mays
cagtgttggaccttcttgctcaccaagaagcccagcccggcctccatcaaagcccacaaccgtcgtaatcgctacttcccctccgatcctcgtcgccgacgcatccacccgaaccctcctccgcgacctcgccgtcgccgcagccttggccatgtcgatcttcgagtataatgggtccgccgtggtggcgatggtggggaagaactgtttcgcgatcgccagcgaccggcggctgggcgtgcagcttcagaccatcgcgacagacttccagcgggtgttcaaggtccacgacaagctttacatcggcctctctgggctcgccactgacgcccagacgctgtaccagcggttggtgttcaggcacaagctgtatcagctgcgggaggagagggacatgaagcccgagacctttgccagccttgtctctgcgctcctctacgagaagagattcgggccatatttctgccagccagtcattgctggacttggagatgacaacgtaccattcatttgtaccatggactgcctcggtgcaaaggagctggccaaggattttgttgtttctggaacagcatcagaatctttgtatggtgcttgtgaatccatgtacaagccggacatgcaacctgatgaactcttcgagactatatcccaagccctgaattcatcagtagaccgtgactgccttagcggatggggtggctatgtgttgattgtgacaccgactgaagtgagggagcatgtgattaagagcaggatggactaaataatggccactagaattattagctggtttccaatgcttaagaccaatgttgtgtttgtattctggagtaacattgtatcatcacagttggtatgagaaggaacgtttgttttctttatctctgttttacaacacttctgtttggtggaatactgagttggtaatatcctagattgcctgttttacaacaaaaaaaaaaaaaaaaaaaaagggctg

SEQ ID NO: 268177 - DNA, 499 bp, Zea mays
cgtagtcgctacttcgcctccgatcgtcgacgacgacgcatccacccgagcccttctccgcgatatagccgtcgccgcactgccgcagcgccggctatgtcaatcttcgagtacaatgggtccgccgtggtggcgatggtggggaagaactgcttcgcgattgccagcgaccggcggctcggcgtgcagcttcagaccatcgcgacagacttccagagggtgttcaagatccacgacaagctctacatcggcctctcagggctcgccaccgacgcccagacgctgtaccagcggttggtcttcaggcacaagctgtatcagctgcgcgaggagagggacatgaagcctgagacctttgccagccttgtctctgcgctcctctacgagaagagatttgggccatatttctgccagccagtcattgttggacttggagatgacaacgtaccattcatttgtaccatggactgcctcggtgcaaaggagctggccaaggatt

SEQ ID NO: 268178 - DNA, 459 bp, Zea mays
ttttcaggagtggtagtcgcatctaccaatgataggaaaaagttgtcggccgtatttgagggccttgcttctgacctacattcatatgatgggagaagagggatgcgtgggattgattactcgtcgctgaaacttggggatcttgccgaggtccgatttgttctcggtaaagtgatcatggacacaatgtacgacaagttaccatgcgaatctactgaggatgagggcgctgctgcagatgttgctggtggaagcctacctccattgtccgcattgttttaatcgtagtgaagcatagggttcactcaacaaactaggcagcccttttctggttttagtcagtgctgcaaagcaatcgagttgttcagaattttcttgtgttgcaagatgaccccaacgacaactgtagacgtatttcagaatttttatcaaggaactcgaatgtgcagttgtagctaa

SEQ ID NO: 268179 - DNA, 2405 bp, Zea mays
gtgcagcgcaggtgcagcgcacgcacaatgacgggagggaaaagccaaagaagccaccgcttcccttccgcggcttccacaccacctgagctcggccggtggcggtctgcttccgaccgtccgccggtttgcttgcttcatctgcctccgccgcacctcgcctccgtccagccagccagccagccagcgccaagtcaagcgatccggccgcacccagcctcgacctccccggccgacccgtgagggcggtgtgtttggccttcaacggcctcgactcgcctcgagggcggggctcttccaccacctgcaggccgggagaagaggtgcaaaggcagcagcttggattcctgctatgtgcgcgcggttggtcagctcgagagagaagctgaccgggtttgggcgtcgagatttcgattgacttttgaggtacccggggtatagtctacaatacaggttgcttcttcttgcacgctgctttcttggctctgtggctaccgaccttgctggctttccctcccgaattagcggctgagctccatccagaccttgcaaagattggacctttggggggcggttcgctcactcctagcttgcctcgctggctggtctttgagcttctcgtgctacgagccaagggaggccatcttttcctgctcggttctgtcgtgcaaacgggaaagattgagctgatctgctgctagctggggatcctgcagaggctaccgcgttcttcttgtctggggtgcacagtgcatgggcagtgggtgaactggtagagagcaagatggggaattgcatcgacaccacggcgcgggtggatcacagcatgaacaatgctgcctacccatcaaaagtgaccagcaagacaagtttgtcgtcaatcccttccacaattaagagcaactcaagtcgttcaacactgactcttccatcaatgagagatcgaaatgagcttcctactcctcggacagaaggtgaaatcttgtcatcttctaatttgaaggcattcacgttcaatgatctaaaaaatgcaaccaagaacttccgaccggacagccttcttggggaaggagggtttgggcatgtctacaaaggttggattgatgagcacacgcttgctccttcaagacctgggagtggtatggttgttgctgtgaagaagcttaaaccggaaggttttcaaggacacaaggaatggctgacagaggttgattaccttggccaacttcaccacaagaatcttgttaagctcattggttattgctcagatggtgacaaccggcttctggtgtatgaatttatgcccaagggaagtttggagaaccatctgtttagaagaggtgctgatcctttgtcatgggcaataaggctcaaagttgccattggagctgctaggggcttgtcatttttacatgatgctgaaaaccaagtcatatatcgtgatttcaaggcatcaaacattcttctcgactcagaattcaacgcaaaactttcagattttggcttggcaaaagctggtccaactggggataaaacccatgtatccacacaagtcatgggtactcatggatatgcagctccagagtacattgcaacaggccgcctctctgcaaaggcagatgtctatagcttcggggtggtgttgcttgaactgctcactggaagaagggctctggataaatcaaaaccaggctttgagcagaacctagttgactgggccagacctcacctgggcgacaagcgcagactgtaccgtatcatggacacgaagctgggaggacagtaccccaaaaagggcgcaaatgccattgcaagcattgcctcgcaatgcatttgcggtgacgccaagctgcggcctccaatgtcgcaggtgctggaagagctggaacagctacaagatgccaagtatggtgcaccatcgccattagtcgacatccggaaagcctcgcacgccgcccccaaatcgcccatgagcagcaccccaaaatcgccgctgagcagcaccccaaaatcgccgatgagagctcaaccggcagcacggccttcgccacggcgctcgcttggagcggcagcccctttggcaggataccgcactgcccaagtgcactagaactttgcccaagtgcactagaactggacttattagcggggccaaggccccctgtaggctgtgtgtttgtgggttcaagctgtgagcactgagcagtgttgtagcttttgcttctactgatgtttcggcgatggtgtgtgccacgggaatatgaccatgtcaaccttatgataagttgtcaggcctggttcattattgacctgtgtcgtgactgttccgaaattcactcacctggcatcaatgtcttgatctattgtacgttgcaaaaaaaaaagaaaaaaaaaaagaaaaagaa

SEQ ID NO: 268180 - DNA, 698 bp, Zea mays
ctcagatggtgacaaccggcttctggtgtatgaatttatgcccaagggaagtttggagaaccatctgtttagaagtgtgtgcttcatctctatggctctgctttgttaagacccagtttcttataactttcttgttcattccctttaaccatgcaatatttctcctgtttaggaggtgctgatcctttgtcatgggcaataaggctcaaagttgccattggagctgctaggggcttgtcatttttacatgatgccgaaaaccaagtcatatatcgtgatttcaaggcatcaaacattcttctcgattcggaattcaacgcaaaactttcagattttggcttggcaaaagccggtccaactggggataaaacccatgtatccacacaagtcatgggtactcatggatatgcagctccagagtacattgcaacaggttagatattttttcctcgcgtgcgtactgatgaaatattggggtagtgttgtgcattactctggtttgtgtcttcagcttttaaagggagatgtcaataatacttcctagtactgcaacaactaaggatacctgatcatttcattttctacctaaagcatatttggtgatacagggtataacaaagggctatttgtttaagctaaaagaaatcattgtggggccctgccatcaaataactgtatttatatttgttttggagtca

SEQ ID NO: 268181 - DNA, 551 bp, Zea mays
cggaattcccgggccgaccgacgcgtccgcttctatttaaagattcaaacaccaggctgttcctttaatacatcatgatgcatccctgaagttggtgtcattcacacactgcaccccattactcttatcaagctcattgctcattgcccagatggtgacaaccggcttctggtctatgtaatttatgcccaacggaactttggagaaccatctgtttagaagacgtgctgatcctttgtcatgggcaataaggctcaaacttgccattggagctgctacgggcttgtcatttttacatgatgccgaaaaccaagtcatatatcgtgatttcaaggcatcaaacattcttctcgactcggaattcaacgcaaaactttcagattttggcttggcaaaagccggtccaactggggataaaacccatgtatccacacaagtcatgggtactcatggatatgcagctccagagtacattgcaacagataacggtcagttggtggagtctgaaagagttgcaggtgaagaccctgagcagcagtcggttggttaag

SEQ ID NO: 268182 - DNA, 490 bp, Zea mays
gggaaatgcctaagaagccaccgcttcccttccgcggcttccacaccacctcagctcggccggtggcggtctgcttccggccgtccgccggtttgcttgcttgcttgcttcatctgcctccgccgcacctcgcctccgtccagccagccagccagccagcgccaagtcaagcgatcctgccgcacccagcctcgacctccccggccgacccgtgagggcggtgtgtttgcccttcaacggcctcgcctcgcctcgaggtgtgagctcctccgacacctgcttttctcggcgccgccgtttctgcaagcagggttatcttcccttctcgccgccaggagtgagtctgtgagttgggtcgtcactgggcggggctcttccaccacctgcagggacaagggaaaaaaaagggcagcagcttggattcttgctaggggcgcgcgggtggtcagctcgagagagaagctgaccgggtttgggcgtcgagatttcg

SEQ ID NO: 268183 - DNA, 456 bp, Zea mays
ctaaaaccgccgtgccagggtgttggaggtagtggtctagttactatataggtttgctgaaaaaaaaaaatgatgtaggattttgactgagcagagcagggggtctgaaaggtggaaggaagggctctgcttggttttcctgcacactgctcctctgtttgcgtcttctgtggcggcggcggcaatggagactgtcacagacgtaggatgtcatgtgactagtgcccgccggggccaacactaatattcaggaactatccatatccatttcggtcccttttaaaatgggagtttctttttctatctcctacgttttctattttagaataaattgatttatgtgactgcgattgcgttttagaataaattgatttatgtgactgtggctatgaaattactgggttctaaaaaaaaaaaaaaagggcggccgctcgcgatctagaaccggacgcgtgg

SEQ ID NO: 268184 - DNA, 730 bp, Zea mays
gaagaagtgggttttgagcatcaggctgcaatcatgcctgatgttcctccgccagaacagctccttaatctggaggagatacgtgaaagacggcttactgatccacgcttcccatcccaatataggaacctggcagctaaaaaaaagtttattccttggcccatagaaatgagattttgtgaaggttcagcgtctcgacatataccaagcttaaactactggtttagagctcgaggggaactctcagacgaccaggctctacacagatgtgttgtagcatatgcttcggatctactattttctggggtgagccttaaccctcatcgggagaagggtttgaagacatactgcctcagtcttgaccattccatctggttccacaaacctgtgaaggctgacgaatggatgctgtatgtgatcgagagcccatctgcgcacggtggtcgcggtttcgtcaccggacgcatgttcaacaggcaaggagagcttatcatgtcgctgacccaagaggcattgattcgaagggagaagccccgaggtccaaatccgagtccgaagctttgaggcacctgacagcctctgcagttgactgtagaggatcccaaccgagctttgagaggcgccccatcctttcttctaatttggtttagatatttatgaattcccaaacaaaaatatagaatatcaagcagtataaaagatctcaagtcaaacctaacatttttttttc

SEQ ID NO: 268185 - DNA, 882 bp, Zea mays
  unsure (1)..(882): unsure at all n locations
gcactgcgaaggggacagccactttcacgctacaggtgagcatggctgccatgaacatgatgcgcacagccactgcgaggagcacggccattcagacaccgctgttgagcatgcttgcgagcatgagtgccatggtgagcaccaaactgtgcacgctgtggaaacacaccactgccatgaccacgaccatgagcacggacagcatgagcttggggagatcgaggaacctgagaaggactgccacgaccacagccaccactgctgccatgagcctcacggcaaggacaaggtcgcggccgagccagttgaagaggtcacgatctcaatcgctgccctgcccaaagacgaaggccaccaccacagcgaggaacaacacaatggggagcactgcaggaaggcgaaagactgcggcggcggcggcggcgctgctcccaccgactgcgctgcgagcaagaactgctgcggcgtcaaaggtggagacgcctgctcgagcgtgcaggccgcgcgtgccagggagaccggcccgtgctgccggagctacgtgaagtgccccaggacggcggcggcgagcaggagcagctgctgcggccacagcatgctgaagctgcccgagatcgtggtagagtagtagtagtactgtagtagggtggaaattccaccgtgggagaagggtgtgcacatatgaacaagcaactgtgaggtgagtgtgactcgccggcgtaaatgtagactaagatcgccgctgcagggtgtttgatctagtagtctagttactatataggtttgctggagaaaaaaatgatgtaggattttgactgagcagagcagggggtctgaaaggtggaaaanaaaaaaaaaaaaatatttatttttaaaataaaa

SEQ ID NO: 268186 - DNA, 2194 bp, Zea mays
cggacgcgtggatcagagcacctgcctctcttcagtttgttgccgtctctctctctcctcttgacgcaactcctctcctatcttctctctctccatcgctccctcctccgcgccgcgttggcaccgaaccctcctgtcatggcaaggccgccgaaggaggcgattgataccttcatcagcatcacgggggcggacgaggccgtcgccgtacgcaaactcgaggaacatggtggtgatcttaatcgagcaataaattcacatttcaatgatggagacagcatattgaacggaatcagtcaaaacgccatgcctgctagtcgtgatgatatgatggacctggatggaccacttgataatacatttcaaagatctttgttgccagagagtttccgtgccccttttgctctaatggatccaaatttccaggaccaattttttgacagagttggctccactgatggtgtcattcgtgaaccgctagtttcacatccaagagaggtgagggagatacctatcgaagttaaggatggtgatcctcaaacaggttcatctggccaggatgttactggaaatgagtcttcaaatggccctgaagtccctgaaactatcataattgatgatgtggacggtggattgttatctgcaccatctgttccacatcctattattcctagcaatacatctactgtgccaactgctcctccattggttcatgttaatgactatgatgaggacatagaagaggaaatgattcgggcagcaattgaagcttcaaagaaggattctgaaggactggcaaatatagtcgagcaaggaggccagcatcaagaggaagtgaatttgagggaccattcttctgataaagcaggcatggaaaccgcaaatggaatagttgagaggcaaggactagcttcagaaaaggctggaacatctaggcaaccaatagatgacgagagcttccaggaggaggctgaagatgtagaagaacagccgttagttaggcgtcgttctcggcgtgccccttctgaggacaatgaattaccaaaaatagtgcacccaggtgctagccctgttctgaacaatcaccagtataatggagatgatttcccatctgaggtattatataatctgtggttccaatgtgcgctaagacattagatggatttgtttaatttctgacgtctttttacaataaagtggggtggcatttcttctgaggaacatgatgaagctgttatgcttgaggctgcaatgtttggtggagttcctgaaggaccaacatatcctttctctatgccttctcacagaacctctacttattatcccccaatatctcattctccatcaccagcattaactgaacagcggttattacgagagcagcaggacgatgagtaccttgcatcgctacaagctgatcaagaaaaggagttaaaggccctacaggaggctgagctccgtcgccttgaagaaacagctgcgagagaagctgttcttgagaaacagaagcaagaggaggaggaaaggcgtaaaaaacaacttgaggaagaggaactagagtccagtctcacttcgaagcaagcatcattaccaccggaaccgtctccagacgcagagggtgctgtgacagttgtagtccgaatgcctgatggcagtcgacaggggcgccgctttctcaaaactgataaacttcagttcctatttgatttcttagacattgggaggacttgcaagccagggacctacagattggtgaggacatacccaaggcgcacgtttaccaacagcgagggtgacgtatcattcagtgatcttggcctaacaagcaagcaggaagccctgtttctagagcagatcacggggtagaggataatcgttaggcatggcttagagataccaccacagctgggcaggagaattttacacaaaatacttgcaccatatcgccagtgaaaactcggtctgtcaaattggttgggttggtcgaagaaaggttaaaaattcttttgtggcgccatgtgtcgtgacgcattgcgctttgcatgcaaattggttgggttggtccaagaaaggttaaaaattcttttgtggcgccatgtgtcgtgacgcattgcgctttgcatgctttacgttattatatatatgcgtgatactttatacctacgcatgcaaaaaaaaaaaaaaagggcggccg

SEQ ID NO: 268187 - DNA, 608 bp, Zea mays
aagaaggattctgaagagacgggtccatcagagctgagcccggtgttcccccccaagagggagtgaatttgggggaacattcttctgataaagcagtcatgagaaccacagatggaatagttgagaggcaagtactagcttcaggaaaggctggaacatctaggcaaccaatagatgaagagagcttccaagaggagactgaagatgtagaagaacaaccgctagttagacgtcgttctcggcgtgccccctctgagaacaccgagctagcacatatgccgcacccaggagctagccctgttctgaacaatcaccagtctagtggaggtgatttcccatctgagtggggtggcatttcttctgaggaacatgatgaagctgttatgcttgaggctgcaatgttcggcggagtttttggaagaccaatgcatcctttctccatgccttctcacagaagctctacttattatccccaaataactcattcttcatcaccagcattagctgaacagcggttattaagagagcagcaggacgatgagtaccttgcgtcactacaagctgatcaagaaaaagagttgaaggccttacaggatgctgagctccat

SEQ ID NO: 268188 - DNA, 948 bp, Zea mays
ggtttgaggacaggaatctttgaagcaagcaagcttgcattaattaatgtcgctccaacacttccagagattcaggtgcaatcaattgcatccttctgcagcacagtcctagggactgcagtccggatcccttgtgaggttcttaagcagcgtttgcaggctggaatattcgacaatgtaggggaggcgattgttggcaccatgcgacgagatggcccaaagggattttttcgtggcactggggccacactgtgtcgcgaggttcctttctatgttgctggaatgtgcctctatgcagaagctaagaaggcagcacagcatgttttgaggagagacttggaagcatgggaagtagtggcagttggagcattgtctggaggacttgcggcaatagtgaccactccctttgacgtgatgaagactaggatgatgactgcccctccaggcacaccagtgtctatgcagatgataatcttgtccatccttggaaacgagggtccacttgggctctttaagggcgcgatcccccgcttcttctggattgctcctcttggagcaatgaactttgcaggctatgagcttgccaagaaggcaatgataaaagatgagaaaaattccagtgagtcaacacgagagatcttgccaagaaagcagtgatcaaccatgcaacttttttattttatttttgggtccatgttgcagagaagcaacagaacatctgcctttttttgatattgggaattacattcccgtagggccttgagatggctgtatagtatacattacatgagaaaagtgctagaggacagaggcacatgctggagctgttgttcttttgctggataggacagctcacttgttttgttatccgacgatgatccatagccttccttgttaaacacgatgtaaatttgctcttgtagttaccctgaggacatttggctttcg

SEQ ID NO: 268189 - DNA, 682 bp, Zea mays
cccacgcgtccgcggacgcgtgggccagcaggtccagcagcaccagcagcagcaggcggttggcgcggtgaaaggcgggccgcccgtggccgcggcggcgtcggagctcatccggcggaacctcgcggagcagatggccatgacgctgacgcgggaccccagcttcaaggcggcgttcgtcaccgcgctgtccggccggctcttcgagatgtcgccgaccaaggactgacggaacggatcggatggattgggagattggcatcgcaggagattctggatcagattgtcttcgagcgcacgccgcaatggtcaactgcgcagcgctggcttggctgtcagagcgaaacagcggtaacagagcaagacacgaggggtctgcactctgcagttgtgcaggaggaggaacagacacaaggggaggacggcgcgcggccggacatggcgtggaacagagatcgtcgtcaccgccggcgggggtgtggtcgacgacgcgacatgcgaaacactacgtgctagctagcataggaaaaaacaacatgaaatcgtacaaccaaccaatccctcgcactgttttagttgttagctgtaggcgaaactgttcatccaattgatcaaatgaaaattatttttccctaaaaaaaaaaaaaaaaaggaaaaaaaaaaggaaaacaccacgcgtctg

SEQ ID NO: 268190 - DNA, 463 bp, Zea mays
tggaacggatcggatggattgggcgattggcatcgcaggagattcttgatcagattgtcttcaagcgcacgccgcaatggtcaactgcgctggcttggctgctgcctccgttcactctccaccgttagcgaaacagcggtaacagagcaagacacgagggtctgcagttgtgcaggaggaggaacagagacagggagaggaggtcgcgcggccggacatggcgtggaacagagatcgtcgtcaccgccggcgggggtgtggtcgacgacgcgacatgcgaaacactacgtgctagctagcataggaaaaaacaacatgaaatcgtacaaccaaccaatccctcgcactgttttagttgttagctgtaggcgaaactgttcatccaattgatcaaatgaaaattatttttccctagcactatgtttcatgagaatgagaccaggaatgaaccaacttgagtttg

SEQ ID NO: 268191 - DNA, 583 bp, Zea mays
  unsure (1)..(583): unsure at all n locations
cccacgcgtccgcggacggtgggtttgcttggtccatttattttggttgtctgtagggaagagacgacgacatggatgtagattccattctttgtgtgagcactaccgccatatagttgacaacgatgaccgacactgtagattccattctttgtgtgtacaccaaggtatcggtgtctacgttgatctggcgatgcgcttttcacggttactgcgaccgtgatgggcatctaggtgctcaaaccattagttggactgaggaacacggagcagcagcaacaatatcgtaaggagagtgcagaagttggacaaatggtatgccatatcttcagttctcttatgatgcttcagcgctacatcttcagttttctcggctaaaaagagatcatagtcaatagtatacctatgtgtgaaagcgctatgctatttgcttgtttgctgggagaaagaaaagatagatgaaggtaattatacaatttctaatacattgttcagcttttgttatttttgccatatgatacacactggccatgggacatgtcgattgagttcactgnattgttttttaaaggaagcggaaaag

SEQ ID NO: 268192 - DNA, 1125 bp, Zea mays
gccaaactaatggattacaaggatacccatgtaactactgctgttagatgaagacttcgaagctgtggtgggggatttcggtttggccaaactaatggattacaaggatacccatgtaactactgctgttcgaggaacaattgggcacattgcacctgaatacctttcaacaggaaaatcctctgagaaaactgatgtatttggctatggaattactcttttagagcttattacaggacaacgtgccttcgatctagctcgtcttgctaatgatgatgatgtcatgcttcttgactgggtcaaggggttgctcaaggagaagaaactggagagtctggtcgacgaagatctagaccacaactacatcgatgtcgaggtggaatctctgatccaggtggcgctcctctgcactcagagcaaccccatggaacgtcctaagatgtcggaggttgtgaggatgcttgaaggcgatggtctcgccgagaggtgggaggagtggcagaaggtagaagtggtacggcaagaggttgagctaggccctcatcgaacctcggaatggattctcgactccaccgacaacctccacgctgaacagctgtcagggccgaggtgaaggcaagcttgagatcagactcccactaattctggtacggaggagtattttgcaagggcacaatagagatgtgtatcaatcatcctagtaaaaaaaaaatccaccaatttgttaatataccagtcagtgggtgaagcgaagattggcagccatggctttggatgtatattgcttgatgtggtcagccatgccttttgagttcttctatgccagggcagcagagctggaggagcttatgtcatgtgcagttgccgcatgcgccaatgctcctgtgtttgtaaaggtcggagctgaggtgctgcggctatcatctgggtccgcgataagttaattgtactgatagttgatatctaactactattttgtgtatcaaatgaaaatgttggaactaaaggatcggatagtataggtgtcttatgaacctgttctggctggcaaaattaaccagaaatatggatttgccacttcaaaaaaaaaaaaaataaatataaaaaaagaacaatatatataaa

SEQ ID NO: 268193 - DNA, 543 bp, Zea mays
aatatttcataggagttaaagtgcacatacctaatcaagtctgtgggtctccaattctgaggtagaaagataatttatgttctcatctttctgaaatgaacaagatgactggcttatgggttaaggtttttttatagagcaccatgacttatcagttttgtgaacaaccctaacttatgtggtcctggcaccacaaaaccttgtcctgatgctcctcccttttctccacctcctccatacaaccctacaaccccgatgcaatcaccaggaagtagctcttccactactggagcaattgttggtggagtggctgctggcgcagccttgctatttgctgttcctgctatcagttttgcctattggcggcacaggaaaccacaagagcaagcatttttttcaatgtatctggcttcaaagttagtctttgattattatctttctcgcaacataagggcaaacaatgtttatatgtagcaaacaaatacggtttgcaaacgttttaggaacatgtttttacaataaacatatacttatagtttcacc

SEQ ID NO: 268194 - DNA, 1293 bp, Zea mays
gacaaattgttatttgtcagatccaggacttggagtgcagtgatagcagttttgggaacaaccctaatttatgtggtcctggcaccacaaaaccttgtcctggtgctcctcccttttctccacctcctccatacaaccctacaacccctgtgcaatcaccaggaagtagctcttccagtactggagcaattgctggtggagtggctgctggtgcagccttgctatttgctattcctgcaattagttttgcctattggcggcgcaggaaaccacaagaacatttctttgatgtacctgccgaggaagatccagaggtgcatcttggccagcttaaaagattttcactacgagaattacaagttgcaacagatggcttcagcaataagaacattcttggaagaggtggatttggcaaagtctacaaaggacggctggcagatggatctttagttgctgttaagagactaaaggaggagcgcacgcctggtggggaattacagtttcaaacagaagttgagatgattagtatggctgtacacagaaatctattgcgtcttcgtggattctgtatgacaccaacagaaaggttgcttgtgtatccatacatggctaatggaagtgttgcatcacgtttaagagaccgggcaccagctgaacctcccctagattggcaaacaaggcgaaggattgctttgggttctgctaggggcctgtcttatttacatgaccattgtgatccaaagattattcatcgtgatgtcaaagctgcaaatattttgttagatgaagacttcgaggctgtggtgggggatttcggtttggccaaactaatggattacaaggatacccatgtaactactgctgttcgtggaacaattgggcacattgcacctgaatacctttcaacaggaaaatcctctgagaaaactgatgtatttggctatggaattacacttttagagcttattacaggacagcgggccttcgatctagcttgccttgctaatgatgatgatgtcatgcttcttgattgggtaattaactatgccatttcctctgttcaaattgcaacttaaatgttcatgccttttttgtggcttccatactgtgtaggggttggtggtcaatttttcctatgtaaccgttaaaaaacttgctaatcatttgatccaatgacaaagagcttttgataatgtctaaggaataaatattttaactgaattggtgcattgtgataggctgacagctgaacaagtagtgacatgcttctgtccctgaaagtaagagtatttg

SEQ ID NO: 268195 - DNA, 370 bp, Zea mays
tatgatctccactgacttccacaaggagtgcaggcaccttcggtcccatccgctgttaaggagaacacatggttatggtgttccacagactggcattttattcattcattgaaaggcttacctcgcttatggtgttccacagagcgacttgaaactattttcacttatgcaaaagatttgtgcattaagaatattttttatcagagttcactcgaggaatgcaagaattaggataggtagattagatcttttttattggtgtatcctgagtttcctctaataagaatcatgtgtcaccacctgagtcaattttactaaacatttttttgctaccagccttaaatacatactacaaatgctgatttaccct

SEQ ID NO: 268196 - DNA, 391 bp, Zea mays
aacttgatattgagctgagtggaagttaccatacttaattgctttgaattgatttttgtggagatatgacttgactaaacatctaaagcagctccagtgtagaaccctgatttttgtcagtgagaattctcagttaaactcccaagaccgttcactggacatcaaagctcgacatgagatattgtgctctagttgaggtttgtgcgtcaataatacttttttatcaaagttcactcgaggaatgcaagaattaggataggccaattagatcttttttattggtgtatactgagtttcctctgataaggaccctgtgtcaccacctgggtcaattttactaaacatttttgccactagccttaaatacatactacaaagtctgatttacgct

SEQ ID NO: 268197 - DNA, 814 bp, Zea mays
  unsure (1)..(814): unsure at all n locations
acttgttaggcccattgcatttctgtctactcttttggaagcagatgatcgtgctgttcggatggctgctggtgaagcattggttttgtgctttgagctaaatctgcttgatgtttcttcttgtgaggatggtgatgttaacacagggggaactggtggttctaagaacaagcttttcctggatatgcaagcattaaaagccaaaatatcaggtctggcctcgaatctctctgctgaggctggggggaaaggtgcagataagaagaaccttactgaccaaagagacttgtttcaacgaatcttagattttgtcaagtatggtgactgccctgaagaatcaatcaagattgctggaaaacgtgatgttttaagggtgtcatcgtggtctgaattaatccagttgaatttcttaaaacggttcctggggaaaggctttctgaagcatgtgcaggagaatggacttcttcaggatatctttgacattaaggttgacaaaaccgaaaccctgtcgtccactgacaagaaaatctttaggtctgaagaggaaaaagaaagagctctgagattaaacaaggaacgtcgtctagcccaagtaaggaagaatgccgtcatgttggatgagtaacaaggtcaagaagagaaggggaaacaacatcgatttctgtatctcatttcatccgggcctttgtctgtttgcacattcattggaagatgtgccttcatgatagtgtactttaaagatactggagttttatagtgcatttaaccgatatgctntgtgtcgtgcattttgaacgtcagcataatttgtggg

SEQ ID NO: 268198 - DNA, 422 bp, Zea mays
ggaaaaagaaagagctctgagattaaacaaggaacgtcgtctagcccaggtaaggaagaatgccgtcatgttggatgagtaacaaggtctcgaggaagggaaaacaacatcgatttctgtatctcatttcatccgggcctttgtctccgcctgtgtaacctattacaggcacatcccattgtctttgcctttgtctttaaggaccctgcagttttatagtgcatctaaccgatacgcaagttcgtgcatattgaacgttagtatgatttgtgggaatagctaagttgctttgtagtttagtatagtcagacctaaggttcattaaatgtagcgtatgtatcaaatctaatgttagtgtaatgatccactcggcagcacgggtggtaacatatttcaatagattgataccaattcctgtttac

SEQ ID NO: 268199 - DNA, 380 bp, Zea mays
gcggggttatatgttatgttgtaaggtaaatgtatattatgtaacaaccatcaaccgtggatcctggacctgaacaggagaatgtgtttgcttgctatatatgaaaattaggtgggtatgttgaagttgaccctgagttcgcaagtttagctttcaactttgagactatctcgctgaaccaaatatgtataccagctggagagttgagccagaggacacgtgctagttagctgttcttctcgtgtctgtatttctcagtctgctctcaaagtatatttaatgtatgacgattcaggttagcttaaaaagttgtgttatctgagaactcaaaaaaaaaaaaaaaaaaaaaaaaaaaataaaaaaaaaaataaaaaaaataa

SEQ ID NO: 268200 - DNA, 660 bp, Zea mays
ccgcaaccaaccccctcgccaccgacctcctcgatccagacagcaggcagcagccatgtccaaggtcttcaccctcgacgcggtcgccaagcacaactccaaggaggattgctggctcatcatcggcggcaaggtgtatgatgtgacgaagtttttggtagaccacccaggaggtgatgatgttctgttgtcctcaactggcaaggatgcgactgatgatttcgaggatgtcggtcacagcaacactgcccgcgcgatgatggatgagtacttggtgggtgaaatcgacgcgtcgacgatcccttccaggacgaagtatgtccccccgaaacaaccgcactacaaccaggacaagactcccgagtttgtcatcaagatcctccagtttttggttcccctggcaatcctgggcttggctgttgccgttaggatgtacaccaagtcggagtctgcttagctttgttgcccacttgcccttgcccccctcgcgattgtacgagtcgaacttgtcgaataagctagcaagagttttgtgaggttttattacatgtgtaacttgtcacgaaattcatcgaatgttctgagctgctgtgggttctgtggtttaaagtgtgatcgcaatgcatcttactggactaaaaaaaaaaaaaaagggcggcc

SEQ ID NO: 268201 - DNA, 534 bp, Zea mays
cccacgcgtccgtgaaattcgtggccagtcagtttaggaggctgcacagcaggcaagtgcagcacacattccgattctattcccagcagtggaggacctgggcagcctgcttcatccaagcagcatggcgccgctactacaagaggaagatggcggagcagcggcgcaaagaagaagaggcggcaagccggccaagtagtagccaccctagccttggggcgactatctatgcatctcgtttcgctgccaacgccatgcgaggggttcacaggctaagaagcaaggctgtccctaccattgtcaggctaccgaaacccccagaaccagattttggtgtcgatgatgctgtctaacgagacaatcacactgtactcgcttgtaattgtactttacctcatctgtagattctgtacaagattcaacgacagctgaagaagatagtgtctgtaaaggttagtggtcacgcacagtcgtcaatttcagtcggtatacagtgcttaaagtctatggaaatgcaaatctacttccttagtg

SEQ ID NO: 268202 - DNA, 1018 bp, Zea mays
  unsure (1)..(1018): unsure at all n locations
gtccggacgtggtacgagaagacgacatggatgtacatttcggtcncgctgctgctctacgtcggtgaaaggatgcttagagccttgaggtcaaatgcttataccgtgaaaattctcaaggtgtgtcttctacctggaaatgtgttgaccataacgatgtcaaagccctatggatttcgttacagaagtggacagtacatatttcttcaatgtccaataatttctccatttgaatggcatcctttctccatcacttcagcacctggagatgactacctcagtgtccacatccggacaaacggtgactggacacaggagctcaagcgcatatttgtggagaactacttctcgccgcatctcaacagaagagcttcgtttagcgagctaggtgcggcagaaccaagaagcttgccaaaattactcgtagatggtccctatggtgcccctgcgcaggattttagaaactacgacgttctacttctcgtcggcctcggaatcggggcaacaccgttcataagcattctacgggatctgcttaataacattaagatagctgacgagctgatggacttggcaatggagaccagcaggtctgaagacagcgccaacagctttagcgtctcaacggcgagtagcaaccggaagagagcatacagaacaagccgtgcacatttctactgggtcacccgagaagccggatcctttgaatggttcaaaggggtgatgaatgaggttgcagaaatggacaagaagggtgtcatagagctgcacagttacctcactagcgtttacgaggaacgcgacgcacggacaactctgctgtccatggtccaggctctgaaccacgccaagcacggggtcgatatcgtatcggggaccagggtgaggactcatttcgccagacccaactggaaggaaagtttcaccaggatcgcctgcaaggatacgaattcaacagttggtgcgttctactggggcgcaacgaaccttggcaaagagctgaagggtctggcgcacg

SEQ ID NO: 268203 - DNA, 949 bp, Zea mays
gcctgtgacctgattaacaacaaaccggaggaggcattggtgggtgggttcaaaaagaacaaagagactgcccttgtggttgctgatcctgcagctgcgctagctggattggaggttacgactttgccaccagctgaggcgactaagccgacatttattggagttgaagggtttgagggtgattatggtggcattgagtttggcaacgatgagacttcacttgctgaggcatttgaagggctcaatgcgccatttggtggtggcctggatgcttctgagtttgttacaacaacgaagaaggatcacaaggacaggaccgtcactgggcttgagttgctagtagcaagtgggcagccaccgaatgcagctgctggtactccattggagaatctcttgctgactaagcgcgcagaaatgaccgctcctgagttgtttattgctgaggagatcaatgcagaattcaaggagtctattcttgtgcgtgttggattgaagggtacaatcttcctgcggaccttgccactgaataaggcagcgggtaaggagacagagttctcatttcgtcttgagggcacatcaggaatgaagagggctgcattgcagagtaatgtcttgagtaacctacagaatggactgttccatgtcaggaccgtgtcgaaagaagaacccattcccctcatgaagtacagcttcctgccgaagcactcacctctccctttgaggatgcgcctagtgaagcgtcatagtggaacgttactctcagtgatgatacagtacgcatccaatccaatgctgccccagcctctgagcaatgttacattcgttgttaagcttcctgtggatcctactctgctcaatgtttcacctaaggctgtgctaaaccgggcagagaaagagcttagatggcatatttcagacattcccctgaaaggtccagccggaaggctca

SEQ ID NO: 268204 - DNA, 1039 bp, Zea mays
aagatctggctacagttccaccaaactcatatgtttactacgaaatggagcatgtctcatttgataaggagaaagattcatgggacttgaagaacgttgctgagaagattgaagcagctgctaagaagaaagaagaagggaatgtgtggtttaaaattggcaagtatgccagggcttctaagagatatgaaaaggctttgagctttgtcgagtacgatagctccttcactgaagaagagaagcagctatcgaaaccacttcagataagctgcaagctcaacaatgccgcatgtaaactaagacttaatgattacaaggaagcaaaggaactgtgtaccgaggtcctggaatctgacaacacaaacgtgaaggccttgtacagaagggcacaggcacacatgcatcttgttgatcttgatttggcagaggcagatatcaagaaagctctagaaatagatcctgacaacagggatgtgaagatggggtacaagaggctaaaggagaaggtcaaggagtacaaaagaagggatgccaaattatatggcaacatgatttccaagttgagcaagcttgaagacacggaagataatggccaaatgagtcaggcagtaaacaagaagcgtgagcgcttatggccactggcggaaatgcttaggagattcttcactgccgatggtagcaagggttccacgctgtggcttgtgctgaggctattgatcccggtaatagtattggttgcagtttgtgtgggttacttcatgcacagcagtgttgaagagatagactgcatcaactgttagttgagcagggtatctgtgctcaccttctgtcctttttcaggtgagtgtttatcgttgtatagatctgatgagtactacacgtatttgttggttgtgtgggttgaggacttgagggcgaagtattcacgtgtactgtactgttaaacttgacttgtctaatagttgcttccactgtctcaaaaagaaagataatcttgttttttcaaaaaaaaaaaaaaaaaaaaaaaaagggcggccgc

SEQ ID NO: 268205 - DNA, 572 bp, Zea mays
tcgaccacgctccgaaagaagatattctgtgctatgaaatggcggttacatagacgctaagggtgcagcttcaagtacataatggtcaactggtggtatatgcatatgactagaactgaatcttgtggtgaattttcaagttggtcagtgttcgatggatttctttatccatctacaaatctaggaccaaaaagaaaaatgggtactgcagtccgcatcaccaccagtcctttgaaagagcaggaaatggaggagtttgtctaacatatctgttatgttcaacaatggtgtatatattattagtcagaatttagccttgcgctattatgatagaattagttgcctggtaaacagtggtaacaatgttgttttgtttatttaatgtatcgatggaccatcttatgtatgagtgaattaagtagacattttcgtgtcgagtatgataaattgttagattgctaggttaaataaatctgttcttgtttttgaccacttgtctattcgataaggcatgtaacctgtaatatgcaatccactagtattcaattgctgtggctcgttttcattcagaa

SEQ ID NO: 268206 - DNA, 674 bp, Zea mays
cccaccctcccttgtatttccagctcggccaaagctgtatataacttgcctacagccagctgagctccccatcgatcctgtcctgtccagcaagggagacctggactggaggaggaggacctacctacccggcctccagctctctcgtctcttcctcctcctcctcgaagctccgatccgatcccccaatgtctgacagcagtccagctcccggcgcctactactccggccctcccgccgcgccgccgcccgagtctaagcccgttgacggcggccaggtcaacgccgatgttcctggctactactcctccgtccctgctgcgaaatctggcgccggcggccagggcagctccgctgctcctaaggaatcgggcttcttcgccagctgttgtgggtgcttctctggcggcgaaaccgcgagatagatagattcagtgttggaccgaggaccatggatggatggatggaacatgcatgcccagtgattgtttgcgccgatgaaagttcaatttgtccggatttattttctctgaaatagtatatgtttttttttctccatcggtgagccggtgatcttgtcaatttgtacaataatcattatatgcaaccaactgtgctttaatttgctctgatatcaaaaaaaaaaaaaaagggggccgctcgcgatctagaac

SEQ ID NO: 268207 - DNA, 468 bp, Zea mays
ctctcttccggctccttgccatccgttcaggtgccgccgttgcagttcgcgaaggtgtcggcagggtcggacggatcgctgctagcgttcttctgggacgcggttgcacacgtgcaaaaagcacacgcgagcttggacgagcacatctcgagatggttcgggctggaccagtccaagtaccagtgggcgctcaacgactattttgagaggaccgggcaggagatagattcgagcaacgctggcactcgttagcagcacagttgtaaaaattcagaaagcttgaaaaagtggattatttctagtttttatgtgtgtaactaagctggtgccgtgtcaagctgcatatagaatccttttggttgcgtgaagactgagttctctttttctgcacccggaagctcttggttgtaacaaatccatatttagcacctttattgtagcttcgttgtggataaaaaaaaagaaaaa

SEQ ID NO: 268208 - DNA, 522 bp, Zea mays
tctcttacagccgccgccgccgccgccgcatcccagcctccatcaccgtttccgtctcgctgccatgggtaaggtgcacggatcgttggcgcgcgccgggaaggtccgcgggcagacccccaaggtggcgaagcaggacaagaagaagaagccccgcggccgcgcgcacaagaggatgcagtacaaccgccgcttcgtcaccgccgtcgtcggcttcggcaagaagcgcgggcccaactcctccgagaagtaggcgccgctcggctcgtaccggttcctcatccttcccgctctccgtatgcttatgctcttgatggtactagtttcgttgttcgcaagcagaggaagaaccttctgtagattcggttttgttgtccatgtgctcagatgggaacttgagattgtatgaatttgagatatggtgatatgagctgatgatttttattatgcttattgttgctcctctgagctgtcttttttgaacgctatccaaataaatttgaaaccagattgctgatgcgt

SEQ ID NO: 268209 - DNA, 252 bp, Zea mays
gtacaaccgccgcttcgtcaccgccgtcgtcggattcggcaagaaacgcggccccaactcctcggagaagtagatatagccatgtctttgtgttttggtcccccactagtttccttgtactgatggcaagttgctgaagacttatatgctattattatctgtatcgatgtgttactgcaacactatgaaatatggtatgcatcgttgagctaaaaaaaaaaaaaaaaagggcggccgctcgcgatctagaac

SEQ ID NO: 268210 - DNA, 695 bp, Zea mays
gggtttttgtcttctgcatggagctttgattcttcaccaccctatcagatgaaaaggtcagacagaatggccatcatcatatcacctgagagtcagcttgatttttcagcagacggactggatacttctaggttctcagattatgaactctccttgccatgactcccagggtgcatactctcactggttgtagacaactgattcgattgctatcgaattccacaatgtgcaggaattgatctcagtctgatgaagccatactggacttagaatccattcgtcctaactaaccagcctcatgcaaatgtcctgggtcatgccaaaatccatgtcatacacctgcagtggggacaagaccttaccgacagattaccctggcatctcatgtaatcaggggtgtacaaaatactgtctaaattgaaagcacattccatagaagattacattgtttgctgcattttgtgaacttatagctagaagttcagattatagaaacccccagctgtgtccaaagaagaaaaacatagctttagaaacatatagagcttcccagtggaatgtcaaattgttcttagtttcttttattgcgcgcgtcccccatgttgcgaaacagcaagggtctgctcattttgtaacaataaagcctgatttgtgggctaaattcttgctaggcattgtcaagaaactggttatcc

SEQ ID NO: 268211 - DNA, 563 bp, Zea mays
gccgcttcctccggctctcgatctcggcccctgccggcccgcggccgccgtgaacgcagtctccaccggcatgcggtttcccttcaagggctgtcctgtcgcctgcccgacgccacagcagtactttttctacgagcaggcggctgccgcggcatccggataccggatgctcaaggtcgctccaccggccgtgactgtggccgcggttgcgcagagcgactccgactcgtcgtctgtggttgatcactccccttcgcctcccgcggtgacggcaaacaaggtgggcttcgaactggatctgaactggcccccgccggcagagaactaggcaggccggagtttttggctgacgacttagtagcttccttttcccttttgccttcatcaggaatgttacttgtggttgttttggtcctgtatggctgtattcttgttctgtagactaagagatggggagtcttgtaaatatttttttccgtcgagacggaaatgaactgagatctgttcgtctgtctgatcaagccggcgttgatatgggcttaagctatggagtattgattagt

SEQ ID NO: 268212 - DNA, 845 bp, Zea mays
agcacggcggggcggaaccggacgtccctcgctcgcaaatatctctccccacctcccctgagcttctcccgacctttggtcaggcaggctcaggcaaagggggcggccaacaaggacgagcgatggcgaccaaggtcatctgcttccttgtgctcgcatccctgctcctcgccgtcgcctttcccgtgtctgctctgcggcagcaggtgaagaagggcggcggcggcggcggaggcggaggcagtgttagcggaagcggaggcggcaacctgaatccctgggagtgctcgcccaagtgcgggtcgcggtgctccaagacgcagtacaggaaggcctgcctcaccttatgcaacaagtgctgcgccaagtgcctctgcgtgccaccggggttctacggcaacaagggcgcctgcccctgctacaacaactggaaaaccaaggaaggagggcccaagtgcccctagaagatccaccgcagctcccgtccgccattgtccccccttctccgaatctggaacgtgttgttcatcttcgaccaccccctaggcttggcattttattactagtataatgctagtgtccgcccgttgcttaatctggaatgctaccagccagatctccatgctctcctgtgagccactcggcagagtgaggattactaggtagggtggcatgtcatgtgctccaccctccactggtacgagtcaatcaactaaagctacccccggattgatgaggaacatcccgcgcgattagtggggcatgtcattacattcatcagcttctatatataaactagataaactttttatccaaaaaaaaaaaaaaaaaaaaaaaaaaaagaa

SEQ ID NO: 268213 - DNA, 429 bp, Zea mays
gtcctggcgagctcaagaagtgccagcaaggtgttctttcgagtgtggtctcttcacaagctactgcagtgtcagatggcacagccacacagaattcgttctttgcaagattctcgttctgaggcattgccctcgaagtgcggcagtttagctgggggagaggatgtcctgagcctgcagattcacagttttgttgaccgtagaaaacgtttattcatttattagttacaagcgtccttaccccccttctccttctgtaaaagtagtgcatatagcaggattaagataaacacatgtaatggagtatatattgtgcaactgccatatatgatatgatatatagcggctcatattaggttgccgaaaaaaaaaaaaaaaaaaaaaaaaaaaaaaaaaaaaaaaaagggcggacgattttaaggaaccaaa

SEQ ID NO: 268214 - DNA, 985 bp, Zea mays
gccggagaactacaagtatctgatggagttcgtggggagcggcgacgaggggaagcggaggccgcggcgggccgggaagaaggagatctacgcgaggctcgccaggcctgtgccttttggcgacggcaagaaggaattctggttggacaagaacaaaggcatgatctgtatggcactgtcgtccaaagcactggtgattactgggattgatgacagaagatactggcaacacatgccaacttcagaatcgagattccagtctgtagcctaccttcagcaaatctggtggtttgaggtggttggtgaagtcgatttctgcttccctgttggaacatatagcttgtacttcagggtccatcttgggaagttctacagacgatttggccgccgccagtgcacctcagagcatgttcatggttgggacaagaagcctgttcgcttccagctatcgacctctgacgggcagcaggcattgtctcagtgctacctggaggagcccgggagctgggtcctgtaccatgctggcgattttgtggcctcaaagcctgaccagctgatgaagctgaagttctccatggcacagatcgactgcacgcacacaaaaggcggactgtgcatcgactcggttcttatctatccaaaagggaaggggtttcaccaggagagggtggtcaggtctcagaaatgagggttgtagatgttgtggaggtactcacattaggatgttagagcaaatgcagcttgcagcctgatcttatttttactttgggctctagttcgcagcagaggtgaagtgtatgtggttgtagaactcaggtattgtgtggtcaggtgaccaccagagtgctctgtcagtcctttggcaaggtcgttttcgccccccttcagctgaatttggacagcgagatagccatgaaactgtactgaaatgagttcgaaggtgtcattcccagtttctaatttgctttctactgattagtttcgg

SEQ ID NO: 268215 - DNA, 534 bp, Zea mays
ccacccatggcagaactgacttatgactatggtgttgctggagctgaatctaggggttcaggttctcgtagaacgaagaactgcgtgtgtggatcacaaaactgcaggggattattttgatgggttgagagacgtgctcttggtggttaatcatgcaaaccactttctgctagatcctttctatgaaaccaaatttagtctccggataatatgacagatgatgtcatttgccatgtgtactgtgaagacagtaagttgtcgagcgagctgtagaatttctgttgctctgaactgcatggtggtcgctttcccaccatttcctcggatgtttatgtgggcgtggattgctgcattgcttccgctaaacttgtccaccaattgcaccggcttttgtagacttgttatcagccccgcttgcgttggacgcctggttgttaggatatggtcttgtaaattatcctggttaaggatcatgttgctttcgactcgaattttcgtcctcccttgcccttatgttcagcaatgttcaggtgt

SEQ ID NO: 268216 - DNA, 357 bp, Zea mays
aactgagcccatgcgtcgtgggagcactgcggctgccagagcaccttcaaagcggcgtgagaggagtgaccggcccaaggacacttcgtcttcagccccagtcaacagagcacaagcgacggctggtctccgctcatggaacaaggtcaaactcagatagaagggaccatgggcattcttatggggcatactgacagggcctcagttgacttccttgaggttcattctactaggaagcggatgcccgttttctcccgaagttagtatgatggtagatcaaatcggtggtgatcgaaacggttccaggagtatgatgactcgtgaggaggacgcaagctaccaagaacgtaattttaa

SEQ ID NO: 268217 - DNA, 400 bp, Zea mays
agccgacagctgcctgctcaagaacgccaaggagcggcccaccatgagcgagggggtcgaggtcctcaagcgggccgtgcacgctcacgccgagcctgactgacggactcccagcccaggcgccagggggaagaaagccgacgccgccgactccgacgcgccgtacagtcggcgatggctacatgtattcaccgataaaggcacgctgctgccttattgctgagaccattgttaggtcagtgctagccgtgactcggtgagttgatattgtgacagcacataaggaatgtctatgcttgggtacattcttggacacattgcttagacgacttgtgtacatatagatgagttggcggattgaactttgtttagctttctaaagtgagcatttcgcaagaaa

SEQ ID NO: 268218 - DNA, 840 bp, Zea mays
gtcttcatctatgtgtcctgatataagattctgatacgcaaatcatgtgtggctccctttgtcaggtggatcctcaggatattgttatgcttgtcatatcgtggcatatgaaagcttccactatgtgtgaattcactcgccaggagttcattggtggactgcagtcaataggagtggattcaatagagaagcttcaggcgaagttaccttcattgcgagctgagcttaaagatgatcagaagttccatgaaatatacaactttgcatttgcctgggcaagggagaagggccagaaatctctcgcattggagactgctattggcatgtggcagttgctatttgctgaaaggagctggcctctcattgactactggtgccaatttctacaggtaaggcataataaagcaatctccagggatacatgggcacagttattggagtttgttaagacaattgatcctcagctaaccaactatgacgaagaaggtgcttggccctacctaatcgatgaatttgtggactacttgaaagagaacggtcttgcctagcatagaaggtgtacggaattgggctgtaggggggagaatttgtcacccacaaggccaccatcattgtataacttaatggtcggatgcttgtattcattgccctaccaatagctaatgcggctcgtgcgtctggggatggagtttatcctctatatagacaaaacttgttgaatgatgtgggtgtaaaacgaaggctagaatggaagtcaagccctggttatcgccattttgaattcctcatcacgtgcctcgcctacgtcattgtgactttgcaaaaaaaaaataaaagggc

SEQ ID NO: 268219 - DNA, 1475 bp, Zea mays
ttattgcattgacacatcaatattttctccaaaccagacactgtgcctgcaggaccatgcttcacccttgatgaggaacacactgagtacacgcccaaaaattaacttgtctggcccaacttatatggacgaacggtcccaagccgcaattttgagtccaactgcaggttccatgagtccaaatgctgctccatgggtgaagaatctaaggaatgggggacattataacacaagcagaagggatgccactgccagtcactacaatggagattctagcattggggcttcattgcacaacctcactgatgcgtatcatggaagcaggcgcagcttaagcacgactatggatatcatgagtcagctggagagtaaagtcgatgggcgactcaatcagaacctcaggtcactgtcgtttggaaattcaagtcctccatcaccagcatcatatgcccaaaatggtcttggaaactatgctggacgtgaacacgtatccctcgatgttcctagaggaaggtacaagacgactagtttgcctgttcctggtcttggttcaagcagaggttatcagttgttgggtggctcatataatggaaaccatgatatgatctcaaccaataccccacaaaacatggctggaattcagacaggaccagcttggcttgaaagtgacgctgaggcaagcacatatttggaatcaaaggatgaagttcatgattttgcaagcctgcgacatgcagttcttgaacaggagctatacagtatacaaagcctgttggctcaggagaaggctagagaaacaacatatcgacaaagattacaaacaccacaattgcaaggcctcatccaggagcaaaatcccccaatcgatctctgtggtcttcacatcagcgaggcaatacacgtcctgaactacgagctcaacaaccgaagaaagatcgtgagatcaaccggtcgccgactccaggttatgataatatcaagcgcccgcaccccagcaaggctgactgccgccgtcgagcagtatctcatggaacacggccttctgtacacgcaggtgcaaccaggcctgctccgcatcctgctctagtaatggaactggtcgtcctagctgttgttcacaactggatcagatgaaaaagaagggaaaaagaaaagaaaagaaaagataagttgacctgtacttttgtatatggcagagattgctagcaggatagtagcgttaagaacttaagatagctcatgtaacattcatgtcaggctttttgtcagcaaatgtatacgtcttaaaatttgggagttagggaatattctcgttgtctttggtgccggtggatgcacacggcatagcgtcttcacagaatcacaatcatattctcgatcacaatcttcggtgctggtggatgcttaagttctgttcctgctggtgaattcaaattgtgagtaatgcctggtcgatgcattagttcttcacaata

SEQ ID NO: 268220 - DNA, 711 bp, Zea mays
gaagaatctaaggaatgggggacattataacacaagcagaagggatgccactgccagtcactacaatggagattctagcattggggcttcattgcacaacctcactgatgcatatcatggaagcaggcgcagcttaagcacgactatggatatcatgagtcagctggagagtaaagtcgatgggcgactcaatcagaacctcccgcccccgccgccgggaaattcaagtcctccatcaccagcatcatatgcccaaaatggtcttggaaactatagtaatgaagcttttggtctgccaaacagtccatatagatctcattcagctatactcgcagatgatattgtttcaccttcagctggacgtgaacatatatccctcgatgttcctagaggaaggtataagacaactagtttgcctgttcctggtcttggttcaagcagaggttctcaggtgttgggtggcccatataatggaaaccatgatatgatctcaaccaataccctacaaaacatggctggaattcagacaggagcagcttggcttgaaactgatgctgcggcaaacacatatttggaatcaaaggatgaagttcatgattttgccagcctgcgacatgcagttctttgaacaaggatagacaggcttttctgatgggaaacaactctttagcaaaggatctaacattgaaggagctatacagttacaaagca

SEQ ID NO: 268221 - DNA, 905 bp, Zea mays
tgaattccttgtaacaaacaagacaaagtcccttgcccccttgcccagtttgattccacagttctatccattgttgttaaagcttattgcatcaaacggtgagagactggagaataagttttcggaagtacttccattaatgatgtcagcaggatcttttcttcccctcttcctatcccttatggatttgccaatgttggtggtggcactggaaaaggtggaaagaagttctggaactcttattggtagtagtatagctacaatccagaagagcgctgctcctgagatgcttcttgcactgatggacgaggcatatactggttctgccgtagaagaacctagtggtaattcaggttctgatgatagtggtcccctagaccttactgacccaatgttcttagaccttctaaaagatgagaatgatggcattgccgcaaaacattggatatcccctacgatatcttcaacgttacaagcagcatttaacagcccacagtcggacagattgaaacagtcactggaaatggcacctcgctttcttactttatattttgcaacagcattgcgagacgttaatgactcactgctgtgtgctcttattccagtagttatgtcaagatatgctgcaatgttcccagacaaagttttctctttcaaggtgagggaaaggctttcagacttcattttggctgcattccagcggtctcccaacatcattgcagtactgaagaaacctattactgacagacttggtgaggctcatgataatcttgccaagacagagttagcattgcacttgtgctgggccattggtgagcatggagctggaggggtgggtcacaaggatgtagctcgtgaactatttgaaaatttggagttattattgtatgaaaacctggcaacta

SEQ ID NO: 268222 - DNA, 702 bp, Zea mays
  unsure (1)..(702): unsure at all n locations
gtttaactgaaagatataaatccagcttccttctttgttttatagcatatttgtcaattttttatgtgaatggtgggggaggcccctacatgtatttcttcactaacagaagcaaagaaatatttacaatacaggaggctgtaggccaaaaaggtagagaaaaaacagaaaaaaccatatttgtatgataagctactcaaccaatcttttgtaagattctttatagaatatctctcttctcttcctattttccatattcgacttaatcttgttaacacatgccaatgcttgtgtatccttgtttatacacagttctatccattgttgttaaagcttatttgcatcaaacggcgtgagggatgtgctcgtattgtcatgaacttcacatagctctatcatccatgttccctttaaatgactcagtacaggtaccataaatatccaatagcaatcccgttgaactacctgatttgttttctaacattctagactggagaataagttttcggaagtacttccattaatgatgtcagcaggatcttttcttcccctcttcctatcccttatggatttgccaatgttgggtggtggcactgganaaggtggaaagaagttctggaactctaatggtagtagtatagctacaatccagaagagcgctgctcctgagatgcttcttgcactgatggacgaggcatatac

SEQ ID NO: 268223 - DNA, 416 bp, Zea mays
gtggtactggcaacttccgtgaaaggggacttggggtgtcttcgcggaggccacttggtgttaatacttggtcctcatcatttgctattgccaagtcattcaataaagcaaaggattttgtgtggagacatgatctctttgaggatagcatggtagcagctgggctttctgggatagaatctggaacaaagctttacatttcaaatttgcactatggagtgacaagtgaagatctacaggagcttttttcagaaatgggtcatttgaagcactgtgctgttcattatgacagttatagacacccaactggttcggctgaggtgatattcaccaggagaagtgaagctctcgcagcactgaagcgatataataatatgcgccttgatgggaaggccatgaagattgaagtaatagga

SEQ ID NO: 268224 - DNA, 655 bp, Zea mays
gaccgcgaccgcgactggttccgcagatcccggaaccgggacgacggcacagctcccgccggccctgtcgctcggcgtcggcaggccaccagcgaggcccgaccacgccgcgctgcctccgagcagcctgctgtccctgcagctgccgcggtgctcggcgggaattggccgcacggcgccgagcctggccctggcgccgccgaaacacaaccacccttcttcgtcgctgacggcggcaaaggctggtggcctggcgccggacctggagctgaagatctcgaccgcccggcagagcgagcaccagcagcaggtccagatggggccatcgctgccgccgccgccgccgccgccgcagaggacgccctttctggggaccatcagggtcacatgacatgaccggcaaagacggcggcggttagtagggaatatcctgctggtaggagaagagcttttgcccatctgaagctggagaaggttgcttcaaaagataggacggggtgggaaaactggaaagaaggaagcttttggcagcgtgtgcgtgtgtgtgtgttgctggcacctggcatttgcagccgattacgactattggcttgtgtatcatgtggtttttgtgttatattatattattgttatttttatgttggtatcctttatt

SEQ ID NO: 268225 - DNA, 406 bp, Zea mays
gacccaccaacagaccaaggcgcacccggggacaatcagaacgccatgcccactctttcagaggaggggccaacaaagagctgcgcccgagaagccatgagtctaaccagtatgaactccataagagactgaccagacttggagctcgagaatataaggagtcaaccgctgcgtgagtcctcccctgatgacgtgtgcccaagtagcgctcactttcttgaatcacctggcaagatcgcaccgccatggcctgatgatgacaccgactacgactatcaagaggtacacggaaatttcgagcaggctgaactcatcgatctgagaaatgacaacaatacttattcggaagcccctgcaactacactggcggctatagctattcctgtgcccacaacaaaacttctca

SEQ ID NO: 268226 - DNA, 1719 bp, Zea mays
catctccatgggcaccggggcatgtgctacagcctccagtcccgcacctcatcgccgacagcatcgagaccgtcatgggcgcgcagcacgtacgacgccaacatctccatacctgggtgcgactagaacatgccaggtacaataatggcacagggacggcttaatcgacctagcataatgatatatggtggaactattaagcctggtcactttcagggcaattcctatgatatagtatctgctttccagtgctatggagaatatgttagtggttcaatcactgatgagcaaagaaagaacgtcctccgcaattcatgtccaggagcaggtgcctgtggtggtatgtacacagcaaacactatggcatctgctatcgaaactttgggcatgagtcttccatacagttcttcgacacctgctgaggacccactaaaactagaagagtgccgtcttgctgggaagtatcttttagagttgctaaagatggatttgaagcctaaggacattatcactgagaagtcattgcgaaatgcaatggttattgttatggcacttggtggttcgactaatgctgttctgcatttgattgccattgctcggtccgtagtttgcatttgactcttgatgatttccagaaggtcagtgaccaagttcctttccttgcagacctcaagcccagtggcaaatatgtcatggaggatctacataagattggtgggacaccggcagtcattcattatcttctggagcaaggtcttcttgatggtgattgcatgactgttactgcaaaaactctagctgagaatgccaaaattttccctcctttgtctgaagggcagcaaataattcgaccacttgacaatcctatcaaaccaactggccatattcaaatactttatggaaatcttgcaccggaaggttctgtcgcaaaaataactggcaaagagggactatacttctcaggtcctgcattagtttttgagggtgaagagtccatgattacagctatctcagaaaacccagcaaatttcaagggaaaggtagtagtgatccgaggagaaggaccaaaaggcgggccagggatgcctgaaatgttgactccaacaagcgcaataatgggtgctggtctcggaaaggagtgcgccctgctgacagatggtagattttctggagggtcacatggatttgttgtcggccacatatgccctgaagcacaggaaggtggcccaattggccttgtccatagtggtgatgtaatcaccatcgatgtaagtaagagggtaatcgacgttgaccttaccgagcagcagctcgaagaaagacggaggaaatggaccccaccgccatacaagtccacctgtggagctctttggaagtacatcaagcttgtggctccagcgtctagaggatgcgtcactgatgagtaggatgtgttacattctgttaggttgtgcacatgatgtgtttgtcaaccaaaagctgttgccaggaacaattgccctgttagagtgattcattgtagtgcggttttgcatgcggcaggtatgacaataaattgccggtttctcagagcttagcaatgctgcagaaactgctgaataatcgagtgtaatcggggtccgtgagcaatcacatctttgtcagtctcccttgttttgtttgtctcattgtttgtagtaccttgttcactgagatgatagtgttgattattctttggtc

SEQ ID NO: 268227 - DNA, 458 bp, Zea mays
  unsure (1)..(458): unsure at all n locations
gatataatcaccatcgatgtaagtaagagggtaatcgatgttgaccttaccgaacagcagctcgaagaaaggcggaggaaatggaccccaccgccatacaagtcgaccagtggagctctttggaagtacatcaagcttgtggctccagcgtccagaggatgcgtcactgatgagtaggctgtgttacattctgttaggttgtgcacatgatgtgttttcaatcaaaggctgtttgccaggaacaaccatcctgttagagtgattcatgatagtgcggtttgcgtatggcaggtataataataaaatgccggtttctattagcttagcaatgctacagaagctgctgaataatcgagcgtaatatgtctgtttaagcttgtgagcaatcacatccttttcagtctctcacttgttntgtttgtcccattgtttctactaccttgttcacagagatgatc

SEQ ID NO: 268228 - DNA, 321 bp, Zea mays
ctactgacgccgccgccgccgccgccgcgctctctccgtcggactagtcagaggatccgtcatggcgaagaaccccaaggtgttcttcgacatcctcatcggcaagtccaaggccgggcgggtcgtgatggagctcttcgccgacaaggtgcccaagacggccgagaacttccgctgcctgtgcacgggcgagaagggcctgggctccgcggggaagccgctgcactacaagggctcggccttccaccgcgtcatcccgggcttcatgtgccagggctgcgactttacgccgggcaacggcacgggcggcgagtccatata

SEQ ID NO: 268229 - DNA, 869 bp, Zea mays
ccaacgcacaaaatttcccccaaaacttctcctcttgaggaaggcagcccgagcgagcgcgctgcaatggcggactcgtcggcgccgacgagagtgatgatggcggtgaacgagtcgtcgctcaaggggtacccgcacccctccatcagctgtcgcaccgccttcgactggacgctctccaagctcgtccgctccaaccctgggggcttccacttcctcttcgtccacgttcatgtccccgacgaggacggatttgatgacatggatagcatctatgcttcgccggaggactttcaccaaatgaagcagagagacaagataagagggcttcatttgctcgagtactttgtaaaccaatgccatcagttagggataaaatgcgaggcatggatcagacatggagatccaaaggaggttatctgcagcgaagtgaagagagtccagcctgaccttctagttgtgggaagtaggggtcttgggccatttcagagggttttcgtgggcacggtgagcgagttctgcgttaagcatgccgaatgccccgtcatcaccataaaacggaacgctaccgaagctcctcaggaccctgtcgacgattgatgcttccaagccatgccatgccatgtcactggagaatgagatgttcttcttcactgcttttataatgggttgatgtacaaaatacgatatggaagtgcctgcctggaactagttcccggagggttccaactcttgcacactgcgcccccaaaaactagagttgaagatgtaaaacgccgtcgtccgccgagggacgacgagagattgtacgtgatacatcgatcgagtctcgtgaacctaaaaagctgccgctacattattgttcgctc

SEQ ID NO: 268230 - DNA, 767 bp, Zea mays
  unsure (1)..(767): unsure at all n locations
cggacgcgngggngctcccaacacgccagcgngctatccagnatgctaggncgggatataatcctgtcgtgtccctgggatggttatatccccccagcttagtttcagaactacagcatactccgtacaggttatgctgacctgttcccacacaatgtgctgtacagttggtggggctatgttgtgattactactccgaatggtgttttggatcatgaggaagcaatcaggcagaacgtgggtgggcaggtccttggttatttccattgactgacaagtaacgtcgctcttagtcctgaatgaggcaacgggttgtgcccatttggtattactgtactgttgttattaccgaacccattctgtttgcatcttgggagctgttttgttgtcgttcatggccatgcaagaaatgaaataacatgccaaatgtacggctgagggctgacaacactaggaatattgttaaacaggaacactgagtttcttgtgaggatgtcatgatagcttttctgagacctttccctacagggagggttgagcacacattggtattttggtcagtgtctgaggctctgagatgtgtttcggatcttgtttgcagcactgcttgtaggactcctttgtttaggacaataatgttgatgggtctgtttgatgaatgacacatgtctgagcgaaaccaatgtcgctggttttgtagagtgttcaatttattggctgggaatgccatgtgaatgtgttgtctggatatgaacctgtcnttcttt

SEQ ID NO: 268231 - DNA, 1301 bp, Zea mays
cccactcgtccgcggacgcgtgggaggagcagtgcttatcaagaacagatcacctattttttggtggggagggacttcagattcaagaattcagatcggtcacaaaggacatatgtagacttccttcattcttctctagtgtccttttcaagaaaatcgatgttgcatgcactggaactgtctcgagggatgcatttgttgagtactggatggatgacaataagattacaatggatatggctagtcaaatatttgaaattttaagaaagccaggttgcacatatctcactcaggatgacttcaagcctgtcctgaaagaactacttgcaactcaccctggcttagagtttttacaagggacccccgagtttcaggagagatatgcggagactgtaatatacagaatcttttactccataaatagatctgggaatggccatctgactctcagagagctcaaacgtggaaatttaattgctgcacttcagcagttagatgaggaagaagatatcaacaaagtgttgagatatttctcatatgaacacttttatgtgatctactgcaaattctgggagctggatgcagaccacgattttttgattgataaggaaaatctcatcaaatatgggaaccattcgttgacctatagaatagttgatagaattttcgcacagatcccaaggaaattcacaagcatgacagaagggaagatgggctatgaagactttgtttactttatattatcagaggaagacaaatcatctgagcctagtcttgaatactggtttaagtgcatcgatcttgatggtaatggtattttaactttcaatgaaatgcaatttttctacgaggagcaattgcaccgaatggagtgcatggcacaggaacctgtggtttttggggacatattatgccagatgattgatatgattggaccagagaatgagagctattttactctacgggacttaaaacggtgtaaactctcaggaaatatattcaatattcttttcaatctgaacaagttcatggcatttgaaactcgtgatccattcctcattcgccaggaacgtgaaaatccaacgctgactgagtgggatcggtttgcgcatagagaatatattagattgtccatggaagaagatggtgaagatgcttcaaatggaagtggtgatgtgtgggacgaatcacttgaggctccattctgaatggtatcttgctgcacgaatttggttgaacatgggtgattatggttgtgaagcggaagaattgtgaagtcggtggctacaatgctgaggcca

SEQ ID NO: 268232 - DNA, 580 bp, Zea mays
tcggttgcagaaaatgagagttgaaatggctggaatgagaagagatgcagagcattattctagacaggagcatgttgaacttgagaagagataccgtgagctaactgacttactgtaccacaagcaaacacaattggaatccatggccagcgaaaaggccgcgttggagttccaactggagaaatcattgaaacaatttcgtgaagtgcaggtcgaggcagaaaggagtaaagctactcgcagatcagcatcgtcgtgggaagaagatgctgatatcaaggcattagagcctcttcctctacatcatcggcacatggcaacagcaaatcagcagttacaaaaggctgcgaagcttttagacacaggagctgtgcgcgcaacaagatttttgtggcgacaccccgttgcacgagtcagcctgctgttctatctggtgttcgtgcatttgttcttgatgcacttgttaaaccgccttcaggacttcgcgtccagagaaggaacatcagccatgggggatctggccagcgcgaacctgccatagcccatagtctctgtgcccttcttgttgattcaggcattc

SEQ ID NO: 268233 - DNA, 1584 bp, Zea mays
gatattttctatacatttaagatgtacagggcctcaaatttcatacctgatcctaatcaggtgcttctagatgccaatccattaaggtctttagctccaatgttccctgcccccatgggagtcaatgttaatcagtcaagtacaccaccattggtttgtgtcactccggttggtcaatttccaactgggtttggtgcagggaaccttcctgcctttggatcgttcactactttcagcgccactacaaacggtgtttcttatacgggcaccagtggtaatggtgccattgatgccactcctatctctgcatacaagacaagatcaagcatatcacttgatgatgatgatgatgagccttactcgggcaaccaaggtttggcatctgaacggaaggctaggagaggccgtcctcctggttctggtcgtgatggatcaaatggtaagttaaagcgccctaagcctacatacaagaattttgttgctggcaaagagcttgtctttctgtcttctacatccgatcccagggagtttgtggaatcagttcacatgacttttgaggccctcaggcgaagacatctgcagatggatgaaacacaggatgctagcagacgtgcagacctgaaggctggtgccatcatgatggccagtaacatcagggcgaattcaggcaagagggtaggaactgtacctggagttgaaataggagatattttctattttaggatggagctgtgtgtcattgggttgcatgcacctagtatgggaggcattgattacatgactactaaatttggaaaagatgaggattctgtagccatatgtattgtctctgcaggaggttatgagaatgaggatgatgacacagatgtgctcgtgtacagtggtcaaggtggaaataataggaatactgaggagaggcatgaccagaagcttgagaggggtaacctagctcttgagaggagtttgcataggaagaatgagataagggttgtacgtggcttcaaggatccattttgcctaactgggaaaatttacatatatgatggtctctacaagattcatgagtcctggaaggagagaacaaagtacggtgtcaattgcttcaagtacaagctgctgcgggaacctggacagcgtgatggagctgcattatggaagatgactcagaaatggatagatgatcctgctaccagaggcagggtcctactagctgatctgtcatctaaggctgaaattttgcctgtttgtcttgtcaatgaggtagaccatgagaaaggacctgtacatttcacttatactaatcaggtcaaatacttgaggcctctcagttctatgaaaaagttgcagggctgtggatgccagagcgtttgcttgcctggcgacgccagttgtgcttgtggacaacataatggaggcgatttacccttcagttcatcaggattgttgtcatgccgcaaaccaatagtctacgaatgtggcgaatcttgcaactgttctacaaattgcaggaacagagtgacccaaaaagggtccaagctacatttcgaggtcttcaggaccacaaatcgaagctggggtcttcgc

SEQ ID NO: 268234 - DNA, 670 bp, Zea mays
cgcaacgcctagggtttcttgcacgagcagatgaagcggcagccaccacaccctcgcagcggcgacgactcgccggccggcgagagaggaagcgacggagggttgaagaaggggaaggggagagggaggtggggcggcgggagtcggaggcggaacgatcagcggctgggcggcggcggcggcggggcgctctccctcgccgccttcgccagcgccaagtcccggaccagcggctacaacccggccctcatcagatggtggtgacactgcccgatatgtgccaaaaccgcatcacaaagggaagaagcacactgtgcatagtttgaaggaagagtatgagaaaaaacgtgctgaggaggagaaggctaaggaagagcgtgatgcaatggttcaggcaaagagggagcaccgggagaagtctgaggcgaagcggaaagaactgagggagaagatgttcaagaagacaagatctggccaacctgtgatgagataccggatcgagcatctcttggagactgcactgagcaagtaacacgatacgtcgataccaacctcgccttttgagaccaaagtgtgctaccaaattttgtagctccgtgcaaccatttgtttactgtaaccgtcttttgtcgcttcatcgatgtacatatctttggattcgttgatcata

SEQ ID NO: 268235 - DNA, 541 bp, Zea mays
gatgcagcagttcaggcgaagagggaacaccgggagaagtccgaggcaaagcggagggaactgagggagaagatgttcaagaagacgagatctggccagcctgtgatgagataccggatcgagcatctcttggagacggcactgagcaaataacacgatgccaccgtcatcttggcagattttgtagttccgctgtccaatcgatttgttggttttaactgactttgtcacctttttagtttgcaaaaatggacaatctaagtgacaaagccagttaaaaccaacaaattggttgggctgcggaactacaaaatttgttggtcaatataccaaggcgatggtggccccacctagagctaggccagaaaagcctcatccaccggcagcccttaagccgtagtagtagggttctattctgttgtcggcagcccttaagaagagactgttcaccagtggagacacttccacttaaccaataaattacctgtgaaatcaaaaaaaaaaaagtaaaaaaaaagagaaaaaaaaagagtagaagaag

SEQ ID NO: 268236 - DNA, 410 bp, Zea mays
cccacgcgtccgtcctcgcgtccggcgtgatgcaatggttcaggcaaagagggagcatcgggagaagtctgaggcgaagcggtaagaactgagggagaagatgttcaagaagacaagatctggccaacctgtgatgagataccggatcgagcatctcttggagactgcactgagcaagtaacgcgataccaaccatttgtagctccgtgcaaccatttgtttactgtaaccgtcttttgtcgcttcatcgttgtgtatatctttggatttgttgatcatatcactcaagagttctctgctgttggcgctgtgcgcttccaatcctgcaagtgatgtcatgtgatctgataactgactcctcgaaaaacaagcaagccttgatttatttaaaaacctacttatccatgttc

SEQ ID NO: 268237 - DNA, 699 bp, Zea mays
cggacgcgtgggcggacgcgtgggattttgacaaggatcatagcgggcacattacagttgatgagttggaagaagctttgaagaagtatgatatgggcgatgaggcaacagttaaagaaattattgctgaagtagacacagatcacgatgggagaatcaactaccaggagtttgttgccatgatgaagaataatagccccgagattgttccaaatcggaggcgcatgttttaaggctcatctcctacatttaattggaaaaaagaaagacttctaagatatatttttccgcggtcagaggggagagcaactgatactcgaaagtgggattcagcctgggcatatgtgcaatgatattacagactttggacaagtcatcagtcatgggtgattgcctttgtgttgcttccatgcctgggcatatgtgcaatgatattacagactttggacaagtcatcagtcatgggtgattgcctttgtgttgcttccattttcgaccatctcatcctacgatctttccaagttatcttcaatgaggtgtgtcgtgtggtctatgtttcctgcctctggatcttttatgtaagagaaacggacttgtaaaacagttccaaattatcatataccaggcgaaaagtaatgcgatgggacttgtgatccaaaaaaaaaaaaaaaagggcggccgctcgcgatctagaactag

SEQ ID NO: 268238 - DNA, 1239 bp, Zea mays
acccacgcgtccggctgcagcaagagtatttccttcctgatggccttctatattcacccacaccagggtatcatcaaccgtgcagctcatttgacagagcactgacacagccaaataatgctcctgggttgtttggtcaagggagtctaccactggcttctggaatgcatcatggaccgatgtatggtcctggatcctacaagggacgccagtatggtagcaaatttggtggcactactccaagttggagttctgctggccgcagatttggtactttcgacttgagtggcaatcaacaaagggggagcatgtcatttggtagtcataatggctctctggagtttatgaatgagcaaaaccgtgggccacgtgctacaaaaccaaagatacaaggcacagagaacacctcaggagatgagagaagcgagaaaattgttcctctgattgatagcgaactgtacaatcgctctgattttataactgagtacaaggatgccaaattctttgtaataaagtcctacaccgaggaccatgtacataggagcattaagtataaagtttgggccagcacagccagcgggaacaggaagctggattctgcttaccatgcagccaaagagaaagaagagcattgccctattttcttgtttttctcggttaatggaagtggccaattctgtggcgtggctgagatgattggacctgtcgatttcgacagaagtgttaattactggcagcaggataagtggagtggccagttcccagtgaagtggcacataattaaggatgtaccgaacaaccttctgcggcacatcattcttgagaacaatgacaataagcctgtcacaaatagcagggacacccaggaggtgaagctggaacagggcctccagatgctaacaatcttcaagagccatgaggctgagacaacaattgtggaagatttcgacttctatgagcagcgggagaaagccttgcaggagaacagacgtcaacagcatgctgccagcaccgatacccagaaactggtggataccaaggctcaagatcctgtggccgacatatcagatgcatttgccaaggccgtccagttgaagaatactgagaacagtgggacaacccccaaaactgagggtgcttcagctgaaaagggttccgctgccaccgccaaagttgaaagaagtgcaaacctgaacacaagccctgtggaggaaagcaggtgattcgttttccttctat

SEQ ID NO: 268239 - DNA, 274 bp, Zea mays
gcgtattaggttaatggaagtggccaattctgtggcgtggctgagatgattggacctgttgatttacgacagaagtgttgattactggcagcaggataagtggagtggccagttccctgtgaagtggcacataattaaggatgtaccgaacaatcttctgcgacacatcattcttgagaacaatgacaataaacctgtcacaaatagcagggacacacaggaggttcaattaggttggcatgatgctggtacctatgacaagaacattatcgag

SEQ ID NO: 268240 - DNA, 512 bp, Zea mays
gggtaaagttcttcaatttcacccttctgacgagcatcgatgaggatctggcctaatcacctgatgatggcatgcatcctgcaaacgagcagtggctgtggccattgactggtcaggtgttctggcctggtattgctgatcgggaaagggaggagaaatacattaaaaagctggataagaagctcaagaacaaggtgaagttacttgaaaggcagaagtctggttacaagcagaagcccctgggacaatgaccatgactgaagagctaacaattcaagatttttttccttgccacgtccggtgcatgcacgtggaagaagagttggagcacaaaaggcaccgctgttgtgaatacgcattctttctacgcctcattgatctccctctccaaagatgtttggtgagtctggaggatattgtcaggatggaaaagcaccattttttttcctgttcgtataaacagattagataggatttgtttggttcgctgtctaatttaccacactttgtct

SEQ ID NO: 268241 - DNA, 494 bp, Zea mays
gcagaccttctacgagccgagctgcgatgcggcgaaggagatcgtcttcggagccgtgcaggagggggacaccggccgccgccgtcccgtggagatcaagcccgtgaaccacggcgacctggcgccgttcgagctgaacgggctgcggttccgcagcagttacggcatgggctaaaccagtggcaataagcagtcgaggaagagatctattgttgcctccgtccgtcctagtagtgttttggcgtcctccgttgtactggtagctgcctgtaaagtgtaaggaaaagagagggagcgatatagagatatcagtgcactcgaggggagcatttgacaagtgcaacggagaagttgggagttttggtaggaagagcttgctcatcatcatggttattggactctttactggcggctgatatatataatatatgtatgtataaaaaaaaaaaataaaaaaataaaaataataatatataaaaaaaaattattaattt

SEQ ID NO: 268242 - DNA, 415 bp, Zea mays
aaagaaggagaagacggtgaagaagaggctgactttgccagagaagatgagattgaagagcaagaggttatacaagctcagaatgagctttgtcaagaagcccaagcgtcgaatgctccgggtttaagcataattttggtttggttggagcggatgatcatgggagcggacaccaccagatccagttatatctcggaagatcagaaaattgtagtcccttaactgtgcctgcccttgtgagtgactatgcaacatcatttttcgaaggcgagagctatgtatggtttctttttttttacttttttttggttgatgccctggcgactccggtgatgtttgatgcaacaccttgcattccattatagcacaataacgcaccattttactgaattttaattacacttggggggagggt

SEQ ID NO: 268243 - DNA, 327 bp, Zea mays
aaaatgaagctggagaatgaaaggatggcggtggaaaatgagcgattggagctggagctcaagcttaaggaaattgagataggcatcaaaccaaagaggatttagagattgcaggatgcaagtggtagagctagggaacttttagagtttctggtaaccattttatctattgtagtaccttacaaattaggatatgttacatagtttcatcttcgctaactgcatatcagttaagttaataactctgttggtttcaagcatttgcaataagtacagtttaccttctgaatatgaaaaaaaaaaaaaaaaaaaaaaagggcggccgct

SEQ ID NO: 268244 - DNA, 1121 bp, Zea mays
ggagaaggcagatccatccgcgagcaatagacttaaggtctatggaggggctgaaggtagggctgatgtgaagaagggctggaaccgtcttgcgttagacagtcttcagaaacaaagtactagtcgtgtaaacacagacgagaagaagaacgctgcgcaaggactcgtcactagttcttgtggtactaatgatacagctaatacccctgccaagttagcttcgctgtatcaggacaacattgcctccattccaagtcttggcgccccaggaatccttggtgaccctcaggaccagcctagtcctgtatctgtgctagatggaccgtttattatacgtgataacagcaggaatgtactgtactcatctccatccccacaggctttgtcgaggtctcccttgatcggatcgtttccacggtccctgccagtgtcgtgggaggaccccccgctggaagccacgtcgtcgctgaattccctgagactctggaggcttttctccaaggccgacgaggatctagactcgctgacgttcatccagaagctggtccgctcctgtggcatggaccgagcaagctgcgtgttggctggccctctggacccggacctgctcgagaaggtttcagagcacgaagacgacggaaccaggttcgggagaaggcggcttcttttcgacgccgttaacgaagcgctcgccgaagctcccctggacggcggaactggccgcgtacccctggggcggcggcagatcacgcctggactgcaactgcaagaacggttccggtggtgactcggcggccgaggagatctggcgcgttatcaggaactggtcgacacttgacaagtaccctccctgcgaaactatcgaaggagacgtcttgctggagatgatactcatgcggtatgcggacagcggcgagacggctctgttggaggtgtttggtcttatgtcctacacctgcgtcgaggtgatctaggagctggttgaagagacggttgatgctctactgactgactgctaacgagtgatacttgctgctgatgctaacactgctcccataatacactcctaaagctgggatgggtgtctttgccttggtcacattttttgtttcgaccggcat

SEQ ID NO: 268245 - DNA, 831 bp, Zea mays
aggacacagatgatagttctgctactcaaacaatatgttcttcaaaagatgtcgtttctattgaagtacctatttcttctgcctgtccaagtgaacatcttgatggatcgagatcaggtggtctgaattgtagctgggataagcctagccctacttcaattcttgatgtatcatttgaagatagcaacattaatggatctgaatcgtcaagaagcattccttgtagcaacgagagaattgccttacgatccgatgcaattgaatctgtcacgcgctcattatcatgggaggaggatatgagctcaccttcgcctttacttgattcgacaaacttaacccccatctcaagcgtggacgacgatgaacttgaatgtgttgcctttgtacaaaagattgtatcatctgctgggctaggcgacctgcggttggatatggtcttcacaggctggtacttgcctgactgccctgtagaccctgcattgtgcgacaagctattggaccggaaggaggaggctgctaagtcgagggagcggaggtcgaaccaaaagcttcttttcgattacgtgaacatggcagtggtcgagattggccatgacaccttactatgcgcctacccctggaggcaggcgtgctccatggcctgtgaggagaccctttctcaagctttggcggaggaagtgccacaccatatgagggattggctccatggatcaggaaagtttgcaggaaacgagaacgacaacgccggaacgttgttggagagagtcatgctgcaggaggtggaatggagaggcttgttgaaatcatgagatggagttgatgagacacaga

SEQ ID NO: 268246 - DNA, 539 bp, Zea mays
gcaagagaccattgggtatatcagattcctcctgggtcaaattgaggctctcagctaccccgacatgggccacggcaatttgacctccttcttcactcaaaatgggccagctggatcagaaaggaaccctgcagggctgttcccagaataccccggccagttgctaaaccataatcataacactggagcacagcagcagcagcctgcagcagtccagcagccgcctgatgagaagcagggagtccatgaccaggtgaaaagggacttgaggagccgggggctgtgccgcgtcccggtgtcctgcacgtcgcacttcggaggggacaacgccgctgactactgggccccggcggcgctcggcgggatgttccgctagatagagcatacagcgccgccgtgccattgaagcatggtggtctagacgtacgtacgtacgggctgggcgagcagctgtttggtgcgagtatatgtgttcatgacgcttgctgcaggtacagagatcatcgagctgtctaagaatcatcgcgagctagctagct

SEQ ID NO: 268247 - DNA, 1154 bp, Zea mays
cccacgcgtccgctccgacgctcctttctttctcggaggcgacagctcgaactcgaatccctcatccagcctgtcgctggcgtcgccggtcgccgccgctcgattgcctccgcctgaatatcccttgccccataaggcctgaccttgaaagcctcgccacttgatcccggcggcggcggaggggagggcgatgccgaagcggacgacacacacctactcgagcgaggacgcactgccggagggccccgagtccgaccttttcgtatactactgcaagcactgcgcctcacatgtcctcatcaccgatacccaattgcagaaaatgcccaagcgaaagactgacagagcacatgttttagacaaggctaagcatctttcaaggctaaatgttaaggaggcaggaaaagtaatgttgaaacgtggtgaaggaaagcttgaaaagcagtttcgcatgagctgtgtgggatgtgacctttttgtttgttaccgatcagaagaggatctggaggttgcccctttcatatacgttattgacggagcactgagttcagttgctgctgagacaaatccacatgatgctcctgtacctccttgcatcacacaactggaaggtggacttgtccaagtagccattgaagtggaagaccgggcacaacgttcagcaataacaagagtgaatgctgatgacgttcgagtaacggtagctgcccttgctgctcgaggggaagctaacagtgagttgctagaatttatgaagcaggttcttggcctaagactgactcagatgacccttcaaagaggatggaataacaaatctaagcttctaattgttgaggatttgtctgcacggcaagtgtatgagaagctcctagaagctgtacaaccttaggcacccgagcgatggagcaatgtggtatgcagtatgcgtctggatattctctttcgagggcataggagaaggtttccatctatattgtgcaacaagtggagcagaacgtgtcgagacgaggtcgaaacatggctcaaatgtataactagaccatagcagtatccggttcattgtttctgtcgtgactcagatattgtatcctgtggtctcaagggaggtggttttgtgatttccacattctgatccagactgtttttgtggcccc

SEQ ID NO: 268248 - DNA, 945 bp, Zea mays
gaggtgagcagaccactcctgcactagtcccctgtccggctgtcccctccttcgtgtcggagcctgcgcctcggcttgtccccaccaacccgcagctcgctcccaccaaacccacacccgaacaatggcgtcggcgtccaaggaggaggtgatcgggaagctcaacatccgcgtggtgcggggcaacaacctggccatcgccgacccgctcacccacaccagcgacccctacgtcgtcctccagtacggcgctcagaaggtgaagactagtgtccagaagaagaaccccaatccagtgtggaacgaagtactgcagctctcagtaacaaatcctacgaagccagtgcaccttgaagtttttgatgaagacaagttcacagcagacgacagcatgggtgttgctgagatcaacattactgacatctacgatgctgcgaagctggacctgaagcacgcctctgatgggacaaggatcaagacgatctaccctgtcggagtaaactaccttggcggcgagagccatgttcagtggaaggatggcaaggtggtccaggacttgattctgaagctgaggaaggtcgagagtggcctgattgtggtgcagctggagtgggttcatgttcctggcgtgaagctgtgaaggccctgtctgaatgagggctgatggagctgcagttgctgtgtccctggtttgagtgtttcgttgtaaacgatatcctgaacgtggtaatatgcggtgtatgagtgaggtttgagtgtgatgctttgtttggggtacttcctggtgacatgatgtgggtatgactgccaaaggttgtggcgcaccaataagaaacgccctgtcagcatgttgtgagatgtaaactaagactttagaacttaaatatacaggtgattgggcgttaattgcaaaaaaaaaaaaaaaaaaaaaaaaagggcggccgc

SEQ ID NO: 268249 - DNA, 1138 bp, Zea mays
aggacctttttgaattccggtcgtttacgcgcccgtcctccgtccgcccacgcgtgcgcccacgcgtacggccacgcttcttggaaaaggttgtgatttttgcaccacatactcatttctgcttgatctgtggtaagggtttcaaaagagatgctaaccttaggatgcacatgaggggccatggagatgagtacaaaactccagctgctcttgccaaacccacaaaggattcaggtgcagatcatgcacctgttacaaggtactcatgcccatttgtgggttgcaaacggaacaaagagcacaagaagttccaacctctcaaaacaatcttgtgcgtgaagaaccactacaagcgaagccactgtgacaagagttacacctgcagccgttgcaacaccaagaagttctctgtcatcgcggacttgaagactcatgagaagcactgtggtcgtgataaatggctctgttcttgtggaacaaccttctccaggaaggacaagctttttgggcacgttgccctttttcaaggccacacacctgcgcttcccatggaagatggggaggtaccagaagcttcagagcagcctcaggacggtgagccgacgaatgaaatggcgaggagcaatgtgtatagcttcccctgtagttcgtctgatggtatatcgaacctcgacatgaaaatggctgatgatgtgcgtggttatttctcgccgctgaactttgatccttgctttggcgcgctcgacgatttcactcgccctgggtttgacatctctgagaaccccttctcattcctgccttcaggatcttgcagttatgggcagcagaacggagatagctgatggatgccgccatcgatgatgactacaccgcggcactgccaacctttatgtatgttgttgcatgatgctagtttggttcatcctctgttcaagagccattttaggctatgcctttaactttcttaagtgtacctccgtttgtggtcattaataatgatcaaggacttctagcatttcttagacccagatagccccaattttcagtatacatacgcaagtatttcttgttcattttgtctgaatcggcgtgatgcttgtagcactgacaatttatcataacaagctgctcagctatt

SEQ ID NO: 268250 - DNA, 1287 bp, Zea mays
gcgagagcgagagagagagagagagagaggagagagagagagagagaggagggagggagctcgagaggtcaacgagggggagctggcacgaaagctcagggctccttgctcctcctataaacccaccgcacccgccttccaggctcccattttctcggccgggagccgcaattccatcctgctgctagagttacatactcacccaatagaacaattctatgcccggtgattgtacctcctgaagtagaagagcatactgaagcagaactcgagtggtgttggatcgaaatggaaggcgggatgtcaagtttggaagccgccatgaaagcttcttcatcgatggcaagcagcatggcaaggaatgctgaccctgaccaacagactctccgccccaatttagtggagcagttctattttccaagacctggtcaatctttgccaggcattcctccattttttgggcctccctctagtttgtatcttcctaatgacaatgaagctaaatttggcaacaactttgaatcaaatccttcacagaatacagattgggatccgcaggctatagtgagcaacctaaccttccttgagcagaagatcaagcaggtaaaagatattgtgcagtctatgagtaatcgagagaaccaattagctggcggttccagtgagctagccgcaaagcagcatctcgtaactgctgatctcactagcattataatccagctcatatctactgctggttccctgctcccttcaatgaagaatccacttcttagcagcaatccagcagtcaggcagcttggcaacactcttggttctcctatgggccttggcatgaatgctaatcagcgaccaagcgtagacagcaagaccgatattcctgacacaggaaaaacttctgattatgaggaactgatgaatacccttaatactagtcaagctgaaagagatgagctgatcaaatgcccaaatccctgtggtggggaagggtctgaactgactccgatggaggaccatgatgtgaaggagagtgacgatggtggtgagggagagaatctcccccctggttcatatgtaatcttgcaactggaaaaggaggagattttagcaccacatactcatttctgcttgatctgtggtaagggtttcaaaagagatgctaacctaaggatgcacatgaggggccatggagatgagtacaagactccagctgctcttgccaaacccacaaatgattctggtgcacatcatgcaccggttacaaggtactcatgcccatttgtgggttgc

SEQ ID NO: 268251 - DNA, 290 bp, Zea mays
accgcagtccgcaccggacctcgagaggggaggagaggagatgggaggggtcaacgaggtgggagcagacaggaaggctcggggctccttcctcctataaacccaccgcacctgccttagaggctcccattttctcggccgggagccgcaattccatcctgctgctaggtgatgaatgtggctgtgtcggccatggtgcagatccccaaggcatttttggtgacggaccaatagcaggatatccccatgacatctgtggtggcagcatcaacagtgtcatttgcgctgac

SEQ ID NO: 268252 - DNA, 869 bp, Zea mays
cgagataccatgcctgctactaatttggcttcagtaatttcaaacaaaatgagaaatgagaaaccatgtctattatcgatttgtcttcgtttattagatttacagagaagctatgactttgatatctaatgcctaactttgaaggaaactcattggatggagctaacttgttttctgtttggtccatttccattttgccgtaccattttatttttagttattgtttcattaatataagttgtgtaccaaatacaccttactgtcaaccgaccaggtacatatacaaacctgacctcccctgcgtttatttagtgattcaaacttcaaaacttttatcctaagttactaaccatatgcactgtttatgtcatttacagggaaaagcgcaaggttttattgcaaccgtgcagtctgtagctatattgttggcaccactatttatgagtccactgacctcttacttcatttcagaggaaacgcccttcgactgcaaaggtttcagctttattgtggcgagtttcttcttggcaatctcgttctgcctcgcttggatgcttaacccaggaatgaaggacaagggcacaaaagctgtcgtttcagacagcgctgatgaggaagcagcgcaagcaccactactggcaaaatggaccagaccatgactccagtccaggaaactgagctataaagctcagctggagtgtgcgtaaaattgtaggatatgtgaattagagtgccaacaacatagggcttgcctgtacctgtagtatagtgacagtacataccccagaacgagaaagccgataaagctcggtgttttgtgccatccagccttcactgtttcaggcaaatggatctttatattatgtgct

SEQ ID NO: 268253 - DNA, 612 bp, Zea mays
gtggcaccccgactgcaacacaaacaacatatacatcacaagcgatcaagatcttattatctcgtactgcaaggctgactcaactgattcaacttcagaagaaaatgctggctctataaacataagcagcatactgtccgggaaatgcctggcaaaaataaacactggaaactccaatgcttgcaaggaaagaaagaaggcgtggaagttccggaacacagtctcggaggcccttgaggacatcacggctctgtactacgacgaggatcgcgacgagatctacactggcaaccggcacggccttgtccatgtgtggtcgagctgaaagctgaaactgcggggcggctttcaaccgtagcacggtgatctggtcttcacctgtgcgcgtattaacagctactagtgcctcacgtggcacgggggtggggggcacgaaagagggaccccccaagccactcaagtgacagttcttatttatctcagcatgccaagagcactgtccatcattctgaaatcagaggccccccagatctgttgtaacggacgtaccttgcaagtaatgaaatccattcgttgatctgaaaaaaaaaaaaaaaaaaaaagggcggccgc

SEQ ID NO: 268254 - DNA, 2215 bp, Zea mays
gcctgaaagtgtatcagaggataatattgaaaaagttgaagagttggttatgcaaactttgaataatttagcagacgaaggatttgcaacagaagcggtggaggcttccatgaacacgatcgaatttagtcttagggagaacaacacagggtcattccctcgtggcttgtcactgatgcttcgttcaattgggaaatggatatatgatatggacccttttgagcctctgaaatatgaacaaccactgcaacaattgaaagcacgaattgcagaggagggatcaaaagctgtgttctcaccgctcattgaaaaatttattttgaagaattcacatcgtgtcacagttgaaatgcagcctgatccagagaaagcatcacgtgatgaagcagctgagaaagagatcctaaaacaagtcaaagctagcatgactcaggaggatcttgcagagttggcacgttctacaaaggagctaaaggaaaaacaagaaacaccagatcctccagaagctctcaaggctgtccctagtctgtcattgcaagatatcccaaaaaagcctattcatgtaccggttgaggttggagagataaacggtgtcaaggttttgcaacatgatctcttcaccaatgatgtcatctactctgaggttgtatttgatatgggttcgatgaaaaaagaacatttgcaattgttgccattgttctgccaatccttactggagatgggcacaaaagatatggactttgtgcaacttaatcaattaattggtagaaaaactggaggcatatcagtatacccattcacatcatcagttaggggaaaagaagatcctctcactcgcataatcgttcggggaaaggcaatggcgccacgagtagaagatttgtttaatctgatgtacatcattcttcaagatgttcaattcacagaacagcagagattcaagcagtttgtttctcagagtaaagcaagaatggagaatcgattgaggggcagtggccatggcatagcggcagctagaatggatgctaagttaaatgcagctggatggatttcggaacaaatgggtggtgttagttatcttgagtatctgcgggacctggaaactaagattgatcaagattgggacagcatatcatcttcactcgaggaaatgagaaaatcactcttttccaagaatggttgcttgatcaaccttactagtgacgggaaaaatcttgaaaaatcaaggcaacatattgccaaatttcttgattcactcccaagtagcccatccattggaagtgatccatggctttctcgtctaccttctgtgaatgaagccattgttgtcccaactcaggttaattatgttggaaaagctggaaacctttaccaaagtggataccagctcaatggaagcgcctatgtcatctcaaagcacataagcaatacatggttatgggatcgtgttcgagttagcggtggtgcatatggaggattttgtgattttgacacccattcaggagtgttctcatatttatcatatcgtgatccaaacttactgaaaacactagaggtctatgatgagacagcaagattcctcagagagctagaattggatgatgatgcactcacaaaagctattattggaaccataggcgatgttgacgcctaccagctaccagatgctaaaggttacagcagcctaatgagatatttgctgggcatcacggatgaggaacgccaacaaagacgtgaagagatactagcaacaagcccgaaggatttcaaggagttcgctgatgctgttgaaaccatcaaggacaatggggtcgtggttgccgttgcctcgatagatgatgttgaagctgcgaataaggaaaacccgctattccctgaagtaaagaagtgtctgtgaggtccaccaccacttgataaggattctagtcgggaggtgtttttttaccagtgaatgcggagtgtgacaatatacgtaacatattgcaagagcaccatctctccgaccacggttatagctagccgaatcttggcttctcttccatgcgattttaaatttggcagtcaataattagttcagatgtagacatagatgcatgctggtagatggctagcgtcttcccatgttggctcaaacgtcggatgtacacaatgattcataaaaaatagaaacggatggtgagatttctacaatatgttcagggtttccatatcgaat

SEQ ID NO: 268255 - DNA, 455 bp, Zea mays
cccacgcgtccggtggaccgccaaggagctgctggatcagtacctcaagttcaggcaggaggccgaggagggtgactgcaagaaggggaggaagaagaagagcaagaaggacaaggacccctccaagcccaagcagcccatgtcggcctacttcgtgtactcgcaggagaggcgtgccacgctggtcgcggagaagaagaatgtacctgagattggcaagatcaccggggaagaatggaagaacatgacagaaggtcagagggctccctatgaggaggtcgcgaggaagcagaaggaagagtaccacaagcagatggaggtgtacaagcagaagaaggctgaggaagctgctagtcttgagaaggaagagcaggagcataagaaaatcatgaagcatgaggctctccagctgctcaagaagaaggagaaggcagataatatcatcaagaaaacca

SEQ ID NO: 268256 - DNA, 535 bp, Zea mays
gcacattcctcaagggagacttgggggagttcggctacgttgctccagagtgcgcgagcaatccggtcggcacgacgaaaggcgacgcgtacgcgtttggggtggtactgttcgagctcgttagcgggcaggaggctgctgctgctgcggtgggcaccgtcgacgtgacgggcgaagggttcaagggcacattggtggactgggttcggcagctcaaggcctctggccggatcggtgacgctgtcgacaaacctttgcgcgggaagggccaccaggcagacatcgaggagttcttgaaggtagcctttgcgtgcacccagcctcgcgtgagggagaggcactccatgtaccgcgtctaccacgccctgaagagcatcggagaaggccgcgacgccacggagcagttcgacgagttcccgctggcctataacaaggacgattcggacactatgtagctagctgacgctgatcaccgattggattgtgggaatgtttttttgtcaggctcgtcgatgattatatatattatatgtgt

SEQ ID NO: 268257 - DNA, 898 bp, Zea mays
accacgcgtccgtgaccgtgctgcagattgtctgtttgcacggtcaaaggaaagaaaatctagatatataacagaactggagcggaaggttcaaactcttcagacagaggctactactctttcagcgcagctcacactattccagagagacacaactggactttcggcagaaaatgctgagctgaagataaggttgcaggccatggagcagcaggctcaactgcgggatgctctaaacgatgcgctgaagcaagaagtggagaggctcaagatagcgacgggcgagatgccgaagtccaacgaacaattcaacatggggatgcagcacgtctcgtacagcggcccttctttcttccatctcccggagcagcacgtagacattcagctgccgcaccatttccagcagcctccgcggaacgtccagatgctgtcccaccccaactccctctcggatatggcgcagcaagactcgcttgggcggctccgggggctggacattggaaaagggtccatggctatgaagccagaggcagaggtcgtggtggtgaagtcagagggcagctctgtatctgcaggtgaaagcaacaccaccttgtagctatacaatacatctgccttccaagaagcctccgtttggtttagagttcttttgttcatagtctgacatcctccttccttgagctgcttcgtccttctcagtaggcatatttttttttttattccattggttatatctactagttaacattggtcggttgccaatcgttgttgtcgtggtggctgatttctatagggacattaatgtgttggtttcgagtttgttattgttgttgatgctgtgtgtgtgtggttggttgtttcgagctaggggctgaaagggcaccgagtgttttttttt

SEQ ID NO: 268258 - DNA, 919 bp, Zea mays
tcgtgggccgcgcccgcgccagtccgcattcgccgcaaacggacgcacgcgggacacctccccgctccccccccccccccccctcgtcgccacgtgtgtgctagggttccggcgtccggcgcgggcggtggcggccattccgatggaggcggatacggggtgtcggttggaggtggacgacgtcctctccttcgccgacgacctcgtcggagtgctccgccgcagcgacgacgccgacgccaacgcgcaggtgatcgcgggcgcggggttgctgcggaccgcctgccgttccgagtccgaccacctccacctgcagctgaaagattatcagcaaaaactatggtcctgcaaggacaagacagacaaagcaaaagctgaaacgattgctgctgatgaactgagtgtactgcaaaataaaatggaagaaaatcttcaggaagattaacagcttcctgaagaattgggagctacacataatgaccttgaaaacctagaccatcaaagggcttctatacaagacaggaagaatgctatcaagaagaaggatgaaaacatgcggaaagccacatataaactttccatgtgcgtgtcagttacaaatatcataccaaatttggaagatcgggataagatctcaagctatactgtcgacaagaatgggaagaagatacagaagttcgagtttgagaagacgacgccaccagttgagatctgtaacacgctttggaaaacaatttagggccgtgcagatcgttgttactgtctgttaacgaagattgtcaattgtacttgtatatatagctgactagctgaggatggtggacctctcatcttcaattgtgcttgaatttagggcgtgcaaaccgtcattagtgtctgctgattttacagtgttttgatttcagtcagtataagatcg

SEQ ID NO: 268259 - DNA, 733 bp, Zea mays
cgggccggcccacgcgtccaccaccacttcctgcgcttcgctctccccagggaccacctagacttaatgtactcgtttgtggaatatatttgttattggtgccttcgtcacttgctgttttgcttccgcactggtaacttggggggatctagggtttcaggaggagagtggagatcatcccgatgatgatgcgaggtggaaggctcacgggtttgacctctcaggttctgaggtgcttcagcacggagatatttgtcagcagattatcattctatacgacagaggaagaattcaaagatattttttcaccatttggtcaccgtagaggaagctcagacttatgagagaccaccaaactggaaggatgaagggatttggttttgtcaaatattcatcgcaagcagaggcagagaaagctgtcaaggcaatggatggcaggattctacgtggaagattgatctttgtggagatggcaaaaggacacgaaagcaagtaggacaccctccccacgagaggatttcactgaacatgaaacatgagagcgccatcagcttatgccagatggcaaatatcccaaattctcaattgatgttgcaacttatatacaaagcacaagttaattttagctagcttatctttgataacactgctaccttgccatctgaatggttgccgtgtattggtatccgttgacctgtgtaagaaatgttggcagctctgtgccctacgaact

SEQ ID NO: 268260 - DNA, 1286 bp, Zea mays
gccacagcctgctagggagagacgcagacggcacatgaaaactacaagaaatccgctgcgaaactccggattaaaaataaggacttggccttctggaatcccccgctaaaccataggcgtgttctattggaagttggaacaaaaccatggagagtgaaatcatggcctcctatgaaacaaagcagaattgcgaaattagggtatttgagagttcagacgagatggcaacagatctggcagagtttatttcacaagcttcagaaatttcagttaaggaaagaggatgctttgctatcgccctttctggaggtcctcttgtcagacatatgcggaagctctgtgaagcaccatacaacaagacccttgattggtctaaatggtacatcttctgggctgaggaacgtgcagttgcaaagaaccatgcagagagtaactacaaattaacaaaggaagaatttctctccaaggtgcctatccttaacggccacgtctactccatcaacgacaacgcgacggtggaagaggcagcgagcgactacgagttcgtgatgcggcagctggtgaaggtccggacggtgggagtctcggagagcaacgactgccccagattcgacctggtccttctgaacatcgggcccgacgggcacgtagcctcgctgttccccaaccacccagcgctggagctgaaaggcgactgggtgacctacatcaccgactccccggagcctccgcccgagaggatcaccttcacccttcccgtcataaactcggcgtccagcgtcgccattgttgccaccggagaggacagggcgagagccgtgtccttctccgtctctggctgccaggaccaggaggaaggcgaaggcccagcagacgacgacgctagaacgacgatgataccgccggctagcatggttcagccaaccgatgggaagttggtatggttcctggacgaggcggctgcttcgtgtcttgaggcttcgaatggcgcttgcgagcatcaggaagggtactgagaacaagccatcttgttcatgcatgcagtgcagactgggtgctgctacctccgcgaacgccgcctactctctggtttcttcagagtcgaaactcgaaagtttgcatgcagttggatgtgggcaattaagagtgaagcggtttgtgtttttgatgtcaagacctcatatcgcgcggagtagctaagctcgaccatatattggtcgccacgtatgatcctattttatttaagtgtgttggcagttttatcctacctgaaaaaaaaaaaaaga

SEQ ID NO: 268261 - DNA, 559 bp, Zea mays
  unsure (1)..(559): unsure at all n locations
tcccacgcgctcgtcggcagcctgctagggagagacgcagacggcacatgaaaactacaagaaatccgctgcgaaactccggattaaaaataagattcttcattttaagatatttgaaaattgaaatgtcggtaggacttggccttctggaatcccccgctaaaccataggcgtgttctattggaagttggaacaaaaccatggagagtgaaatcatggcctcctatgaaacaaagcagaattgcgaaattagggtatttgagagttcagacgagatggcaacagatctggcagagtttatttcacaagcttcagaaatttcagttaaggaaagaggatgctttgctatcgccctttctggaggtcctcttgtcagacatatgcggaagctctgtgaagcaccatacaacaagacccttgattggtctaaatggtacatcttctgggctgaggaacgtgcagttgcaaagaaccatgcagagagtaactacaaattaacaaaggaagaatttctctccaggtgcctatccttaacgggcacgtntactccatcaacgac

SEQ ID NO: 268262 - DNA, 1212 bp, Zea mays
cccacgcgtccggtgccggcctcgcgctggaggagaaggagaaccggagatgcagggccagtatgcacgcggcggcgtcggccggagaggaagctgggggagggctcgccaagacgctgcagctgggggcgcttttcgggctctggtacctcttcaacatctacttcaacatctacaacaagcaggttctgaaggttttgccataccctataaacatcacaacggtgcagtttgctgttggaagtgccattgctttgttcatgtggatcactggtatccataaaaggccaaagatttcgggtgcccagcttttcgctatccttcctctagctattgtccataccatgggcaatcttttcacaaacatgagccttggaaaggttgcagtgtcatttacacatactataaaggccatggaacctttcttctcagttctcctttcagcaattttccttggggagttgcctacgccatgggttgtgttgtctcttcttccgattgttggtggtgtagctttggcatcccttactgaggcctcctttaactgggctggattttggagtgcaatggcttcaaatgtaaccttccagtcaaggaatgtgctaagcaagaaacttatggtgaagaaagaggaatctctcgacaacattaacctattctcgatcattacagtcatgtcattcttcctgttggccccagtaaccttacttacagaaggtgttaaagttagtccagcagtgttgcagtctgctggtttgaacttgaaacaggtatacacaaggtcattgattgctgcattctgcttccatgcataccaacaggtgtcatacatgatcctcgccagggtatccccagtcacacattcagtgggcaattgcgtcaagcgtgtggtggtcattgtgacctcggttctgttcttcaggacccctgtttctcccatcaactcactcggtaccgggatcgctcttgctggagttttcctatactcgcaattgaagaggcttaagcccaagcccaaggctgcttgatcatagacctttgcaggtccatccaatagaacttttgaagttatgctatgccattggaatgattagtgagtgccgtagttagaatgatgtttaaagaagagctaccacttcagcagataatttgtgacttgcttgcattttttggacggatttgttcgtgtattaataattttgcagtgacgat

SEQ ID NO: 268263 - DNA, 487 bp, Zea mays
atcctcgccagggtatccccagtcacacattcagtcggcaattgcgtcaagcgtgtggtggtcattgtgacgtctgttctgttcttcaggacccctgtttctcccatcaactctctcggtaccgggatcgctcttgctggagttttcctatactcgcaattgaagagacttaagcccaagcccaagactgcttgatcatatacatttgtaggtccattcaatagaactttggaagttatgctatgtcattggagtgatcagtgagtgccgtagttagaatgataagcctctccgttttgttaccagttgggtggataatttatgatttacttgctagcatttttggacggatttgttcgtgtattaataattttgcagggatggttgtcgttgtgctgtttgctgtttatagacctgaaactgaactgcgatgtttcattggaccatcttcaatcgtgacaccaaattaagatagtagatacaatag

SEQ ID NO: 268264 - DNA, 437 bp, Zea mays
cggtgtcggtgctgtgggcggtgtgccaccggtaccgtgaccggcgcacggtggcggcggcggcggcgtgcgagaacgggctcaccaagctgctgctgctcatgcagagcggctgctcgccggcggtgcggctgatgacgtcggagctgctcaagatcttcagggtcaacggcaagagctgcgtcgcagggtacgactccaagaccagccacatcatgcccttctgatcctcaccgccatcggtgatacaacagtggaaccagcatttgtctgttacccttttccagtttcgacatttttttgaagtgattcgttggaagtgcatacagtagggaaaaaatacaagaaagaatgagttctcttggagcaacacacaacttgtatatgagtagaggatttcggtcgaaagaaatcaatggatgaaacaaattcagctt

SEQ ID NO: 268265 - DNA, 994 bp, Zea mays
cccacgcgtccgcgcgtcatcccaatccctacccaattacgacacgcctgccgccgccacgccgcccgaaatccggaggggaagctcctcgacgacgtagcggccagtggcagctcggacgatggcctcgtccaactccgccgccccggctcccgccgacgggggcgacgacctcgaccagctcctcgacagcgcgctcgacgacttcaccaacctcgatctctctgcctctgccgcccccaaaagctccggcgaggcatcggggtcaggatcgggaggcaaggggccagtgaaggggctggggctggggcttccggaccccaaggcgccgaagcggcgcgcggggaagcagccgccgccgaggggcgcgtgcgccaaagaggcgctcgaggagctgacgcgcgagacgcgggaggctgtgcgcggtctcgagacggccactgggggtgtcccgtcactggacgatgacgccatgatggaggagtttgtcaagcagttccaggagttcgcaggggcacaggatatggactccattgttgaaacaatgatgcagcagcttttgtccaaggagattcttcatgagcccatgaaggacattgtggaaaagtatccaaaatggctggaggataataaagacaagataagcaaagaagaatatgggcgttataataatcagcttgaactcatggtgaagcttattgaggtctatgaaaatgatcctgagaacatgactaggatttttgacatcatgcaaaacatgcaagaatgtggtcaaccccccagtgatcttgtccaagatattgtaccttgatctggatctaagcaagttgggacaactggctcctgagatgcttgaatcagctccaaattgttgcgttatgtgaggaccaaaagcattccatttgggattcgaattccatgaaggtttctttacctgtaccaacccccccccctgggcttagtagatagaagataatttccatctggataatct

SEQ ID NO: 268266 - DNA, 923 bp, Zea mays
cctacaggtgttgtctggctagcttatagcttataaaaaatctgaaaaggggggaagaaaaagaagacgatggaaaaaggggggggttggttttacaactaagcgccacttctttgtggcgctgggccatctgatgcctactggagtagcttacaccgagtgacaccaacgtggctaggcctaattttgtgtttggtctcctcttccggcttcttgggatccggtcctactagctgaagaagaatctgtacaccgttatctttttttttctttcctctgtgatcatcccatgcttgcctgatgcctgtccccgtcccgtccgatggcgaccgccgcaacgccaaatcccggaagcggttttcgcggctcctatagtagtactagctagcatataccgccataccatatccatccgcctgtttgttgttggctttggtttggttccgtcggcctgccgtggttttggtgtggctccgtccacgatccacacatctgtcggcggctcatcagttcttgcggacgaaggtcatgggcaggccgttgagcggcagcgcgaaggggccgaactgcacgccgctctcggacttggaggtggaccacctgtacttggtggcgaggtggtggaagagcacgagcatctccagcttggcgagctcgttgcccgggcacgagtgggtcccgttgccgaacggcaggaacgtgttgggcttgggagcaacctcgaatcgggaggggtcgaacttctccgggcaggggaagtggtcggggctgtggtggatgttccggaacaggggcatcaccttccagcccttggggatcaggtacccttggtactccacgtcctccacggcctcccggaaggtgaaggacaggatggacgccacccgcatcgtctcctggatcacacggctcgtcgtgcgcat

SEQ ID NO: 268267 - DNA, 697 bp, Zea mays
ccggctgccgccgacgggggcgacgacctcgaccagctcctcgacagcgcgctcgacgacttcaccagcctcgacctctccgcctctgccgcccccaaaaggatatggactccattgttgaaacaatgatgcggcagcttttgtccaaggagattcttcatgagcccatgaaggacattgtggagaaatatccaaaatggctggaggataataaaaacaagataagcaaagaagaatatgagcgttataataatcagctagaactcatggtgaagcttattgaggtctatgaaaatgatcctgagaacatgactaagatttttgacatcatgcaaaacatgcaagaatgtggtcagccccccagtgatcttgtccaagatactgtacctgatctggatctgagcaagttgggacagctgtctcctgagatgcttgaatcagcaccaaattgttgcgtaatgtgaagacaaaaaacattccacttgggattcaattccatgaagtttcttagcctgtacgaaccgcctcccccctttctggcttgagtagattcaagataatttccatctggataatctgtaaagccttgcaaatatataatgggctcaatgttctttctggttctttctgttatttttctgtaacactcccgtcgttcctatatacataccttacgtgtcgaaaccccttacgtttt

SEQ ID NO: 268268 - DNA, 722 bp, Zea mays
accacgaggtcgcagctccccccgcaaaaaccctagctttacctccccacaagcgcctccaagatgaagctcgtcaggttcttgatgaagctgaacaacgaaacggtgaccatcgagcttaagaacggcaccgtcgtacacggaaccattaccggtgttgacatcagcatgaatactcatctgaagactgtgaagctgacactaaaagggaaaaatcctgttacccttgatcaccttagtgtgaggggaaacaacatccgctattatatccttcctgacagcctaaacctggagactttgctggttgaggaaacaccaagggtcaagcctaagaagcctacttctgggaagcccttgggccgtgggcgtggccgtggtcgtgggcgcggtcggggtcggggacgttgagcatgctagctgcttttggaaattgcattgcgtgcatctgcagtgtaatctacattcctatcaattgtacgaagtatgcctttgattatgcaaccatgtatcaattgtttttttttgccgtggatttatgttgatgaggttaccatgtgatcatatgttctttccctagaacttttaagaacaattaaatactatctttaagacttctctagacacatcacacatagctcttgttatgcactttagatatacaacgtacaattatgtatctatttagatatacattatatattgatgcagagtatcatatatct

SEQ ID NO: 268269 - DNA, 265 bp, Zea mays
ctcgagccgacctgacaccgcaataaccctagctttacctacctacaagcgcctccaagatgaagctcgtcaggttcttgacgaagctgaacaacgaaactgtgaccatcgagcttaagaacggtaccgtcgtacacggaaccattaccggtatgacgtcatgcgaactttaccactgtgggaattagaggtgcggggcacctttaggtgtgcgggcttagaaagtagcttaatactgtgtttctggctgtaacctaggaacatg

SEQ ID NO: 268270 - DNA, 416 bp, Zea mays
cccacgcgtccggctccccccgcaaaaaccctagctttacctccccacaagcgcctccaagatgaagctcgtcaggttcttgatgaagctgaacaacgaaacggtgaccatcgagcttaagaacggcaccgtcgtacacggaaccattaccggttatccggtcgattatggtttacatatacggacagctatcttcagatagtgttgacatcagcatgaatactcatctgaagactgtgaagctgacactaaaagggaaaaatcctgttacccttgatcaccttagtgtgaggggaaacaacatccgctattatatccttcctgacagcctaaacctggagactttgctggttgaggaaacaccaagggtcaagcctaagaagcctacttctgggaagcccttgggccgtgggcgt

SEQ ID NO: 268271 - DNA, 1314 bp, Zea mays
tcgccttatgcagccacacaagctacaggcaaatctgcgacagctggagaaactagaaatgcatggactaattttaatcgacctgttagtccaaatgtgcagccacaccctactggccttaaaaagtcatggcatcagttatttagtcgttcagcatcagtgtctccttgtcctgacgttacaacttcagctcatgatatgattcggaaggcagaaccaaatggagctcaaatatacaatgctcatacatttctctctcagtatccgcctctggactacaagccaagttcaagccagtctatgcaatttccaggttttccaccgcttaatggagcacctcccagtaacccactacctcattttcctgctggacatatgcctttctatgatgatgcagaatcaacactacttgaagaaccagagcaatttgaggacccatgctatgatccagatgcaattgcattacttgggccagtttcagaatctctagataacttccctccggacttagattgtggattcttctcgagtgatgttgctaaagaaccacatgggtggccttcaccaattgagtctcctctctcaagatcccacacggttgaagaaaagcttaccaagccctcgcactcatcagttgcaagaggttctggtggtcccattctgcctgtgactagcagtgaacaaggcacatggcaaatgtggagcacgccattggttcaggaaagtttaggtttgcaaggtcctcagagtcagtggtttcaacaaaacacaaatcaatttaaccatagtgctaaccttttcagtagtggaggcagggcaagaagtcccctgggtactggtttgaatgacagtgatccatggcttcagaaagcacctttccaacaattgccacctgatacaccaagcctgttcctttcacatgaaatgccaggaaaattacacaatgacttggtttttgggtctccaaacaaatcagcccgtgaacacccctttggaccgcctggttatttgtggcccaaggaggaactggcgctgaatggagctcaggacggtggaggcgggcatatcctgtcgccgtctggtggcgcacgagttggcggcggcgttggcttattttcttcagcaagtccagatgtacagtcactgtggtcattccatgaaacattcaatgaaaaagagagcatagaatgaacaaacttttataatagaaggaagggaaaaagtgtggagccaaggcttccttgcctcctctctcttgtagggttttactgtctttaccgaggtgataagctggactgtgttccttaatgatgc

SEQ ID NO: 268272 - DNA, 478 bp, Zea mays
agtcccctgggtactggtttgaatgacagtgatccatggcttcagaaagcacctttccaacaattgccacctgatacatcaagcctgttcctttcacatgaaatgccaggaaaattgcacaatgacttggctttcgggtctccaaacaaatcagcccgcgaacacccctttgggccacctggttatttgttgcctaaggaggaactggtgctggatggagctcaggaaggcggcggcgggcatgttctgtcgccgtccggtgcacatgttggcttgttttctccaacaagtcctgatgtacagccactgtggccattcagtgaaaaaagagagcatagaacgaacagacttttgtaatagaaggaagggaaaatgtggagccaaggcttccttgcctcctctcatgtagggtttacggtcggatataagctggactgtgttcctcttttttgcactgcattgggccttgtttcacctg

SEQ ID NO: 268273 - DNA, 860 bp, Zea mays
acgcgtacgcaggcttcggctcgagccgatctccagatcgcccccccaaaccctcttcttcccccttcccgtgctcgacccagatcgagggctcgatccgtcggccatggcgctggagtgggtggtgctgggctacgcggcgggcgcggaggcgatcatgctgctgctgctgacgctgccggggctcgacggcctgcgccggggcatgatctccgtggtgcggacgcgctgaagcccatgatgtcggtggtgcccttctgcctcttcctgctcatggacatctactggaagtacgagacgcgccccacctgcgacgacgagcacgcctgcaccccctccgagcacctccgccaccagaagtccatcatgaagtcgcagcggaacgcgctcctcatcgccgccgcgctgctcctctactggatcctcttctccgtcacccagctcgtcgtcaggctcgagcagatgcagcagcgcgtcgacaagctcaggaagcgcgacgactgatggatccgcatccatccggtgggctcgttcttcctttgcctgccttgtcttcctgctttatgttgtggtgctgatgttttagatctcggatcgtaatttgagacctgctggtagcatttgcttcctttgccttgccgtcttcagataaaaaagaacagcgctcttggaaacgatgatatgtttaggatgtttggacgaatggtatctgtcgtaattgatgtcttcatccatgacttggttacttggttggtgtcactgaatgtacactgagatattggttaatagctactagtgctgttttcctcatgtgataaaaaaaagggtggccgctcgcgatctagaaccggacgcgtggg

SEQ ID NO: 268274 - DNA, 657 bp, Zea mays
ctagtacgaagccctcagtcctccctcacacaccgaaccgagcgcaccatgtcgtcggcggctggaggagtggaggagacggtgcgggcgtcgcacatcctcatcaagcacgagggttcccgccgcaaggcctcctggaaggaccctgacggccgcatcatctccgccaccacgcgcggcgacgccgcagcgcgcctcctggacctccgcaaccagattctctccggccaggccaacttcgccgacctcgccgctcggcactccgactgctcgtccgcgcgacgcggtggggacttaggtacctttgggaggaagcagatgcagaaacccttcgaggacgccacatatgccctcaaggttggtgagctcagcgacatcgtggacactgacagtggggttcacatcatcctgcggactgcctgaggaggggatcacactgtcctctcaggctttcagttagtgcttatggcgttctgttagaacctgtatttgtattcctgctgggagcctgagttccattccgtgcaaagataaatcatgtgtgacgacacgtttgcaacagcatttatgcttaaactgcattaatgatgatgcgttgagctcctgaatgcctagtttttctggcgacagtaaaaaaaaaaaaaaaagggcggccgc

SEQ ID NO: 268275 - DNA, 718 bp, Zea mays
ctaaaataagaaagaaaactagaacctaaaaaccagcgacgccgagcggatctacagccaccttggtcaccggcggcgatggcgagttccaagtccggcatccctatcaaggcagaacaagattcggatggctcggcacaaagcacagctgatatgacggcttttgtgcaaaaccttcttatgcagatgcaaaccaggttccaagctatgtcggagaacatcatttcaaagatagatgaaatgggtgcgagaattgatgaattggaacagagcctcaatgacctcaaggctgagataggcggtgaaggcatgtcgacgccatctaagatgaaggaagagtcaagaccttcagacagctccgcttgagtgcagcagaagcagcgtgactcgtttcagaggccgttgctgtgtcttgggcgttcatcactaacaaatacgtccctgttttaaggtctcatttgagcaagagattgtaacccgtgctacttgtgttttgctgaatggtttgccataaattgtacccgtcttcgttctgtgtagacctacccgtggttatgccctgagcatgtagtgacagctgctagaatgctagccccccaattactaaaaattcgggattcgcaagcataatttactttgcttctgtgttagttttatcccttacatggatagtagtgtatatatttttaattggcttacatattaaatccatgttcgc

SEQ ID NO: 268276 - DNA, 369 bp, Zea mays
gccgggtgccgcccggagcacctcgtcccggatgcggcgccgccggggccgtagcccccgtggaggctccgcccgagctgcagatctaacgggctgccggaggaggaggctgacagcagcgtagctgtgctgctgctgcgtggcatggcgtgctccgtccccgggtgaacttcccccagtgtgtggcacgggtgggggcaaccgttgcgggcccacctgtaagtgtcaggccggcgcgccgccgtggctcggtagcctaggacttctccatgtcttgctctgctccggtgtaagataccgtggattttaataatgaatcatggcatcaaataaaaagctgtacaaagggcggcgctcgcgatctagaac

SEQ ID NO: 268277 - DNA, 858 bp, Zea mays
ggacagatatcgacagggatgcatataacaaagctgaggagttattattattgtccctaaatgaatgggccgcgactttagttgcatcatcttcacttcattctatttgggttgaagttttaggcgacccgctcctaagaaggttacttctcaggttcatcttctgccgagcaactcattccctgttcaaaccaacaaaccataagacagagttccttccgacctgcatgcctcctttgcctgagtctgttgatgcagagagcatgctctcccaaagctgtgtgctgcgagtcgcatcattctttggcgctgccagtcagttctcatttgctgaggttaccacatggcctgatgttgaccctgaggaggctgttgtcaccagttcttctggcagtgccaacaaaggtgtgcctgagacagccagagattcagacatttcaaactcatcatcatctttttgatgcgaccatggcgctaccttcgtccgcttgtgttatttactcatctgcatatgcggatccatttgtaattactggtgctcctttatgcttgatttacacatcaagcagaactgccttgcctttttgtttcctggttacttactgaattaatagtcactagaacatttttttatcccttagtttggaggtgtggaggagctgtgtgagaaagtgtggttgaagagtgttgtttcgttactgtccatggctcggtagaatgtattccctcggtcatttcggtttttctatgtctgttttctatacaccttggtatacattagattagatacataataaaagttatatatgtaaaacagacaaaatggcatctaatttagaacggaaggaatattatgca

SEQ ID NO: 268278 - DNA, 757 bp, Zea mays
tgtgttcttgggtgtaagagacgtaacttccagcggtggttacgattacttgcttaggctgtgccgcctaagaggcaaaattgactcgaatggtgttgttgccgcatacctggaggagaggttgaacatgggtgtcaactttcttctatctgctgagattgaccattgtaagaagaactacaagtttggtttcggaatgaccgtaggagagtaattctgctaaaacaattgctgagaagagcacatgaggactttcgcagtctgctttgcattgtatgttaagatacttcaggtctcagttttgattgatcaggttctgccccgtcgaaaaaaatactagctgttgctgctttacagggttttgtctcagtgtattggtggttgtttattttcagctacttgagcatgggggccatgattctttgttcatcttggatgtaactagctgattggtgttccaatgatgttgtatttgcagaacgattttttccttttaaatcaccaacaaccaccacactaggctttttctgtaccatcatggacgggccacaagattttacagttcaaagctttggcacttgccatatttgatgtcgtcttgtgcttttgctcatccatgtcagtcagaaatctcagttcatactcagtgcttttgctcatccatgtaagtcagaaatctctgttcatatcagtttttttattaaaaaaagtttccgctgcataaaataccaacaaaataaaaaaaaggggcggccgc

SEQ ID NO: 268279 - DNA, 619 bp, Zea mays
  unsure (1)..(619): unsure at all n locations
gccagctttggttatgattacttgcttaggcagtgccgcctaagaggcaaaatagactcgaatggtgttgttgccgcatacttggaagagaggttgaacatgggtgtcaacttccttctatctgctgagattgaccattgtaagaagaactacaagtttggttttggaatgaccgtaggagagtaattctgccaaaacaattgctgtgagcgcacatgagatacttatgcagtcggcttcgcgcgtatgttgacttgttaaagatatttcaggtctcagttttgactgatcaggttttgccattgcgccgtggaaaaacacaggccgttgctgctttacagggttttgtatttcagtgttttttcagctacttgagcatgggggccatgattctttggtcatcttggatgtaactagctgattggtgttccaacaatgttgtattggcggaacaatttttacctttttaaatcactaccaatccacctcattaggccttttttgtaanatcaccccccagccgttttattttaaaccatatcaccatttagcacttgacatatttaatgctgtcaaaaaaaaaaaaaaaaaaaaaaaaaaaaaaaggcgcgcccgcccg

SEQ ID NO: 268280 - DNA, 436 bp, Zea mays
cggacgcgtgggtttttataggcactacacccgtgattattgtatctcactccggccaacaggaggctgtgacacgtacagagattaaaccataagaaactagtttatttgccagtggtcgtactttggacggcgatttggagatagtttatttgcagcggcatggccacagcccatagccccaggcaatccttgagctggcctcaccaccaagtaggtcctaaaaattaaaaaggaaacttctgggcggcggattgtatactgcctcggctcgtccataatgctggggtctccagatactatgcagaaaacgcggcctcgctttgactccagatatacttaatttattctttcgaagtctgcaaatgaaaagcttattccacctgctgcttatttttatcttcttccaatggtggaagtatcagcagctccttcc

SEQ ID NO: 268281 - DNA, 378 bp, Zea mays
ttaataattttttttttgagccgaaatgggcacgcggttataggcactacacccgggattaagaaactagtactactggcacgtacagagagaaaaccataagaaactagtactactggcactctgccagtggtcgtactttggacggcgatttggagatagtttatttgcagcggcatggccacagcccacagccccaggcaatcattgagctgacttcacaactagtaggatctaaaaaataaaaaagaaaacttctgggcggcggatcgtatactgcctaggctcgtccataatgctggggtctcccataaccagatattatgcaaaaaacgcggtcttgttttgactccagatatacttaatttattctttcga

SEQ ID NO: 268282 - DNA, 433 bp, Zea mays
  unsure (1)..(433): unsure at all n locations
aagctccatggtggttttagctctagtagctgcaattttgatggtcttctcaattccatgatcaaagcggaaaaggatgatctctcattcacggatagcgacctggggtgcgacttctttccactcggtgcttgcgtatgagacctcttaacaacccctcgtgcagattggccctcgacgggatgggatgggactacggcctacgggagaggttgtaaagtacactgcttaggagcattggccagtttatgctgcctaatgtgttactatgcttggtactgtgcacactagaaatgctagggatacaggtagctacggacatgccttgtaatctacatttcctcctcttcgaatgggaaatgaaagtgattatggttaggtaaaaaggagcaagtataatgctccaaattaaaaaanaaaaanatattatatt

SEQ ID NO: 268283 - DNA, 1330 bp, Zea mays
ctggctgtttgcaatgtattataggaagcagaaaatgagaaaagccataccactcacatgtctagaagattctgtccaacttagcaaggtttcacaagatgagggcataaaggttgacagatccatagagttctcatatgaagaactttctgatgctacaaacaactttagtatggaccataagattgggcaagggggttttggttctgtttattatgctgagcttagaggcgagaaagctgccataaagaaaatggatacaaaggcatctcaagaattcctcaatgaattgaagattttgacacgcgtccatcacacaaatctggtgcgcttaattggttattgtgttgagagttgcttatttcttgtttatgaatttattgagaacggaaacctaagctcagcttttgcactctactggtccatgagacaccttcataacccgtcccatgcagatgctggcttaggttatgaacctctctcatggaccagtagagtgcaaattgcccttgattcagcaaggggtctagagtatatacatgagcacactgttccagtgtatgtgcatcgagatatcaagtctgcaaatatcctgatagacagagacttacgagcaaaggttgcagattttggactgacaaaactttcagaaattggaactacatcacagtcactcccatcactacgagttgttggtacatttggttacatgcctccagagtatgctcgatatggtgaggtttctcctaaggtggatgtctacgcttttggtatagtcctgtatgaacttctttctgccaaagaagctattgtgagatcaacagaattcactgatgcacaaggcctggtttatctgtttgaggagactctcagcatgccaaaccccatggaagctcttcaggaaatgattgatccaaggctaggaggtgactaccccattgactcggctgtgaagattgcgtaccttgcaaagtcatgcacgcatgaagagcccaggatgaggcctaccatgagatctgtagtggttgctctcatggcgctttcatccaaggaccatgagttaactcggggacacgattagcatagcacattgtccctggggctgctttccatgtcagatgaaaacaatacaaaagctatcgtgtacagatgcaatgtattttcgttctgattttgtagcgcttaagttggctagtaacattgtgtgtagttttctttgcctgcttctctataacaacaaaaaggggatgaccgagcggtctaataagagcccccacccaattaagatgataatggatatggctcggccacttccgagccggcaatattt

SEQ ID NO: 268284 - DNA, 692 bp, Zea mays
gggaggtttcacaagatgatttcatttttgttgacagatccatagagttcgcatatggagaactttctgatgctacaaacaactttagtatggaccataagattgggcaagggggttttggttctgtttattatgctgagcttagaggcgagaaagctgccataaagaaaatggatacaaaggcatctcaagaattcctcaatgaattgaagattttgacacgcgtccatcacacaaatctggtgcgcttaattggttattgtgttgagagttgcttatttcttgtttatgaatttattgagaacggaaacctaagccagcatctgcatgggacgggttatgaacctctctcatggaccagtagagtgcaaattgcccttgattcagcaaggggtctagagtatatacatgagcacactgttccagtgtatgtgcatcgagatatcaagtctgcaaatatcctgatagacagagacttacgagcaaaggttgcagattttggactgacaaaactttcagaaattggaactacattacagtcactcccatcactacgagttgttggtacatttggttacatgcctccagagtaagtactcagggtatcaactatcttgttcctttattcagttcgcatgaatgtgcactctcaaaataatatcacaatatagttttgataggctattgtttac

SEQ ID NO: 268285 - DNA, 631 bp, Zea mays
ctgtttatccagtgggagcaacactgagagcatcctggagagtgcgaggcagcgtggcatcgagctgaatctgtcaccaacatagtgtgtcccttggatccaagctgcatgatgttttgccagtcggagatgttggtagtgttgtgttaactggagatggcgtgtagatatatcggtgatcatggtggtgtgagatcatttttgttctttaggtgcaggtttagtgggacatagtcgtcggtatcttacagcatgtgtttctgatggagtgatatggttagtaagcagtggtgaaggatacaggcatacgggcactggggcatataccatacttttggactagaccggctagagactgattttggagtccgttatgtttccgttttccgttctcttggttttctctgtcgtcaatgtattataatcatgatgatgaatggatggagaaatgagatgagatttttttgagttcactcatgcagtttcggttattatatttttgtgctgtcttcgaatctaatttggtcgacgggtcccaaagctgctgtgcgtgatttggtcgacggcatgtttgggcatgtatgtttgggcatgtttggaagtaaagtattttaaccccaggttttggaat

SEQ ID NO: 268286 - DNA, 577 bp, Zea mays
gggggggacaacgccgacagtgccaggggcgacgcccacgacggtgccggggaccatgccaatgccgggcgcgaccccagcgttgccgacggggaccatgatgccgggcactacgttcacggacgccaccccggacagcgggatgccgatgggtggtggtggtggcctgggcatcgagggcggggaacaaggcagcgtgctactcggagccagcagcggcgaaggcggcgtctcttggctcgccaacatggccaccggcgacgcgtccgccgcgggcgccccgctggtggcttcggctcggttcgtggtggcgacattgctctgcggcctccatttgcggcggcttctgctgtagtggtgatggagagggtagaggaaacccactcgtacgtagtagcactgtactgtaccttaccttacattgtagcagtgtctgtagatgattactatcaattgatgatgttgagttagtcgcaggattagccacttgtgtctgctagtactggttctggttctagttctagttctagagaagaaattaatgcatgcttgcgggtgggcattgattgattaagtt

SEQ ID NO: 268287 - DNA, 1078 bp, Zea mays
ctaatgcaaatgattcctctcagaaaagaaaaccaagtaacaataaacagcagccccctgctaagaaaagaaaagagaatccaccaaaaagtaccatgccatcagatgaccaaggatcaaatgtgcaaagtgggcacagtggtgctgttactgatgtagaagtcggaggggccagcacggagaaggtcatggcatctatcgagatgaaagtggacagtgacagccgaacagggaaatcaagttcaaatgaaccaaagccatccttttataatgacaactgtacagtttttgtgtcaaatattgacttgaaagcaaatgaggatgatctcaggcgattcttctctgatattggtggtgccacagcaataagattgctgagggacagattcaccaaaaaatcaagggggttggcctatgtggactttttagacaacaagcatcttgaggcagctttttagaaaaacaagcagaagctgcttggaaagaaagtgagtatcgcgcgatcagatccaagcaagggtaagaagagccgtgaagcaggtcaaacaagccaggataatttacctccgagtggtggtgatgatgcaaaagcaacaggatccagtggaccagacaatgaagtacccaagggtgatgcaaaaaccatagggaagaataccctttttgcaccacgagctctggttaaacctcttggatggacaaacaaggatgagaagaaaccagatgttgcaggggagttgaaatcaaatgaggagttccgaaatctgttactaaagaagtgatatcagttggcaggtgtggatctccatgccccaatccagtgccaagatttgtggtgccttcatctctatgttagaatgatggacctgtagtagcagcttgaactggggatctacaaccgttatgtcttaccccgatgtagacatgaatatttctttctgctagggagattatacaagccatgccgaattgcagggtggtgaaggtgaaaacgggacgttgcgttcgagcagaaaaaccctgcccatgtgaaaagaaaacactgaccttataatatgtgctcactttctttttgaac

SEQ ID NO: 268288 - DNA, 523 bp, Zea mays
  unsure (1)..(523): unsure at all n locations
cccacgcgtccggactgctataacgacagtttactgatcttacactgaggcactgattggggtctctgcatgctttatttttaaatttgcaggtggcaaatcgttggatccagtgacgaggtcgagtacagcccgttccctgtgcccaagcacggcttgcctgtcagattatggagacaaaacaatccggtcgacagaaaggggcgtgagaccgacgacgatcatgtggagaggatatttatttagtttgactcttgagttaggcatgaatttaaccccaagctagctagagaagttttttttcccctttgaaattcttctttgctcgcctcttcctcctggatcaaattgcgttggaggagaagaaacggcagctttctctctttcgttttctttgcctgcttcaccgctacgataatggtgaaaatatgtaagctacgtggacatcaatgatccacagcatcgttgatatatataatatatagagaaaattctctgcacggtcaatgcagntctatccggt

SEQ ID NO: 268289 - DNA, 1784 bp, Zea mays
cccactctttcgctatcgtttctataaacatgagagtttgttagtacagacaaacatttttcatacctgtgatgaatctccactggttagttatgcttacggacttccagtttcactacgaagtaaaacagtacgatgttatatctaatttaacaatcgttgtgatgagaaattttagtctgaacactgattggtggaatttccatcggtctcatttactgaacctactattgtccccatgatagtactatgtataatatgattacaatgcttaacttgcatatgctgctgagcttttattcatgaagcgtggaggacagcttatatacgccggtcccttaggtgccaaatcgcgtaatctggttgacttttttgaggcaattccaggagtgcctaaaatcagggacggctataatcctgctgcatggatgttggaagttacaagcacccaaatggagcagattcttggagtggattttgctgaatactatcggcaatcaaaattatttcaacagaccagagaaatcgtcgaggccctaagcagaccgagcagtgaatcaaaagaacttactttcgccacgaagtatgctcaaccattttgtgctcagtatatggcttgcctatggaagcacaacctatcgtactggaggaaccctcagtacaccgcagttagattcttctacacagttattatttccttgatgtttgggacaatttgctggaaattcggttctagaagggggacccaacatgatatattcaatgcgatgggtgccatgtatgcagcggtgctgttcataggaattaccaacgccacttctgttcagcctgtgatctccatcgaaagatttgtatcttatagagagcgagctgctgggatgtattcagcgttgccttttgcattttctctggtcactgtggagttcccttacatccttgtgcagtcactcatatacggttcaatcttctacagtttgggatcatttgagtggacagcagccaagtttctgtggtacctgttcttcatgtacttcacgttgctgtacttcactttctatggcatgatgacgacggcgatcactccaaaccataccattgcgcctattattgcggctccattctacacgctgtggaatctcttctgtggattcatgatcccaagaaagcgcatcccagtttggtggaggtggtactactgggccaacccggtgtcgtggacgctctacgggctcctgacctctcagttcggcgacctggaccagcccctgcttatggccgacggcgtcacctccaccaccgtggtggctttcctggaggagcacttcgggttccgccacgacttcctcggcgccgtcgcggcaatggtggccggcttctgcgtcctcttcgccgtcgtcttcgccctggccatcaagtacctcaacttccagcggcgatgagagagcaatgcaagtggttcagctagctagtatagtagccaccgccgacagacccaccaaacggatcgcagcctactgtacatgcatacaccgatcgatcagtgcaggagggcagcagcgcaatgaattatgaatgcgatgtaccagcgcgtcgtattggcacagttaatttgcccattaccccagaacatttcgccgggggtaaataatcttccggtcggtcacgggagcgagagtgagaaaaaaaagtaaagagtactgtatagccagctattcatgtacttgctgccttggccttcccttcatcgttatacggtggcgtcgctttatgcatggtttatttat

SEQ ID NO: 268290 - DNA, 755 bp, Zea mays
  unsure (1)..(755): unsure at all n locations
ctgaaggtgacagtggtgtggacgaggcccccatcaatggaaaaaatgaaatgctgctgaagggcaagggatctgtgacggccaaaaatgagcacgagcagcctgagtttgagtttcaccgtggaaatcttgaagcactagtgaggcctgttaatgttggaaggcctttgattggcggagcacccaaaaatgatgagagtgacaccttccttgaacttcaggattccatgagtgtggctagcaatactgaaactgatgatgctggtacccaagagtggtggtggaaaccgagttcccctcttgggatctctgttggcacaccctgtgctgaattctatgatgcatttgaagaaatatcaagtgatggtggaactaggtcttcacgggccatggatgatgacctccgtgaaatgaggttaagcctgttgaccgagattgagaggaggaagcaagcagaagaagcacttgagatatggcagaaagaatggaagaagctgagtcaccacctatcacatgttgccttgtcacttccatctccaagtatagctgaggatactgatgattcaagcatcgatcctggagctgagttgtgccagcaaataactgtttcacaacttgtagccgctgctatttcccaggattttgctcgtgctgaagttgaatcagagatggaaaccgtgattgccgcanagaacttcgagattgcaaggctgtcngatagggtccagtactatgaagctgcaaacagggaaatg

SEQ ID NO: 268291 - DNA, 625 bp, Zea mays
agagcgtctagacgtacaagatctacatcttcaaggtgctcaagcaggtgcacccgggcgagtggtatctcgtccaaggccatgtccatcatgaactccttcatcaacgacatcttcgagaagctggctgccgaggccgccaagctcgcccgctacaacaagaagcccaccataacctcccgggagatccagacttcggtgcgcctcgtccttcctggcgagctcgccaagcacgccgtctccgagggcaccaaggccgttaccaagtttacttcctcttagatcgccgccgcacggagcgacggctctgtttcgtttcctcgtacttttaggccagtgctaataggttgctcgaggaacaatgtagtgtggaaatttctaatatattccaaattgtgctgatataatttgcttcaaaccttgaggaggcgctgttttaatttggggttgctacagccgtacaatttttggcgccaatatcttgcttcgtattcactggggttcaatcacctgaatcatgtaatttgttcagggggataaataacatttatcaaaggattgtgagatttaaataaacaaataaaatcttaaatgctgactttggttataaaaatatacaataatg

SEQ ID NO: 268292 - DNA, 449 bp, Zea mays
cggacgcgtgggcggacgcgtgggaggaagttggcataccggacactgacatccaggcggagtcttcaagcggagatgaggagactgggaataaaactgtgacgacagaacaacaaagtgcagctggggctggctctatgaagttccatttctcgtgcactttataggggtacccgttgctctgagtgctggtaatcgacttacctggtttcggcaggcaggcatacacgggcaccacaccgactaatcacaagaggcagtggagcaactttctcctcgagagttcatttttctttgttctgaggggggcagttgaaagcctggacaacactagcaattcatttatttgtaatgatcctagcatagcagatgttgttacctacccaatgcagcgtttgtaatttttttgctgtaaaaatatcaaaggcagaaaaaagtactttcgcagt

SEQ ID NO: 268293 - DNA, 1161 bp, Zea mays
gatacgggcccttgctctcctcggcccaccgatccacgccccgcacgcacacgacccgcagaccgcaccctgtcggcgagctcgctcccgttcccgtccgctgctctccgctcgacgccgccgtcttccgcgcagctagtgtctacactcccggcgacgatggcggaggacttggttttggacacggcgatccgagactgggtcctgatcccgctctccgtggttatggtcctcatcggcgtgctccgctactttgtctccaagctcatgcgctccccggcgacctctccgtctcccgaccccaagctcgttaaggaagggcaggtggtcatcagggcgaggaacctgaggaccaacgcacagttcatcccggccaaggctttcaaggcacgcaaggtttattacaccaacgaggaaaatggattacttcatgttccaaaggaagacgcgcagaaggctcaggcagccatgttttctgatccaaacatggccatggacatgatgaagaagaacctatccatgatagttcctcagacacttacatttgcatgggtgaactttttcttttcaggtttcgttgcagcaaaaatcccctttccattgactcagagattcaggggaatgctgcaaaatgggattgacctgagcactgttgatgtcagctatgttagtagccggtcatggtatttcctcaatttattcggcttgaggggtcttttcagtctgatccttggtgaagaaaacgcaactgatgatgcacagaagatgatgcaaatgggtggtggatttggatttaacccaacaatgagtttgggagcagagaaagacagcctggatatcatgcagcatgactgggctctacctaagatggagcggcacgcagaagatgtgttgaaacagttgctgaagaaatgactcgaacggttgggcttctgggaagcaacactcgcgtcgcgtcttccagtttttgttgaagccagtttggaccaggaattttaccatttctaaatgtattatttataactagctactataacacccttagaaggtggagaccgggtgttgtgatacttaatataagtagaaaaaacgtaattctgttactttattctcctgatatttatgagcatcgtttaagcactcgtgtggtgatttctttcc

SEQ ID NO: 268294 - DNA, 377 bp, Zea mays
gctcgcatttcgctttccttgtggtcaaagatccacatccgagatgacgggggaaacaaaaggtcctctaccttccaagaatcaatatcgaatccacagttcatggcttcatgcacaccttgggaaaaaaaagacaagagatccgtgctctacgttgcaattctaattgatatcctgccaagtattcttcgagaggtccattaaaaaaaagtattcttcgaggcttgtgcacttctgtaactcttttgtaccccgtgtttaatttctgggcggcatggtatcaagagtacccagatgtatccgtcgctggtctgaacactaatttaacgcactcattcgcagtatggcaatgatgtggccaactaacggtccctttc

SEQ ID NO: 268295 - DNA, 338 bp, Zea mays
cccacgcgtccgaacatcagtatcgaatccacagttcatgcacaccttggggaagaaaagagagagaagagatccgtgctctacgttgcaagtctaattgatatcctgccgagtattcttcgagaggcccattcaaaaaaaagtattcttcgaggcttgtgcacttctgtcactgttttgtaccccgtgtttaatttctgggcggtatgatatcaagagtacccagatgtatccgtcgttgctggtctaaacactaatagggtgtttggtctgaggaatgggctagtccattctcttctcgctcttttttttatttggtttattaaatagaatgagtt

SEQ ID NO: 268296 - DNA, 404 bp, Zea mays
ctgtgccaacacctcccgctcgccccaacgtccggcaatcgtcgacgacctatgagtctgatggcacctcgtccatgttctcttcgggccccttctcaggcctcagccccttcgagaccgaaaccattccaaggactgcggttttctcagaagatctccatgaaggtccatgactggtggggggtggctgccttgccatcgccgagccgagccgtttctctagagcctgtagccatgtagtcaagcattcaaaggctggtggtccaattggcctggccagccattgggaggaaaggggtacctgtaaattccatttttctgcgccgtctcaaaagactactactagattattacaacccccaaggacgttccctggctttgtataaaaccccccgttttgttcg

SEQ ID NO: 268297 - DNA, 541 bp, Zea mays
cccacgcgtccggattttggctgacaaagagcgctgtctgaggtgcgtggtcaagtggaggcgaagatgagcaaggaggatgtgctcaaggtgcagatctctgaagccaattacgtacacattttcctaccacgacttttattctgctttccgtttctcaacgtcttggacattgccggcgagcgcggtctcctcgacaacttctactgctaactcgggtgcaagatgcccagcaaacttcccaatccagctgccggcaaggagatgaggttcccgacggcgacaattttccactacacaaccggattcttcagcagcatatggatccgttgaagcgccgtgtgacaatgccaccaaagagcagcaacaaacaagctcaaagtctccgctaaccactaatctcataaagcttgaattttctcattgctatgtttccttctcctagcaaagttaagatgtttgcacatttctagcttattaggtccttgtgtggaatgtgtttgaacaatgatctcatttaaacaatatcaacatgtgtgat

SEQ ID NO: 268298 - DNA, 483 bp, Zea mays
tgtcccccagtttttcaatgccaatccgataggtcaaaatggtggatatgaccttagtcgttcagtatttgagcttcaaatcaacgaccaacgttttgaggatgcagaggaggaacaggagagccatgaaaataatggacattagaaacagagacatgttcctcgagagcatcatgtgatttattttgttgtaaatcactaccgatgcagctcggtttgcctactgtttcatctacactttctcttcctttttccttgatgttataggattaacatccctgggtgcctttctggaattgcatcgatggttccttttggtgagaaaaggtcttgctgctggtcaagaatgtaacttgtagagcatgatgccccaccgtgtgaaattagttccggccttttgatccaacaaatagaaggtcgaattgggaaaggagataaaaaaaaaaattaaaaaaaaaaggaaaaaaaaaaaagggcggccgc

SEQ ID NO: 268299 - DNA, 1035 bp, Zea mays
gtgcaccttttgtccttcaggcattgggctacaactcaggtgatgtgttcatcaagagagttgtggctaagagcggggacaccgttgaagtaagcttttatcccaatggtacgtgatggtaacttgttggttaatggagtagttcaggaggaggaatttgtgctggaaccagccgactacgaaatggatccgctgactgtgcctgaaggctatgtctttgtcctgggggataacagaaacaacagctttgattcacataactggggtccacttccagttaagaacatcctcgggagatctgtgctccgatactggccaccatctaggataacagatacaatatatcagcatgacatggtgcagcacacagctgttgcatcctgataatacattgtggcaataccacgtggtgcacgccaatttctcctttccctgcatagctttattgacaattgatatgcttagccgtggggttctttatttatttgttgtagccttgcctcaaatgtcgattgggcagcttggctgacagattagtttttttttccctccctacgggcagatgcttgtttaaagacagcaattcttgtactccgtagctaagaatgaatgccatataaatgttgcagtagatgaacgagcatcaaggagtgtaggatgaggatggcagttcttttgttttatgagatgagatggtgctctaaacttacgtaaaggaaatacgaagcatagaagagtgcccaagttgtgttatgtatttttttcattccttgatcttggatcaaagattcaaggcaaagtcagcctggtgcaaaggttttggttgaatccttgtatcctgccagataaggttttttgatggtgcaattttggattagcatttgccctagtatttagtgttttttagttctgtattcatttatgatgtaatacaactttgtgagcatagttctgtttggcctgctttgttcaatcgcagtgcgggttcaatactacgttgcctgatgttattgtctgttattttctttgtaaaaa

SEQ ID NO: 268300 - DNA, 607 bp, Zea mays
  unsure (1)..(607): unsure at all n locations
ggaaattctggacactgtgatctttcgggcacctccagtccttcaggcattgggctacagcgcaggtgatgtgtttatcaagagagttgtggctaagggtggggatatcgttgaagtacgtgatggtaacttgattgttaatggagtagttcaggaggaagaatttgtgttggaaccagccgactacgaaatggatccgctgactgtgcctgaaggctatgtctttgttctgggggataacagaaacaacagctttgattcacataactggggtccacttccatttaagaacatccttgggagatctgtgctccgatactggccaccatcgaggataacagatacaatatatgagcatgacatggtgcagtacacagctgctgcatcctgatagtacattgtggcaataccacatgctgcaggtccatttttcctttccctgctgacaaagggttatgctgagcctttagggcttgttcggttattttcaatccatatggattgaaggggattgatacggattgagggggattntgacttactagggattgaaacccnctcaatcccnctcaatccatatggattgggatataaccgaacaaaccct

SEQ ID NO: 268301 - DNA, 345 bp, Zea mays
acttgatatcaggcaagaatctgaccggcttactgatgttatggatgctataactgaatacctcggtattggatcataccgtaaatggccagaggagaaacgccaagaatggctactatcggaacttaatggaaagaggccgttatttggtccggaccttcccaagtcagatgagattgctgatgttctagatactttccacgtattagctgaacttccatcagacagctttggtgcatatgtaatatctatggcgactgctccctcagatgtccttgctgtcgagctcttgcagcgtgaatgccatgtgaaaaaaccactgagagtcgttccattgttcgaaaa

SEQ ID NO: 268302 - DNA, 713 bp, Zea mays
tgctgcttagttcgacgaagaacagtcagcccaccttgtccctgctcactcaactgaagcagcagaacaaaccagataagttaggtcccacaccggaaaatgagccgaactcggacacgatgttgaaagcctggggtggcagccaccacaagagcatttcctccacacagcgccatgacgctgaatccctccaatcagccctcccgtgggccggcctagcccagaatgacaggttggagtcagaaaagaacagatattctgattccgtgctagtctcatcggctttctattctgcagacggtccacaaactacctgccttacacctaacatgacacaagtgcagcaggactgcatatcaagctcctgggagatgcctcaaggtggacctctaggcgagatcttaacgaactccaagattagtgaggactcaagcaagtgtggatctaggtcatatggttggctattgaatcttgaccatgcaccatgattcctcaatccatggagagcttgacatagatatctcaccacggatgcaaacaatgagtcaggaaaaaagaaggtccaaatgaccgtactgtttaccccatgcatgctcgttatctacatttgtacttctatttttgtagtattcagctgttgaattatcagttcttctgaatctggctgtatcttaaacaaattctagtttccgtccaatgatatcttgcttgct

SEQ ID NO: 268303 - DNA, 1311 bp, Zea mays
cccacgcgtccgcccacgcctccgctcgcattgcattgcattccttcagttcagtagtgtgctctgacagtgagatggcgagcgtgaaggttttcgggtcacccacctcggcggaggtcgcccgcgtgctcatgtgcctcttcgagaaggaggtggagttccagctgatccgcgtcgacgcctaccgcggcaccaagcgcatgccccagtacctcaagctgcagccgcaaggcgaggcgctcaccttcgaggacgagagcctcaccctctccgactccagggggatcctccgccacatctcccacaagtacgcgaaccagggcaacccgtacctgattggcacgggcgcgctggagcgggcgtccatcgagcagtggctgcagacggaggcgcagagcttcgacgcgcccagcgccgagatggtctacagcctcgccttcctgccgcccaccctgcccaagcagaacgacaacggcaacggcggcgcgttcaacgccagggacgccaccgtaggcagcaacgccgacgcgtccagcggcaagcgcggtgtggccgggtcacagccggcggcgagccagaccaaggtgagcgcgcagaaggaggaggagatgctgaagctgttcgagcagaggaagaaggacctggagaagctgctggacatctacgagcagcgcctggaggaggccacgttcctggccggcgacaacttcaccatcgccgacctgtcgcacctgccctacgcggaccacctcgtctccgacccgcgctcccgccgcatgttcgagtcccgcaagaacgtcagcaggtggtggcacgacgtctccggccgcgacacctggaagtacgtcaagaccctgcagcgcccgccgtccacgtccaccgacgccagcgccaagaacggccagctgggccagcagcagcacctgccgtcgtccaccgacggccacggcgtgaagagccaacggctggtccagaacgagcggcacttctagccgttgccgtcccttcccgccgacgaataaactacctgcgccgccgccaccgccgccgtccatcaacatgcttccttgtgctgttcgtgtcgttttcatacgtcatacgtgtcttgctgcttttgaagctccgttcccgggtgcagggacctacgagtccattccgtcgtttgctgattctgttcgtcgtgtaataaaatgaaaaccccaccccgttttgaatgaaattcaattctcagtgtcgtgtgaaatatactcgattgtaagagttttgatcttgatgttgtcaaaataacgtccacatgatcggaagtcttgc

SEQ ID NO: 268304 - DNA, 424 bp, Zea mays
tatctgcaacgtcaaatcaacacaggctgttgtttgcttcttttggtaaaggctttagctgcggcagatccaccggcggcgccccgagaatcgaagatgccggtgaaggtgttcggatcgccgacgtcggcggaggtcgcccgcgtcctggcctgcctgttcgagaaggacgtcgagttccagctcatccgcgtcgactccttccgcggcaccaagcgcctgccccagtacctcaagctccagccgcacggcgaggcgctcaccttcgaggacggcaacgtcaccctcgtcgagtcgaggaagatcctgcgccacatcgccgacaagtacaagaaccaggggtacagggacctgttcggcccgggcgcgctggagcgggcctccatcgagcagtggctgcagacggaggcgcagagcttcgacg

SEQ ID NO: 268305 - DNA, 551 bp, Zea mays
  unsure (1)..(551): unsure at all n locations
tcgtcacgcgtccggagaaagtttaccagggtcaattggttggtccaaccacatttgaagcaaagttgcagcctcatcttctttggagtcttgatcaggtgaaagagaacatcaagacccagacacatcaacttatagatgctcgatcaaaacctaggtatgttactcatattttaattatgatgaagtctataagtacatcgtacatgcatgcagcatatactatatactgcctctgcctgtatctgtaagattctgcttaatattgatggtggttttctgaaggctacatgcatttggtagtttctatgactgcttgaaagtatgttcttctctcttttcttttgagaggcacaacagttttttttaagtcgtttgtaatgaaataattcctcagcatgcagccgctcagtgcatactgtaagcgaactagccctaagtggtttgcattcaggaatcaggacaaatactgatataacttatgttttagatattttggtcacctaagcntttttttggtatttaagtatcttttgatttaccagcacaca

SEQ ID NO: 268306 - DNA, 1426 bp, Zea mays
ccgaaccaccccaaccaatttcctccttaacgaactttttagaacccggtccagaaccctacccaaccatggcggtctgcctcctctcccgcgccgccgctgccgccgcggcgctgcgcggcgcggtccggccgaaccacctcctcgctcgggcctccctccccaagggtcgggtcgggtgggcggcgcgcgcggcggagggcgccggtgggccccggtgcggcccgtcgccactgctgggcgcgttcgggatcgccgcgcggtgcaacgccacgtcgtcttcgtccgcggtgtccgaggccaccggcgtccacacagtgcccccgacggagcccgtggtgtcggccgagtggctccacgccaacctcaaggaccccgacgtcaaggtacttgatgcctcttggtatatgcctgcagaacaaaggaatccattacaagagtaccaggtggcccatatccctggtgctttgttctttgatgttgatggaatatccgacagaacatctagtttaccacacatgctgccatctgaaaaggcattttcagctgctgtatctgctcttggcatctacaacaaagacgggatagtagtttatgatggaaaggggctgttcagtgctgctcgtgtttggtggatgttccgtgtatttggacatgataaagtttgggtgttggatggaggtttgccccaatggcgcgcttctgggtatgatgttgaatcaagtgcctctagtgatgccatcctaaaggccagtgcagctggtgaagcaattgagaaagtttaccagggtcaattggttggtccaaccacatttgaagcaaagttgcagcctcatcttctttggagtcttgatcaggtgaaagagaacatcaacacccagacacatcaacttatagatgctcgatcaaaacctagatttgatggtgcagttcccgagccacgaaaggggattagaagtgggcatgtgcctgggagcaaatgtgttccgtttcctcaggttcttgacagctcacaaaagctattgccttcagatgagctccgtaaacggtttgagcaagaaggaatatcacttgatcagcctcttgttacctcttgtggcactggtgtgacagcatgtgtattagccttgggccttcatcgacttggcaaaaccgatgtcgcaatttatgacggatcgtggaccgaatggggcgcccatcctgacactccagttgcaactgctgtttagtctcttcataataggacgcccgtgctcttcatagaggacctcttgattgtatttgccccgtgctgtgattctatggaggttggttggatgcttggatgtaaggctggggaagcgaagccttttggccttcactgtaaaagctgcaacagaaaaactgtcacatgcactgaattataagataactccccttgatctct

SEQ ID NO: 268307 - DNA, 386 bp, Zea mays
atcgaagagaaagggaggcacatcgtggagaagatgcgagagaatgctaggaccaacagcatggagaggaccagtagctagcgaggatgcaaggatcggcatcttgtttcgttgatttgggaagtggtgtataggctgaacttgtatgttttctttgtagagttgtgcaacatttagggttccacgagagctgatctattatgtgggtgtggcggcggcaaatatgcatggatgggatgagcggtgtacttgtgacctcatgttagtatcagcttgtggaatactatgaaaaatgcaggtgccaatgcctttcaccatgctactagttagtttgtctgctacttgttcccaagtttaagaatgtgatcaactgtgacaccttgttt

SEQ ID NO: 268308 - DNA, 635 bp, Zea mays
tgttgtgaacaacttcacgttccactatgccctctatgttcttatgaactggctcactacctattttgagctaggccttaagcttagcctccaggatatgggttcctcaaagatgcttccctatttcaacatgttcattttctccaatatcggcggtgtggttgctgatcacttgattacaaggaggattctatctgttaccaagacaaggaagcttctgaacaccatcgggttcatcgtctcagcgtttgcactcatggcccttcctttgttcagcacaccgtcaggcactgtaatgtgttcagcgatatccctcggttttcttgctctaggaagagcagggtttgccgtgaaccatatggatgttgctccgaagtttgcagggatagtgatgggagtctcaaacacggcggggacactggccggaatcgtcggtgtcggcctcacgggcaatattctggaggcggcaaaggcttctaacaaggatctaacggactcggaaacctggaaaacagtcttcttcgttccagcatatctttgtattttcagttccgtcatttttttgatcttttcgacaggcgaaaagatctttgaataaagggtggttattactttttttgccaattcttttctta

SEQ ID NO: 268309 - DNA, 373 bp, Zea mays
tccttgtcaggttcaggctcaaacattgcagatgcaggctgaggctgcattagctgtgcctggtagttggtgcatgctgtgtatcttaagggtcacagcactagtagtgtacaactaggaatatgtgtgtcgaatccatttgtaaaatagcagccgttattgtttgtgtggtactgatccagcttttttttagaagaaaacatgtgttgccatcccgagatggctggacaggtgttgctactattcgcgccgttgccgggcaatatcgtgtgctatctgcatcgttatttctgccactacgtgacgttgtctgtaatagaggatttgtactacattgtttatatagtgaagtattgtttatataatgaagttc

SEQ ID NO: 268310 - DNA, 679 bp, Zea mays
caatgtagtagagcctgagtgaggaggagcagggggaggacgaggctagggttgcgtcggcgatggcgtcggcggcgaagacccttgcacgggttggatcatccctcttcggccgcattctcgcgtctccgtcctcgtccataccccgcgccgggctgccgctagccaggctgcagccacacgtcccgccgccggcaccggcgggcggtggacgctgacgaggcggagaccgtcgccaggctgagctcgctccccggcgagatctccttcccctgcggcctcccctcgctccgcttcttcatcgacgacgttgaggatcctgttgctaatgaccctctccagttgcttccgaaaagaacttaccagcccagtaccatcaagcggaaaagaacccatggattccttacacgtaaatcgaccaagggtgggcgcaaggtgattgcccggagaatcgccaaaggcaggcacagaatctcagtttagctagagcgcggaatctcagtttagctagatctcgctcgtagcagccctggatgttttctgtaacacagattcgtatcgtgttcgttctatggttagcactctgctgaaggtgagcccccgcgcaagcagcagtccatgtatggatttttattgtgaaacttttttttgggtggtttcagtcctggccatccgtagg

SEQ ID NO: 268311 - DNA, 665 bp, Zea mays
aaactctagctgatgggctgcatattctctcaaaggaaaaaacgggggttgcagtcattgacaggaaaaccagccgtctaattggatcattacagtgcagtgatctctacctgtttctagatgacagcacccttttcagcaagcgaacgacaactactctggaagaattaatcagcctgaataacaagaccgacaggaaatgcagcaccgctgaaaattcatgtgcgcctggccgaaacatcctcgcgctcaggagcaggcagtcaggcatggtgggcctaccagccaccaacctggaatccgacaccctaaagcaagcgatggagaagctgacaactttaaggagcagctgcagcttcatcgtcgacgagcacgggcgcgtccaaggagtggtgaccacaagggacatcatctccgtgttctccccgctgtgcatggactcgaggattgacggggccacgttcttctcgtctgcgctcgagcaggctggctgccgcgttgagaacgggcagatgtttcagaattagtttcagacaaaactggaatgcagggaggctttagtttgttgcagtgaggaagatgtacatggcacttaccggctatgttgccctgatacgaggcactctggatacgggatacgtcgatactctgatacgctatttttc

SEQ ID NO: 268312 - DNA, 1130 bp, Zea mays
  unsure (1)..(1130): unsure at all n locations
gttcttaacaccgcctaatgaagcaaagagtctgctgcggactggtcggcgaatggtgattatcacacgggccgacttgtgctgaatccagaggcagcgagacaccggatcccgtccgcccccggaccaagaatcccaacctcacagcgatggcagcatcccgcagcgaggaacgtgatcagaatcagccagtggtgcttgtgacggggtgctcggagggcggcatcggccacgcgatggcgcgcgccttcgctgcggccgggtgcgccgtcgtggccacggcgcggtcacgcggttccatgcgcggtctcgacggcgacccgcggttcctgctgctggagctcgacgtgcgctccgacgagagcgcgcgcgccgccgtggcggatgcgctgcgggagcacggccgcatcgacgtgctcgtcaacaacgctggggttcacctcgtcgcaccactcgccgaggtgcccatggagtccttccaccaggttttcgacaccaatgtctatggtgcaatgaggttaattcaatctgttatccctcacatgatggaaagaaggaaaggaacaattgtgaatgttggaagtattaccgctctggcacctggaccatgggctggtgtgtattcagcatccaaagctgctcttcatgcattgagtgactcgttaagggttgaactaagaagcttcggcataaacgtgatgaccgtcgccccaggagggacgaggtcgaatcttgggaattcttctgcagccaagtatgatcagatgcacgagtggaagtactacaagaaatacgaggaagggctccgagccaggactggcatttcccagggccccaggtccactccagcagaagagcttgcaaaggcggtggttgcatcggttctaaagaagaaccctccagcttggttcgcttacggccagtactctgctattctgtcgattttgtattatgcaccgctatggttcagagattgcctctataagtttgtcatgaaatgttagtccctggaagaataatggctgtatggaccaaagagagagctggacaggcccagttcaaancatttcattgtactgacaagcctgtacgtcgtactcctataatggatatttagaactatgctctgt

SEQ ID NO: 268313 - DNA, 330 bp, Zea mays
  unsure (1)..(330): unsure at all n locations
ggaanagagaagttctggagagtttgccttgttgtctcaaaagtctgctgcgatatccacgcagaaaccagtggtggttacaaaacagactactctgccagcacctcctcagaataggtttaagcttgacaatcggaccacatcattcagaattcttccacctttgccacctgaaattgcaaatgaatctgtcttggcagaccatttctcatcatttggggatctttcgtcggttggcctggaagatactggagcccataaccttgatgcaaccctaaaaccttcgctgagttgctcagcttgggggacttacacaacacgacaatcaac

SEQ ID NO: 268314 - DNA, 513 bp, Zea mays
taaatttggatggtttttcctattctacttggttcacatcgccttctgcgtgtacgcagctgtttctccttcgattctcttcgtggggaaatcgttgaccgggattttcccagcaatcagtttgataggcgacagcgtgattgtcgggatcttctacttcattggctttgcactgttctgcctagagtcttcgctaagcatgtgggtcattcagcgtgtttacctctacttccgaggaagtgggaaggaagcggagatgaggcgggaagcagcacgcagtgctcgcgagggcagcattttgacgaaccgtgtatatattatatagcacggcgtgcgttttgttcatagtttgaagtgtttgtagatcaacatacatatgtagagtagtgttgccgtgttggtgtactgtaaatcttcagaatttttcttaccagtatttttagccctaataataaaattgtaatgatgatctcactcaagcttttagggggaaaaatatatacttacgttgtc

SEQ ID NO: 268315 - DNA, 539 bp, Zea mays
cggacgcgtgggtagctgacgctttggctgaggttaacgaaggaaagattccagaggatcgagttgcacttcagttgcttgccaaggagatggcagaatggccagacattgagatagaagctccaaaaaagaagagcaaacctgggaaatctgtctatgcaaaagccacagatactggcatcgatcctgagacagctgctaaaagacttaaccttgactgggactctgctgctgatatagatggcgaagaggaggacgatgatgaaactgaagtgccgtctgcagtgggatatggtgccttgtatttgttgacagcttttccggttattattgggatctcagtcgtcctaattcttttctacaattctctgcagtagctcctccccttcttgagtgagaatgtgagatgttgctgcattcttgtaaatctgagttacaaggctagttaatcagtaacattttttacgccagtgttgcaaagatatgacaacttgtatagatgtcaaattccaaattttggaattgtagatacttttttt

SEQ ID NO: 268316 - DNA, 628 bp, Zea mays
agaaaatccacgattgtcaacatatgacagacggctcccctgctgtggctgtggaataggttggtcttgttttcttctaggtttcttgtgccctatcatttggtacgttgcagctcttctctattgctgcaagtactataatcgggatcctcgtgaacggactggactcgcagcttccgctgttctggcggttatcattacagctgtaactattgtaaccctgtctgttctgctgatatgttgtgtcaacaaacggttcttgaatagctgtgcagtttggcctaagtgatagcagcaagatatctattgcaaaacatcagcgttgaactactaactgaaatattctttagattctttagtcagtgcacttattgttggactgcaaaagggaaatcaccaaattatgtgtaacatgatccattatcacctgtgactgtacattacagattactggacctgtggaaattctgaagctatatgcagcaattccttctctcccctgaaacttttgaaccaatgttgttactgataattggcctgatcagaacaatcagagttcagaacttgtatccaatctggctgaaattacatcaccagattaatctggaatggaaattgtgctgagagg

SEQ ID NO: 268317 - DNA, 969 bp, Zea mays
gacccacgcgacctttgggtttgaaggtggccgatggtgaatttgccagatgcatgaaatatgctatagacagtgactgccatcatagccgaggactatttggcagacgatgttgatctagaagctatagctaacttgacagaagggtactcgggtagtgatctcaagaatctttgtgttactgctgctcatcgtcctattagggagattcttgaaaaggagaagaaggagagagcttcagcagaaacagaaaataggccattgcctctgtcgcacactagcaatgatgtccgtgcattaagaataagtgatttcatacatgcgcatgaacaggtgtgtgcaagtgtttcctcagattccagtaacatgaacgagcttgtgcaatggaatgatctctatggagaaggcgggtcaaggaaaaagacaacgctaagctacttcatgtagctgatgttgcaagtatatcgggagaagtgccctggcacaaagcagaaatggttggaggcagttgggggtgtgtatcgggtgcagttggaaaagagctaggttcacctgccatccatccattgagagaattgatggctcaggtggagcggaatggagtagtatacacattggttgctgcctccactctgggccatgtatcatgcatctggacatgacggatggtctggcttgcagttgtcctaacaacagttttgagtgcaacatatcactgtctgggaaagaaaagaaaagaaaatataccatttgtgttgttcccactccacaggaagcacggcgacgacatcgcccaacaacccttttccatcgtttcttaaaaaataattcattatttaggttgtaaacatttagagcctgtgcaagtgtacagtatgagcatcaggagtattaacctagtgttgatgtctatacctaatctaatttattgattagaatcatttaacatgaaatacatgattattttgt

SEQ ID NO: 268318 - DNA, 500 bp, Zea mays
cccacgcgtccgcccacgcgtccgtgaactgggatggtctgagaacaagggagaaagaacgtgtattagtacttgctgcaactaacaggccatttgatcttgatgaggctgttgttaggccgcttccaaggaggttgatggtgaatttgccagatgcatcaaataggagaaaaattcttagtgtaatactagccaaggaagatttggcagacgacgttgatctagaaactatagctaacctgacagaagggtactcaggcagtgatctcaagaatctgtgtgttactgctgcacaccgtcctattagggagattcttgaaaaggagaagaaggagagagcttcagcagaaacagaaaataggccattgcctctgtcgcacactagcaatgatgtccgtgcattaagaataagtgatttcatacatgcgcatgaacaggtgtgtgcaagtgtttcctcagattccagtaacatgaacgagcttgtgcaatggaatgatctc

SEQ ID NO: 268319 - DNA, 1368 bp, Zea mays
tttagcgccagcggcttcatccgatctccttgtcacctcctcacctcaggcgcacaccgatcactctcttccctcctccagcagtccagctcacacccaccgccccaccccttccactcaaatccagggacatcgcagatccaccggctctccgatccgctcgcctccgcacccgcccgatcggatcccgcagtgttgatggaacactgaattgtggatattcaagttttagaggaagaagggcaagcatggaagatttctatgatataaaagcatctaaaattgatgataaacaaataaatctcttcggaatttttgatggtcatggtggttcacgtgctgctgagtatttgaaggagcacttgtctgagaacctcatgaaacatccggagttcatgacaaatacaaaattagcattaagtgaaacatatagaaagaccgattcagagtttttggatgctgaaaggaatactcatagagatgatgggtcaacggcatcgacagcagtgatggttgctgatcatctttacgtggcaaatgttggagactcgagggctgttatatcaaaggctggcaaagctattgcgctctctgaagatcacaagccgaacagaagtgatgagaggaaacgaatcgagagtgctggtggaatagttatgtgggctggaacttggagggtaggtggtgtacttgcaatgtctcgggcatttggcaaccgtctcttaaaacaatttgttattgcagaccctgagattcaggaacaagaaataaatgatgagttggagtttctaattatagctagtgatgggctgtgggatgtggttccgaatgaggacgctgtttcacttgtgaagatggaggaggatcctgaggcagcagcccggaagctgacagagactgcgttctcccgtgggagcggcgataacatcacctgcatcgttgtgaagttcgagcatgacaagcctggcggcggcggctactcgcctccaggcgacaagagttgattccatttgctgttggttatacgctttgccggtgccccttttaccctgggccggattttgctggccccatccatggtgccccccgcggctggtacttgaggaaggagctggttcatgttcgtcgcctgtcttgtctatatttatgcccctaattttggtctccggtcagtggggttaccggcgggcagtgcttgcccatttgcatgtttatcgtgggttcatcgtcctatacggcattgttgtagacttgtagttgctgttgcctgttgtatcaatgagagctaattctgtgaggcgcagggggatgggtgcactttgagatgttcccggaccgatctccttgcaaacacctccgctgcactgt

SEQ ID NO: 268320 - DNA, 412 bp, Zea mays
  unsure (1)..(412): unsure at all n locations
ccgatctctcacctctcttcagccacgcacactccctccttccctccccgatcactgctctccctctccagttcacacccaccgccccacctctcccactcaaatccagggccatcgcagatccaccgcctccccgatccggtcgcctacccagccgcccgatcggatcctgcagggtttgtgcccgccgtgagttagatggtttacgatggtgccgtgaaggaccaggaccaggagagcgcagcggcgagcactgcgttggcggcatcggtggtggcggcgtctcccgagcaggtggtggtggggagcacgagggtctcggcgaggccgccgcaagacaagcgcctcggcgtgcgccaccccttgaagcaccgctggttccgtgcccggngtaaggtgatggtggagctcg

SEQ ID NO: 268321 - DNA, 388 bp, Zea mays
ggccgcttctgtctcctcttcttcccccgcctcggagcgccagcggcttcatccgatctccttctcacctcctcacctcaggcgcacaccgatcactctcttccctccgccagcagtccagctcacacccaccgccccaccccttccactcaaatccagggacatcgcagatccaccggctctccgatccgctcgcctccgcacccgcccgatcggatcccgcaggtgagccccctccccctccattgtccccggcgcgccgtgctccgctcgctcgcatctgctgctgctactcatgctgctggtagggtttgtgcccgccacgagttagatgggttacgatggcgccgtgaaggaccaggaccaggagaccgtggcggtgagcact

SEQ ID NO: 268322 - DNA, 541 bp, Zea mays
tctcgtcggggcggctcccgctcctgcggtgctggctgtggtggcgcccatggaaatgggccaggacgaggagagggcggagaaggagaagaggggcaaggagagggaaaggcagacggagcgggagagggtggatgaggccggctacatgagcggaggatggcagagtgttgctcgtacactgaattgtggatattcaagttttagaggaacaccggcaagcatggaagatttctatgatataaaagcatctaaaatcgatgataaacaaataaatctcttcggaatttttgatggtcatggtggttcacgtgctgctgagtatttgaaggagcacttgtttgagaacctcatgaaacatccggagttcatgacaaatacaaaattagcattaagtgaaacatatagaaagaccgattcagagttcttgggatgctgaaaggaatactcatagagatgatgggtcaacggcatcgacagcagtgatggttgctgatcatctctacgtggcaaatgttggagactcgagggctgttatatc

SEQ ID NO: 268323 - DNA, 1322 bp, Zea mays
cagaaggccggcctgtttgtacatatctgcatcggtccctacatttgtggcgagtggaacttcggacggccatgcagggtttcactgagaaaattgtgggaatgatgaagagcgaaaacctctttgcatcccaaggtggcccaattatcctctctcagattgagaatgagtatgggccagaaggcagggagtttggtgccgcaggtcaggcatatatcaactgggcagcaaagatggcagtcggattgggtactggtgtgccgtgggtgatgtgcaaggaggaggatgcacctgatccagtgatcaatgcatgcaatggtttctactgtgatgcattttctcctaacaaaccttacaagcccacaatgtggactgaagcttggagtggctggttcacggaatttggtgggaccatccgccaacgaccggttgaagatcttgcatttgctgttgctagatttgtacaaaagggtggttcttttatcaattactacatgtatcatggaggaacaaattttgggcgcattgctgggggtcccttcatcacaacaagctatgattatgatgctccaattgatgaatatggacttgttagagaaccaaagcacagtcatcttaaagaactccacagagctgttaagttatgcgagcaggctttggtttctgttgacccagcaattactacccttggtaccatgcaagaggcccgcgtcttccaatctccatctggttgtgcagctttccttgcaaactacaattctaactcctatgcgaaagttgtgttcaacaatgagcaatacagcctaccaccttggtcgattagcatccttcctgattgcaaaaatgttgtttttaacagtgccacagttggtgttcagacatctcagatgcaaatgtggggagatggtgcctcatcaatgacgtgggagaggtatgatgaggaggttgattctctggcagctgctccattgctcaccacaactggtttgcttgagcagcttaatgtcaccagagacagcagtgattatctgtggtacattaccagtgttgacataagcccatctgaaaactttctacaaggcggtggcaagcctccgtctctgagtgtgcagtctgctggtcacgccttgcatgtctttgtcaacggacaacttcaaggatcttcgtatggtaccagggaggatcgatgaattaaacttaattggcaatgttaacctttcagctggtactaacattattgaactcttgggtgttgcttgtttttcgtcctatgttggattgcttttttcattcttgtttttcccccttagattttttctttt

SEQ ID NO: 268324 - DNA, 1636 bp, Zea mays
tttgtggtacatcaccagtgttgacataagctcatctgaaaactttctacaaggcggtggcaagcctccgtctcttagtgtgcagtctgctggtcatgccttgcatgtctttgtcaacggacaacttcaaggttctgcgtatggtaccagggaggatcgaagaattaaatataatggcaatgctaaccttcgagctggtactaacaaaattgcactgctgagtgttgcctgtggattgccgaatgttggagtgcattatgagacgtggaacaccggcgtcggtggtcctgtcgtgcttcatgggctggatgaaggttcgcgagaccttacttggcagacctggtcctatcaggttggcctgaaaggcgagcagatgaatctgaactccatagaaggctcaggctcagttgaatggatgcaagggtcactgatagctcaaaaccaacagccgttggcctggtatagggcttacttcgagactcccagcggggacgagccattggctttggatatgggcagcatgggcaagggccaggtctggataaacggacaaagcattggacgctactggacagcgtatgcagacggggactgcaaagggtgcagctacaccgggaccttccgggcacccaagtgccaagcaggctgcggccagcccacccagcgttggtaccatgtgccaaggtcctggctgcagcccagcagaaacctactggtagtcttggaggaactgggtggtggggactcgtcgaagatcgccctagccaagaggtcggtctcgagcgtctgtgccgacgtgtccgaggaccatccgaacatcaagaagtggcagatcgaaagctacggcgagcgcgagtaccacagggccaaagtgcacttaagatgtgcgcgtgggcagtccatttccgcaatcaaattcgcaagctttgggacacctacgggaacctgtggagatttccagcaaggagattgccactcagctaactctcacacagtcctagagaagaaatgcattgggctccaaagatgcgtcgtcgccatctcccccgagagctttggaggagacccctgcccgagcgtgacgaaaagggtggcggtccaggcagtatgttctcccgtcgcgtagccttacttctccaagcaatggatttggaaggcggtcgacaaaaaaaaaataaaaaatggtcgaaaccagtgcagggtgagtggaactgtaagtatcgtcgactttgattattagatgtggctggcttgagaggttagcagcattcgttgtcggattccagattaggatttgtagtctgctgcatctccatgaattgttcaaagcggccggctggataatgttgtagctggtccaggaatgcagctgtagagagagagagagagagagagagagagaggagtggaggcagaagagtgactgattatgcattcttttgctgtggtgttagtagctgtgtacccgtgacacatgtcgtctttcttggaacggagaaagatgcaggtgaagtgtgcattgtgcccttttgttctactgctactgctagtggtaaggcaggagccttgcaattgtcgggggagaattgtctgtaagactgtaactgatgagaacagtgccttctttttctgaagg

SEQ ID NO: 268325 - DNA, 652 bp, Zea mays
atcgagagctacggcgagcgcgagcaccgcagggccaaggtgcacctgaggtgcgcgcacgggcagtccatctccgcgatcagattcgcgagcttcgggacgcctgtgggcacctgcggcaacttccagcagggaggctgccactcggctagctctcacgctgtgctagagaagagatgcattgggctccagagatgcgtcgtcgccatctcccccgacaacttcggaggagacccctgcccgagcgtgaccaagagggtggcggtcgaggcggtgtgctctcccgccgcttaggcttagcctgcccgcccgcccctacttctccgactccccgagcagcggatttgaaggccgaaaccgactgtgtgtggagagtggaactgtaagtatcgacttgcattagtcggagggaggtttagcattcgtccgtctgattccggattaggattggtgctctgctacgtctccatgaactgttcaaagcggccagctgggtccagggatggagctgtagagagaggagtaggagtagaagactgatcatgcgttctttgatgtgtgaggagtagggggagaaaaaaaaaaagaacaggctttgatgttctcagaaactcaagttcagatctaatagtgcatggaaaatcatgaaccc

SEQ ID NO: 268326 - DNA, 1541 bp, Zea mays
tcggttttcatggcatttatcccccacctacaatctcaggcaagccgccattactgagagccccaatcgcacatcgggtcgtggcaagctcgcgacgcggaagcgccaccgctcccctgtccgtctccgtccacctcctgtgccggctgcctgcctgcctaccacatcaatcagtgtgaccatccagcacattcccatgacgtgccacgccagcctgctgctgccggcgctcgccgccgtcctgctctgctgccccctcgcgcaatgcgggcagcagaactacacctccatgttcagcttcggcgactcgctcaccgacaccggcaacctgctcgtgtccagcccgctctccaaccacatcgtcggccgctacccctacggcatcacctacttccaccgccccaccggccgctgctccgacggccgcctcgtcgtcgacttcctagcgcaagcgttcggcctgccgctgctgcagccgtacctgcagtcccgcggcaaggacctgcgccggggcgtcaacttcgccgtcggcggcgccaccgccatggatccgcccttcttccaggagatcggcgcgtccgacaagctctggaccaacctgtccctcagcgtccagctcggctggttcgagcagctcaagccgtcgctctgcagctcaccgaaagagtgcaaggagtacttcagcaagtccctcttcctggtcggagagatcggggggaacgactacaactacgccttcttcaagggcaagaccctggacgacgccaagacctacgtccccacggtcgccgccgcggtcaccgatgccaccgagaggctgatcaaggccggcgccacgcacctggtggtgccggggaacctgcccatgggctgctcgtcggcgtacctgaccctgcacccgggccgcaacggcagcgactacgacgccgccggctgcctcaggacgtacaacgacttcgcgcagcaccacaacgcggtgctccagcggaagctgcgggcgctccgggcgaagtacccgcaggcgaggatcatgtacgccgactactacggcgccgccatgtcctttgccaagaaccccaagcagttcgggttcacgcatgggccgctgcggacgtgctgcggcggcggcgggccgtacaacttcaacccgaaggcgagctgcggcgtgcgggggtccagcgtgtgcgcggacccgtcggcgtacgccaactgggacggcgtgcacctgacggaggccgcctaccacgccatcgccgacagcatcctcaacgggccctacaccagccccaggctcctctgatccgaacgccggtggttgaagctcgtcgtccgtccatcggcagccgcagctcatacaactgtagtggcgccaacaatgtggctggcctgtgagcttgctagctgtggtaattaaacgaatgctgtacgtagtactccctactactagtgtgagagtgtgacggtgttgggactggaactggaactggaagggtaactcgtaactaaaaatggtggagttttgcgtccgttcgtttctaggc

SEQ ID NO: 268327 - DNA, 874 bp, Zea mays
cgcgtccggcattctcaccgttccgagaccagcgccagacgcagacggccccgaacgccggcggcgagcatcaggtcgtcgacctccgagcatcgacccgccgcgatggagaagggaaagggcctcgctcgccgctgggcggtggagctccccgacgcctcctcctcctcccccgccgtccccgacccgcccggcttcaccagatccgcgcccgacgcggacgacgccgctggagcgcgccagcgcaaggactccgaggctgcatggaaggcgcagaaagcttgggaagttgcgcaggctccgttcaagaacctgatgatgatgggatttatgatgtggatggcagggagcactgtccacctcttcagcatcggaattaccttctctgctctgtggcaacccctcaacgctctccgatctgttgggaaagtttttgaaccatttaaggacccaagggtggatactattgctcctaagttgctctttattgccctcaatttggctgccatgggattgggtatatggaagcttaatacattgggccttcttccaacaaatccatcagattgggtgtcttctctggctcctgctcgggaggttgaatatgccggaggagggctccccttaatttaatgtccatttccatttgaacttattttactagttgtaatattaataccgagtgacatttttaccatacacccctgaatacacgaagttccgggttttttcccctgtctggatttgtactactattttctagatgcgtttgtttgtatcgaatttgcgaccctgaagtatagtcgtgtctggatggaaaaggattaaattatcttctaatcaaatttgactaggaatgaatttaattaccttc

SEQ ID NO: 268328 - DNA, 1086 bp, Zea mays
ttactgtgtggcttttgacctgactcctgaccctgccacgtacgacgaaccgatggcgtctggacgtgaccgcgcccgcctgttgatcggctggccaggcctccatcacgccttggcgcgtgcacgagatcgtagccaagccaagccaagcccgcccccgtcagcgcaagcgcaaacgagcaaaccgtgccacgcatcgcatcgcactgcactagtacctgcatgcaggcgcgatctgcgggccggcgagcctggtgaacgcgatgatggacctgcaggagggggcgctgatgctgctgggccccacgatgaacgccaaggtggcgttcgagctgtcggagcggctgccgcacctgccgctgcggatgcaggagcactcgcgccgcgcgctggcgttcgccgagcggatgcaggggctgggcctgcgcgtgctgtacccgggcctcccgggccacccgcaccacgcgcgcctggccgccatgggcaacccgggctacggctgcggcggcatgctgtgcctcgacatgggcaccgaggagcgcgccaaccgcctcatgcaccacctccagaacaccacccagttcggcctcatggccgtcagcctcggctactacgagacgctcatgtcctgctccggcagcagcaccagcagcgagatgccgcccgaggaccgcgcgcgcgcgggcatctccccgggcctcgtccgcatgtccgtcggctacaacggcacgctggagcagcgctgggcgcagttcgagcgcgcgctcgcgctcatgcagacgccgacgcccacgcaccatctcaaggccgccgccgccgaccgcgacggccccgaagccgccaacaaccaccaccgcaagcactgacgcgcttgcgcttccgagcgtgcatggcctgtgtggacttgtgtgtgtcgtgttcgtgtatatactactagtgccattcaagcaagaatattaaacaccatctgatccctctggttcagatggatcgatatgccagtgcaagcggctcgatctctggggaacctgggaatggacctgaataaatgggatttgtctttaaaaaaaaaaaaaaaagggcggc

SEQ ID NO: 268329 - DNA, 388 bp, Zea mays
cccacgcgtccgcggacgcgtgggggcttgaaaggtttggactttcagagcctgtaccattttacagtgggcgctcctgtgcttgacaagaggataatgagtctcccagcttaccctggtcccggaattgacgcatgatatcttgcctcgggggaatttttttgtcgacagatcaacaaagaaccgtggagcctgactgttttggtttatgtgtagtggcatgcctgaaatctatgcattgcatgccccggtactacccactcactcgtattttatctagttgttagccacgacgatcctatgttgcaccagcgtacaagtatgtccggatgttccagtgcgattattctggtcctcaaccaggtatatagtttggtattgtgcacct

SEQ ID NO: 268330 - DNA, 784 bp, Zea mays
gagcaaaacaaatactaaatgccgccaccgcccaccgccgtatcatcctgctggcgcggcacaagacgccaccgagccaagaatttgcatcctcatcctgcggctgtcagtgtcaagcagccaggctcaggggtaaggtttcagcaattcagctccctcgcctccgccgcggcaccggcactacgagtgcttcgctaccagccagccagcacactctacgagtcgccatcttccactccaccgaggcagctccaagccatggccatggagaaggccgcctccttcctctcctccctcttaggcggcggcggcggggagccggcggcgactgtgaaatctatcttcatataccctatcaagtcctgcaggggtcttgccgtgtcacaggcgcccatcacctccactgggttccggtgggatcggcagtgggtggtggtgaacgccaaagggcgagcatacacccagagggtggagcccaagcttgctctggtccaggtggagttgccgccggaggccttcgctgagaactggcagcccacgcccgacgaccacctggttatcagagcacccggaatggacacactgaagatacctctaataacggaacacgccacaatcgatgatgtctctgtctgggagtggtctggctctgcgtatgatgaaggggctgaagcgtctgaatggttctccacttactttgggaagccaagtcgactagtgcgcttcaaagaagcatcggaaactaggccaaccgatccagattatgcccaaggttataagatca

SEQ ID NO: 268331 - DNA, 907 bp, Zea mays
aaatgattcttcagaacagtgaagctatggtatctatagacatgcctgctggcccttgtgaagtggtagtcattgctgataaatacgcgaacccagttcatgttgctgctgatctgctatcccaggcagaacatggcccagatagtcaggttgttctagttgttgctggagacggtgttgatctgggtgccattgaggcagaagttagcaagcagtgcaacgcgcttccaagaggtgaattcgcttcaaaagcacttagccacagcttcactgtgttcgcgaaagatatggttgaggcgatatcattctcaaatctgtatgcccctgagcatttgatcatcaacgtaaaggatgctgagcagtgggaggagttcatcgaaaacgcagggtcagttttcttgggccaatggaccccagagagcgtgggcgattatgcgagcgggacgaaccatgtccttccgacctatggttacgcaaggatgtacagcggtgtatcgctgaactctttcctcaaatacatcactgtccaatccctaacagaggaagggctgagaaagctggggccgtacgtcgcgaagatggccgaagtggaggggctagaggcgcacaagagagccgttacccttaggctgcaagaggttgaggccaatgtaactgtctagccgctgtccatggtctattgcaacgttcagactcgatgtgggatgctggagttcttccctaggaacctaggggaactggactattgatgtcttccaaacaggctctggaatgttagaaagaggcgtttcaactggtgcagctaataatgttcattggaccctgatttgtttcacgaataaacttgagcagaacttactgtgtatatatgcagtgttctcgtattagttatttccctagttgaatc

SEQ ID NO: 268332 - DNA, 252 bp, Zea mays
cccacgcgtccgacgtttgctagtgactctagcctgccaggcagttcttaacttcactgctctgcctgtgcatgttattattcctcaaatgtgtcgtctttatcagtacattgccccatcacaggcacagacatactgttagatgtatgagcaattgtcggcttgtaatttattggtagagctatgctccccctaacatttatatgtatatatgtgatcttgattcttaaaaaaaaaagagaaagaaagaaa

SEQ ID NO: 268333 - DNA, 717 bp, Zea mays
tcggatcggctcgacacagctcttctgctccacgagattgttgaattcatctctgccctagcaccagccatggcgaagccgcagcttcttctctgtttcctactcgccgcctccgcgccgctaatcgtcgccacggccaagaaatccggggacgtgtcggagctccagatcggcgtcaagtacaagccggaatcatgcagcattcaagctcacaaaggtgacaaggttaaagttcactaccgtggaaaacttactgatggaacggtttttgattcaagctatgaaagaggtgacccgattgaatttgaattgggcactggacaagtgatcaaaggatgggatcagggtctcctgggaatgtgcgttggtgaaaagcggaagttgaagatcccatcaaagcttggctatgggcctcaaggctcgccacctactattcctggtggagcaaccctcatatttgacacggagcttgtcgctgtcaatggagaaccaaccaaccaatctgacgagctttagattcatcaaacaaatgaatccattcacctttttactcggaactcagcagatgtaatactttccaagaaatgagccttcattccctgccactttcatagtttctttcgctgttccacactgacatctatgatttttggagcaaactctgatctggtttgactagtttacacgtttgtgtgtggaatctgaagagctggtctg

SEQ ID NO: 268334 - DNA, 707 bp, Zea mays
ctttttggaactgtgtatacaggcggcggtggatgcataataatacagatgcagtacacatcaggacaccctggtccagttgagattgtacaaaacatgatgccatcatgctgcattgacgtcgaaacatatgacaagatttatactgcgagttttgcctgctaaggtggcatgctatgcatctcaagaggaaatgacaaaggcaattagtccccttattgaaaagtacttcctaaaagaatgctcctcaggtcataagtttgcagtgttatatgaagcaaggtcaaacacaggaattgatagaatgaaaatcataaacgcagcagcgaaatctgtaccacaacctcataaagttgacctgaagaacccagacaagactattgttgtccagattgcaaagaccatatgcatgattggagttgtggaaaggtacaaagagctctcgaagttcaacctaaggcagctgacctcaccggagtcggagaagtaagcctatgagtgacaaaatcttccaggcaaaacgtggaccaacttaaatcagcagcagcgtcaggtggttaggcgctagcgaattaaattaaggccggccgaacctcactgtcttgaaagattcagatgttctaatgtttaatgctttactaccagtggttagtggttgctggttaaaaaaaaaaaaaaagggcggctgcttgcgatctagaactagt

SEQ ID NO: 268335 - DNA, 457 bp, Zea mays
cggacgcgtgggcgaagttcattctaaggttgctgacctcaccggagtcggagaactaagcctatgagtgacaaaatcttccaggcaaaacgtggaccaacttaaatcagcagcagcgtcaggtggttaggcgctagcgaattaaattaaggccggccgaacctcactgtcttgaaagattcagatgttctaatgtttaatgctttaccaccagtggttagtggttgctggttcatgcttcccaggttagagtcacgattttttttttttgaggctgtagaaagatctgacgatacttcatgtgtgctttctctctgacgatggttccatacaggggcttaccaaagacgtagaatctatcgttgcagctccattgctctgagcatttctatagcttgaataaatctgcgtgctaggtttctatgcaaaaaaaaatttagggaaaataaaaaaacaa

SEQ ID NO: 268336 - DNA, 411 bp, Zea mays
gttactcccggccatcaggcgcacaccgctctcccgccgccgtcctgcgtgggtgcgatatccctacatccccacctcatttgcacccggattggcttcttcttctactactactaggagctctctttgcgatcccaaagtcgcacaataaaggtaaatcaaagggaaccgacttaggagctggaacgacatctaggagctttacgacggaagagatctctaaacattccacaagggaggactgttggatcgtcatcaaggacaagggctatgatgtcactccttatgtagaggagcatccaggcggagatgccattctaaataatgctggtggtgattccacagagggctattttgggactgtaacttatattgtttcctatacctgataacatgctctgtaattgcctg

SEQ ID NO: 268337 - DNA, 818 bp, Zea mays
gcaaattcgcctcggtcgttcaaccaaacaagctcactcccggccatcaggcgcacaccgctctcccgccgccgtcctgcgtcggagcgatatccctacatccccacctcatttgcacccggattggcttcttcttctactactactgtacagaactttttatgtggctgcaaagttctgtaattctagaggagcaaaatggagattattatcattatctcacttgtcattcttttggcactaggagctctctttgtgatcccaaagtcacaaaataaaggtaaatcaaagagaaacgacttaggagctggaacgacatctaggagctttacgacagaagagatctctaaacattccacaagggaggactgttggatcattatcaaggacaaggtctatgatgtcactccttatgtagaggaacatccaggcggagatgccattctaaataatgctgggggtgattccacggagggcttttttgggccacagcatggcactagggtcttcgatatcatcgaggatttctgcatcggtcagttgaaggcttcatgatgatgacaggatagtttgtattgaatttattacgggacataaatttgtgagaagctacattttatctatgtttgagcattgcgaccatcgagcatatgaatgccagtataattgttccacaactgttattaggcctgccctgagctgtgatgtaggagatcgttttttttcccctctgatggggcaatgtgagctgttcgacccctggttgttgtgcttgcactattctgttgttggacaaaacgaaaacgtttttaaccccc

SEQ ID NO: 268338 - DNA, 501 bp, Zea mays
  unsure (1)..(501): unsure at all n locations
cggacgcgtgggcggacgcgtgggcggacgcgtgggcggacgcctggccacgcgtccgatcgagtccaagcattcaccggagaatcccaaatcacactctccagtaaccgcccgcttctccagccgcatctctagccgagtctatctcctcctcctcctccgccgccgccgcaactatcctaatggctcgcttcgccgtggtcgccgccatcgtcgccctcctcgccgtcgtcgcggcggcgcaggccccggccgccaccccgaccacagctcccaaggccgcgcccaggatggccccgctgccgccaccccctgtgcggtccccggccaccgtcccggcgccggccgtcaagccgtcgaccgccgcggcgccgtccccgctggcctctcctcccgccccgcccaccgagggccccgccgcctctgcgccgtccgcgaaggccccgacctcgtccgtctccaccaccccggccggcgcccncaccgtcgcgccttccggca

SEQ ID NO: 268339 - DNA, 803 bp, Zea mays
aaaaaaggaaaaaggctcgattcgctgttgcctcattgcctgccacagctcgccgcggacgccgtcgccgctcaagtgaagtccggagtgggggcttgcgatctccgctgcgggcgcggaagatggctgacccagagttggaagctatcaggcagagacggatgcgagaactacaacacggtgcggcaaatcagcaaaatgcgggccaacaaaaggctcaggaagacgcgaaacaggaagctgaggaacgccggcagatgatgcttgctcagatattatcttctgaagcaagagaaaggctttcccgcatagctttggtcaaacctgacaaagcaagaggggtggaggatgttttgctgagagctgctcaaactggtggaatatctgagaaggtgtctgaagaaagactcatctcccttctagagcaaattaacagccacacaagcaagcaaaccaaagttacgattcagaggcgtcggaatgtccttgacgacgatgattagatgcaacctgcaagtctctgcttcgagtgtactattggctggtgataaattaaaagtggtaccgaactgtttagacaatgatctcatgcgactatcagcagcaatgaaaacttggtacttggtacttggtagactatttcattggatattcggctgtatatgatccgatgtcttattttggggtgtgtgtgtgtatgcccccatcgaggacagtcgatattggctgtgtttatccccgaaacactattcttccttgagtcatggcattattaatgggtgctttttgcccccattgagtcc

SEQ ID NO: 268340 - DNA, 500 bp, Zea mays
gctcgattcgctgttttctgccagagcacaccgtggacgccgtccccgctcaagtgaggttcggagctcagagccttgcgatctctcggctgcgcgcgcgcaagatggctgacccagaattggaagctatcaggaagagaaggatggaagaactaatggcaaaacacggtggcggtggggcaaatcaacaaaatgcaagccaacaaaaagctcaggaagacgcgaaacaggaagctgaggaacgccgacagatgatgcttgctcagatattatcttctgaagccagagaaaggatctcccgcatagctttggtcaaacctgacaaagcaagaggggtggaggatgttctgctgagagctgctcaaactggtggaatatctgaaaaggtgtccgaagaaagacttatctcccttctagagcaaattaacacccacacaagcaagcaaaccaaagttacgattcagaggcgtcgaagtgtccttgacgacgacgattagacg

SEQ ID NO: 268341 - DNA, 564 bp, Zea mays
tgcggcgatcagcgaacaagcctggcgagaacggcagggcagtttccaggaatgatgaaactggaagctccggccacaaaacacctgccaaggaccgagaggactcacccagggacctcccagcgatcctgaacaaggaccttgaccgggagcgcatggtggccgaggcgaagatgtggggcgaccgggagcgcatggtggccgaggctaagatgtggggcgaccgagagcgcatggtggctgaggcgaagatgtggggtgaaaattggcgtgacaagcggcgtgcagagattgggcagggtagcctggattcagttactgggaacagctagggggcaattaagcgaacagaaacgtgacatccacccatgcatttcgtttgtttatttccaggtccattttcgttctggcggcggtcggcaggccctagggttgtacatttctaggtcagggaagagtgggaaagcggcagcgttgtactggacagtgaatgcatgtggttgtacatgtaaattctcagaaaagttttgtgagaatgaaaggacatatttgagttccacttgt

SEQ ID NO: 268342 - DNA, 715 bp, Zea mays
cgtccttctcttgccgacttcctcgcgttcatttcttcaccccacccgccccccaacgccaaatctaggagcaaaggtccggaaccttctagccgcacctagggtttggattggcgccgagcatggcgtacgtcgaccacgccttctccatctccgacgaggacgacctcgtcggcggcgccatggggggcccgcgcggggcgcccgtgaaggagatcgccttcgccgccgcgctgctcgccttcggggcgctcggtaccatcggtggcctgctaatggccgtcaaccgcgtcggaggggaccgcgcgcacggaattttcttcatgatgttgggcattgtaatgttcatccctgggttctactacacaaggatcgcctactatgcttacaaaggttacaagggcttctctttttcgaacatcccaccgatctgaaggagtgtgctgctgcctgctggttatgaagtggtgtcgctggtttaagagtttgtcgactctgtcgaatggctctgtagacacccttgtcctacatctgtctgtggccacattctctttgaacactctagaatgaactggtggatgtgtacagataaatgcagccatagttgtgctcctccatcgcggtttggccgattggaaggttgcttgttgtgctcgtgtgaccatgttcaactaatacgcatcgctacttgtgcattaaaaaataattattatat

SEQ ID NO: 268343 - DNA, 303 bp, Zea mays
gtcagccacctccaggagacgggcgtcctggagaacgccttcggtggcgacaagacctccgcctgagattccaacattcatcacgcgccgagagctctcggcaattatcacgcgccgagtgagcgctcgtttcggccgtctttttttccactgtaccaatcatcctgttgctaccagtagtggtctagcggagaatgatgcacacttccccccgctgggaacgcggcgatttttgctggaacagttgaaggccgagccggggcgaatccttttggcctggccgtgcactgcttgctgaactgc

SEQ ID NO: 268344 - DNA, 457 bp, Zea mays
tgtgtctaatcattgcaggaagaggcggtcgagatcgagaactccggtcaaaaggagatagaaggcatggacagtttatccgacgagatctttgcctaaacattcctctgaaacaaccaaagacatttttgcggttctgctgttgtctatctagtgcgtcttttgctccgacaacataatggtagaacagcattcctacagtgacaaacatgaaggcgaggactggatgtaccttgatataagatgcacattgaactgtatcttgtttgatagatgagctatataactagctcacgcagctggctgtatgatctgtagttcccccgttatctgaattgttcatgtattaggccatgtactgctcagcagagctatgtagttagttgcacttgtatgacttcagcatgcctgttgccagttgtttgtttcgtctataaaaagctaaaaaccaaggaag

SEQ ID NO: 268345 - DNA, 1079 bp, Zea mays
ttcccacgcgtccgctcactggatttctcaaggagttgatgcagcggagaaatatatcctgtgagtcactgtacactgttcgaaccatcaaggagaaactttgctacgtagctgctgattatgaagctgaattgcgtaaagatacacaagcgtcctgcgagatcgatggtgaagggtgtttcactctgtcggaagagagattcaagactccagaaatcctatttcagccccatatgggaggaatgtgcgaaatattcagatattgtttgatttgtgcatcgattacagtttagttagggttggtcaatggttgatcttgcccttgcaggcgtgctatgggcttgcataaagcagtatctctatgtatggatcactgctatgtttcaggaacggttggtgatgacagctggtacaagacggtcattttagctggtggttcgtcgtgcttgcctggtttaccagagaggctggagaaagagcttcaccaacttcttccaccttatatgtcagaaggaataagagtactccccccttcatttggcactgattctgcctggtttggtgcaaagatgatcagcaacgtgagtactttcactgaggcatggtgtgcaaagaagaaacaattccgtcagaagacaggccggagtggtacattgtttgccaattcctggtaatgaaaatctcagacacaagtcacgagcaagaaacttaaagagttccccgcatcaaaaatacggacataacatccggtccatgctccactgagcctccaccagtatatagaagcatgagcattcatgcccagtatatattcacgtccatatcatgcatatatggattatgagccagtgcatcatttggtggtgttgttataggatgttttggtaagttcgttgtggttataggttgttggcaaaagcgcagttgtctcgttttaattttaagtggaaccgattaattagttattgagcatgagtctttgtttatagctatatatgtctcatgaaatttggtacagttctaaatgttgtaaaacgcaataaatcattttataaatgagatatgtctttattgctgtt

SEQ ID NO: 268346 - DNA, 602 bp, Zea mays
tggccgaggtgatgacatggctagctactcccctcaaaaggactgtcaagtttgccgatgtcaggcctcccgaaacaaacaggccctttgtcacctttaaggctgaggggaacttctactttgtcgatgctgaccacttctcgaacaaggcattgttggctaggctaacgccgcagaagcttcctcatgagtctgcgttcaagaacttgtgattgaaagttgttccgcttgcccatgcctgcaccctttgtaggccgttttgagaacatttctgtgacaactcttcctgctaatactttcctgaagatgtgttactatatatttgtactgttgcgtaacattctctatgtggagaattgctagctgcttgtgtcgagcagttttagtttaggaaacactatgaggtctggtaaacagttgagtctgcattttgaataagtagatggccagatatctgcctgggatccttaaacatacacctcattgcgacctgaaattgccttcgccttgctgccgtctatgattgctcaaatgtaagatggtgcacctgtgttgccttggggtgtgaaagcattattgggtaattgtatgtacctttttcc

SEQ ID NO: 268347 - DNA, 426 bp, Zea mays
cccactcgttcgcccacgcgtccgcccactcgttcgcccactcgttcgcccacgcgtccggccacgcgtccgggtggtggtggtggtgcaggatatggcggatcatcaggatacggtggtgcttatggcggcggcggcagcagtggctatggtggtggtcagagtacgagttcttgggactgaactgaattctggttagaagtgaaaaatgggtcaacctgttgggtgtgaaaaatgggtcaaccgttatcgattagtccctgttggatggagcgaatgcctgaaatttgttgcttgacttgcgagtacggtgtcaggaggtttcccagtgccttaatcttgcattttgtgttgtactagggattgcttatgttattatctgaattggtggtctcttttctacgcctcaaaaaaaaaaaagagaaa

SEQ ID NO: 268348 - DNA, 376 bp, Zea mays
tagggccagtggtggaggatatggtggtggttcctacgaagcaggtggtggtggtggatatgggggatcatcaggatacggtggtgcctatggtggcggtggcagcggcggcggcggctatggtggtggtcagagtacgagttcttgggactgaactgaactctgattagaagtgaaaaatgggccaaccttttgggcgtgaaaaatgggtcaaccgttatcgattagtccctgttggatggagcgaatgcttgaaatttgttgcttgacatacgattaatcttgcgttgtgttgtgctaagggattggcttatgttattatctggattggtggtttttctaccccccaagcttgtgctgtcccctttcacaaaaa

SEQ ID NO: 268349 - DNA, 931 bp, Zea mays
tgggcggcggggacgaggtcgacgaggacgaggaggcgcgcaccgcgaggctggaggaggagaacctggccctccgggaccgcctcttcctgatggagcgcgacatggccgacctccgccgccggctcctagccgtcgaggagctctgccgagaccgccacagcgacggcggctgcgtggtggacgccaccgccgccgacgaggccgctcgctccgagagcgctgccgccgtcgtatcccccggcgcctgcgcctgcgaggaggcggacgccatggagaagtgaagcatatacagtaccttctacctgaccagacaaggccctcccggccgtactgaaactgtacatacgggttccgtttcttccctgtgcagatgtcgctgtggagtagtaggaagaagcgacacctttgaaagccttttagagttactcttcgttgcatcttgttagctttgatttcgtttcatgttcttgtagaaaggatcatcagtcaggaaaaggccgtgggcgacgatggaatgtgagggggaggaacacgagatcctggtgtcctcctgctcgtccagatcttcaaccaccagctaaccatccttttttttagtgtagccagtaattgttattccgacacgttctttgttttgtaatactactaatatctgttgttatattctgtgctgtgctcacggtggattgttcggtgattgggtagggtatgggggaggatacggtgtcgcagcctcgcaggactggaaccatctctgcatctgatcgacgggacagcccccgtgttgggttgggtgtgttcaaagtgctgccgttgcgggttgggtggttatggatgccttcaatgccgtccggttggatttgcttgctgctagtgggtaaagttgtgccgtgcaaaactggctggctctcgcaactaggcaggcacc

SEQ ID NO: 268350 - DNA, 681 bp, Zea mays
cacgcgtccgggaaccttccctcagccacaggccgacagcccacgccgtcgaacggccggggatccggtacctccgctccgcccccgactccctctcgccggacggctgcagatccggtcaggccgatccgtctcggacccggtggtagcagtggaggaatccgctgccggtcgatcgatcgggagagatgcggcagcagcggggcggggtcggggccgggaggagggaggacgacccggggctcctcacgagagccgtcgacagggcgttccgcttcgtccgcctcgccgagttcgagatcttcttcgtcctcttcttcctcatcgccttctttctcttcaaggacctcatgtcacagcctcaatacaatcagctatttgtcaagaagcctgatctagataacccctggccttagggagtacagaactacatatgtgtataagttgtagcctactagcctggtcttttctttgagttgtgttgcaagtactctttgaagccctgttatcaggagcatgttttatgattagttagaggattctcttcggtgacgatgaatatatttagctagtcattttaatattggtatgtgtgatactgaggttaatgccggcagttatcgttcacgcagcttatatgttgtgaagtccaatgagctcggcgagatgatcatatgatat

SEQ ID NO: 268351 - DNA, 519 bp, Zea mays
  unsure (1)..(519): unsure at all n locations
cggaattcccgggtcgacccacgcgtgcgcgcaacttcacagcgtatcatcgttttccatcgctcctactcctatcatccagaaaatctgagcggtattgatggcgcccaaggcggagaagaagccggcggcgaagaaggtggcggaggaggagccctcggagaaggcggctccggcggagaaggcccccgcggggaagaagcccaaggcggagaagcggctacctgcgggcaagtccgccggcaaggagggcggcgacaagaagggtaggaagaaggcgaagaagagcgtggagacctacaagatctacatcttcaaggtcctgaagcaggtgcaccccgacatcggcatctcctccaaggccatgtccatcatgaactccttcatcaacgacatcttccagaagctcgccgcggaggccgtcaagcttcgcccgctacaacatgaagcccaccatcaccttccgcgagatccagacctccgtccgnttagtccttcccggcgagctcgccaagcacg

SEQ ID NO: 268352 - DNA, 879 bp, Zea mays
gaattcccgggtcgaccgcacgcgtgcgcccacgcgtccggggcaaaggatttgatcgtgcccggtgtgatgccatcagggtgctttgcggtctgcctgaccatgtacgctgaccccaaggaagggcatggctcgcgcaccggctgcctcaagcggttcaacactttctcttgggtgcacaatgcgatgctgaagcgcgcgctcgtgaagctccgagcgaagcaccctggcgcgaggatcatctatggcgattacttcacgccaatcatccagttcatactccagcccaagaaattcgggttttacaaacaaccaccaagggcatgttgtggcgcgcctgggaggggtccttacaatttcaacctgacagcgaagtgcggtgagcctggtgcctcggcttgcgctgatcctaagacgcactggagctgggatggtattcacttgacagaagccgcgtatctgcacattgcctgaggctggcttcatggaccgttcgcagaccagcctgttgtccaagcatcttgagttgagtacagtacaccccagccgctcctccctgctgttcttgcacctctagagtgagtgtaccacaatagcacacaccgtgcgtgacaccaaactggatccgataaggtaaggtagtagtagttccagtgcagtcgggtaaagagctgagataggtctattaattaaagcttgattcctttcattcaggatggtggtataagtacaatgtaatgcacaaaacaattcatatgagtaccagttagaaatcactatggtggttagcttgctccaacttctgtatctaacttttgtatctatttatatattttttatatatataggacatatcctgcccaaccatgtatgtcatgc

SEQ ID NO: 268353 - DNA, 1055 bp, Zea mays
ctaatatatggtgcatttattcattctagtcaccttgagaacaatcagttaactggtgaattgccatcttctttgggtgacctacctaacctgaaagagttgtatgttcaaaataacaagctgtctgggcaggttccaaaagcacttttcaagagaagcattattttgaacttctcaggcaacagtggccttcacatagtaagcaatggcattagccacaccataattattatatgtgtggtgattggagccgttgtcttactgggtgttgctattgggtgctatttcattacatgtaggagaaagaataaatctcatgaagacactgttgtcattgcagcagcaccagctaaaaaacttggttcatattttagtgaagtggctacagaatcagcacacagattttctttatctgaaattgaaaatgctactggcaaatttgagagaagaattgggtctggaggctttggcatagtatactatggaaagttggctgatgggagagagattgcagtcaaacttctcacgaatgactcgtatcagggaatcagagaattcttgaatgaggtgacattgctttccagaatacatcatagacacctggttacattccttggttacagtcagcaagatggcaaaaacatactagtgtatgagttcatgcataatgggacactaaaagagcaccttcgtggagctgataatgaaaagataactagctggctgaagcgtcttgagattgcagaagattctgcgaaaggtatagagtatctccacacgggatgctccccaacaatcatccatagagacctgaagagcagtaacattctcctagacaagaacatgagagcaaaagtggcagacttcggtctttcgaaacctgcagtggatgggtctcatgtgtcaagtatagttcgagggacagttggatacctggacccagagtactacatctcgcagcagctgacggagaagagcgacatctacagcttcggcgtgattttgctggagctcatctctgggcatgaacccatctcgaatgacaactttgggct

SEQ ID NO: 268354 - DNA, 801 bp, Zea mays
agcaattcgcatccctggctccgtggacttgcatccgcacatcaggaaggtcttgaggaagctacggctgacgacggtcctcaccggcgtattcctcagggccaccgagctgacgctgaagaggcttcttgtggtcgaaccctttgtcacctacgggtttccaaacttgaagaacgtgaaagagcttatttacaagaagggccgtgggtttttcgacaaggagcctttccctcttaccagtaacgatctaattgagaaggctcttggagatcacggcatcatatgcttggaagacgttgtgcacgagatcgccacggttgggccgcacttccgagaagcatcgaggttcctcatgcccttcaggctcaagtgtccggagaggaggctgcagatgaagaggaaaccctacaaggatggcggcgactcgggcgaccgtggcgacaagatcaacgaactaatcgagaagctgaactagaagcgcagaccttgcctcctccggctgtcgttttgcgttggagcgatggatctgttattaccttgtcggttttgtaatagcattagctgggtgtaccttcggctttgaaaccttacctgcgcttgtgcgatcaggtcatgaaatagcaggcgcttctttggtcatccccttgcgttctgctccacatgcctcttcggttggtgcgacaatatatcagctgtgttatgaatgatgtagcgtgctagtatagtgcagacgcttataatgtatgcacacttgcaactgtgaacggacatatatgcaaacattacttctatgatcttcaa

SEQ ID NO: 268355 - DNA, 418 bp, Zea mays
ggacggtggcggacgcgtgggcagagacgtacatagagttctccataccattgttcaggagcagggctccctcgacagttctaaggccgagagcttcgtgaagaatctccaaatggagggcagatatctgagggatgtgtggtaaagagcgattggatgaacattcgttcgtattacacacgtgtacaactactaccggaagagcactgacaatggactagatctgatatttttattgcttctatatttatttttattttcttttgcttcgttctcttcaagagctctttgctttctttgcggttctcccaagagttctttgtacctatgtattacaaattctttatatgtataagatgaggacaattttggcaaataaaaataaaatttatatattcaattaatttttaaatttttt

SEQ ID NO: 268356 - DNA, 595 bp, Zea mays
tggggcatgtctcttatgaagttctattacctgttagatttttagatatgtgggaaccagctattttggcaataaagagggaaggttacagcgttaagtgtaatggacagcgcggtgtcgttgtcatggagaaatttcagcaagcgatgaccatcaatatcccatttgggcgtcctactgagttttcaattttgtctgctgatggtgctgagtacaatttaaagcctgcagagaatgccccatcacgagatgccattgttctaatactaaggctattcaggatgaaggctgttgagaagagcaagggaaaaagaaagggcatcttcttcaagtagtttgtagttgtagcagtattactacgtagtgtcatggcaggttgactgtatctgttacctatgttttcgcggttcatgtatgtagaaggaaagagcaagttgtctgcgtgcttatgtaaagttccgattcaattcgattagattcaattggcaccgtacccagttttttgtttgtttttgccctgttgtaggcagggatgaattctttttccaattaatgttggtttgtttggccataacaaaaaaaaagacaagatgat

SEQ ID NO: 268357 - DNA, 479 bp, Zea mays
gaattcccgggggaaatattctgtagctggactcacaagactgaccttttccaaaggatcaagaggaaaactggaattccctacaaatgcatgctgttctttgatgacgagaacaggaatattgaagcagtatcaaaaatgggagtgacgagtgttttagtagagaacggggtgaaccttgacatgtttaagctgggtctcagtaactttgcaactaactgtgctgcctccagcagaaaggatgacgaataacctcgaggagaagtgatacatagaagataataccttcaaaacactgtactcgaattcattgtaatcaatttgcccgattcatgaacaatttattggtgaaagatgacctcacagactagcttttgaactgatgcaacgcctgtctaatatatttatttgaaggcaaatcactccatgtcattatttcacgtgcaaagcaatatattggtgcatatctgttttgtttt

SEQ ID NO: 268358 - DNA, 705 bp, Zea mays
ctgacgcgtgggccatacacgagggttcggcgagggcatgtaagctgcgtccctgggatggccctttcctttgccacagttgccaggaaaagaaagaggcgatggaggggaagcgtcactcgcgagactcctcgtcgagaaatagccggtcaagtgaatagtgactaaagccaggagtcatcttgaggcgaccacctagcggtgtgacgagctaactcttggtgcagttgtcattgtagcagcacttcctctatacatggattaccattggacatagacagatgttggaacttggatggtgccatgcgtacatatgttggacctaatgcggtaatggaccgtcggccaaattcaatcgcctctaggtaccacaccggcgacggcgtcttcggcaaggcttgtagcagtagctcatgcaggtagtgatgacaagggactgttagcgaagaatgtcgacagcggccaatggtcatgtaaattgttcatcgtatagaggtgcaagtgacaattagccacggttttgtaattctgagctaggattagctattgggaccctgtaattcgtctgggcagacctcaaactagaggtcaacaacgtagcctggcctattgtagaatgtatcttgccctacagtcttcatgattcaaccctgcaattaggctgttgccagtgcttttttgtcatgttagctatcgcctcccctt

SEQ ID NO: 268359 - DNA, 883 bp, Zea mays
ttgaattgtcattgacataatatcaccagagaaaccaaaacgcactatacaatctcaaagaacgccaggaaaaggccttgtgcttctaaaaaatttctttttaaggaaaacaacatctgactcgttgtctctccctgataaggataattatcctgagccagatttagaggaggtctttgaggacggatgcccatccctttcaaggaggcttaattctgagtatcctgtccgagacatgttcaaactttttgcatgtgcaatttgtcaaattgacttggaatctggccaaggcatatccatacacgagggtttgtcaaggccaggcaagctgcgtccctgggatggccctttcctttgtcacagctgccaggaaaagaaagaggcgatggaggggaagcgccattcacgagattcctcgtccagaaatagcgggtcaagtgaatcgtgactgaagccgagaatcatcttgaggcaaacgcctagcggtgtgacgagctaattatcgttgctgctgttatcttgcagcactttctcatggattaccattgaattgagacatgttggaagtcgccatgcctatatatatgttggagctgtacggtactggaccgtagagcaaatccaatcgcctctagataccacaccagcgtcttcggcagggcttgtggcagcagctcacgcagggaatgatgacaagaggtgttattattagtgacgaatgtcgacagtggccaacagtcatgtaaattattcgtcgtgtagaggtgcaagtgacaaatagccacggttttgtaattctcaactaggattaggtattgagacctgtaattcgtctgggcagaccttaaactgaaggtcaacaacgtagcctggccctattgta

SEQ ID NO: 268360 - DNA, 564 bp, Zea mays
agaatgacgacctgcaggcaaaggtatcggctgcttctgagaagattaaggaactctcttcccagcttgccaatgcaagagatggcacgatgaatggtaaagccaaggaagaagataatgagaagggcgacaccgaaaaggatgacgaacctgttgtggtagttgccaaagtatgggagaacagcaactttgctgactacgattcatctaaggttaaggagaacgatggcgactcgcaggttgatttggaatcaaacaggggcgacgcaggtgttgacagcaacggcctgctcccaactaagcagagcagtggcaggacatcaccaactaaacagcaccagcagcataagaagaagctttctctgaagagattcggtggtctgctgaagaagaaaagcgaaaattagcataaaaaccatctgatcatattctttgttctatcctttgtggcatatttctttggcgagccatctatttcccgagtcttcacatatgttatggaaagcagatgatggatgcttcaaagaagaatacagaatgtcgagtgtatttacataattgcgt

SEQ ID NO: 268361 - DNA, 547 bp, Zea mays
gtcatgggaaggctatgagcttacaattcttcagatttgcagctggccaactcaatgatggactacgacccttcatatgattctgaagaagcttccacagtaatgccatcatctttccatgatatcagtgatgttgagttccaagacaattgggccagggtttgggtggaccttggaacctcggattaccttggcttggatgtattactaaactgcttaacacagttgagctcagagcacttgggtatcaaacaagtggtttttggaggcaagaaaatgggtgactgggaagagggcatgacgagctctgattatggatacaagcacttcaagatatgataaatttacaggtgacaagcaacggtggtgatgcaaggctggccgagaaatttgatcaagactgcatgcatctcgatgtgcccttgtatgtaaataaattaattggcatgggttctattttatcgtcgtgatagcagtgaattttaactaacagctcaaggcaggctagcagaatagaaaaatataatatggatgcatgtcttgtttc

SEQ ID NO: 268362 - DNA, 1592 bp, Zea mays
cccacgcgtccgcccactcgtccgcccacgtttccgccaatctttaccccaggacaatgtgtttatgatatcaaacccaaaggcaaaataccctgtgctgcagctggaccttagattgatatcagatcttgttgttgttatcgtgtctgctacatgtggtggaatcgcttttgcttgccttgggcaacctgtgattacaggttatctacttgcaggatctataattgggcctggaggttttagctttgtcaatgaaatggtgcaagttgaaacggtagcccagtttggtgtgatatttctcctgtttgcattgggacttgagttttctactgcaaaacttcgagttgttcgtgctgttgctgttctcggaggaatgctccaaattatgctgttcatgtttctttgtggtattttggctacactatgtggaggcaaaacaaaagaaggtgtttttgttggtgtgcttctctccatgtcttcaacagctgtggttttaaagtttctgatggaaagaaatagtatcaatgctcttcatggccaggttacagtcgggacacttatattgcaggattgtgctgttggcctgctgtttgcgcttcttccaattttgagtggtacatctggccttcttcacggagttgcatcaatgacgaagtcgctggtggtattgataacgttcctgaccattctctctatcctctcccgcaccgggcgttccttggtttcttaaactgatgataagtctgtcatcacagacaaatgaactataccagctggcagcggttgcgttctgcttgttatttgcttggtgtagtgataagctgggcctgagtctcgagttgggttcttttgcagctggagtaatgatatcaacaacagaccttgcacaacatactcttgaacaaatcgaacccatccgcaactttttcgctgctcttttccttgccagcattgggatgctaattaatgtccatttcttgtggaaccatgtggatatactccttgcagcagtaattttggtgatcaccgtaaagacctttattgttgctattgttgtaaaagggtttgggtatagcaacaaaacatctcttcttgtcggcatgtcacttgcacaaataggagagtttgcttttgttctcttaagccgtgcttcaagtattcatctaatcgagggcaagctatacctgcttcttcttggaaccactgcactcagtttggtgacaacccctctgctattcaaaatgatcccagcagtggtccacctcggggttcttttgagatggttttctgtcgataccaatcaggtggagctgggcctaaaaaatgatgtcctccgcattgatagcggcaagcgcataaatctgatagtccaaggctcacatgactcatgacacatggcacactgcaagctacttttttgtatggcttgagtttacaagctctgtaaagtgttttcacctgtactgaagagtttctagcagatatacgagggtggaggcaagagaactcaactcagatcttgctcctagggcgagatcaatcctcccccatcatggagactgcatgggcagttgggtttgccgtttttgaga

SEQ ID NO: 268363 - DNA, 332 bp, Zea mays
agaagaatgaaaccaaagataacaagtcatttccttttaaggaggtcttcttggatcgatctgagcaagaggatgttcccacgttgattgatcggaaggacaatgtttttatcatctcaaacccaaagtcaaaataccctgtgctgcagctggaccttaggttgatatcagatcttgttgttgttatcgtgtccgctacatgtggtggaatcgcctttgcttgccttgggcaaccggtgattacaggttatctacttgcaggatctataattgggcctggaggttttagctttgtcaatgaaatggtgcaagttgaaacggtagcccagttt

SEQ ID NO: 268364 - DNA, 480 bp, Zea mays
gagaaagaaaggaaggagaaagaacgcaaagaaaaagaaagagaccaccgggaggagagagaaaaggagaaagggaaggatcgatcaaggagagatgaaatggagtttgatggtgctgatttgaacacccatggtgcaaaagataagaaaagagataaagataaagaaaagaaacataagagacgtcaccatgacacagatgatgtaagctctgagagggatgataaagacgatgctaagaagtctcggaggcatagcagtgatcgcaagaaatctaggaagcatgcacatggctcagattcagatagtgaaaaccggcacaaaagacataaaaaggaccgagatagtagtagaagaaatggagcacatgagctggaagatggtgaacttggagaggatggggagatctattagtctttctgtttgctaccgagattcattcatctccagtcttgttacacatggatttattgccatctc

SEQ ID NO: 268365 - DNA, 502 bp, Zea mays
cccacgcgtccgcccacgcgtccgtcgggaaccgccgccgacgccgcaggaggagacgcatcgaggttagcacgcgaagaagcgaccatgagggccaagtggaagaagaagcgcatgaggaggctcaagaggaagcgcagaaagatgaggcagagatccaagtaggcagatcgagatggattgtggacctgatgacatgcgtgggtacatacatttcttcggatgcgttggtgtgcctgtggagagatgtcaacctgccatggtgtcacggtccgccatcagttgaacgtcttgcctgcacttcagtaggccacttttcatggttctagttgtatttgaatccagcgtttgccactaagataaatcagacagtcgttttgtgaacctattatgatggagctttatttgctgataatatctagctacctatttgagctaataacttattatatttagataattatattatatattatttttaattaataataaaaagggcggc

SEQ ID NO: 268366 - DNA, 1307 bp, Zea mays
cccacgcgtacggataaggcgaacgatgtccacctagaaaccctagttcgaacgcgccgccgtcaccgtcgtcgctcgcgctctccgcccggatcggagcgagagtaggggcgtgtcggcggtgaaagcgactgcgtcagccatggcggacgaggagcattcggagaggagagaggaggcctccgagcttgcccccttcgacccgaccaagaagaagaaaaagaagaaggttgtcatccaagaaccttctgatgaagtggacaagcttgcagagaagacagaaacactggcagtcgcagaacccgctgaacttaacttcactggaatgaagaagaaaaagaagaagccggtggatcttgattcaactcttgatgagcttggagatggggaggacactcaagatgatcaagctgtagaggaacaaggggaaggcattgtgctgggaagtgtccctacatacccttgggagggaactgatcgggattataaatatgaagagctgctggacagggtgttcaacattctacgtgagaacaacccagatcttgctggggataggcgtaggaccgttatgaggccaccacaagttcttagggagggaacaaagaagacagtttttgttaactttatggatttgtgtaaaacgatgcataggcaacctgagcatgtgatgatgtttttacttgctgaaatgggaacaagcgggtcacttgatgggcagcaaaggttggtgatcaaaggaagatttgcccccaaaaactttgaagcaatcctgaggagatacatcaatgagtacgtcatctgcaatggatgcaagagccctgataccattctgtccaaggaaaatcgtctgttcttccttcgctgcgaacagtgtggatcttcaaggtccgttgctccaatcaaagctggattcgttgctcaagtcggtcgtcggaaggcatgagcatctatatgtggatggtgttggggtcaataccaactcaacaatagttgattatttgttgactagagattctgcggcgcaatgttgagcaagatatatcaacgatgccctttgtctgcattcaaaggattcatctattgatgtcacaagcctatgaaaactggcgagtgtgaatcctgatctacgactccctgcgatcataatcctgtgactgctggttagtgtcaaatgcagtctgttaaacttcttgatgcggtcactaatacaagttcatcaaagttttgtccgaatgccataattctgtcataaaatttactttctctgtaatacacaatgaatctaagtgtttacttcattattc

SEQ ID NO: 268367 - DNA, 562 bp, Zea mays
gttcgaacgcgccgccgtcaccgtcgtcgctcgcgctctacgcccgtgagtctcgcgtcgatccagtggaaccagcgccccgctctggatctaaccggcttcgtgccgtcgcagggatcggagcgagagtaggggcgtgtcggcggtgaaagcgactgcgtcagccatggcggacgaggagcattcggagaggagagaggaggcctccgagcttgcccccttcgacccgaccaagaagaagaaaaagaagaaggttgtcatccaagaaccttctgatgaagtggacaagcttgcagagaagacagaaacactggcagtcgcagaacccgctgaacttaacttcactggaatgaagaagaaaaagaagaagccggtggatcttgattcaactcttgatgagcttggagatggggaagacactcaagatgatcaagctgtagaggaacaaggggaaggcattgtgcttggaagtgtccctacatacccttgggagggaactgaccgggattataaatatggagagctgcttgacagggtgttcaacattctacgtgagaacaac

SEQ ID NO: 268368 - DNA, 658 bp, Zea mays
  unsure (1)..(658): unsure at all n locations
acagtttttgttaattttatggatttgtgtaaaacgatgcataggcaacctgagcatgtaatgatgtttttacttgctgaaatgggaacaagtgggtcacttgatgggcagcaaaggttggtgatcaagggaagatttgctcctaaaaactttgaagcaatcctgaggagatacatcaatgagtatgtcatctgcaatggatgcaagagccctgatactattttgtccaaggaaaatcgtctgttcttccttcgctgcgaacagtgtggatcttcacggtccgttgcaccaatcaaagctggattcgttgcgcaagttggtcgccggaaggcctgagggtcctttgcgctgcctgctctgttttggtcgtgtatttcttggtttttttttcgtgtcatgttaatgcagctgaggttcggtttatgattgtcctatctctgtgtggctgaaatttgaggccataccaattcgacaatattagattattttgccggatggacattctgctgtgcaatgttgagagcaagatgtgtcaacacttacattttgtcccgcccccaaaagatccatagaactcatggggcagtcctgtggcggctggcgagtgtccnaaaaaaaaaaaaaaaaaaaaaaaaaaaaaaaaaaaaggcgcggccgc

SEQ ID NO: 268369 - DNA, 888 bp, Zea mays
cggagatgagaaggccgtacgatttttgcgacgtacaggcgtcctccttccgcggccgcacggaaggggaagatactgtcggaatcggcatcttcccctccagtccctcgctctaccaccagcagcgaccgctgtcggaggagggcgtggttgggggaagtgccgcagcgggaggagataaagcgttctccaatcttccaatccccttcggctgccacttgttctagtatctagttagttgtgaactttaaaataggttaaataaatacatgggagtccaagaagattctaggccttctggggccctgggtggcctatacagggtacagtttgtgggccggtcaatatacagtgatgacgaagcagtcaagactagcattatggattcttcaacttgtgaaccacaagaggataatggctccggccggcgtttgctaatctggagattatggcagcaaagacccccatgcttgaagcccatacactgtagcctctcatgcgataaacatgttggtgaaactattgcaaatgttgttacctcacttcctttcattgttcttggactgcaaacaccaagaaagaacttgaatacaacactttatgctaactcattgattggagttggaatagcttctagcttgtatcatacttcacggggaggcatcagaaaatatttgagatgggcagactatacaatgattgccacttcaactctatgcttatcaagagcccttcgggatgagaatccaaaatttctgatggcagcatcaacattgctcctaccatttcaacccctgatggtttcagctgtccacactgggataatggaggtttcatttgcttaacgagcatcaatagatccagagctcaagacggcacataacctac

SEQ ID NO: 268370 - DNA, 1059 bp, Zea mays
gtccacacacgcctctacacagactcctggtaagatttcttctgggacgacgagttccgggtgaagaacagctgggacgacatgcttcttcagtacgagacactggaacagtgcgccaagactggaaccatggttgtccggtgggtcaggaagtttccgttcttctgcagcgacagggagtacatcataggccgcaggatatgggcgtctgggaagacattttactgtgtgaccaagggcgtgcctcgtccctccgttccaagacaaaacaaacctcgccgtgtggacttgtactactcgagctggtgcatccgtccagttgagtcgagaaaaggcgacggtgcaatgagtgcatgcgaggtgctcttgttccaccacgaagacatggggattccatgggagatcgcgaagcttggcgtccggcaggggatgtggggctgcgtcaagaggatagagcctggccttcgggcgtaccaggttgggaggaccgccggagaggctgtttccaagtgtgctgccatggcacaggtcaccaccaggttcagtgccgacgagctcgtcatcgcagggccgggcaacacggaggccagttcttcttcgtccggcgacggcgcagaggttgacaaggcgacgaagcactgggcgaacagcatacccaaggttctcatggtcggtggcgctgtggccctggcctgctgcaccttcgacggtgggttgttgaccaaggccgtcatcttcggcactgccaggaggtttgcaggagggccaggaaggcggtaggtacggtgtaacggtggacggaaagatccagcggcacaacacaaaacaagtgttgctgcactgcagcccgctgcgggttaataggttagaaatatagcatttgttacgaggaaacatagaagtattatgcaagaaaaccgctgttagataagaaatacactgctgtgtattagtagttaataacaagagttcttggtttttgtatgtaaagaaaaaaaaacaagaaaaaaaaaaaaaaaaaaaaaaaaaaaaaaaaaccacgcgtcccggacgcgtggt

SEQ ID NO: 268371 - DNA, 1038 bp, Zea mays
aggtccagttgaatcaagaaaaggcgacggtgcaatgactgcatgtgaggtgctcttattccaccatgaagatatggggatcccatgggagattgcgaagctcggtgtccggcaggggatgtggggctgcgtcaagaggatagagcctggccttcgggcataccaggttgcgaggaccgctggagagcctatctcaaaacatgccgccatggcgcatgttaccaccaggttcgatgctgacgagctcgtcacggaagacagcgcggaggccagttcatccactgacaacaacaagaccaccgaggttgagaagccaaagcactggacaaacaacatacccaaggttctcatgatcggtggcgccgtcgccctggcttgcaccttcgacggtggattgctgaccaaggccgccatattcggcacggcgaggaggtttgcagggccaggaaggcggtaggtggatggagctggtcaccctagagcaatgccatgctaatcatgtgtagcaaagcgttggctggatggatgcctggaagtgccctaagcagtcctttttgtagcaatgcactgcagaggacagaatgccttgtctagttgctcagtctagacatcatcctcatgttgcagataaggtggtgtgctcttattacagatcagtatcagttgagaaaaatagatccctgcacatcccgagaaaggaaatggacgacaaagatccagcgacacagagaagtgtacgtaagcagaccgggcatgcttgtgctgctgctgcagccgcgccgccgggttagagccagctggataggttagaaatgtagcattattatgaggacaaagtgtacgatgaacaaggttcattctggcagctgtacgacgaacaaggttcattgtcgttagatgaaacgacaagaattcactgctgtttagtaacaagaattcttggtcttgtagctctggcatctatttgttctcccctatggaaactagatgttgacctttttggctgttcgtgcaggatttttgcacgtacaagttttt

SEQ ID NO: 268372 - DNA, 531 bp, Zea mays
aatcagtgtccgaggccaaagactgtctaggcttttctaaagtgagaagatgatgggatatacttgtcgtgtcagtctgtcagaaggaaaggagtgaagctattattccctcttgttgtgatccgcgctgttttgcctcttcccccctacccgtttcctcccttcgtgctggttgtggttctaaattcctgattgccggccgtcccgccttcttccttgccaagacgagactctcctcctcctgccactgctaccgctgctcctctcaactggtgaactggatcctgatttggggagaaggttaaactggatgcctttccatgtaattaattgcctctctttaccattctacgtgctactagtattgaagtatcatcacccttgttgtgtccttctgtctgtggtgtgatggtcatggactcatggtctgtgtttcttcggtgaagagttcgtacccgtacataaaagatcttcaatcagtggccggtttggtacctgtttggttcagcttttttctgaccagctaatctg

SEQ ID NO: 268373 - DNA, 469 bp, Zea mays
gcccttcattttctctgccttgggcatccccgtctccatcggggtcttcgtcctcggcatggcatggtgagtcacagtgtgcctccacaccctgtgtcgccaaatctgcacggcgttggaggctccagtggtgtcctccatggaagagacataggtcaaagggccatacttcatagctatttccccctcgatgtttcaagtgaaagggcctaagagtattggagcactctatgttacctgcttggcgccaactattcaaaatttactctagggtactagataattttccttgtcgagttttattttggtatatgtaactttgtaattgggcctaagcgtattggagcactctaagttaacaggtgcttgaagctaatgatgaaattatacagcttggatgaataaacctttgttgtagtgacataagaagtttcgaaactgcaaggaattttaaatttgaatatttttc

SEQ ID NO: 268374 - DNA, 957 bp, Zea mays
  unsure (1)..(957): unsure at all n locations
tggacgcctgggagcttaacagcctgtgtgacaaaaacaataacccaactgcccatgatagctaatgcactatatatccaaaacctgatacatgcatcaatttgtcttaaaaagtacattcataaaaatataaatgtataaagagttcatttgtattttaacaaaagtctttggtcaaagccatattctggagaccgtgtcagtgtcctagaccacaaataacattggagggagtaaattatatctcatgtctatcaacgaagttttactttttaggttctattaatgtctaattcttgtaacccctcttttttggtatctcaattgttgcagttaggaaaccttccattacggccttatttctgcagaagtatgacaccaactttcatctattctctaccaccaaagagatggaaaagcaggttgcccccacccccatagctttctgttttgtccctataacaggtttacctatgttatatatagacaccgtagcaatgcacgtgtaatggtagattttctgattggttagtttggaagtgaagtaggtgccaatgttgtgcatgagcagaagaaatattattcccttcaatattagtagaggtagagatatttacttttatcagtatttgtgttgtgataccgatttgtagcctaatgtttcaggtcaaagggccatacttcatagctttttgctcctcattgttttaagtgaaagggcgccagctattcaaaatttactctaggtagataattttcattgtcgagttttattttggtatatgtaactttttgtaattgggcctaagcgtattggagcactctaagttaacaggtgcttgaagctgatgatgaaattatacagcttgcatgaataaacctttgttgtagtgacataaggagtttcgacattacaagcccccttaaatttgaataaaaaaaaaaaangagggaaaa

SEQ ID NO: 268375 - DNA, 378 bp, Zea mays
gtggccgccctttcttttttttttttttttttttttttttttgaatggaacacaagtattatcttcatttgaaggtaaagtctgtcaaaaaaaaaaagagcccatgcatgtaggggcacaaatattcttacaaaagaatcgaaaacctggaagaacaaaagcatctcgcaggctaaaccccaagctatacctatctacacagctccacgtttcagtatcttccgattccgacccctcctggaacaggaacagggacccaaggtttacgcatccaagaaggcgactgctcttcccttcacaaagagccctttgaatttgatgatgcctgccaggatttcttcaagcgaaaatgatatatatatataacccattatactc

SEQ ID NO: 268376 - DNA, 497 bp, Zea mays
gaattctccgggtcgacccacgcgttcagccgacgcgtgggcggacgcgtgctcggactcgtgtgtcagacgcgtgggtggttgcaagagctgataatgagtatctgtttgccttgcacaatgttagttggccatttttctgtgaggtacctctgtgcaagtgaatactgaattggaggagaatcttaggtagggaatatagataacaggcgctccatatataaacttcgttattaggtgctgtatggactatggttcacatatttgtaacgtgaacggtaaccgataatgttaaaacatgtttgtttaagtccaaccgtaatcagataccacactagaaactgatatcatcctaaatcattattcttgcaatttaagttagtggagaatctttagcgggcagggctagcaactcacaatgtgaagagtgggcgtagccgaacaccttaagactgatttcatggctgtattacatgccaagtgctttttcgacgcat

SEQ ID NO: 268377 - DNA, 888 bp, Zea mays
  unsure (1)..(888): unsure at all n locations
gttgaggatctggaaaaacatattcgtgatgtgaatgctctggttacagtggtgcggtccgtccgttgccaggttgacttgaatgaagtatttaaccggcaagcatatggtgccaagaattcatctcatctgcaagaactgctggactatagtaaatcagtgccacctagtcgccgtcatgataacagtatttccaccttgtcgcatctatgaacaggattctgttaacttggctaaggtggagtcttggcttgaagatcttctttgggagaagaaatctattatggacatatatcgctgtaaagggattttatatatccatgattcagaccaagttcatacattaccggcagtgagggaggtctatgaagttgtgccggctcgaaaatggtctgagacagagtctcgcatgaacaagatagttgtcataggccgcaatctggatatcaatgtacttcaagattcttttagtggttgcaagagctgataatgagtatctgtttgccttgcacaatgttagttggccatttttctgtgaggtacctctgtgcaagtgaatactgaattggaggagaatcttaggtagggaatatagataacaggcgctccatatataaacttcgttattaggtgctgtatggactatggttcacatatttgtaacgtgaacggtaaccgataatgttaaaacatgtttgtttaagtccaaccgtaatcagataccacactagaaactgatatcatcctaaatcattattcttgcaatttaagttagtggagaatctttagcgggcagggctagcaactcacaatgtgaagagtgggcgtagccgaacacctcaagactganttcatggctgtattacatgccaagtgcttttccgaccc

SEQ ID NO: 268378 - DNA, 1052 bp, Zea mays
actggtctagcattcccgggcccaaccactgcgtcaccaaatcggcctacgcccacggttccacctcctcgtccacgaggtgaggaaaccctagcgaccgaccatggcgttgctcccgcgcaccgcgcggctggccctcctttccaccccgcgggcgtactccgctgccgctgctgcgggcgcctccccgacgtccccagcgccatacgggggcgcccccccaccggcgatgtcgaagacggccgagttcgtggtctctaaggtggacgacctgatgaactgggcgcgtaagggctcgatctggcccatgaccttcgggctcgcctgctgcgcggtggagatgatgcacgccggcgcgtcccgctacgacttcgaccggttcggcgtcatcttccgtccgtcgccgcgccagtccgattgcatgatcgtcgccggcacgctcaccaacaagatggctccggccctccgcaaggtttatgaccaaatgcctgagcctaggtgggttatttcaatgggcagctgtgccaacggtggtggatactaccattactcctactctgttgtacgtggatgtgaccgtatagtccccgtggacatctacgtccctgggtgcccaccaactgctgaggcactgctgtacggcgttcttcagctccaaaagaagatcaacaggcgtaaggatttccttcactggtggaccaagtgaagcatgcttctgctgttgctcgcttgctacgtttctttgcactcgacctacctgtcttatctgaaataaggacggactttgctcggattcacaaatttgttgtgcctggaaggatgtatgcccaggttgtgacgaacatataacttgtgtacttggagtcagttcgcctgtaatggacaccagacctgctgtgaatctgtttttaagcttccattgtaatacagcaatacaccatatacttgtatgttaatacaccatatacttgtatgttaaaaaaaaaaaaaaaaggcgtctatatctccaactttctttttatattatccaaacttactaacactttcttcct

SEQ ID NO: 268379 - DNA, 932 bp, Zea mays
gtttggttgctggaaagggagtggacttttacaacttctcatgtccctattgttgggagggttcggagtccggatcgggatttgccacaaccagattgttcaacactcggaaggctcaccaaatcgtgctacgcttctgcttcctcctgcacgaggtgaggaaaccctagctgtctgaccatggcgttgctcccgcgcaccgcacggttggccttcctctctaccccgcggtcgtactccgccgccgccgctgccgctgcgggcgcctccccgacctccccagcgccatacgggggcgcgcccccaccggcgatgtcgaagaccgccgagttcgtggtctccaaggctgatgaccaaatgcctgggcctaggtgggttatttcaatgggcagctgtgccaacggtggtggatactaccattactcctactctgttgtacgtggatgtgaccgtatagtccctgtggacatctacgtccctgggtgcccaccaactgctgaggcactgctgtacggcgttcttcagctccaaaagaagatcaacaggcgtaaggatttccttcactggtggaccaagtgaagcatgctcctgctatttctcggtcgctatgttttctttgcatttgacctgcttgtcacatctgaaataaggacacactttgctcggatttgcaagttctcttttttttttcttggtgtgtctggaaggatgtatgtccaggttgtttgatgaacgtataactcgtgtaccagcagacttgctgtgaatctatatttttcgagcttccagtcttccacctgtaataaaaaaaatataatataaatataatacaaaaaataaaaacaaaatacattttaatcatagtaattgtaaatgtatttaaatagtacaaaatctttctaaaatcttaaaaaggggggcccttttaaaaa

SEQ ID NO: 268380 - DNA, 393 bp, Zea mays
agaaaaaagaagccaacagggaggttccagctctcaaaatgattcatcacatttcccccctgagtgatagttcagttagcgtcgtacggatgtatatgaacgaaaccaaatcttttcaaagagctgaggagctgcaaatggtgtatattatcaactacgtgacctcaaagccgagaatgttggttaccacggacatggatgttagaagtagaacccagttaactttgcagcgtttggtgtgtttgggggcgctttgccgcccccagttcgatattcatttcttggttgtgtctggagttagtcagttcattgcttttgtatgtattatatactgtgattacaacacaaggttctaggttgtattaatgatatgtcctgatcattcctgtgccc

SEQ ID NO: 268381 - DNA, 359 bp, Zea mays
cggaattcccgggtcgaccgcatcgcgtccgaagaaagcacagaatctctggtagaagtggacatcgtcaaggaaaacataagcatagagagaaggctagtactcagcctgatgctatacctcaagctccagtcattcaagatttccttctgtagcatctgagagactcatttggtacacttgagttacccaatatatgtgttttttttgttccttaaagtttatgaattttcattctattttgacctgtggtgctgtttagtctttgatctgttgctggtcgtgctgtgccatactgtcataacacttgatgcaattgctctttgataggtctattgaaatatgttagttcatatgtc

SEQ ID NO: 268382 - DNA, 616 bp, Zea mays
gggccagcctgtggaggcctcggccaggacttctgccagccggtgctccagctgccggaagcgcgtggggctgacggggttccggtgccgctgcggcgacctgttctgcggcgcgcaccggtactcggaccgccacggctgccgctacgactacaggggcgccgcccgggacgccatcgcccgggagaacccggtggtgcgcgcggccaagatcgttaggttctgattcgaccggcgggcggaggaaggaattgcagagagggaaaacgaagattccaagggcggaaggggggaaaggcatgcgaaatcagagaggtcttcggtgttactactatgctgttcttggacgtgtttgatttttaatctccttttatatatatatatatatataattttcctacggaggtgggaggagaggaggtggacgaagaatagtgtaatgataatggtggtggtgcaccggcggtggttgagggcccaaaacgatgaacacatggggttgggttgggtgtatgtatctatctgtcacacgcagcttttgtgcaagactattatactaaaaaaaaaaaaaaaaaaagggcagccgctcgcgatctagaactagcggacgcgtgaa

SEQ ID NO: 268383 - DNA, 605 bp, Zea mays
tctggcctcccaattcgctggccgctccggcgggcggggccttcgccgcgggccaggctacggaagccgcggcgagggcgtccgcgagccggtgctccagctgccggaagcgcgtggggctcacggggttccggtgccgctgcggcgagctcttctgcggcgcgcaccggtactcggaccggcacggctgcagctacgactacaagggcgccgcccgggacgccatcgcccgggagaacccggtggtgcgcgcggccaaggtggttaggttctgatccacgacggaaggaaccgcgccgcgcgcgtgcgtgcgcagacgggaaggaagtacacgacacaaaggctcgcagggcggagaagggaggaggaaggcgtgcagacaaggtcttcggtgttattattattacgctgttcctttgattttaatctcctttttttaaaaaaatatttgtcctatgggaatgggaggagaagaggtggacgaagaataatggtggtggtgcagtggcggtggttgagggcccgaaacgatgaacagatgggttggattgggttgggtgtatgtatgtgtcacacgcaactttggacagaactattatactagt

SEQ ID NO: 268384 - DNA, 575 bp, Zea mays
atagatgaccgaaacctcctggggctgacggggtgcgggtgccgctgcggcgagctcttctgcggcgcgcaccggtactcggaccggcacggctgcagctacgactacaggggcgccgcccgggacgccatcgcccgggagaacccggtggtgcgcgcggccaaggtcgttaggttctgatccacgacgggcgggaaggaaggacacagacacaaaggctcgcaggcagggcggagaaggggaggaggaaggcgtgcggacaaggtcttcggtgttattattattacgctgttcctttgattttaatctcctttttttttaataaaaaaatatttgtcctatggctgaatgggattgggagaagaggtggacgaagaatagtggagtaataataatggtggtggtgcagtggcggtggttgagggcccgaaacgatgaacagatgggttggattgggttaggtgtatgtatatgtcacacgcaactttggacagacctattacactagtcctccaaacccaaaaaaaaaaaaaaaagggcggcagctcgagcccacgcgtccgcccacgcgtccg

SEQ ID NO: 268385 - DNA, 261 bp, Zea mays
gcggcgaaatcagagaggtcttcagtgttactactatgatgttcttggacgtgtttgattttgaatctccttttatatatatatatatatatataattttcctacggaggtgggaggaggagaggtggacgaagaatagtgtaacgctgataatggtggtggttgagggcctgaaacgatgaacacatggggttgggttgggtgtatgtatctgtcacacgcagcttttgtgcaagactattatactacatcgctggtccc

SEQ ID NO: 268386 - DNA, 608 bp, Zea mays
gcactgggtcggtgctttcctgtaactagaatcacacaagataaccatgtttacattttacagcaaacgaccaccagtaagacctcatcaagcaggctacaaaaaccgagcttgctggaatggatgttcatcacacaaatctaacaatcagtctctgtaatgtacatcgacctacctacacatatggcggcatccatggactgtttgttagcatggcatttgggcagccttcctttcatcaccttctaattgctcttttgctcctgtaactgctaagagtcgagagcccccctgcaaatactgacatctcagagggtggagacgagggctggatcgacgacgggagtggagaaaagaagcttgtgtcgttgtttggaaggtcaaagtcgtacaagtcatccgcaaacatagcaaattcagcatcgccatttctgaagtccagtggcagtggcatgtccctgctggactcaagcctttcaggctctagcaccacactgtcgagatctgtcagtgatttgatttgacgatccagagaagcaattgtcttctggcactctgcgagcttcccagctgcgttagcgagctccttctcctacagcaatgacaac

SEQ ID NO: 268387 - DNA, 401 bp, Zea mays
ggaaagtagaatttaagttgaacaacaacacatacaaacttcacttgagcattgaatatgcacttcctttgcactttcctgtaactggaaacacacgcagataaccgagttcacattttgtaccacactaaccgtcactgacacagtaagacctaagacctcatcaagcacgctaaaaaaaactgcgcttgctggaagggatgttcatcacacaaatctaacaatcagttcctgtaatgtacatggacctacctacctacatatgggagcatccatgaactatttgttagtacgacatctgggcgcagcctagtttttcatcaccttctacttgctcttttgctcctggaactgctaagagtcgagagcccccctgcgaatactgacatctccgagggcgg

SEQ ID NO: 268388 - DNA, 1230 bp, Zea mays
gtccggagatggaggatgccgttgctatagcgccgcgattctttgtcgtgccactctggttgctcaccggcaatgcgatggtcgatggcctcgatcccatgacgttccgcttacctgcacatttctttggtgtctatgacggacacggtggtgcacaggtagcaaattactgtcgggaacgcctccatgtggccctactggagcagctgagcaggatagaggagactgcgtgtgcagctaacttgggagacatggagttcaagaaacagtgggaaaaggtctttgtggattcttatgctagagtggatgacgaggttgggggaaacacgatgaggggaggtggtgaagaagcaggcacaagtgatgctgctatgacactcgtgccagaacctgtggcacctgagacggtgggttcgacggcggtcgtcgctgtcatctgctcctcacatatcattgtctccaactgtggagattcacgggcagtgctctgccgaggcaagcagcctgtgcctctgtcggtggatcataaacctaacagggaggatgagtatgcaaggattgaggcagatgggtggcaaggtcatacaatggaacggttatcgagttttcggtgttcttgcaatgtcgcgatcaattggtgacagatatctgaagccatggataattccagtcccagaggtaacaatagttccgcgggctaaggatgacgagtgccttattcttgccagcgacggcctctgggatgtaatgtcaaatgaagaggtatgtgaaatcgctcgcaagcggatacttctgtggcacaaaaagaacagcacaagctcatcatcagccccacgggttggtgactccgcagactcagccgctcaagcggctgctgaatgcttgtcaaagcttgctcttcagaaggggagcaaagacaacattactgtcgtggtagttgatctgaaagcacagcgcaagttcaagagcaaaacttaaccgtgacaagcgtagcaacaagttgctaagaacctatagattcggacagtcccaagttcggtcattttagttcgctgctttagtgcattgcttagcccagttccttatttttctcagttctttttaagccatgccaagggctgtattccccgtatacggtacagatcgcgaaatccctatcagggatggtttggtgatatcagaaaaaaaaaacaagggcggccgctcgcgatctagaaccgaaaaagtggg

SEQ ID NO: 268389 - DNA, 524 bp, Zea mays
cgctcaagcggctgctgaatgcttgtcaaagcttgctcttcagaaggggagcaaagacaacattactgtcgtggtagttgatctgaaagcacagcgcaagttcaagagcaaaacttaaccgtgacaagcgtagcaacaagttgctaagaacctatagattcggacagtcccaagttcggtcattttagttcgctgctttagtgcattgcttagcccagttccttatttttctcagttctttttaagccatgccaagggctgtattccccgtatacggtacagatcgcgaaatccctatcagggatggtttggtgatatcagggtttatatgttttcctgaccgtggtgactgtcctgttttcattcttctttcttcgctgccctgtattcattttgtcaagctggggcaggcatccaagtatttggcaatgtatatttgagcttgcaggatacaaagggaacgaattgttatgaagggtacgtatcctgccctgctgaatttgggaatctatcaactgcatcag

SEQ ID NO: 268390 - DNA, 555 bp, Zea mays
gcgtgtctgccttccgggccactacttatccctcgtgtggggttctgacacggcgccgactgcgactgagaagaaacctccaaacacctacctctctacgaactacctgccgccggaaaaccctagagcgctcgaccatggatccgcagcagccggagcctgtcagttacctctgcggagattgcggagctgagaacaccctgaagcccggagatgtcatccagtgccgtgaatgtggctaccgcatcctctacaagaagcggacccgccggattgtccaatatgaagcgcgctgaagagtgaagacaagggaaaacactgaagatggttgatctattactcgccacattacctatgtaaacagtcttctgggggaaatgaaaatgtcagacttaacgtttgtatgtcgtgtgcctcctttgaacctgagctgtataatttgtaacgcttgaactggggactgatttgagaactgagacactgcagcaatatgttgatggatcctaagtggcgaatctaatgcatgcgtaaaagaagaggctgccgctcttaaaa

SEQ ID NO: 268391 - DNA, 467 bp, Zea mays
gcgcccacgcatccactcactcatccccgcgcttgcccttcactttaccaggtcaataaatatagagctcaggtgtcaattcgaaggatacaccacatagatcaataggacaatcatccactcatccgctactactacttcgtcatgtctactacctttgatataaaattctcacctcctggctactacggatgatctgcatttctccgtcgtttcttgctgcaaatcttaatttaataatgttctgcttcagattgcggagctgagaacaccgtgaagctagtagacgtcgtccagtgccgtgaatgtggccaccgcatcctctacaagaagcggacccgtcggattgtccaatttgaagcacgctgaagagtgacgacaggggaaaaacactggagatggttgatctattactcgccactcacctatgtaaagagtcttgtgagggaaatgaaagtgtcagacat

SEQ ID NO: 268392 - DNA, 276 bp, Zea mays
cgacgactgcggttgggaagggaagacgcctacaaacccctctctacctctcctctgcgaaccacctgccgccggaagccctagagggctcgacccatggatccgccgcagcagccggagcctgtcacctacgtctgcggagattgcggagctgagaacaccgtgaagctagtagacgtcgtccagtgccgtgaatgtggccaccgcatcctctacaagaagcgcacccgccggattgtccaatttgaagcacgctgaggagtgacgacaggggaa

SEQ ID NO: 268393 - DNA, 1254 bp, Zea mays
cttgaaagtctacctcaagacgctgctgacgaggaagaaccacttgacaggggtggagtacagggacgaccccaccatcctcgcgtgggagctgatgaacgagccccgctgcaccacggacccctccggcgacacgctgcagcgctggatggaggagatgtcggcgtacgtcaagtccatcgacaagaagcatctgctcaccgtcggcaccgaggggttctacgggccgacgagcccccaggagaagctggacgtcaatccgggcacgtggaaggacaacaactacggttcggacttcatccgcaacgccaagatcccagacatcgacttcgcttccatccacctctaccctgacacctggctgctgcagcagcacgccacggtggacgagaagctcaagttcgtgaagcggtgggtggcgtcccacatcgaggacggggacaaggagctgggcaagccggtcctcgccaccgagttcgggctgtcgcaccgcgccaagggcttccaccactcccaccgcgacgtcttctacaaggccgtctacgacaccgtctaccggtcggccgcccgcggcggcgccggcgccggcgccttcgtgtggcagctcgccgtggaggacatggaggagttccacgacgacttctccgtcgtgcccagcgagcacccctcgctgcacaggctcatcaagtcgcaatcgtgcaggctggccaagcttaggcacggggtcggggaagggaggccaagcggacgctgtcggtgtgcgccgccggctcgtcctaggaacgaccgacgagcggtgctgcgcaggcagaagccatttccacgcgtccccctttcagctttgttgcgcccagtccgagggttttgtctttgtttctgtcgtccgaatggagcgagtggtgatggtgaagtgtgtcagaaatagatcggagaaaaatgaaatagaaagcagcaacagcaacaagaaaaaaaaagtgtgttacctcgtgaggctttggtaatgctgctggttagattcgtttgtggccacagcaccgacgcctcacgcagtcacgcctgcccgtggaatggcagatcggcatagataagctacagtttccgtcctgtgcaactgtacgttagatgcccttgacctttgatatgtagagtcatcgtcgggtggcatccaatggtaatagtcctccatatatagtgtatttctgcaatctggacattggacctatatttatatatagctgtaagcataagaggccc

SEQ ID NO: 268394 - DNA, 602 bp, Zea mays
  unsure (1)..(602): unsure at all n locations
accggnccggaattcccgggtgcgacgcacgcgtccgcatctctcgctgcacgactcaggtcttccccgggggctggacggcggtcctaggcgcgcgcgacaacgttggtgtctggaatctgcgcgccgaaaggctggatgactggtacagagggcaggaggtctatgtgaaggttgccgatccactgggctacaacatcaccgagatggtcgtcccggacaatgccctctactgtggtctactgaaggagaggcaaaagccacaggttcatgagtcgaacagcaagtcgtcggcgcaaggcgatgctggatggagcaaccgactcctcgcaaccatgatcctggtcgtcgcagctgtgatcttcagttgatcctctctctttttttttctccaaagttttttggtagatttttgcctagaggaaatagaacattgaaacgtctagcctacaagttcagcatagggtagttcgtggagataggatctggccgagctgtttgatagtgtagggcagcttggaatgatgtctgtggagaaggcaagaaacgtgatactggaatgagatttatcagttaaaaaaaaaaaaaaaaaaaaataaaaa

SEQ ID NO: 268395 - DNA, 776 bp, Zea mays
  unsure (1)..(776): unsure at all n locations
ataaaaccctaaacccaggacccagggttatcggtgaggcgagccgcgagtggaactgtggaagcgtcgagcttttttcttctttggcttactgcgcaagaagaagggtaacgagaggacggcggcgatggcgaagaggctgctcccgtctctgaaccgggtgctggtggagaagctggtgcagcccaagaagaccgccggcggcatcctcctcccggaaacatccaagcagctgaatgctgctaaagtggtggctgttggccctggtgagcgcgacaaggcaggcaatctgatcccagttgctctgaaggaaggtgacactgttctcctgccagagtatggtggaactgaagttaagcttgcagctgataaagagtacctcctcttcagagagcacgacattttgggcacacttgtggactgattcagagcatcagcaagcctgtcactagtcgttggttctagacttctagtgtgagatgcgtagtatcagattctgggatcaaaatccctgagaaagaactctgaactgtcgtgatgtcatagattttgtgatgaaacatcataattgcctgcttcttgttgcaagcgaacttttgcgtttaaaatggttccataacactctcgttcgcctctctgtccccggctgcaatgctctctaatttacgttggctgttgattggatttccagtatgtacttcttatggtgcccgggaacaattaaaaaaannaaaaaaaaaaaaaaaaaaaaaaaaaaaagggcggccgcacgggaa

SEQ ID NO: 268396 - DNA, 650 bp, Zea mays
ataaaaccctaaaacctccggctgatcggttggtgttgaggcgagtggaagcttcgagtttttttttcttctttgtcttgctgcgcaggaagaagggaaacgagaggagggcggcgatggcgaagaggctgctcccgtcgctgaaccgggtgctggtggagaagctggtgcagcccaagaagaccgccggcggcatcctcctcccggaaacatccaagcagctgaatgctgctaaagtggtggctgttggccctggtgagcgcgacaaggcaggcaatctgatcccagttgctctgaaggaaggcgacactgttcttctgcccgagtatggtggatctgaagtcaagcttgcggctgataaagagtacctcctcttcagagaggatgacattttgggcacacttgtggactgattcagatcgcgggcaagcgggtggtgagatgcgtaggatttgaagctgggaacaaactccagaaagaactgtgccctgtcgtgatgtcataaatttgtggtgaaacatcatatcatgaggataaaacttgttgcttttttgtgatgcaattgtggaaactttcggatttaaaaaaaaaaaaaagggtggaaaaaaaaaaaaaaaaaaacaaagaaaaaaaaaaaagggggccccccc

SEQ ID NO: 268397 - DNA, 393 bp, Zea mays
cttgcaaggtttgaggcggctttctttagaacacatgctaattattttttttgtttcattggtgtatgaaactaaatcttgatattcatgggaagcttcgagttctttttccttttggcttactgcgcaagaagggtaacgagaggacggcggcgatggcgaagaggctgctcccgtctctgaaccgggtgctggtcgagaagctggtgcagcccaagaagaccgccggcggcatcctccttccggaaacatccaagcaggtagcaccatcgtccgctaccgttgttttttagtagtttaggggattcagtttccggcgagggacgtttggatcatggtgtcgggcaaggtgttccgcgccgtcgcttgccgaactgaaaacggctgcagcag

SEQ ID NO: 268398 - DNA, 318 bp, Zea mays
  unsure (1)..(318): unsure at all n locations
accggnccggaattcccggggcgacgcacgcgtccgggcttcgagatggggcaggcgctgggcggccacatgaggcggcaccgcgaggagaggacgacgggcgccgccgatgcctgggtctggcgcgccgacgacgcgctgcagcgggcccgcgggggcgccgccgacccgcccgtcttgctcgagctcttcgcctagctagctagatgatccgtagcggcggcattgattagtatataatccacccaggacatgtgaatcttcttaggccctgtttgggaacaaagtttttgaaaaccacagtttttgaaatactaa

SEQ ID NO: 268399 - DNA, 898 bp, Zea mays
  unsure (1)..(898): unsure at all n locations
gaccggtccggaaattccttgtcgttccaacgcgnccaccgccttcggcctcaacctcgctgcctccgggcagctcgccgtcttccgccccaaggtcgatgagatctctctcctcaccatcaacaccaccaccggattcaacccagcttcagctggtggattcatggtagcatttgccggcaggaagtatgcagctagatctattccgatattcgtatccaacacctcagtcacagtgtccagcttcacactggtacttgagttcaacaaaggcagactccaaaacttgcactggaagaaggacggctgtggcgcttgctccggcaagtcgaacttcgtctgcctcggcaaacagacatgcgccatcaggacgcagagctgcaagagccaagggcccgtcgactgcagcgtcggcatccagctggctttctctggcacggacaagcacgagtcggttctgaactcgtggtacgaggtgtccaacctgaggcagtactccctctacgggctctactccaacctcaaggacaccctgagcggccagttcaacaagatcttctaggctgctttggtgctgccattgtttattctctcctgctcccatcccgatcattcttaatcctgatgttgtgcgtaacattattttggtttcgcgtccgggttgcctgtatccagacccgcgtccgccctgtctcagctctaccgtatgtaccattgcccgttggtgtcgttttagtgcctagcagggttgatgaattttgtgatgagctagctactgtcctgccgatgactatgtttgcttccaaaggacacggcttatcgtcgctgatacccctgggtcgaggttttatgttataacgtcattgtggtcttgtcatgacaatgtcttggtattata

SEQ ID NO: 268400 - DNA, 731 bp, Zea mays
ctagtcaccttctccctcacacccacctctaccgctgtcgctcacgagctctccgcccaacagaaacggcggtggttactggaagccagcttggccggttcggttgccaccaacgcgccccgcaaaatctcgtcgccgaccgccatggcagccgccgacgcgtcgcgtacgctgcttgctgcagtatctctcgccttagctgcctgctgcctcgcgcagctggcggcgggggacacgaacggcgtctacgagccgtgcagcgacgcacggatccagcgcggggacggcttcaccttcggggtggtcttcgcgggatacaacgccttcttctccggcaacacacagctctccccctgcgaccgccgcctcaacctcgctgcctccgggcagctcgccgtcttccgccccaaggtcgacgagatctccctcctcaccatcaacaccaccaccggattcaacccagcttcagctggtggattcatggtagcatttgccggcaggaagtatgcagctagatctattccgatatttgtatccaacacctcagtcacagtgtgcagcttcacactggtacttgagttcaacaaaggcagactccacaacttgtactggatgaaggacggatgcggcgcttgctacgacaagagtatccaccaacgccgtggccatattacctacgtcatccagacccacagctggctgaaccaatggacccacgcctccagaggggg

SEQ ID NO: 268401 - DNA, 464 bp, Zea mays
agggcccgtcgactgcagcgttggcatccagctggctttctctggcacggacaagcacgagtcggttctgaactcgtggtacgaggtgtccaacctgaggcagtactccctctatgggctctactccaacctcaaggacaccctgagcggccagttcaacaagatcttctaggctgttttggcaacctcaaggacaccctgagcgtccagttcaacaagatcttctaggctgttttggtgctgccattgtttattctctcctgctcccatcccgatctttcttaatcctgttttggtgcttgtatccagaccagttttaaccctgtctcagctctaccgtatgtaccattgcccgttggtgtcgttttagtgcctaacaatatttatgaattttgtgatgagctagctactgtcctgccgatgactatgtttgcttccaaaggacacggcttatcgtcgctgat

SEQ ID NO: 268402 - DNA, 367 bp, Zea mays
agcgtcggcatccagctggctttctccggcacggacaagcacgagtcggttctgaactcgtggtacgaggtgtccaacctgaggcagtactccctctacgggctctactcaaacctcaagggcaccctgagcggccagttcaacaagatcttctaggctgttttggcgctgccattgtttattctcccccctgcaccctcctcttctttctgtccgcatgctccggttcctcatgctgtgcttgattcacattcttttagttgccgcccgcccaggttgcttgtatccagattccagacctgttataacgctgtctgagctctaccgtatgtaccgttggtgtcattttagcgccctttttttcgtc

SEQ ID NO: 268403 - DNA, 612 bp, Zea mays
cggctcgatgtctgagtggattcccacgagatatgagctttcagttgtgcaattggttgacacgataagatgcaagctgatggagatgatgtacacacgcagagagtcttccaatgcatggactgaggtattaacaccggcagccaatcagaaacttcaggaagaggtgacaaagcccacaccctcaatgtccttccagcagaaaacggtgaaaatggcaatgtgtttaaggtctgtgatgactcagttaatgttgtcaaccttgacacatgggaatgcacctgccaaaggtggcatatttctgggctgccatgcatgcatgtgattgctgtattggagcgcactgggcaatatgcatatgactactgtgtgaagtacttcacaacagaatgctaccgcttgacctattccttgtcaataaatcccatacctgatgttattgtgccgcctacattaatcgacttagctcagagcccagcaacatacccatgcccactgcgaacccgccgtcgggttggccggccaaaagagaagcctgctgatcctcgcattgcaatcaagagggcagtgcgctgcagcaggtgcaagggttatggacacaacaaggcaacc

SEQ ID NO: 268404 - DNA, 1747 bp, Zea mays
ggcctgcgcctcgtcggctgctgcaacgagctcaacgccgggtacaccgccgacgggtacgcgcgcgcgcgcggcgtcggggcctgcgccgtcacgttcacagtcggggggctcagcgtgctcaacgccatcgcgggcgcctacagcgagaacctgcccgtcatctgcagcgccggcgggcccaactccaacgactacgggaccaaccgcatcctccaccacaccatcggcctccccgacttctcgcaggagctccgctgcttccagaccgtcacctgccatcaggcggtggtgaacaatctggatgacgcgcacgagcagatcgacacggccattgccacggcactgagggagagcaagcccgtgtacctcagcatcagctgcaacctccctgggctgcctcatcctaccttcagccgcgacccagtgcccttcttcctcacccccaggacgagcaacaagatggggctagaggctgcagtggaggcaactgtcgaattcctgaacaaggcggtgaagccagtccttgtcgccggccccaaactgcgtgtggcaaaggcaggaaaggcatttgtcgatatggtagatgccagtggctatgcctatgccgtgatgccatcggccaagggtcttgtgccagagactcacccccacttcatcggcacctactggggcgccgtcagcaccgccttctgtgcggagattgttgagtccgcagatgcctacctctttgcaggccccattttcaatgactacagctctgttggctactcattcctcctcaagaaggaaaaggccatcatcgtccagcctgagcgtgtgatagtggggaatgggccggcattcggatgtgtgatgatgaaagagttcttgtctgaattggctaagagggttaataagaacaccactgcctatgagaattacaagaggatctttgtacctgagggccagccgctggaaagcgagccaaatgagccactgcgagtgaatgtgctcttcaagcacgtccagaagatgttgactggtgatagcgcggtgattgctgagactggtgactcctggttcaactgccagaagcttaagctgccagaaggctgtgggtatgaattccaaatgcagtatggttcgattggatggtcagtgggtgcattgctcggatatgctcagggtgcgaaccacaagcgtgtgattgccttcattggtgatgggagcttccaggttacagcacaggatgtgtcaactatgctgcgatgtgagcagaacagcataatcttcctgatcaacaacggtgggtacacgattgaggtggaaatccatgacgggccatacaacgtcatcaagaactggaactacactggctttgtggacgccatccacaatggcttgggcaagtgctggacctccaaggtgaagagcgaggaggagctgacggctgccattgagacagcgctaggggagaagaaggactgcctgtgcttcatcgaggtgatcgcgcacaaggacgacaccagcaaagagctgctggaatggggctctagggtttctgccgccaactcccggccaccaaatcctcagtagaagtcccgcaggctccaagcctcggagtgccagtagtgatagtaagctgtagcacggtgggggctcaaccgaataacgtgaacgcattgccctttctgttacgtgttttaaaaaaaaaaaaaaaaaaaaaaaaaaaagggcggccgctcgcgatctacgaacgaaaggg

SEQ ID NO: 268405 - DNA, 386 bp, Zea mays
  unsure (1)..(386): unsure at all n locations
agaagaaggactgcctgtgcttcatcgaggtgatcgcgcacaaggacgacanccagcaaagagctgctggaatggggctctagggtttctgccgccaactcccggccaccaaatcctcagtagaagtcccgcaggctccaagcctcggagtgccagtagtgatagtaagctgtagcacggtgggggctcaaccgaataacgtgaacgcattgccctttctgttacgtgttttattttattgtgtttctgtggtcgtatatctgttttgtgacgtgtcccctgcttctcccatgtgaattccacaagaactatgagaaatttcaggttggtgatcactaaaaaaaaaaaaaaaaaaaaaataaaaaaaaaaaaaaaaaaaaaaaata

SEQ ID NO: 268406 - DNA, 1182 bp, Zea mays
ctggcaacatctcaagatcaaaaagaacctacattggaaaaataaggtctaacttccttggcacaagatttttaatttatgatacacaaccgccctataatggggctgtagttcctcctgccggaaggacaagcaggaggttcaactccacaaaagtctctccaaagctgccttcagtcagttacaacatcgcacaggtatcgtatgagttaaatgtccttggcacgagaggtcctaggcggatgcgttgcatcatgcactccatacctgcatcatcagtggagccaggtggcacagtgcctggacagccagagcagattgtacctcgagccctggaggattcattccgcagcacggcttccttctcgcagtcgttccgtagcactgcctcattctccaagtccatcatggactcatccatggatttcaatagcgctcgcttctctgacatcgctggcagcagcgctcgcttcacgggcgttcctggtagcagctctcgcttcgcgggcgttcctggcagcagcgctcgcttctcgggcattgctggcgccagattggacaacgacgaggagagtgaaaccaaggagaggccactggtgcttcgtaataagccgcctaggtggcacgaacagctgcagtgttggtgcctcaacttccgtggccgtgtgacaattgcctcggtgaagaacttccagctgatcgccgcggctaccccgccaccggcaggtgcgccaaccccctctcagcctgccccgtcagatcccgacaaggtgattctccagtttggcaaagtggcaagggatatgttcacgatggactatcgctaccctctctcggctttccaggcctttgccatttgtctgagtagctttgatacaaagttagcctgtgaataaatggagaagaacaaaggtaaaggagaacatcaggttgcttgcattaggccatcagtgtacctctttccatctggctctcgtgttgccttggttgtatttgtgcttaatgtagccatgaatttggtggcccatatatggacgcatgtgttgttgttggccctctcccttagaagtgattaaaagttgcatttggaccacatgttacccgatctgtaatatacttgcagtggcatcgcatgccgcgtgataacaaagttcccgttcgtgattggacttgtatggtttc

SEQ ID NO: 268407 - DNA, 553 bp, Zea mays
  unsure (1)..(553): unsure at all n locations
agtcggtcgcttgcttgatctaatgcagcatgcgaaggcttctcacttgttgatttttgaagatcgcgacaaacacgtggtcagttaagcttatcacacgactccaattgccgatcagctcaacaatgacatatgacaggtaaacaggatacacctctttagaaggttctttgaaaaatgtttgctttagagattcaggcctagctagggtaggaggatagtgttgttcatctgcaagactttcttcaaccacgggcaacacattctcagcttagatgaggttgcagtcttctaatagttcactgtcttccatgccgttctcatccaacgcgacaacatcatggttagtgaattgatgaaaatctactatctttcaccggatgcgttattcaccagcttatgttgagttttcctaatccagactcaatttcccggccagcaatgtctcccgtacgatgcaaatcaagtcatcatattcttcagtcctgtacagtaatttgcttggtttctagcaagaactgttccgtacgcgtgggtcgccccggttnttccg

SEQ ID NO: 268408 - DNA, 1910 bp, Zea mays
accgtcgtccgagttggcatctttggcctaaccttgtatcattgcccaatcacagatctgctccgccttctctttctaatccctctttcttcccctctctctctctctctttctctctctctctctctctcgcattacccactacctgcttctgctgcttgcttgtgcggtggacgctgcggtgcggagctggagaggtgaagaaggggatgaaggaggagatggtggtcggcctgtcggcgccggggccggtggggaggtggggcgccgcgccgccgcaagcatgctggagaggatgaaggactacggccaggagggcgccttcgcgctctgggacgatctctcgcccgaggaccgggagctcctcgtccgggacatcgagagtctagacctctcaaggatcgatcggatcatccggcgctcccttggatcacaaggcatcccattgcctgctgtcgagcccgtgccggaatctagtgtctccaaggtggaggacaggtctgcagaggacaaagaaagatggtggaagaaggggttgaaagccatctcggaggggaagctggccgttgtccttttggccggtggtcagggtactcgactgggaagctcagatcctaagggatgtttcaatatcggacttccatcaggaaagtcacttttccagctccaagctgaaaggattctgtgcgttcaaaagctggctgctcaatctagcgaaagcccgagtaacactgtgccgatccactggtacataatgacaagcccctttacagatgctgccaccgccaaattctttgaaacccgtagatactttggcctagaccctgaccaagtgacatttttccaacaaggcacacttccatgcgtctctgccgatggtagatttattatggagacaccatatagggtagcgaaggctcctgacggcaacggtggagtttatgctgcgctgaagtccaagaagctgatggaagacatggctgcgcggggagtgaaatacgtagactgctacggagtcgacaacgcgctggttcgagttgcggatcctacgttcttagggtacttcatcgacaagggtgtgtcttctgccgccaaggtggtgaggaaggcttacccgcaagagaatgtcggggtgtttgttcaacgaggccgcggtggacctctctccgtggttgagtacagcgaaatggacgcggctatgactactgagatcaatcagtcgacagggcgactccgttactgctggagcaacatctgcctgcacatgttcactctggacttcttgaaccaagtggcgaacagcctcgagaaggacagtgtataccatctagctgagaagaagatcccttccatccatgggttcacgacgggcctgaagctggaacagtttatattcgacgccttcacttactccccgtccacggcacttttcgaggtcatgcgggaggaggaattcgcgccggtaaagaacgccagcggcgcaacgtatgacacccctgatagcgcgaagctcatgctgctccgcctccacagcagatgggtagtcgctgctggcggcttcttgacgcactctgtgcccttgtatatgacaggcgtcgaagtttctccgctctcctcctacgccggagagaacctggaagccatctgccgtgggcgaacgttccatgcgccgagcgagatctcgttttaggaggtagacctgttcatgggactggagtagcagttgtgtgatcatctgtaaaacgagcgtaaaggatgggcaggctgttgtgtactgcgtgttgtagatgtaacatctcggacggacaccaaattcatctcgagttttctctccgaggacaaacaaacagacgaaagtgcataaagctgaataaccggaacaagaacagccttcataatgcacaaaatag

SEQ ID NO: 268409 - DNA, 468 bp, Zea mays
catgcgggaggaggaattcgcgccggtaaagaacgccaacggcgcgacatacgacacccccgatagcgcgaagctcatgctgctccgcctccacagcagatgggtggtcgccgccggtggcttcttgacgcactccgtgcccttgtatatgacaggcgtcgaagtttccccgctttcctcctacgccggagagaacctggaagcgatctgccgcgggcgaacgttccatgcacccagcgagatatcgttttaggatatcgttttgtgtaactgtggactgaacggaaagggttgcaagattgtgcatgtttacttcgaggcgtgagatgggtgtcgggttgatgtgttgcttgtatgttctctgagtgttgtgatgtagcatctccaactccaaattcatctcgagttttctcccccatctccttggactgctgccatttttaatgacaatcggtcaggttcggatcc

SEQ ID NO: 268410 - DNA, 435 bp, Zea mays
cggacgcgtgggcggacgcgtgggcggacgcgtgggcggacgcgtgggcttccatccgtgggttcacgacgggcctgaagcttgaacagtttatattcgacgccttcacatactccccgtccacggcacttttcgaggtcatgcgggaggaggaattcgcgccggtaaagaacgccagcggcgcaacgtatgacacccctgatagcgcgaagctcatgctgctccgcctccacagcagatgggtcgtccccgctcgcggcttcttgacgcactctgtgcccctctatatgacaggccttgtagtgtctccgctctcctcctacgccggagagaacctggaagcgatctgccgtgggcgaacgttccatgcgccgagcgagatctcgttttaggaggagcacttgtgtctggagtagcacttgtgtcatctgtaaa

SEQ ID NO: 268411 - DNA, 1639 bp, Zea mays
  unsure (1)..(1639): unsure at all n locations
tcgttcgaattgcgacagcgagagcgggaagaggaaactcgaaactcggcgagcgggatggcaaccggcccggagaagaaggcggccagcacaaccgagctccccgcaccctcaggctggacgaagaaggttgctccaactcgaggtggacgatttgaggctatttttgtttccccaactggtgaggaagttaagagcaagagacagctaacccagtacctgaaagctcatcctggaggccctgcatcctcagagttcgattggggaaccagtgatactcccagacgctcagcacgcttgagcgagaaggtcaaggcaactgagagcccagagggtgagaagacccctaaacggggaagatcaagttctaagagaggcaaaaaggaggaaaaagaagacacagaggctgcaaatgaggctggagaagatggtgcttcggcggaaggtaaaggtaccgatgtggagatgaaagatgctgaaaatgctgaagacgagaagaaagatgtcccaagtgcagggaagactgaggaagttgacgataagaaagatgctgaaaatgtggagatgaaagatgctgcagagaagactgaggaagttgacgataagaaagaggaagcccctactgtagatgcagcagagaagactgtggaaggtgatgataagaaagaggagccccctgcagagaagactgatgagaaagaggaagccccagctgtagatgcagcagagaagaatgaggaaggtgatgataagaaagaggaggagccccctgcagagaagaactgttgagaaagaggtggtccctgctgtagatgcagcagagaatactgaacaaagcaccggtgggcaagcacagcctaacgatgttgctgccccagaatctgagaataaaggagacggcaagccagctgaatccgaatcagctccccttgcatttgttgatgaagcagcgccccttgtaatcgttggtgaagagaaaactgaggacagtcaggcagctgaatctgcggtgccttccctggcgtcttcagagggagagaagaaagagaacggtggtgccactgaaccagcagcacctcctccagctgatgcagacaagggcgcggagaattcaggccaggtgaacaccgccccccaagaaccgacggcagcgaactgcgacaaggggcagatccaacctggtgcctctgctgtcaggtgcacataagggagcttggtctccgatgagagactgttgctttgtgtgtttagggcaatacctcgcatttgctttgagaattataatcgtggttaacctgacaggacagcgctgtgcagcactaggctgcccagcacgtagttatctttccgttttttttatggcggcagggacaaatgtgtgtacccggttcaaagtgtaactcgttattagcgtggtgaacattgatctctggagcggactggaggacgtagtactgtctccaactgttgtaacgtgacgttgtttgtgttgttgccttgtgttattgaacttattatgatccataaataaaagccataagcgtggcaggggtcattccctgaccaccttcaggcaccaaataaaaaaaaaaaaaaaaaaaaaaaaaaaaaaaaaaaaaaaaatntaaaaaaaataaaa

SEQ ID NO: 268412 - DNA, 1607 bp, Zea mays
caacactccaacccgtccccccccaattcagcaccagcctttgcgcatcgcgacagcgatatcgggaagaggaaactcgaaagcccggcgagcggtatggcaaccggccaggagcacgtggcggcgcggcgccggcggtcgaggagacgccggagaagaagcaggccagcacaaccgagctccccgcaccctcaggctggacgaagaagcttgccccaactcgaggtgcgaggtggacgatttgaggttatttttgtttccccaactggtgaggaagttaagagcaagagacagctaacccagtacctgaaagctcatcctggaggccctgcatcctcagagttcgattggggaaccagtgatactcccagacgctcagcacgcttgagcgagaaggtcaaggcaactgagagcccagagggtgagaagacccctaaacggggaagatcaagttctaagagaggcaaaaaggaggaaaaagaagacacagaggctgcaaatgaggctggagaagatggtgcttcggaggaaggtaaaggtacagatgtggagatgaaagatgctgaaaacgctgaagacgagaagaaagaggtcccaaatgcagatgctgcagagaagactgaggaaggtgaagataagaaagaggaggcccctgctgtagatgcagcagagaagactgagaaaggtgaagataagagagaggaggaggcccctgctgtagatgcagcagagaagactggtgagaaagaggtggcccctgctgtagatgcaacagaggagacagaaaaaagcaccgaaggccaagcacagcctaattatgttgctgccccagaatctgagtataaaggagacggaaagccaggtgaatccgaagcagctccccttgcatttgttgatgaaacagctccccatgtaattattggtgaagagaagaaagaggaaaatactgagaatgagaacagtcaggcagccgaatctgccgtgccttccctggcatctttagagggagagaagaaagagaatggtggtgcccctgaacaaccagccctgcctgtagctgagacgaaggcagatgctcctccggcagaggcagaaaagggggctgaaaattcaggccagccgaataccggctctcaagaaccgaaggcagcaaactgcgacgaggggcagattcaacctggtgcctctgctgtgaggtgcacataagggagcttgatctcagatgggactctgttgcgttatgtctttaggccgatacctcgcatttgctttgagaattgtaatcgtggttaacctgacagcgctgtgtagcactaggctgcccagcacgtagttatcctttcgtttcttttataacggtggtgttgcagcatgggtaatgggccggcctgtgctgcctcagccaccactgcatacccagtgtaagtgtaactcgttattagcgtggtcgacattgatctgtggagaggactgcaggacagtactgtcctcgacagctgtaacgttacgttttgtgtgttcccttgtgttattgaacttatattatgatccataaataaagccataaccccggcagggtcattccctgaccaccttcaggcatcccc

SEQ ID NO: 268413 - DNA, 326 bp, Zea mays
cccacgcgtccgcccacgcgtccgcccacgcgtccgcggcaagccagctgaatccgaatcagctccccttgcatttgttgatgaagcagcgccccatgtaatcgttggtgaagagaaaactgaggacagtcaggcagctgaatctgcggtgccttccctggcgtcttcagatggagagaagacagagaacggtggtgccactgaaccagcagcacctcctccagctgatgcagacaagggcgcggagaattcaggccaggtgaacaccgccccccaaggaccgacggcagcgaactgcgacaaggggcagatccaacctggtgcct

SEQ ID NO: 268414 - DNA, 453 bp, Zea mays
agagaagatggtgctgcggcggaaggtaaaggtaccgatgtggagatgaaagatgctgaaaatgctgaagacgagaagaaagatgtcccaagtgcagagaagactgaggaagttgacgataagaaagatgctgaaaatgtggagatgaaagatgctgcagagaagactgaggaagttgacgataagaaacaggaagcccctgctgtagatgcagcagagaagaacgaggaaggtgatgataagaaagaggaggagccccctgcagagaagactgttgagaaagaggtggtccctgctgtagatgcagcagagaatactgaacaaagcaccggtgggcaagcacagcctaatgatgttggtgccccagaatctgagaataaaggagacggcaagccagctgaatccgaattagctcccactgcatttgttgatgaagcagtgccccttgtaatc

SEQ ID NO: 268415 - DNA, 655 bp, Zea mays
caccctcctcatgtacatacgcggcgcgacgagcgtgcagtgttcttgctgccacactgtgaacctggctatggaagcaaatcaagtcgcgcatgtgaactgcgggaactgccgcatgctgctcatgtaccagtacggggctcggtccgtgaagtgcgcggtctgcagttttgtgacatcggttggaacctcacctggtgcagagcagaagcccagcagctgagctgatagtgtccctgaaagtgctgtgagaccacctatgaaaaggatgctttgagtgcacatgtatagagttcttccctgaagcgattctttcactttcttttcttttgtttcttttcttttcttttttggttcctcctcaccatctccaccccacccgtccacttctgcgttccttcgatggatctggcgagcccgcggaataaatgagagttttggatatatagctagggcttaacctcgtcgacttgtctgtaaaatcgaatgagacatatatataaacctatgttgttttaaaaaaaaaacaaaacaaaaacacaaaaaaaaaaatagtagcagaaagctacagactaattatgaaaaaatctgtaatagaaataaaaaaagggggcggccgttttaaaggacccaagtttactaccccgggcttgca

SEQ ID NO: 268416 - DNA, 335 bp, Zea mays
ctgagctgatagtgtccctgaaagtgctgtgagaccccctatgaaaaggatgctttgagtgcacatgtatagagttcttccctgaagcgattctttccctttcatttcttttggtttcttttcttttttggttcctcctcaccatctccaccccacccgtccacttttgcgttccttcgatggatctcgcgagcccccggaataaatgagagtttttggatatatagctagggcttaacctcgtcgacttgtctgtaaaatcgaatgagacccatatataaacctatagttgtctcccctgtttcaaaaaaaaaaaaaaaaaaaaggaggaaaaa

SEQ ID NO: 268417 - DNA, 1651 bp, Zea mays
ctttattatttcaagctggttgatccttctgttggtgcttcaggccacttagttaatccccacaatggaaatgatgattataacaaatttgtgtctgatttcacccccattctaccacttgaaaatccattcttcactgatatacaacaaggagcttttggttttgatggcatcatgaatcctcttgatcccctcgatgctttcttgaatcaaacacttgttgatcctgatgaacattcatcaacaacatcaaaagttcagtatgattctgacattccaacagaatttgagaaccattggaatatgaaggttgagcctcaagatgatcaatgctggtgggcaaacataggttttgagccagacgaaccaaatcctctgcttccttgtgacaccactgaccaagacatactttctgttgactctggtgctgattccttcaatgagcttttcaatagcatggaagagactggaattactgttaggcctcaacagttggactccactgtgcaaccaaaccatgtgttcgctagccagggcaatgcaacacggaggctgcggctacaggttgagtgtagggagatcataactaaagatgagagtgaagatgaagtatcatgtgttctaactccagactgtttgaacgattctgttgaggagtccactgcagagaaggatgtggcttctgatggggatgaggctgagtcaacagggattgttattagaagccatcaccctgctccaagatcaagctcagagaggtcattcactcaacagggaactgctatgcaaaggctgcggctacagtcaggccttaacaaaggccagcgtcctagtactgatgattcatcaagctgcattatagacgaaccaggaagtcagcacaaagcagaaaaagcagagattgaagaggatgcgagtacaaacctcgctggaagtgctgatgatctacctggtaatatccatgatgatgagcaaaagaacatccctgaacatggtgctgaaatgacttctccagaagccaaatctgttctgaggttgcggaagacttctgaggaaggcaacaaggatgtcaagcaggagagttgtctcgagccacacgtgagagcaccaatgcagaagggaggcttccaatcatacatcatctggctggttcttccggtggctctgctcctgcttctctgtgttgggacatatggatgggtatgaaatctatcctggtgcggtgcaaggcatgactttttgcgcacatgggttcttggcgtcaacctggtgtgctgtcttctgtacataacctgtggcatcctttcaacagccgtaccctgcagtaagacatcccggcattgccaaggcagctgaaaaataaataaaaaaaacaagtggtagaaatgacaaggtggaaaagagcgaggtgtgttattgttggttttagtacatcgtagtcttcttttgctgttgttgtagatgtcttgctaatgttgtcgctgttgtgtagttgcaattcaagcccagggctgccagttttatttcctaatgtaatgtagcaagagcgagaccctgttagacgggtgcgctgaaattctgaacctctgtaatatctgatgttcttgtggatacctgtttcagaattttcggttcctgaaaaaaataaaga

SEQ ID NO: 268418 - DNA, 615 bp, Zea mays
gaattcccgggtcgacccacgcgtacgcggacgcgtgggcggacgcgtggggtgaagatgaagtatcatgtgttctaactccagactggttgaacgattctgttgaggagtccactgcagagaaggatgtggcttctgatggggatgaggctgagtcaacagggattgttattagaagccatcaccctgctccaagatcaagctcagagagttcattcactcaacagggaactgctatgcaaaggctgcggctacagtcaggccttaacaaaggccagcgtcctagtactgatgattcatcaagctgcattattgacgaaccaggaagtcagcacaaagcagaaaaagcataaattgaagaagatgccagttcaaacctcgctggaagtgctgatgatctacctggtaatatccatgatgatgagcagaagaacatccctgaccatgggaatatgctttggaacttctgtatattgcgactctcgtgatgacttctgtttgtgctaaactagttaaatatgttgttgaactgaaggtgctgaaatgacttctccagaagccaaatctgttctgaggttgcggaagacttctgaggaagcaacaatggatgtcaag

SEQ ID NO: 268419 - DNA, 560 bp, Zea mays
  unsure (1)..(560): unsure at all n locations
gttgcaagagaggtanaaaaaaaaaaaaaagggcggccgctcgcgggctcgatctggccacattgacggggaccatctgacgcttctgaatgtataccatgcatacaaacaaaacaatgaagatccccagtggtgttacgagaactttgtcaattcaagagcacttaagtctgcagacaatgtcagacaacagcttgttcgacatcatgactagattcaacctcaagatgtgcagcacggatttcaatagccgtgagtactatgtcaatatcaggaaagccatgcttgcggggtatttcatgcaggtcgctcacctggaacgaactggacattacctgactgtaaaagataaccaggtcgtccatcttcatccctccaattgtatggaccataaaccagagtgggtcatctataatgaatatgtcttgaccaccaggaatttcattcgcacagtcaccgatatccgtggggactggtgagttactactatctgaacaaagctggtcacttttagtttgaccatttgaagatcgattgatatttcttgtgacttaatgtgc

SEQ ID NO: 268420 - DNA, 543 bp, Zea mays
gaattcccgggtcgacccacgcgtacgcggacgcgtgggcttgaccaccaggaatttcattcgcacagtcaccgatatccgtggggactggctaggggatattgcgccacatgactatgatctgagcaatttcccgtcatgtgaggccaagcgtgttcttgagaggctgtataacaagcgagagagggaaagagctgcaaatagaggctgaggttgatacttccacaaacctggtgctctgtaattccaccgcaggtctatccagagcccgtatacgagctttggttatcacagatagctgtcccatttgtcttaggcaaatgcgttagcatgatgtctcctacacaccctaatatctattgtctcatcagcatgatcattatgtacacaacctcgagaaattctttagcatctcaattagttgtgattcagattaattgtgtgacagtctgtttttgtatgcatcagacgtttatgttttgtgtttctatgtggttaactggttacccttcggttggaatgaaattcccctgattttggttt

SEQ ID NO: 268421 - DNA, 1902 bp, Zea mays
atgctaccctcgaagcagagaaattccagggttacttcaatggtgcacccttgatgaaggtgcctgggagacttcatccagttgagatattttacacccaagaaccagagagggactacctagaggctgctatcaggacggttatgcaaatacatatgtgtgaacctgctggtgatatccttgtattccttacaggagaagaggagattgaggatgcatgccggaaaatcaacaaggaaactaataatatgggagatcaggttggcccagttaaagtcgtgcctttgtactccacactgcccccagccatgcagcagaagatttttgaacctgctcctgccccattgaaggaaggaggtcctcctggaaggaaaattgttgtgtccaccaacattgctgaaacatccttaactatagatggcatagtttatgtgatagacccggggttttccaaacagaaagtttacaacccaagaataagggtggaatcccttctggtgtcacccatttctaaggcaagtgctcatcagagagctggtcgtgctggacgaacacaacccgggaagtgttttaggctatacacggagaagagttttaatgaggatttgcaaccacagacatacccagaaattcttcggtcgaacctggcaaatacagttcttaccttgaagaaacttggaattgatgatttagtgcattttgactttatggatcctccagcaccagaaactctaatgagggccttagaagttttgaactatttgggtgcactagatgatgaaggtaatctgacacagttaggtgagatgatgagcgagtttcccctggatccacaaatgtcgaagatgctcgtcatcagtccaaaatacaactgttcgaatgaaatcttatcagtatctgccatgctgtcagataattgctgtttgttgaatggtatcgtctcgcccctttgcatctgctgaccaccgtggacctcgtctgttattaccatattctttctttagcacccaattgcttcctccggcctagggatgctcaaaaggctgctgatgaggcgaaggctcgatttggccacattgacggggaccatctgacgctgttgaatgtataccatgcatacaaacaaaacaatgaagatccccagtggtgttacgagaactttgtcaattcaagagcacttaagtctgcagacaatgtcagacaacagcttgttcgcatcatgactagattcaacctcaagatgtgcagcacggatttcaatagccgtgagtactatgtcaatatcaggaaagccatgcttgcggggtatttcatgcaggtcgctcacctggaacgaactggacattacctgactgtaaaagataaccaggtcgtccatcttcatccctccaattgtatggaccataaaccagagtgggtcatctataatgaatacgtcttgaccaccaggaatttcattcgcacagtcaccgatatccgtggggactggctaattgatattgcgccacattactatgatctgagcaatttcccgtcatgtgaggccaggcgtgttcttgagaggctgtataacaagcgggagagggaaagagctgcaaatagaggctgaagttgatacttccacaaacctggtgcttcataattccacagcaggttatcacagatggcggacccgtttgtcatatgcatgatgtcttccacagcctgttgcctagtgtttcatcagcatgatcattatgcagacagcctcgagaaatcccttggcagctcaattagttatgatgcagattaattttgtgccattctccttatttttgtatgcgtaagatatttatattttgcgtttctatgtgattaactggttatccttcggttggaatgaaattccactgattttggttt

SEQ ID NO: 268422 - DNA, 417 bp, Zea mays
cttagaagttttgaactatttgggtgcactagatgatgaaggtaatctgacacagttaggtgagatgatgagcgagtttcccctggatccacaaatgtcgaagatgctcgtcatcagtccaaaatacaactgttcgaatgaaatcttatcagtatctgccatgctgtcagcacccaattgcttcctccggcctagggatgctcaaaaggctgctgatgaggcgaaggctcgatttggccacattgacggggaccatctgacgcttctgaatgtataccatgcatacaaacaaaacaatgaagatccccagtggtgttacgagaactttgtcaattcaagagcacttaagtctgcagacaatgtcagacaacagcttgttcgcatcatgactagattcaacctcaagatgtgcagcac

SEQ ID NO: 268423 - DNA, 477 bp, Zea mays
cccacgcgtccgtgactggattaggcattacctaccgggttaacgggatgcatgatataccttgctgtgcaattattacggcgtaacctgcgtcgctgctctcctgatcggagatcgaccaccttgactcattggaacatagccatatatctggcagctagcatatatctgatcaaagcaaagccatatatctggcagttctggggtgatccgtccgtggaaaaggcttggccactgacctgcgcgaggacaaagcagtagaaacatatcagccaatcaaagcaaagccatatgaattcatgttaaacatgtccatacatatagcagtgaaaagtatcaaatcactgatttcctctcttggcctttgtaactgtacatactgctttcgtggcctttgtaattgttcatacttcttccgggcattcattatgcaggcatgctgttgccgtgtcattctgttcatgctgataacagccg

SEQ ID NO: 268424 - DNA, 964 bp, Zea mays
tcgataaacgtgctattgctatatcagatatttgacgagatgatgcaaacttaactgtgttgaggttgcaggaggaaagcattacaacgttcctgctgtcaggggataggggcgaagcatagacaagcattgggaggaccattgtaaataggaatgaaaacataaagtcttccctgactccgaaagagaaagcacgcattatatcaactttgcaagccgtgggacacagagttgcaatggttggtgatggaataaacgatgccccgtctttagcagccgcagatgttggaatagccatgcgaactcattcaaaagagaacgctgcctctgatgcagcttcagttgttctactaggcaacagactttctcaggtggtagatgcgctatccctgtcgaaggcaacgatggcaaaagttcaccaaaatttggcctgggcagtggcatataacatagttgccatttcaattgccgctggagtgctgctgccacaatatgatttcgccatgacaccatctctctcaggggggttgatggcccttagctcaatctttgttgtcagcaattctttgcttctgcagctgcatgggtcgtttcagaacacagaaaaacggcagggtgatctgagctcaagattaaactgaattgttgggtttagtttgacccagccgaaggacagtggtattgaattatagagggttctgatactggttttccagctccggctaattgaactgagtcagaactataagtagcaagctattcgtgtcagtagtagcatgttcctgtactgtttgtctacccaactatagtagcaagtatgacccagaaggacaataatctaccacggccttcaaaaagacaaaaacattgtaaattagtaatggtactgctgtaagcctgtaaacaaagttaaggcgtatgactatcgttcatggtctaaaaaaaaaaaaaccaatactcaaat

SEQ ID NO: 268425 - DNA, 951 bp, Zea mays
gccgggaccgggccgggatttcttgcgtacgcctccgcggagcattcgagaagccgaagaaaattcgaagacgaggagcagctacactgcggacggacttcgggcatggagggccagttccaggttggcaaggaggaggtcatccaagcatggtacatggacgacagtgaagaggaccagaggcttcctcatcatcgcgagcccaaagaattcatccctctcgacaaactttccgaactaggaatattaagctggcgcctaaatgctgatgattgggagaatgatgagaacctcaagaaaattcgtgaagccaggggttactcttacatggacatttgtgatgtgtgcccagagaagttgccaaattacgaggctaagataaagaatttctttgaagaacacttgcatactgatgaagagatacgatattgccttgagggtagcggctactttgatgtgagggaccaagatgatcagtggatccgtgtagcggtaaagaaagggggcatgatcgttttgcctgcaggaatgtatcaccgctttacgttggatagtgacaactacatcaaggcaatgcgtctatttgtgggcgagcctgtctggacaccatacaatcgtccgcatgaccatctcccggctaggaaggagtacgtcgagaaaatcatcaaccgaggtggaaaccaagccgtcgaagctcgttgagcgtgtccactctacatgtcctcctgccgtctcagcctcttgtgttttacactctacaactcctagtaccgccgaataagatttgctatctgcaatgtgctcatgccaccaccgtgtgtgccagttaacagtttgcacgaaacccgcttaaaatcttccctagatattttgttgtacgaatgaatgacatgtggtgtttgataaatgatgaaacgatgatggttcacatcatgatacatatactcaggt

SEQ ID NO: 268426 - DNA, 951 bp, Zea mays
  unsure (1)..(951): unsure at all n locations
tggacaggagctacaccaccaccgcactgctccaggagctgcacctcccccaccaccacctggaggaggtggaagaaataanttataaagaattaatacaataatattacatggacgacagtgaagaggaccaatggcattctaataatgataaagacaaataattgagttgtttcgacaaactttacgaactaggaatattaagttagcatctaaatgctgatgatcagaagcatgactaaatacaagacaaaatctgagagaaaggagcgccactgagaacaggatagttgtaaacaaggctgaccaaaacattgtatatactaagctaagataaagaaattctttgaagaacacttgcatactgaagaagagatacgatattgtcttgagggtagcggctactttgatgtgagggaccaagatgatcagtggatccgtgtagcggtaaagaaagggggcatgatcgttttgcctgcaggaatgtatcatcgctttacgttggatagtgacaactacatcaaggcaatgcgtctatttgtgggtgagcctgtctggacaccatacaatcgtccgcatgaccatctcccggctaggaaggagtacgtcgagaaaatcatcaaccgaggtggaaaccaagccgtcgaagctcgttgagcgtgtccactctacatgtcctcctgccgtctcagcctcttgtgttttacaccctacaactcctagtaccgccgaataagatttgctatctgcaatgtgctcatgccaccgctgtgtgtgccagttaacagtttgcacgaaaccctagatattttgttatacgaatgaatgacatgtggtgtttgataaatgatgaaaaaaaaaaaaaaaacaaaaaaaaaaaaaaaaaaaaaaaaaacaaaaaaaaaaaaaataaaaaaaaaaaaaataaaaaaaataaaaaaaaaaaataat

SEQ ID NO: 268427 - DNA, 426 bp, Zea mays
  unsure (1)..(426): unsure at all n locations
ganaattcgaagacgaggagcagctacactgcggacggacttgggcatggagggccagttccaggttggcaaggaggaggtcatccaagcatggtacatggacgacagtgaagaggaccagaggcttcctcatcatcgcgagcccaaagaattcatccctctcgacaaactttccgaactaggaatattaagctggcgcctaaatgctgatgattgggagaagatgagaacctcaagataattcgtgaagccaggggttactcttacatggtttgctaataagtttatttttgggcacttgttgttttgttactctaccttgagtagcaaggtcaatacctattcaaagcttcagactagtatgataagcattttccttatgcaggacatttgtgatgtgtgcccagagaagttgccaaattacga

SEQ ID NO: 268428 - DNA, 513 bp, Zea mays
cggaattcccgggtcgacgccacgcgtacgagcaattcgacttttctggggccgcagccctacaagtaaacagtctaggggtgattatggccacgggcgcaacggcaatggcatgtactacgggacgccattctacggtggatatgggtacgcctcaccggtcgcccacccaaacatgtatgccgcggcctacggagcctacccgtactatggaaaccagcagctagtgagctgatgtggcaatgctctctgctcagtttcctccctcggatcggagggaggaaaccaagtttttggtcctgtaagatagtagctacaatgagatattataggcggccatacaaatgggcgagagagacgagaagggtatgtgatgataatgctacctgcagacttgtgctgctatagcagaacataaaagagcttgtagtagacaataaaaacctacttttgtcttggaaattttgactcgctataaaactagagctatcggttgttgtgaccactgtttgc

SEQ ID NO: 268429 - DNA, 333 bp, Zea mays
tttgtttttacgcgctgcaatgatatcttaggattcgttagagtcacaagaggcatttcttgatgctgcaatcaagcattcctcaattccaccatgaaaataaacaccatctactccctcgtcaacagcaccgccgcaatgcagtaaaagcaccaagccatcttggttgctccttacgcggaggtagcaggcagcagcgggatcaagcgttacagacatagtttaacctcacgagcatcgtctcatcatcgtcatcatcgtcatacaaacataagtagactccgaaccaaaacgctgtaaaacgatggagctaagctagtgcaagggatggag

SEQ ID NO: 268430 - DNA, 710 bp, Zea mays
ttccttatctatcgaaggcatttggaggacttaataggcttgacatgttcttcccatttgacccgtatctacttaaagagtctgacagatatatacggccaaattttgagttctggtccttggtcaagacgacatacactaacgacaacagcgatgaggacgacgaagagcttggcgacattgacgcacctggaatgaatgtgggcagcttggatgatcacttcgaaatagattttaacagtgacgatgacattgagtataagatgaataagatgtccataacgccgcaacgcactttctaccatccactggctacaaacagtgagtccaaccgcatgcctgcgaggatcagaccttcagtgagccccccatcatagcaaggttctgctcagctctttacttgactgatgatgacacaaaatcagatgctaggaagttgcacgtgccaagaagggaccaggggatgacgaccaaacatacaccggagtgtattctatttattattccagttgctagtagggtcaaaactttaatgcagagtgtatatgtgtttcagggcaacgcgtggaaaaccggtttgtgattgtatacttggtagtcagcccttaggaacaggtatgtgtttgtagcaagacttacgacgtgaaatgaggattctcttggggacattaatggtataacgtgcgaatgttagaacctaattttcaatt

SEQ ID NO: 268431 - DNA, 796 bp, Zea mays
ccggtccagaattatctcaccaccgctgcctccgcggtttcgcttccccccgtcttcccaagcctttgcttcgctcttcgcttcggattccctctgctcatggccgggagagggaaggcgatcggctcaggggccgccaagaaggccatgtccaggagctccaaggccgggctccagttcccagtgggaaggatcgccaggttcctcaaggccggcaagtacgccgagagggtcggcgccggcgcccccgtctacctcgctgccgtgctcgagtatcttgctgctgaggttctcgagcttgccgggaacgcggctcgtgacaacaagaagacccgcatcgtcccgcgccacatccagctcgccgtccgcaacgacgaggagctctcccgcttgctgggcacggtgaccatcgccagcggtggtgtcatgcccaacatccataacctgctgctgcccaagaagtctggcggcggcagtgccaaggctgcggctggtgatgaggactagaccgaccacgcctagcctttcatccggtggtggcacctcttgtggatgctgccgtatcaacttgtgcctgtgtagtacgctctagaaatgccttaggtgttgcgttgtagttcgggatgtgtctccctgtaccactgccaaggattagttctgtatatgttgctataaagagtgcatcctttggacgacctgtttatcaatcctggtatcccagtttgcatttcgtgtccaaatcttggtcagtccccccgaaaattctgaaaatgaaaaaaaaaaaaagggcggccgc

SEQ ID NO: 268432 - DNA, 631 bp, Zea mays
aattcccgggtcgaccgacgcgtccgtctgtccgtcctaccaccaccgctcaccgcggtttggctttctcccctcttccgcacccgcttctcgctccggattccggattccctctgctctttccctaacgaaggtagccatggcggggagaggtaaggcgatcggctcaggcgccgccaagaaggccacgtccaggagctccaaggctggcctccagttccccgtgggaaggatcgccaggttcctcaaggccggcaagtatgccgagagagtcggcgccggcgcccctgtctacctcgctgccgtgctcgagtatcttgctgctgaggttcttgagctggccggcaatgcggcacgtgacaacaagaagacccgcatcgtaccgcgccacatccagctcgccgtccgcaacgacgaagagctctcccgcttgctgggcacggtgaccatcgctagcggtggtgtaatgcccaacatccataacctgctgctcccgaagaaggccggcggcggcagcgccaaggctgcggctggtgacgaggactaagtccttgactacggctctggtggcacttccaggatgctgccgtatcaacatgtgtctgtgtagtacgttaggttttcgctgtag

SEQ ID NO: 268433 - DNA, 397 bp, Zea mays
ggtttgtttttttgggtttgtttttttttttttgggttgtacccctaggtggtgggcggcatatatctggataatagccttgggcctctttcttcttgcgttcgtgggcaaaacagcatcgaccagtgacatgaaccggacacattaatagttaatacatacggtaggttgctagacaccaaggagcgaaccccttcctcaccgaaacgcagtcactcacatagcatgatagcataaacagcctatacattgccacgcgcacctcatttccaggccgggtacgagttgtcctgccggttgttcctgaacgcgcagcacccgacggagtagacgacgaccaggaacatcaggaagaccatgttgacggtggcgatcttcttccaatcgttcttcaagt

SEQ ID NO: 268434 - DNA, 509 bp, Zea mays
  unsure (1)..(509): unsure at all n locations
gtacgcttgagactatgtctntggctaaagctgttatacttttccgtgaagttggattgagacaggttcgggttctaccgaaagcttgtaagagggcacctgttgtcggcatactaacaagacatgatttcatgcctgaacatatattgggccttcatcctttcctctttaagagtagatggaagaaggtgcgacttggcaaggtaaaagttaccaacatattttgaagcttgctggtgactggtgatttggggaggtcaccgaaggatcatccgaagctgtatacctggtgtcaaatcacgtattttgcagagaataactcaacttgaaaactagtggatcttacttcaagaaaataatttcgttgtaaatgctaagaaggggatggaacatggctgctaagtgctaacaagttattttcccacgaacaagaggaatctcactgtaaatttattatgcatactttagctaacctttgaaaacaaatgctatctgtagtgcctagatgc

SEQ ID NO: 268435 - DNA, 485 bp, Zea mays
gaatttccgggtcgacggacgcgtacgcccacgcgtacgtccacgcgttcgggcgagttagccatcaggccaaacatgccttagttggcatgaggacaccgctcgcagggattaggtagagcaattttggcagatgctgaaatacggtgtgggtgtggcctgcgcattcattgcctgcagacaataataaggtgcttatgttcttgcaacaaactgcagcacctgaaattctgcgtcaccatcactgccctttccaactcagcagagcttgaagatggcagcagcttcatccgcagctggttgttgcagaagcaatgatcatcatgactaaatctgacagtagtggcttcgagagtgatgctaggatgttggagagaaaaaaaatgtgtcccgccatacctctttgatgttaattcactgacatgtatatatacgatcggaaacgttgtaacgttcacttgatgtaaattattagtcgattaatc

SEQ ID NO: 268436 - DNA, 501 bp, Zea mays
gaatttccgggtcgaccgacgcgtacgcgaacattcaggtcacggaggtgcagacgcttatcatgatagaccagttctactgcgacagggcgaggtgcatgaaccagacgtcggcggtggccgtctcgggcgtccagtacgaggacgtcaggggcaccttcaccgtcaggcccgcgcacctggcgtgcagcgacagatcgccctgctcggggatcaccctcgccgggatacagctccagcccctgccgctgccgcagcaccgccgcctgtcgtacgaccccttctgctggcaggcgttcggggagctgtacacccccaccgtgccccccataccttgcttgcagatcggcaggccggcagcagggaacagcgtgctgtccgacggcgacctttgctgaaacgccgatcggttcatcagttaagctaaggcggtcgtcgtgatgcttccgacccctgctttgcacgatgtggattgtggagtgtcagttgatgatgcatcat

SEQ ID NO: 268437 - DNA, 1693 bp, Zea mays
  unsure (1)..(1693): unsure at all n locations
tctttgacgcgtggggaaaaaaacagagtccaaaagaaggatcacccaggtgggggagaagcgcagggacagagagaggaaagggacgcccgtctcgtcacgtcctccacccccgccgccatggctgccctgggcctgctcctcctcgccgtcgtcggtgccaccaacgccgcggcgccgggcggtagaatgtccatcatctcctacaacgaggagcacgccgcgcgcgggctggagcggacggagccggaggcccggacgctgtacgagctctggctcgccgagcacggccgcgcctacaacgcgctcggcgagcgcgaccgccgcttccgcgtgttctgggacaacctacgcttcgtcgacgcgcacaacgagcgcgccgcggagcacggcttcggcctcggcatgaaccagttcgccgacctcaccaacgacgagttccgcgccgcgtacctcggcgccaggctccccgccgcccggagaaggggaaccgtcgtgggggagaggtaccgccacggcggcgccgccgaggagctgccggagagcgtcgactggagggagaagggcgccgtcgcgcccgtcaagaaccaggggcagtgcggaagttgctgggctttctctgcagtaagctcagtggaaagcgttaaccagattgttactggtgagatggtgaccttgtccgagcaggagcttgtagagtgctcgactgacggagggaacagcggctgcaacggcgggctcatggacgccgctttcgatttcatcataaagaacgggggcatcgataccgaagatgactacccttacagagccgtggacgggaagtgcgacatgaacaggaaaaatgccagggttgtgagcatcgatggctttgaagatgtgcctgagaacgacgagaagtcgctgcagaaggcggttgctcaccagccagttagcgttgccattgaggccggtggccgggagttccagctctacaaatcgggtgtcttcagcggaagctgcaccacgaaccttgaccatggtgtcgtcgcggtcggctacggcgccgagaacgggaaggactactggatcgtccgcaactcgtggggcccgaagtggggcgaggctggttacatccgtatggagaggaacgtcaacgccagcactgggaagtgcgggatcgcgatgatggcgtcctacccgacgaagaagggcgcgaaccctcccaggccgtctccaaccccgccaacaccgccggctgcccctgacaatgtctgcgacgagaacttctcgtgctccgcgggcagcacctgctgctgcgcgtttggcttcaggaacgtctgcttggtctggggctgctgcccggtcgagggcgccacctgctgcaaggatcacgccagctgctgcccgccgggctaccctgtctgcaacgtcagagctggaacttgctcggtgagcaagaacagcccactgagcgtcaaggccttgaagcgcactctcgccaagctgagcaccgcatgaggacctcgatctgggactgcccattgctttttcttgactcatgggcgttcagatccccaagagcaagatttcatagattatctatatgtttgtataagtactattaccgtcccatgaatccgctgtaaataactagtacctctgattaaaaggataatattatttgtcaaaaaaaaaaaaaaaaaaaaanaaa

SEQ ID NO: 268438 - DNA, 471 bp, Zea mays
taacccaactaaaatcccaaaagagaggaaaggcacaaacagacggtacaaagaaagggacgctcgtctcgtctcgtcacgtgccgccgccatggctgctctgggccgtggcctgcccctcctcctcctgctcctcctcctcgccgtatcgggggccgccaacgccgcggcggcgcccggcggcatgtccatcatcacctacaacgaggagcacggcgcgcgggggctggagcggacggagccggaggtgcgggccatgtacgacctctggctcgcggagcacggccgcgcctacaacgcgctgggcgagggcgagggcgagcgcgaccgccgcttcctcgtcttctgggacaacctccgcttcgtcgacgcgcacaacgagcgcgccggcgcccgcggcttccgcctcgggatgaaccagttcgccgacctcaccaacgacgagttccgcgccgcgtacctcggcgccat

SEQ ID NO: 268439 - DNA, 324 bp, Zea mays
tctggggctgctgcccggtcgagggcgccacctgctgcaaggatcacgccagctgctgcacgccgggctaccctgtctgcaacgtcagagctggaacttgctcggagagcaagaacagcccactgagcgtcaaggccttgaagcgcaccctcgccaagctgagcaccgcatgaggacctcgatctgggactgcccagtgcttttctgactcaccaagagcaagatttcatagattatctatatgtttgtataagtactgttaccgtcccatgaatccgctgtaaataactagtgcctcttattaaaaggataatattatttgtc

SEQ ID NO: 268440 - DNA, 289 bp, Zea mays
gtggctaggggacgaaaaagggctggagagattaggcagccgctggccgctgctgtactgtggcgtcgcggtcggctacggcgccgagaacgggaaggactactggatcgtccgcaactcgtggggcccgaagtggggcgaggctggttacatccgtatggagaggaacgttaacgccagcactgggaagtgcgggatcgcgatgatggcgtcctacccgacgaagaagggcgcgaaccctcccaggccgtctccaaccccgccaacactcgctgctggccctgacaat

SEQ ID NO: 268441 - DNA, 786 bp, Zea mays
tttacgctcgcgcgcagtactgcacactgccatcgctctcgtcccttcgctgccgctctatctcggccggagccatgggcggcggtggcgcggcgctgctgctggtgatgtgggcgggcgtggcgtcggcggccgtgtacgaggtgggcggcaccattgggtggaccgtcatgggcaaccccgactacgccgcctgggccagctccaagcagatcgtcgtcggcgacactgttgtgttcacgtataacaagcagttccacaacgtgctggcggtgagcaaggcggactacaagaactgcatcgccaccaagccgacggccacctggtccacggggaacgattccgtcgtcctcaacaccacgggccaccactacttcctctgcggctacccgggccactgcgctgccggccagaaggtggacatccgcgtcgcctcctctgctgccccttccgccgcaccgtcgccgaccccctccggctccaagccctccggcggcgccacggccgcgccgtcgccgcaccctaacgccgcgccgaaggccctctccgccagctccgtagccgcggctgtcgccacgtccctgctctccctggccgcggccgtgctggcatgatcacttgatcaggatcgtgtagtgctggccaggggacggcgcctttgtgaattgtgagagctcgtactgtgtctgtgtgactgtgtctgtggccgtatgagcatttagccctggatctgtgtttgttactctgtcttcttcgggaacatcgattatctcatctgccttctcc

SEQ ID NO: 268442 - DNA, 517 bp, Zea mays
cccacgcgtccgggacgcaggggggcatttccgggaacctcgccgcgggcggggctggagagccgcggagcttttgatttaaccggccggttggtcagccagccagccagccagccactcagtactgcacactgccatcgctctcctacggtactgctgcctaccgcgcgtctcgtcccttcgctgccgctctatctatctcggccggagccatgggcggcggtggcgcggcgctgctgctgctggtgatgtgggcgggcgtggcgtcggcggccgtgtacgaggtgggcggcacgattgggtggaccgtcatgggcaaccccgactacgccgcctgggccagctccaagcagatcgtcatcggcgacaccgttgtgttcacgtataacaagcagttccacaacgtgctggcggtgagcaaggcggactacaagaactgcatcgccaccaagccgacggccacctggtccacggggaacgattccgtcgtcctcaacaccacgggccaccactactt

SEQ ID NO: 268443 - DNA, 919 bp, Zea mays
aggtgacactatttaagagctatgacggcgcatgtacgcatgcgctatgctgggattgcacacagacgtaacctcgcccagtgcgtgcctggcaagtggcaaactcgagctgtctagtcctcggttcgcgaatcttccacagagaggcagacggcaggactcgcttcaagctcctcatctcgcgcagggggggtcgcctgagatcacagagacaatggtgaaggcagttgctgtcctcgccggcactgatgtcaagggcaccatcttcttttcacaggagggggatggtccgaccaccgtgactggaagtatctctggcctcaagccagggctccatgggttccatgtgcacgcgcttggcgacaccaccaacggctgcatgtcgactgggccacacttcaatcctgttggcaaggagcatggcgcaccggaagatgaggaccgccatgccggtgatcttgggaatgtgacagcgggagaagatggtgttgttaatgtcaatattactgacagccagatacctcttgctggaccccactcgatcattggccgagctgttgttgtccatgctgatccggatgatcttggcaaaggtggacatgagcttagcaagagcacgggaaatgctggcggacgtgttgcctgtggtatcattgggctccaaggctaaagcagttaacctccgaggcaaacaccatagaaggtcgaagcgagcacctcaggatgttgctgttccatttcccctgtattggcaacacaatttgagtactccaaataagcgcctgatccatgatcagagagcactattcatgccattttgtatatgaacaatgttgcgcacctgcttaagtgtctgttccaacaaatgcttaagaagacactactggaggtgtactatggagtactaccagcagcatct

SEQ ID NO: 268444 - DNA, 573 bp, Zea mays
gtcggtccacgcgtccgcccacgcgtccgcacacgcgtccgcggacgctgggcagacggcaggactcgcttcaagctcctcatctcgagcagggggggtcgcctgcgggatcggtcaatcagtaatcaccccaaatcctagggttctagtcgcttctcgtcgtttcgttcgtagatcacagcgacaatggtgaaggcagttgctgtcctcgccggcactgatgtcaagggcaccatcttcttttcacaggagggggatggtccgaccaccgtgactggaagtatctctggcctcaagccagggctccatgggttccatgtgcacgcgcttggcgacaccaccaacggctgcatgtcgactgggccacacttcaatcctgttggcaaggagcatggcgcaccggaagatgaggaccgccatgccggtgatcttgggaatgtgacagcgggagaagatggtgttgttaatgtcaatattactgacagccagatacctcttgctggaccccactcgatcattggccgagctggtgctgaccatgctgatccagacgaccttggcataggtggacat

SEQ ID NO: 268445 - DNA, 1690 bp, Zea mays
tttactgtcttgcgcccacgcgtgcgcccacggggggggacgcgctcaacctcgaggccgccgacacggcccctcccctctccaccgccggcgtagagggcgccctcgcccccgcggggaccctcgtcgagagggccatccgcatcgcgtccttcgcgaacggaggcgccgccacgtcggtggaggacctcggccaccacgcggggtattaccgcctccccaacacccacgacgccaggatgttctacttcttcttcgagtcgaggggccacaaggacgaccccgtggtgatctggctcacgggcgggcccggctgcagcagcgagctcgcgctcttctacgagaacggccccttcaacatagcggacaacttgtcgctcgtctggaatgattttggttgggacaaggcatcaaatcttatctatgtcgaccagcccactggaactgggtttagttacagctcggattcgcgtgacactcgccacaacgaagctactattagcaatgatctatatgatttcctgcaggccttttttgctgagcacccaaagtatgctaaaaatgatttcttcataactggggaatcatatgctgggcattacattcctgcctttgcaagtcgtgtgcaccagggaaacaagaacaatgagggcattcacattaacttgaagggttttgctattggcaacggactaacagatccagcaatacagtacaaggcataccctgattacgcattggatatgggattaattacaaaaacacaatttaacaggatcaataaaatagttccaacttgtgaattcgctgtcaagctttgtggtacttctggaactgtatcttgccttgctgcgtactttgtctgcaatacaatattcagtgccatcaggacaatcataggcaataaaaattattatgacatcaggaaaccatgcatcggaagcctatgctatgatttctctaatttggagaaatttctcaacctcaaatctgtcagagagagcctaggggttggagatatagagtttgtttcatgcagcccaactgtctatgaggccatgctattagattggatgaggaaccttgaagttggaatccctgaactccttgagagcgacatcaaagtgttgatttatgctggagagtatgacctcatatgtaactggcttgggaactcaaggtgggtaaactctatggaatggtctggaaaggaagcttttgtgtcctcatccgagaagcccttcacagtcgacgggaaagaagctggcgttctaaagagccacggtcctttgagtttcttgaaggttcacgatgctggtcacatggtacctatggatcaaccgaaggctgctctggagatgctgaagaggtggacttctggaaacctttcggagccatcttcaagctcccagaggcttgattttacaatgtaacaaaacacacatgctgctcatgacatttcgagcatgtacctctggatgtttgtaggctcagaaaaggtcctggtcttaggctctgaaaacctcatctggcgaccatacgttatttaccttgtatgggcgctccgcttgctggtgagacacggtgttacgagttacgactcgatgaacatgtaataaagcttttcagagaattgctaggccaggtagggacggaagcggacgaaaaaaaaaaaaaaaaaaaaaggaaa

SEQ ID NO: 268446 - DNA, 547 bp, Zea mays
  unsure (1)..(547): unsure at all n locations
cgccatatgtcgccggaggccggaccaatcatccggtccgccgaccagctactcctcccgttcctcctcctggccgttgcctccgtcgctgccgccgccggctcgtgggagaatggatatgggagcatccttccgcctcccctcctcggctccgcgccggttcccccgctccgcggccggcgacctgatccacgcgctcaacctgcaccccgccgacgcgtcccctcccctctccaccgccggcgtagagggcgccctcgcccccgcggggaccctcgtcgagaggcccatcccgatcgcgtccttcgcgaacggaggcgccgccacgtcggtggaggacctcggccaccacgcggggtattaccgtctncccaacacccacgacgccaggatgttctacttcttcttcgagtcgaggggccacaaggacgaccccgtggtgatctggctcacgggcgggcccggctgcagcagcgagctcgcgctcttctacgagaacggccccttaacatagcggacaacttgtcgctcgtctggaatgattttg

SEQ ID NO: 268447 - DNA, 453 bp, Zea mays
tcctttcgtccggccacgcgtgcgggacaattattggctattaaaagtattgcgacatcaggaaaccatgcatcggaagcctatgctatgacttctctaatctggagaagaagcgcagccataaatatgccagagagagcctacaagccggagatatagagtttgtttcatgcaggccaactgtctatcaggccatgctattagattggatgaggaaccttgaagtgggaatccctgaactccttgagagcgacatcaaagtgctgactcatgctggagagcatgacctcatatgcaactggctgggtggtagcatgagtatgtgtacacaaactggtggtattgttatctcagagaaggacagttttcgttgcataacagcaggaagacaatactgctgaattgctgatactgaccatctattcttccccattactgtttctatattatgta

SEQ ID NO: 268448 - DNA, 734 bp, Zea mays
ggtccggaattacccgggtcgaccgcacgcgtaccgcccacgccgtccggtgaggggttgactttgcgttctaccacttgacgtaccaaagaactctgagcgcaggaataacctgctgttcgctgcaagcacggagcctggtaccgacgttccagctgaagaagaaccaaagttcatccccttcactggttcaggaaggcgcttggatgggaagccttccaaagataaagatgtgctagcctcttcccctgcaaagcgacaagctaatgcgaccaacggtgtacagccttcaacagccaccacatcacagggcagttcatcgcgtaaggccacaggaaaacttgtctttggctctggtggtagccgagccgaaaaggcacctgaaaaggaagcagaggagcccaagaaagaagacccaaaattcgcagcattcacaggaaagaaatactcactgaagggctgaataaataggaagacaatgtattatcagtatttccggtgacggacattctcagggagaagcgcttaccaaccctgttatgtgggagggtctttcggtgggatagtggtctctgtttctcctgaactattacccttgtgtagttgtgtcagccacaccggagcaactgatgtataaagccgctcttgtccgataatggatttctgttgagcttgcatgtacattttctaaaaagataactgaaatcgcctaaaaaactacgaatactatctag

SEQ ID NO: 268449 - DNA, 815 bp, Zea mays
cgcgtgcgctccctctcccgtctgcccctccctctctctctcgtggagacgactgggccgccgtcgttgctgccctacgcggctacacccacgtcttcttcgggcccttagccgcgacgagcgccaccagggagtagaagaggttaaccttctggttggaaacgatgtacttcgaaggctatggcttccgtggaagtactttcgagcagacatatcgctgctatcctgcgtctttcatcgacaagccacaacttgaggccggtgacaaaattataatgccaccatcagctcttgatcgtcttgcatctctgcatattgaataccctatgctatttgaagtccacaatgcagcagcagaacggacttcgcattgtggtgttctggagttcattgcagaagaaggcatgatctacatgccatattggatgatgcaaaatcttcttttgcaagagggagatatggtgttcataaaaaatgccaacctccccaagggcacatatgtgaagttgcagcctcatacaacagactttctagatatttcaaaccccaaagcaatcttggagaaaactttgcggaacttttcttgtctaactacaggtgacagcattatggttgcatataataacaagaagtactacattgatatagtagagacaaagccctccaatgctataagtattattgagaccgattgtgaggttgactttgctccaccacttgactacaaagaacctgagccagtaaaacctgctgttcctgcaagcacggagcctggtaccgacgttccagctgaagaagacccaaagttcatcccc

SEQ ID NO: 268450 - DNA, 389 bp, Zea mays
tctctctctcgtggagacgactgggccgccgtcgttgctgccctacgcggctacacccacgtcttcttcgggcccttagccgcgacgagcgccaccagggagtagaagatgttaaccttctggttggaaacgatgtacttcgaaggctatggcttccgtggaagtactttcgagcagacatatcgctgctatcctgcgtctttcatcgacatgccatattggatgatgcaaaatcttcttttgcaagagggagatatggtgttcataaaaaatgccatacctccccaagggcacatatgtgaagttgcagcctcatacaacagactttctagatatgtgaacgcccaaagcaatcttgagagataactttgcggaacttatcttgtcta

SEQ ID NO: 268451 - DNA, 679 bp, Zea mays
cggacgcgtccgcccactcttttccttgcgccgccgccgctgctgccgccgccatgtcgaagcgcgggaggggagggacggcggggaacaagttccgcatgtcgctgggtctccccgtcgcagcgaccgtgaactgcgcggacaatacaggcgccaagaacctctacatcatctccgtcaagggcatcaagggtaggctcaaccgcctgccgtccgcctgcgtcggcgacatggtcatggccaccgtcaagaagggtaagcccgacctcaggaagaaggtcatgcccgccgtcatcgtccgccagcgcaagctgtggcgccgcaaggacggagtctacatgtacttcgaagataatgctggagtcattgtgaaccccaagggcgagatgaaaggatctgctatcactggacctattggcaaggagtgcgctgacctttggcctaggattgctagtgcagcaaatgctattgtctgataccactggttgggaggctagttgagatagttttcttgtgatccattttaaccttttctgtacttcaacatctgtggaaatttacttgattaatgtactaagggaaaagacgcttaggcgcacaattaaaataggccgaactgtgcacttctgtaaaaaaaaaagtcagtttagtgatgtgctggcgttgtgatcttgtttgg

SEQ ID NO: 268452 - DNA, 416 bp, Zea mays
atcactttgttttttatttagctgctaccccgtggcggcacggccttggcagataatgctggagtcattgtgaaccccaagggcgagatgaaaggatctgctatcactggacctattggcaaggagtgtgctgacctttggcccaggattgctagtgcagcaaatgctattgtctgatactactggttgagaatagttttattgtgatccattttaaccttttctgcacttcaacatctgtgggaatttacttgattaatggactaagggaaaagacgcttaggcgcacaattaaaataggccgaactgtgcacttctgtagtcagtttagtgatgtgctggcgttgtgatcttgtttggatttgtgcttttgtatgatcgttccagtattaagccctgtaccactattctttttt

SEQ ID NO: 268453 - DNA, 989 bp, Zea mays
  unsure (1)..(989): unsure at all n locations
ggaagtgctcctcgcccagtcgccccaccatcgcctccgtcgacggcgtcctcgtctccgncgcgctcgcctcaccaccaccgccaccacggccttcctcgtctcatctccgctcctggactcgccctcgatacgctactgacggggtgtccctcgccgtcgacacgtgacctccgtcatttgcatctcagctccaagatctactccaggtgcatgcatgcagctgctggcctgtagctggcagtggtgactggcaggctgatccggttggacacggagaatgggctgctcttggcaccaggattggcaccatcaccggcacgcttgtctccaatcttcattgatataattgactccattcggcttggttgtgcttgttttcagggtgaagacaagaagtgacccagcaatttccattttcttgctcaggatggcaatggccacatcattatcttaccctccaccacctcccttttaccgactgcacaaaaattttgagcaggatccttcatctgcaccagaacctccaccaccaattgatggaccattcaaagccttgggtgttgattacacaggagatgttgtgattccaagcttggagagtcataatgtccgtcagctttatccaaagggtcccaatattgacttcaagaaggagcttaggaccctcaacagagagcttcaattgcatattttggagctggcagatatattagttgagagaccatctcaatatgctcgtagggtagaagatattacgctcatattcaagaacttacatcatcttctcaattccttacgacctcatcaggcaagggccacattgattcacatgcttgagagccaaattcggcaccgcaaggaagcaattgaagatataaagcagtgagtctcctttctcatatgtagtagtgttgaaatcacatttcatgtattcaattntagtctgtgtctataactgagtctcctgccacaactccagtttccta

SEQ ID NO: 268454 - DNA, 979 bp, Zea mays
cggtcctgaattcccgggtcgaccgacgcgtccgcccacgcgtccgcggacgcgtgggtccgcatcggcgtatctcccggcggcaaaggcgctctcctcccgacctccctgcggtgccggtacgacagtcgacaggatggcaatggccacatcagcatcgtaccctccacctcctccattttaccgattgtacaaaaaatttgagcaagatccctcatctgcaccagaacctccaccaccaattgatgaaccattcaaagccttgggtgttgattacacaggagatgttgtgattccaagcttggagagtcataatgtccgtcagctttatccaaagggtcccaatattgacttcaagaaggagcttaggaccctcaacagagagcttcaattgcatattttggagctggcagatattttagttgagagaccatctcaatatgctcgtagggtggaagatatcacactcatattcaagaacttgcatcatcttctcaattccctacgacctcatcaggcaagagccacattgattcacatgcttgagagccaaattcggcaccgcaaggaagcaattgaagatataaagcagaggagggaggaagcgcaaaagctgcttggggaatcactgcttatcttggatggaagtcaaactaactaggctgacgccgtcaagttagttggttcaagaccgattcttctatgagttaaagagtgttagtagaagacaagatgtgtctggattgttgtggtatcatctgttgtggcttgtggtatttccagctttgataactgaattttcttacttctatggtctatgttagcaaagttggattactttcttacttccattggtactcaactgcatcatgggttactttcttgtggaagtgtatattgtgagattgattcctcgtggccagcttaaatgaaaggttgttatatgctaaaaaaaaaaaaaaaaaaaaagggcggccgc

SEQ ID NO: 268455 - DNA, 524 bp, Zea mays
cacacgcgtccgcacacgcgtccgcccacgcgtccgcccacgcgtccgaattgatgaaccattcaaagccatgggtgttgataacacaggagatgctgtgattcacagcttggagagtcataatgtccgtcagctttatccaaagggtcccaatattgacttcaagaaggagcttaggaccctcaacagagagcttcaattgcatattttggagctggcagatatattagttgagagaccatctcaatatgctcgtagggtagaagatattacgctcatattcaagaacttacatcatcttctcaattccttacgacctcatcaggcaagggccacattgattcacatgcttgagagccaaattcggcaccgcaaggaagcaattgaagatataaagcatttcctatttgcttgtatccaccttccatcaactagcactacatcgtctgtaaaaaacatacactaggggatatatcattgtgatctcatccatcaccaaggcaaaaaggaggagggaggagcgc

SEQ ID NO: 268456 - DNA, 345 bp, Zea mays
aaacggacgaccgagaccgcctgggcggatccgagttcggacggcccatcagagcatcagacgaccaccttcctgcccccattcgtttccgcatcggcgtatctcccggcggccggcaaaggcgctctcctcccgacctccctgcggtgccggtacgacagtcgacaggatggcaatggccacatcagcatcgtaccctccacctcctccattttaccgattgtacaaaaattttgagcaagatccctcatctgcaccagaacctccaccaccaattgacgaaccattcacagccttgggtgttgattacacaggagatgttgtgatttcaagcttggagagtca

SEQ ID NO: 268457 - DNA, 644 bp, Zea mays
gttcgcactaaaatttcagcaaaccaatctattgagaaagttgaggtgttgcaatctaggacttatccattattcgttccatggaaaggtggagtgattttgggcgtccttgatattggtaaggatgcgtggattcatagagaagattggattaaaaatggtgtccacatcgggagtggcagaaaatataaggattcctattttcttcaggcgcaagtaatgtgctactacaacgtataacagtatcttatttccgagctacacacgaagacttgcacttatacaggttgttcgaccgtccaaaccatcctagaatatgattggtggactgcgattaaattgcgtacatgatgcatcagttctatgcatgctcgctgctgtctgttcggaggtcatcaactcgggacctggactaagggccttgtcgttcgctcaacccctatgaaaaagtttggctttctaaagatgtagtagaagtactcatttattccctgccaattgaacatttcaaatcttcgtatggtgttaatgaaaaatctgatgtttggattcgtatttatttccaatgatgataatgtatatgtgcattctcgactgttttggaaagaatgaaaaatcctcgtccgtttgcgttagtatgttgt

SEQ ID NO: 268458 - DNA, 445 bp, Zea mays
tcccgggtcgaccgacgcgtccgcggacgcgtggacagcccgtcacctaccattcgacccgccgcgacgctccctgctcggaacagcctgcgttgctcgcccacacgacgccacgcatgcaggaggagccagggcgtcgtcccgtgccgccgttcgcgggcgtggacctccgccgccccaagggctacccccgtggcggttgccaaggaggagaggccggcgccgggcggcgacccgtgcccgcggtgcgggtcgcgggacaccaagttctgctactacaacaactacaacacgtcgcagccgcgccacttgtgcaagtcgtgccgccgctactggaccaagggcgggtccctccgcaacgtccccgtcgggggcggcacccgcaagagcagcagcagctcctcatcatcctcggcggcggcggcggcgacgacgacgacgacgt

SEQ ID NO: 268459 - DNA, 647 bp, Zea mays
tggcatctgtactcccccaaggatatttatcgatcaggatgaagtgatcccacatctggagcctggaatggcgccttcaaccgtggaccctgatggtgctggatatccggaaagagcaaatagagccaagaaggcagtcaaaatcagtgctcgcagcctcgcaaagctcgataagaatgaggtaatgaaagctgctgcaaaagctcgggcatcatcctcggttctgcgaccaatagatgcccgccgtggtcatgaagctgatgtcatctccagcggcagtgccagtgtcaggagcagcatgagtgttgactacagtggcacaaaggaatcaaacagcgagatgaaactttctccgcttcataactcatacccccaaagccttgcaagccaggatgaatacgataccggcacaccaaccgcaagcagtttaagcagtctggtcaacatccacaagcttgcatcccactctcagttcagtgctgcgcctcgccctgcacctccggaaagacctgtgccggcgatggtgcggccacctgttcccaccacacaaataaccaacccagggataccgcggccagctgttcccacaacacaaacaaccaacccgatgttccaatcagccacatcttatgttcgagagaaccgaa

SEQ ID NO: 268460 - DNA, 1603 bp, Zea mays
cccactcgtccgggccaatccctcgctgccccccacactccagaagtccagaccaaagctccaaagtccaatccctcgctagccacttgccatctgatcaaccagccagccgatctcagcgatccgccatggccaccgcgtattacgagaggccccgtggcggcgccgtcgaggaggcggacgacttcgatgagttcgaccccacgccgtacggcggtgggtacgacctcgccgtcaccttcggtcgcccgctgccaccgtccgaggaaacctgctacccgtgctcggcgccctcgacctcctacgacgcaccgcactacgccgcctccgagccgtccccctacggtcaccacgccaagccaaagcccaactatgggttccgcccccagcaggagcaacagccgtcttacggcagcggctacggatccaggcccgagcccgctgcggaggagggcggtggctatggatctggcttcggatccgggtatgggaggaagaagcaggaggaggagagctacggctctggatatgggaggaaaccgcaggcggaggagagctacgggtccggcgggtacggctctggctacggcggtcagacccggccggaggagagctatgggtcagcagggtatggatctgccaatccgcaggctgagacatacggctctggctacgggaggaagccacaggtagaggagagctacggatcggagtatgggtctgggttcgggaggaagccgcagattgaggagagctatggatcggggtacgggaggacgccgcaggttgaggagagctatggatctggttacgggaggaagcctcaggttgaggagagctatggatctgggtacggcagcaggccgcagggtggggaggagtatggcagtggtggtggtgggtatgggaggaaggcacaggaggagacctatggctcctcggggtatggctatggcaggaagaacgaggagcagagctatggtggttctggctatggttatgagaagaaggcatctgaggaggacgaaggtgcctttggctctggtggttaccggaagccaaaaccctatgacgaggagacacagggttcatacggttatggagaggagcagcccaagtatcagagtggcgggtatgagaggccgagctatggtgggggagaggggtactatggccgcaagaaagatgatgacgactcggatgatgagaagaagcggcgtcattctaagcaccaccaccatggccaccactacgatgactaagcaccagtgccttctgctgggcgttgccctggttcaccgctactgctactatatccattcgcttgcataaataaagacggctgtgtaccttctggacactggaccaccgttgcgacgttgcctctgcattgttacagccgagccgtgagtgtgctgtttattatctaatgttcaaatcgttgtgatgaaccaccgtccacgcctgttgatgccgaaccgaatgtctggatttactttgcgcctgttcttgtggtgtttgtcgccttccctgtcaaaaaaaaaaaaaaaaaaaaaaaaaaaaaaaaaaaaaaaaaaaaaagagaaaagggggcgcgcccggt

SEQ ID NO: 268461 - DNA, 486 bp, Zea mays
agcggggaaagcggatggcattctgttgattctaatcactagctgtccatgttctattatgtaataaggcctagctgcatactcacgtcgcgtccgtccaagcttagttagctgtagaaagaagaacacctggtgtaaaggtctgaaccgtgctgctgtcacggcgtggcctagcgacattctcgccacgctccgcatgtaacgttctcgcgcaaaaggcgggcacgacgcagcgtgagcgggtgtggcggggaaagcggatcgcattctgttgtgaacatcagaggaataaaggagaaagtgcagggcgcagttgcgcagtctgcggcaaagtattttctgcgcgttccgtagcctctgctctgtccagtttttccgtcaggtgaaaacagagtagccactgatcgctgtcgagcttcccattccggtggccggcgccaacagggaaggtgcacttgtagtagctgcgcgggttctcgctcccct

SEQ ID NO: 268462 - DNA, 2635 bp, Zea mays
tggtacgcctgcgggtgcgcggctccggaatgtcctgggtgggccgacccagtcgttcgttctcgcgtccgtttcgcaccagcgccggcacaggcaacgcagcaccgcaccgagccgagccacttagcgagcgagggaacagcctccacggcgaggagagaatggggagaggagggatcggaggcgcggcggccatggccatggccatggagaccgccgatcctgcccgtgcattcgtgaaggacgtcaagcgaatcattatcaaggtgggcacggctgttgtcactggcatgaatggccgattggccatggggaggctcggttctctctgtgaacaggtgaagcaactgaattttcaagggtatgaggtgattctggtaacctcaggagctgttggtgttgggaggcagaggctccaataccgtaaacttatccatagcagcttcgcagatctgcaaaatcctcagatgaactttgatggaaaggcatgtgctgctgttggtcaaagtgtcctgatggcgatctatgacacattatttagccaacttgatgtaacgtcatctcaacttcttgtgacggatcgtgatttcaaggatccaagttttggggaccagctccgtgagactgttttttcactgttagatcttaaagtagtacccttatttaatgagaatgatgccatcagtacccggagacagccatatgaggattcatctggtatattctgggataatgacagtctagcagctctgttggcagcagaacttaatgctgatcttcttatcatgcttagtgatgtggaaggactctatagtggtccaccaagcgatcctcagtcaaagattatccacacatatgtcaatgaaaagcatgggaagctaattagttttggagagaagtctagtgttggaagaggtggcatgcaagctaaagtgtctgctgctgctaatgctgcatcaaaaggtgtacctgttgtcattgcaagtgggtttgcaacggatagcatcattacagttctcaaaggcgaaaagatcggtacacttttccacaacgaagcaaatttgtgggcatgttccaaggaagctacagcccgagagatggcagttgcggcaagagactgttcgaggcgtctacagaagttgtcatcagaggaacgcaaacagattttgctagatattgctgatgctctggaagcaaatgaggatgcaattaggtctgaaaatgatgccgatgttgaggcagcacaagttgctggttatgaaaaagtcgttggttgctaggatgacccttaagccaggaaagataacaaatcttgcaagatccattcgtaaaactgctgacatggaggaccctatttcccatacattgaaaagaacagaggttgcttaagatctggtttttgagaaagcatattgcccattgggtgttcttctcattatttttgagtctcgtcctgatgcattggtccagattgcatctctagcgatccgaagtggtaatggtctccttttgaaaggagggaaagaagttatgagatcaaatgcaatattacacaaggtcataactggagttattcccgatactgttggcaaaaagctcataggccttgtgactagcaaagaggaaattgctgatctactagcgcttgatgatgtaattgatcttgtcattccgagaggtagtaagtctctagtttcccaaatcaaagcaacaactaagattccagttttaggtcatgctgatggtatctgccatgtttacattgacaaatcagccgacatggatatggcaaaacggatagtattggatgctaagattgattatccagcagcatgtaatgcaatggaaacactacttgttcataaagatcttaacaagagtgagggacttgatgatctattagtggaacttgaaaaggaaggagtagttatttatggtggacctgttgcacatgacaagttgaaagtaccaaaggtagactcatttcgtcatgagtatagctcaatggcatgcacagtcgaatttgttgatgatgtgcagtcagctatcgatcacataaatcgttatggaagtgcacacacagactgcatcatcacaactgatagaagtgctgcagaggcctttctgcagcaagttgatagtgccgctgtgtttcataatgcaagcacaaggttttgtgatgggacgcgttttgggctaggtgctgaggttggcataagtacagagcgcatacatgcccgcggacctgttggagttgatggacttctaactactcgctgcattttgcgcggtagtggacaagtggtgaatggtgacaagggagtggtttacacccacaaggatcttcctttgcaatgaggcaaataacctccgttgtggtcgtaacgaatggctggactccccttttaagtacccttttcttttattccatgctacaaagtttggtgtcgtaacaagcagaatgcctatttagtaggcattgatgtaatcagaccattttgtcgtggtgttccttgtcgtataaaacatccgagacatctgtattagaggcgcggtagctagttgatacgcgattgttctggatgaaatttggatctgttccaatgcaatgataatgcatgtgtgatgaggtcct

SEQ ID NO: 268463 - DNA, 797 bp, Zea mays
cgtccggatttcccgggtcgaccgacgcgtccggcctaactgcagtgttatttcatgagcagtaaataaaatttgtgtcgaatagtatgtgatgtcgtatcactttcaagtgtcttgaatggactacataataggttctcctaagtcacatactcacattgtatacatttaccttacagagtcttacttatgttggtactaatcaaggatcttttatatgtaactccaacgccttgcctttgttggaggcaagggtatttcacatgtttcaaattgccatgctgaaggagctaacgaaaaccaactgtgttccacagatattagaacctttgagatccttcttcgcacgtatgaagtacgagacgttgctctgaagagcctcacctccgatgaggcttatgtggggcctcttccgcagaaaagaagaatgcccacaaccccaggtgaaaacacggactgcccacaaaggacttcctccattttggttaggccatgcagcagtgctagagggcacacggggtacttaacctttgcaaggctttgcgtgtgataggcaagcagagtcgtaaaataggtgagtgtaaggattagttgatgacaaaagttgataggaaattacactccattttttagagactgtatcttttgatacgttgttatatcctaggcatggccgaatgctgtccgggcaaggtttgtgctcgctgtaacttagcatctctcggttccgggcaccctgaaaatttgcgagtcacagaatcactcttcaaaaaaaaaaaaataaaaaaaaggggggc

SEQ ID NO: 268464 - DNA, 1005 bp, Zea mays
aatgatattgaacccagctggcctgctaagaggtcatcagtcagcccagttcatccgaaaaattcacctcaatcagggagctctggtgatgagactagatgtaacaaccaaataaaaagggctcctagtgatgcgactggtggcagtccggcttcacctcaggcatcagagagaagcccagatactattatgtctgcccctaggtgtacgactgcaggagcagtgtgttctggtgatgcaattagtaagcatgatgttcctcatgttgagaactgcaacactccaactgtagccgtgtgcacaactttgaagcgtgtagcggagaaagttgtatcagagctagttggaagtgaaaggatggggagcaacaacagtgctgaattgctggagagtatggaaaaggctgaaaatgtttgttttggtgggaatggagttagtcaaggtggccttccagaagagttagaggtatgaacaaggatacatcgtggaaatcattactgaggatcagtggcgtcaacgacacaaaattgaaggaagaattgtggagatagacaagttctaccgcttgctgggtggaatggtaagtagctcaactcacaagtttccttctggacacagatttgcaattgcggaggtttctctgacaggagatggtcgaaaatcatgccttgtaacggcatggcaaaaaacaacaaagaagatttcgtgtaagggcatggtcgaatattatgtcttgctggtacactctagatcagcatggacttttagtttttggtttttacttgttgagcagctggcttcccagagttgacttgtttgagtctgtgatgcccctgccatgctgttttctagaatagaactagatgagatgctgtgtcccctaaggcccttttgtacctctcctttgtaatataagatttttttgactttcttgttagtggtaccggtcccattcatgtgatgattctgatgagttataaggtcagattttctgttttggtgctc

SEQ ID NO: 268465 - DNA, 528 bp, Zea mays
tttggtgttagtcaaggtggccttccagaagaggtaggggtgatgttactggtgcaccctgctcctgcttttgtgctgtgtaacatgatctgagtattctcatttaactttttctgatgcacaaagccaaaccataggattgaagtggtttcttaagctgatgcaggtatgaacaaggatacatcgtggaaatcattactgaggcatggtcttgaactcagcccttgtgcattcagtatctacattgctctgttttctttatactcggctgtttgggatttgtctgctactttatggcaggatcagtggcgtcaacgacacaaaattgaaggaagaattgtggagatagacaagttctaccgcttgctgggtggaatggtaagtagctcaactcacaagtttccttctggacacagatttgcaattgcggaagtttctctgacaggagatggtcgaaaatcatgccttgttacggcatgggaaaaaacaacaaagaagatttcgtgtaaaggcatggtcgaatattat

SEQ ID NO: 268466 - DNA, 743 bp, Zea mays
ccattgagcagggattgcaatatcattattggttatgtgaatgtgaagaaccaaatatcgagggaggatctaaaagaagcattcagaaaatttggagctggccggtatgtggacttcagcatcggagataattcacgataccttcgctttgaagattctaaggcagctgaaaaagcccgcatgtctgcagtacttgctgatggtggcttgataattaaggaccacattgttactttggagcctgtgactggtgaagctgagaaggattattgggacacaatccgcagtattcaaggaaagtacaaggatagtagaagctacaagggaagggcttcaaataaccagagaggaggaaagcgtttcaacgcgaagcgagatagaaacccagactcggagaagaattctaacaaggctcggaaggttgaagctatcgcatgaggttaatttaggtaccttagctcgactaaagaagtaacatgttatgccagcatgatcgacttcagtactctccaagtttctagaatcgacttgttttttagctatcgttttcattttggtcgttttgccaccttattcgatgttcgtcccttagctataatccttttgtaatggctttactgtgatgcgagggctcacccgatggcgtgtaatttgagcacaccaagcttaggcttcccttgcgaaagggtgggagcctttctattcaaaaaaaattgggatgtagggcctgaattttttttttt

SEQ ID NO: 268467 - DNA, 893 bp, Zea mays
gtttctccagattctgatcactcaaaagatgatgctggactcccccttacgccaaaaaatgttgatccagctggatctgaaggctttacgacaggaagatcttataatataagaattgatgaccaagttttgcttcggttttcaccaaagaattctgactcaacctattactttggtgatatgattggtggagcacttaccttctttcacggaactggaaaacggaggtgcctcgaggtatctatagccctggaaacatctgaaacaattaatcctcgcgcattacatccttcaagaaggggctcaccaacaataaccaagctacacagtgaacatcatgaggttgttgcggatcttcaccagacaagctttctgttttccattcccattgatggccctatgtctttttgtacctcaaaggtcactgtacagtggtctcttcgatttgagttcttcacaactccggaaggaacagacccagctaggtacgagcacccactccttgttgataaaagagagaagggtgaatgggtgctcccggtaactgtttacacacctccattgcgcagacgagctactcatgagaggaatggtagatctgtctcacctggaaatatcttcaactcttgaagtgcactgttgccgaagtatagttactttcagctggaaaggatttacagactattctgactggtacaattgcatcaaaaggattttctcgctgtaaattgttataggatttgcaatgcgatgtctatttttttaatagagaacaaatggagtgaaatacttgacttgcaccaaatggatttattggaccatttgtttcatcgatttgtatcccatgagagatgcatcctggccaaaaaaaaaaaaaaaaatattcgagacta

SEQ ID NO: 268468 - DNA, 480 bp, Zea mays
ccgctccggaattcccgggtcgaccgcacgcgtccggggtgaatgggtcctcccggtaactgtttatacacctccattgcgcagacgagctactcatgagaggaatggtagatctgtctcacccggaaatatcttcaactcttgaagtgcactgttgccgaagtatagttactttcagctggaaaggatttacagactattctgactggtacaattgctgtaaattgttataggatttgcaatgtgatgcctattttttttaatagagatcaaatggagtgagatacttggcttgcaccaaatggatttattggaccatttgttccatcgatttgtatcccatgagagcaggcattagcatttggtgtttaagatgccccccagaatatagtaactgtgacacaagcggcccaattttgataaaaaaaaactacgtggttccggtcctaaaaaaaaaaaaaaaaaaaaaaaaaaaaaaga

SEQ ID NO: 268469 - DNA, 633 bp, Zea mays
  unsure (1)..(633): unsure at all n locations
gttgtggcaggcggatggcctgatactcgtctgcggcacgcatgtccagcacgccgcggccaagacgagcagcaaagcaaaccgtatttgtcccgcggcggcctcttcgtcccgcaaggtcgccccacctagatccggccacgccgcacgttccccttttccgccgcagcgatggtgtacgtggattcctgggacgagttcgtggagcggtccgtgcagctcttccgcgccgaccccaacaccacccgctacgtgatgaagtatcggcactgcgaggggaagctcgtgctcaaggtcactgatgaccgcgagtgcttgaaattcaagacagatcaagctcaagacgcaaagaagatggagaagctcaacaacatcttttttgctctcatgactcgtgggcctgatgctgatatcagtgaagtttcagggaaggaacaggcagagcaacagcaagcgaagaaaggtcggggaaggaggcaataatgcggtctgatccttatttgttacagaaaattcacaactggaatgatggattaacatttcattgactttatngtactctgaagaaagttttccagtccagaaccgagaacaaactanatgcactctatcatgaatgaatgcatgattgag

SEQ ID NO: 268470 - DNA, 549 bp, Zea mays
atcaaagatgatttcttcattaaagcaaccagggtaacagccacatgttttagggacaaaaatgtaatactgtgtgtgagcaaaaagggtgtattgcctaggtctactgagttgtaacaagatgagcagtaaccatctgcagtctattttttcacatggaggacctctccactactactctggagaagaaaccatatctacctccctggacgatggatcgtcatcttcgtcttcagatatatcatctccaatgctgatgacatccgtattggttggctgtctaacaaactgacctcgcacccttggcctcgtttcagcgagtttcttccggttcacatacctcaccttcttgtcaaagcagcgctctttcctcttcagcctgaacttggcaagtgctgcagccctcctctcggagcgactgcatgtttcctcaggcactggtggtgtgctcgatgccgatgaccacacattttgcgtcggtaaatgacttgagtgcgtactcatgccagaaggattaaactgaaatgatggtatcacaggtaaaccatg

SEQ ID NO: 268471 - DNA, 476 bp, Zea mays
atcaaaaagatgatttctcgattaaagcaaccggagtaacagccagatatttggggacaaaagtttatactgtgtgagcaaaaagggtgtattgccttgttgccagtagaagaatgtattgtctagtcctactgagttgtaacaaagtgagcagtaaccatctgcactctaatttttcacacaagaggacctctccactactctggagaagaaatcatatctacctccctggaggttggatcgtcatcttcgtcttcagatatatcatctccggtgcttatgatatccatattgcttgcatgcctaacaaattgacctcgcacccttggcctcgtctcagcaagtttcttcctgttcacatacctcaccttcttgtcaaaacagcgctctttccttttctgcctgaatttagcaagtgctgcaccccttctctcggagcgattgcatgtttcgtcaggcgttggtgtgctcgatgc

SEQ ID NO: 268472 - DNA, 838 bp, Zea mays
acactgaggacgttgcagcaaacaaaacaaatgccgcaaacctgactgaaggcgataggtgcagcgagaagcatgaaaaatcaaatggacctgttatagaaatttcagttgattgcaacatgcccggtaaaattactgggcatgtggaggcttcgagagagatggaaaaggcagcaagcggtttacctaatcaatctcacgaggatgatttgacaagagacggtgaagtgatcagcaaaccaaagaactcagagctcactaaagagaaatcctgcagtgacaaaccatcagcaagcagcagagaaccgaaaggagacaaaccaaaccgtggtgcagctgaaggtggagatgatccgaagaagaggccgcgtgatcaagccggtaaaaatacgtcagatgcctcaaactcgacatacaagaaggttgaaatgttcgtgaaagagcagatcaggccactttgcaagagtgcggtgatcacggtcgatcaatataaagtgggctgtcgcgaaaacaactgacaaggtaatgagcttccaccgcgacgccaaaaatgcaaactttttgatcaaggagggtgacaaggtgaggaagctcgcgctgcagtacgtcgaggcatctcagcagaagatcagttgagaccctttaccggatttgtaaaatgtgatcgcaatagctgccattgtttcctcgtgctggaagcaagcaatccatgtaaatgactgggtgtgcggatcacttggtcaacaaccgtgtacaggccacccttcccgtaaatacatctgcttatgcattttgacatgaacaagtgcttcaggtgaaattgaagaagttttgctcg

SEQ ID NO: 268473 - DNA, 589 bp, Zea mays
gcttcgtctatcgctgttctgccaccacgacccactgactaaagctcagaactcagatatctatggcttgtgtgaggaatggcagctagccatcgacagaatcccagataaggtggcctcggaagggatcaagactctcctgacagtgattcatgctgtcgtcattcaacaagctgaggagcataagcagaagaagaggtcggagtctgcattcaaagagtttgagaagaggccggaggagctgagagccctggagtcaaagtatgtcggcgctgaaggttacagagaaatggcgcgaaaatcatcggtagctgacaagcgggcgaaggttgaggctctgaggagccgtgccgacgaggagaagatcaaatacgagaagagcatcggggtcaccagagcaatgaccctgaataacctgcagactggcttccctaacgttttccaggcgatgacgggcttcgccagcgtgtgcatggaggcatttgagtcggtgtacaacttcaagcggagctcggacccgaagaggctgctgacctgaagcaatagtggataaaatggatacagtcctagggttttagtaacaatgata

SEQ ID NO: 268474 - DNA, 1238 bp, Zea mays
gaattcccgggccgacgcacgcgtccgcccacgcgtccgcccacgcgtcctttgccttagccgcttcgcatcgcggacctggccccggcgccgatgcacgggtcgcagctgcgcgtggcctaccagggcgtgcccggcgcgtacagcgagaaggcggccgggaaggcgtacccgggctgcgacgccatcccctgcgaccagttcgaggtggcgttccaggccgtggagctgtggatcgccgaccgcgccgtgctccccgtggagaactcgctgggcggcagcatccaccgcaactacgacctgctgctccggcaccggctccacatcgtcggggaggtgcagctccccgtgcaccactgcctgctggcgctgcccggggtgcgcaaggagtgcctgacccgcgtgatcagccacccgcaggcgctggcgcagtgcgagcacacgctcacagccatgggcctcaacgtggtccgcgaggccttcgacgacacggccggcgccgccgagtacgtggccgccaacggcctccgcgacacggccgccatcgcgtcctcccgcgccgccgagctgtacgggatggaggtgctggcggacggcatccaggacgactccggcaacgtcacccgcttcgtgatgctggcccgggagcccgtcgtgccgcgcaccgaccgccccttcaagaccagcatcgtgttcgcgcacgacagggagggcacctccgtgctcttcaaggtgctctccgccttcgccttccgcggcatctcgctgaccaagatcgagagcaggccgcaccgccaccgccccatccgcctcgtcgacgacgccaacgtcggcaccgccaagcacttcgagtacatgttctacgtcgacttccaggcgtccctcgccgagccccgcgcgcagaacgcgctggccgaggtccaggagtacacgtccttcctccgggtgctcgggagctaccccatggacatgacccccatgaccgccggctcttcctccaccgtttcctcgtccgatccctcgtcgtcatgaattgccctcctggatgctggagctccgaggagaagtcgccgagtagagacgttgggtttctgcttatgtcgtcctactcgcccgcccctcgctgcggctggagtaattaattttgagtttactttaatctttcgtggtaatacgtgtaattgttccgcggtgaatataatgtgagatatatagtcccaaaaaagaaaaaagaaaaa

SEQ ID NO: 268475 - DNA, 498 bp, Zea mays
  unsure (1)..(498): unsure at all n locations
aatcggtgttgcaatgtctgcagcgggtatcaccagggcgccgatcgggcagaatccgaggctcgggtgctacgccccggggaggggcggaggcgtggtgaggtgctcgttgcagggcgcggtcgtcggcggccgggcggagtggcagagcagctgcgccgtgctgtccagcaaggtggccgcgctcggtacgcactccgtcaacggccacgtcgcgccggcgccgactcagaacggggcggtgctggatttggtcnccgtgagtagtagtagtatcaatggcgccatcaccaagaacctgccgcagccgcttcgcatcgcggacctgtccccggcaccgatgcacgggtcgcagctgcgcgtggcctaccagggcgtgcccggcgcgtacagcgagaaggcggccgggatagcgtacccgggctgcgacgcgatcccctgcgtacagttcngagtggcgttccnagccgtggagctgtggatcgcggaccgcgccgt

SEQ ID NO: 268476 - DNA, 336 bp, Zea mays
cgggtgctcgggagctaccccatggacatgacccccatgaccgccggctcctcctccaccgttgtttcctcgtccgatgatccctcgtcgtcttgattgccgttggaggctggagctagctccgaggagaagtcgtcgagtagggacgttggttttctgctcatgtcgtcctactcgatcgcccctcgctgcagccggagtagttaattttgagtttcctttaatctttcatggtaatagtattatgtacgtgtaattgttcaaaatcatccgcggtgaatatatctgtgaaacagtactacatgacattcataatttcataaaaaaaaataaaat

SEQ ID NO: 268477 - DNA, 464 bp, Zea mays
cgacccacgcgtccggcttctggggggcacatcatcttcttccattgcctgagtcttcttggctattgcctgttgccactggacgttggtgctctactttgcatgctgaaggacaacgtcatacttaagattgtcgtggtgacaatcacattggcttggagctcctgggctgcctatccattcatgagcgctgctgttaacccaaggagaaaagctctggccctatatcctgtcttcctcatgtatatctcagttggtttcctcataattgccattgattaacggggttgagctttgtagtaacatctgaagagttgagagtttccttggatggttgaaccaccagaatacatacaagtttgagtagacaatgcttctatccttgtaccctcgtggagtctttgtgaattgcctcgtaggaattttggtttttacatgatcttgaggcataaggttgtaaaatt

SEQ ID NO: 268478 - DNA, 406 bp, Zea mays
cctatccattcatgagtgctgctgttaacccaaggagaaaagctctggccctatatcctgtcttcctcatgtatatctcagttggtttcctcataattgccattgattaacgggggggcaagcttcctagtaacatctggatagttgtgcctttccgcgtggatggttgaacccccagaaaacagacaagtttgagtagacaatgcttctcccctgtagtctgaatcgtctcgtggggatttcggtctttacatgatccggaggcttaaggttgtaaaattagttgaaaatctataccctgttgtaaagggctgaacttttgacccctgaattgactgccaagcttcttacactgtgtgagagagaatactgtgttaaatgagccccccagaggtgcatcgtgtgt

SEQ ID NO: 268479 - DNA, 694 bp, Zea mays
atttccgggtcgacgcccacgctcctctccctctcccgagcacctctccttcctccactttctccccaactccggtgagcgagagtgtggtcacgacacaatcatggcgctgcccgtggggccaatcgtcggtgcgcgagctccccttcggggtgagcatgtcaccgtcgagcgacctcttggcggtgccctagtgtcctgtgcgtggcgttatgtaccggtggctgcgttgtttctacccagtcgtctgcaaacaagattagcaggaatggacgaaatggtttgagttggttctctgagcaggttgacaagcgaggacctctatgaagctgatgctaacatttacagagcaaaaggatctatattagagcagtataaaagggtggatgtgaggcttacattggttgtgagcttgaaagggaattttgttgttggctggtgaggttcttttgacttctgatgcaacgaggatagctgaaatagcaatcttcttcaatgtcttattatgcgggagcttgaaaatacttcaatttataagtttataggttttcatgttggagcatctttgtcatggtagcatgtaggttgctaaaatagtcagtggaataatgagccaatgtctaagaacacttgtcttttttttaggacagtataataagaactgacgtttccctgtccatatggacgttccccc

SEQ ID NO: 268480 - DNA, 772 bp, Zea mays
gagccatccccaggctcttgcgcaatgtgaacacacattaacaggactaggaattgaacatagagaggctgttgacgacactgctggtgcagcaaagattgttgcagaacatatggtccaggatactggtgctattgctagttcattggctgctaaactctatggattggatgttcttgctgagaatattcaggatggcaaaaataatgtcacccgtttatgatgctagctcgaaaacccaacattcttcgcaatgatagaccatttaagacaagcatagtcttttcactagaagaaggacctggacaactctttagggcgcttggtgtattcgcacagaggaaaatcaacctcacaaagatcgaaagtcgtccacacaaggagaggcctcttcgagtatctgatgactgttcctcactcttaaagaattttgattacctcttttacgttgaccttgaagcatcaatggctgatccaaagattcagaatgctcttggaaatctgaaggagtttgcaacctttttaagagtcctcggaagctatcctacaaatgtgaatgaaccttagaaaacactgcagattacatgatggattagcaggaatggacgaaatggtttgagttggttctctgagcaggttgacaagtgaggacctctatgaagctgatgctaacatttacagagcaaaaggatctatattagagcagtatagaagggtggatgtgaggcttacattggttgtgagcttgaaagggatttgttgtttggctggt

SEQ ID NO: 268481 - DNA, 1389 bp, Zea mays
cccactcgttcggcatcggcgagggcgctcatgcaaaggtctatgaggggaagtataagaaccaaaatgttgctatcaagattgtgcacaaaggggacacccctgtggagatgaccaagagggaggggagattcttgagagaggtgaccatgctgtcaagggtgcagcacaagaacctcgtcaagtttattggggcctgcctagaacctgtcatggtggtcgtgacagagctactagtggggggctcgttgcgcaagtatttggtcagtctccgacctaggagccttgagcctcgtgtagcagtggggtttgcattggacattgcccgagctatggaatgcttacatgcacatgggatcattcatcgtgatcttaagcctgagaatctgttgctgactgcagaccagagaacagtaaaacttgttgatcttggtttggctagggaagagacactaacggagatgatgactgctgagacaggaacataccgttggatggctccagagttgtacagcacagtaacactgaggcatggagaaaagaagcattacaaccacaaagtagatgtctacagctttgcaattgtgttgtgggaactcctccacaataaactgcccttcgagggaatgtctaaccttcaagctgcctacgctgccgctttcaagaatatcagaccaagtgccgataacttgcccgaggagctgtcagaaatcctaacatcctgctggaaggaagacccaaacgacagaccaaacttcacacagataatacagatgctcctacactacctatccaccctttcgccacaagagaccttggcgggcccccgccgcacgttcagttcggagaacacaatcctgcccccagagtctcccgggacaagctcgctgatggcttcgcggggcgacctcggcgacacgcccaagggcaagaaggaagacaagccgaggggcttcttcttctgtttcagcgagtgctattagcacgagcccccccaaagggggaacactccgataagcttgcaaatactgaacgaacaccgtctctccccagctccgatgccctgcgactcaagccatgtccagccggtcaagtcccaggcatccatagtccgcaccctgaagaacggaagtgtagtcgaacactgttttgttttcttctgctaatcaaggtctcctgcatcgctgacatgctgatgacatataccagcagggtaaaacgacgggtaaaccttttgactccagatagtaatggtgggaatagcttacctcccctgtgttttctggcgcaccatggtgtaacggagttgctagagcgcgactatagattgccttcctgcctgcctgtctcgcccgacatcgtatagaaataaaaccaataattcgcatc

SEQ ID NO: 268482 - DNA, 1057 bp, Zea mays
cggaattcccgggtcgaccgacgcgtgcgcggacgcgtggggagaaaatgggaatgcatgagatgagggttctggttgctgaaaggtcgacgatgaacatatacatcaagggagaagacttggaagtggagcagaattgcattggcattttgctggaagggttcttgaagatcgagaacctgactctcatcacgcccccagcgttgcttctgccatggaatgctgacttgagcttattcggtctcgagtcctcagactactgccatactgcacgcaggtatcaggtggaagccagagcgcggatcatcttcttcgacgaggcagaggccgcccatcttcatgttcagacaagtgcgtcgctgccccaaggtgagccagcacggagcatgagcaaggagcacagcggcttgctcagctggcccgagagcttccggaggtctcgtggcagcctaggcttagcagctgagatgctgccgggcggcttgtcttccagggccctgcaactgagcatgtacgggggcagcgtggtgagcctctcctccggccagcagggtcaccggcggcagaggccacgtcatcgcgtgcaggcggccacgacgatgacaaaccagaagaagcacagctcttcctaccccaggatgccatccatatccaaggagcggcatctgctctccgtgcagtcggagggctccaacatgaagagagtggcagctctacctgaggttgctgccaccgctcctgctccggcaggggcagcacaggggcagcggagggctatgaacttgcaggaggaatacaactcgagcgaagactccgccggcgaagaagtcatcgtcagagttgactcgcccagcatgctctctttccgtgagtccaccgccgtgcctccgccccaggagcagtagctggatgcctggatgtggtcttctcttctcgtgtattgtattgtactgtatgtattgtatcagggaagctttggcgcagcggtgtggtgtggtgtggtgtcctccacaaaataaactaaaccacatttccgcgttccaaaaaaaaaaatata

SEQ ID NO: 268483 - DNA, 1002 bp, Zea mays
cccacgcgtccggctcacccaccagtttatcgaatactgcatatggggatgggacaatctcccaaggacagtcctgatgtactacgccaatttcctttcctcgccagagggctacttccacacggtcatctgcaacgtgccggagttccgcaacaccacagtcaaccatgacctgcatttcatttcctgggacaacccaccgaagcagcaccctcactacctcacgctcgctgacttcgacggcatggttaacagcaacgcgccctttgcaaggaagttcgggagagaagaccccgtgctggacaagatcgaccaggagctactgggccgccggcctgatgggtttgtgcccggtggatggacgtatctactgaatgcgacgactgaggaagggagacccttcgccgttgagcgcgtgcaggatctccgcccagggcctggtgtggacagattgaagaaactcgtcacgggcttgctcacacaagaaggctttgatgacaagcactgcctgtgagactgccccccagtaagatgattctggctgggggcggtagattacacggtcaaatcttgagggcattgaagccattttctgggaatatgcctactggctgaagaagcagcacatagtatcatgtgatgtacgcgtggatgcaagcaacggtaagataggtgctcttacagacacagccgcctgagttgagctactaccgtacagcaggaggccacggacgtagccggcggagattatacaggaatagtagctcattaggttatgttagatgactatatcagccccttccccaccgtcaataatgttgggaattttgacatctccccggcgctccgggttgtgcaaggcaggcaggcagtccattctttgcttggatgccatggcgcctggtgtaaccacctggtagcgtgtgaggaggcttcgttgtattgactagtgcatatttctgggcaaaacaaatgcgtttggttgcccccatgtattctttt

SEQ ID NO: 268484 - DNA, 411 bp, Zea mays
gaattcccgggtcgacccacgcgtgcggagctgacgagttcttcctaaaacctgggcgggtattaaaccttaacaaggctaaaccccagatactggaaagcagatgcaagcgggaacagcaccagcaaagtgacagtcacagtggcgaacgcaggaaccccacaatcagcagcagcgatagcataaacaaccgcaagagaaagggtgcaggcaccgaataaatctttgcccagctggcaaacagatcaaggcacagttaactgagaactgactagtacagctaaaaccttttccttttcactttactttggcctactgatttgtaacgtagatgttagccctggatttgcaaaacggaacggaaatctgtaactgatacttgttgagtcgaatcgatcgaagtgattctgc

SEQ ID NO: 268485 - DNA, 1421 bp, Zea mays
  unsure (1)..(1421): unsure at all n locations
ggaccagcgcacgtntctcgcncgncgacgcgctgccgcggccatatacggcgaaagcctattcgtgcccgcggccgtggatagataggtcagtgacgattgagaaacccgtagtcggagcagaggaggggtagaggatggtgttcggtcaggtggtgatcggcccgccgggctccggcaagaccacctactgcaacggcatgtcgcagttcctctccctcctcggcaggaaagttgcggttgtcaatttggaccctgcaaatgacgcattgccatatgagtgtgccataaacatcgaggacctcataaaactcagtgatgtcatgtctgagcattcgcttggccctaatggagggcttgtgtattgcatggattacttggagaagaatattgattggcttgaagaaaaactgaagccttttattgaagatcactatctgttatttgattttcctggtcaagtggaattgttcttccttcactcaaatgcaagaagtgttattaataaactcatcaaaaagatggacttgaggcttactgctgttcaccttattgatgcccatttatgctgtgatcctggaaagtatgtcagtgctttgcttctttcactatcaacgatgctacacttggaattgccacatatcaatgtcttgtcaaagattgacctcattgagaactatggaaatttagcattcaaccttgacttctacactgatgtccaagatctttcttatttgcaatatcatcttgagcaggatccccgctcagccaagtacaggaaactgactaaggagctctgtgatgtgattgatgattttggtttagtcaatttttcaactttggacatccaggacaaggaaagtgttggcaatcttgtgaagctgattgacaagagcaacggatatatattttcttctattgacagtagtgctgttgagttcagcaaaattgcagcggcgcctcttgcttgggactactacagaacagcggaagtgcaggagaagtacatgaaagatgatgagttcgcgcaactgacaagcaggatgcaatgaggctggcggtgccgtcccgcaccccccctttggtagcacaacgggtgaacggtgaaccacgacagtgtggcacgtcgaacttcggttgccagaacgatgtgaaacctgtctaaattcatgtagctcagttgtaggtgtttactgaagctaattgctatagttgcctgatcttctgggagtaccctttgggcagtaaaaaaatgcacttgtcacctgtgaccaaccggtcaggtcctgttttgtttgttcgcttcaacttcgaactgcatcagctacaatctttagagacaaaatattgtagtgtttggactactgcagttgtaatctttaaagacaacattgtagaagcagtagaaatcagtatggatt

SEQ ID NO: 268486 - DNA, 382 bp, Zea mays
gagacgaggtgaggggtcggggttcgtgtggcgaacggcgtgttgagccacgcgcccgcgctctgtgacgcccggaacgttcttggagagcgcgagcgaggtcttctctcttctcggtgcgggtcgctgactcgctgtgccctgtgatgtgatgtgacgctggatcgttttgggtccgaccaacgggagaagagcggcctgtggtcgccgccgccgtgtgtgggctggatggcctgctctcttgtgctcctcctatatatcagatgtacttcctccgaggagcagggtttcgctaccttttcgtactcgctacagctacagctagtacgtactatactaataaaagctgcagttattataggacaagaaccggaagaacact

SEQ ID NO: 268487 - DNA, 339 bp, Zea mays
acggcgtgttgagccacgcgcgcgtgcggccgcgctctgcgacgcccggaatgttcttgggagagcgcgaccgcggtcttctgtcttctcggtgcgggtcgctgtgccatgagatgtgacgctgggtcgttttgggtccgaccaacgggagaagagcggcctgtggtcggtggtcgccgccgtgtgtgggctggatggcctgctctcttgtgctcctcctatatatcagatgtacttcctccgaggagcagggtttcgccctttcgctaccttttcgtactcgctagtcgctacagtacagctagtacgtactaaactgtagcttttattagtatagta

SEQ ID NO: 268488 - DNA, 919 bp, Zea mays
cgtaccggtctcggaattcccgggtggagccacgcgtccgcgcatacgcaaccttatcatcatccgcccttgggttttctatccgatagaccggggacgcacaggcctctcgccctccgcgcggctccacaggagagcaaaaatggcgaccctctccatggtctccgtccccatcgcaccctcctccttgtccctttccacccggggccgcagctcctccgcatccttccccgctaagaagggaggaatcggtcacggtggcttgcggatcgagtgcatccgtattggtggtgttgagattccaaaccacaagagggtggagtactcgctgcagtacatacatggcattggacgctcacgctcacgccagatcctcctggacctcaatttcgataacaagatcaccaaggacctctccgaggaggaggtcatcaccctccgtaaggaggttggcaagtacatgattgagggagaccttaaacgtttcaaccgtgtggcgattgagaggctgaaggagattaggtgctacaagggcatccggcacaagcttggactcccagttcgtggccagaggacaaagaacaactgccggacacttaagggaaagagggcttcagttgccaagaagaagtcacccgcctcccaggatgaataaatcgtattgccatgtattgaagttctctctctctctctctctctctctctctctctctctgtgtgtgtgtgtgtgtgtgtgtgtgtgtgtgtagcgctactactgctgggtgttttgtttcgagcttttatgctgccattgacaaatcatggggtagccatcagctgctgcagattttgtagcaatgacatactagctcatatgggtcggttctataaatgaagatcaaattcttgtttaaaaaaaaaaaaacggacgcgtggg

SEQ ID NO: 268489 - DNA, 371 bp, Zea mays
tcgacgcacgcgtccgggggttcagaggattgccatctacgagtacatggaaagcggcaatctgcacaacctactgcacgacttgccactaggagtgcaggcaaccgaagactggagtggcgacacatgggaggacaacaccggtggtgttgcaacaactgaaatcgtcacgccggaaggtactgcaacatggatattccggcacaaaatcgccctaggtgccgcaagggcgctggcattcctccaccatggctgtatcccgcagattgtccaccgggacgtgaaggcaagcagcatctacttcgactgcgcaatggagcctaagcttgccgatttcgggctgtcgatggtggcaggaaccagggccgatc

SEQ ID NO: 268490 - DNA, 1617 bp, Zea mays
cccacttcgtccgcccacgcgtccgccccggtttctggccgttgctgctgtcccgccggcgtccagtctcggcggggctctagctggggacgcgccggctcgcgctgtgacctgggagctctggactctggaggcgctgcaggcggtcgggcgggcgatggggtgggcttcctgctgcaagcggtctgacggggctgaacctggcaggaggaggaggaagaagaaggacacggcgtggcggatcttctcactcaaggagctccagtcagcgacgaacaatttcaattacgacaacaagctcggggagggcgggttcggcagtgtgtactggggccagctctgggacggatcacagatcgccgtgaagaggctcaagagctggagcaacaaggccgaaacggagttcgctgtcgaggtggaggttctggcacgcgtgcggcacaggagccttctaagcctgcgcgggtactgcgccgaaggccaggagcgcctgatagtctacgattacatgccgaacctgagcatacactctcagctccatgggcagcacgcggcggagtgcaacctcagctgggagaggaggatgaggatcgccgtggactccgcggaagggatcgcctacctgcaccacagcgcgacgccgcacatcatccacagagacgtgaaggcgagcaacgtgctcctggacgccgacttccaggcgcgggtcgccgacttcggcttcgccaagctggtcccggacggcgcgacgcacgtcaccaccaaggtgaaaggcacgctggggtacctggcgccggagtacgcgatgctcgggaaggcctccgagagctgcgacgtcttcagcttcggggtcacgctgctggagctggccagcgggaggaggcccgtggagaagctgagccccaccacgagcgcgaagcagaccgtgacggagtgggcgctcccgctggcccgcgccaggaggttcggcgagatcgccgaccccaagctccagggccgattcgtcgaggaggagctcaagcgggtggtgctcgtcgggctcgtctgcgcccaggacaggccggagctgcggcccaccatgtctgaggtcgtccagctgctcaagggagagtctgctgagaagctcgacagcctggagaacgactgcctgttcaagcctggtggtagctcgttccagagctcggactgcgtcggcgagggcgaggggaggagccccggaccagatggggggatacaggaggcagttgattcgagcgagacagtatcctcagcaagctagtgtgtggtattggcagtagctggttcctcagcaagactggcatagtggcagtagctggtttctcagcaagacagcagctccctgcccctgggagaaacgtgtgttgatcagtgtatttattttttgtggttaatccttgctattagcgagttaattcgggagtttccttgcccagttctatcttcgtgttggcatggttctatcttctatggttccagatgttcactgcactggtgttagcgtttagctacttcagtgcatcaatggttttgtgtgcaagtccgtaatatgtaatacatttttgaggttttcatcatgcaaggttgatttcttcgagc

SEQ ID NO: 268491 - DNA, 1558 bp, Zea mays
tgttatttctgtgcagcgtatgtttgattttgacaactatttttactggtggacagaacttctgttcaagagatgataccatcttttgtggtgtgtttgacggccatggaccttatggccatttggttgccaagagagtcagagatctgctgcctctaaagttaggagaaggtttgacgacggaagatggtagagtaacatccactggcaacattaagctcaacacacatgatgtagcttcaccagaacacatagacaaaggaagtactgccatttcctctgaagctcagcagaatggagagtatccagagaccttcccagcattgagaacttcattcttgaaggcattccgtgtaatggatagggatctcaaattacataaaagcattgactgctttttcagtgggactacagcggtggcagtgatcaagcaggaacacaatcttataattggcaatttgggggattcaagagctgtcttaggcaccagagatgaaaataaccagcttattgctgttcaattgacagttgatctcaaacctaacattccaagcgaagcacagagaatcaggcaacgcaggggcagaatattcgcgcttcccgaggagccggaggttgctcgtgtttggcttccaaagtacaactctcctggactggccatggctagggcatttggagacttctgtctgaaggaccatggtgtaatttctacgcctgacgtctcctatcaccacatcacggagaaagacgaatttgtggtgctggctactgacggggtctgggacgtgctatcaaacgatgaagttgttagcactgtctgccgagccacatctcaggcctctgcagcccggtttctcgtcgagtcggctcaccgcgcttggcggactcggttccccacttctaagatcgatgactgcgctgttgtctgcctgttcctgaacacagacaaagcgagcgaatcgtcgagttctttggccaagaacttggcagatgctgtagaagttagcagtgctgggcgcgccacaactgtccaggtgagcgctggtgcatctacagatgttgccgccctggtaccagtaccagatgggaacgaggtgtctattgctgaaaccatcacaaagctggtcacgctcatggatttgcccaaggatggttgaggctcctgtgattgggacctgaacgaagatataccacatcggtgggtttctgcttgcagtttttttttctgaacgcaagtgtggctagaatttgcagttttgcttcgtgtaaagtaccgcgtcagtttagcgtgatttgttccagtttttgtaatatttcaattcatgttagtattgatgcgtccgtgcgtcgtcgagatcgtagtattctgtaggaaggaggctactgagtttttgtgcttcctgtaaatatattcatcattctatctctggtgtctgatctatatcatcattgctttgggggtcggtcttattaccataaataaggattatataaaaaaaaaaaaaaaaaaaaaaaaaaaaaaaaaaaaaaaaaaaagaaaaaaaaaaaaataagaggg

SEQ ID NO: 268492 - DNA, 519 bp, Zea mays
ctgctgtttgttctattcctgaacacaaatgaagcaagtgaatcttcgagttccttggccaacaatttggcagatgctgtacaagttagcactgctcagtgctccaaaactatccaggtgagcgcacctatagacggaaacgaggtgtctgttgttgaaacgaggtgatttgcacaatgatggttgaggcgcaaagtgagcttgcatgctgtgcctgtgactgagatctgctgaacgatagtagttgaggcagagagagcgggggcatgaacatgctgtgctgtgcctgtgattggcatttgtggagccaagatatagcacgtcggtgggtttctgcttgctatttttttctggacgcaagtgtggttattatatgcgacattagatttttataggagaaacataaattgtagggtacttgaagttttggctttaaacatttatgttaacaagatatctgtatcattctttggcctcgttgctactcacagaaaaggttctagagcttgttgatcacat

SEQ ID NO: 268493 - DNA, 345 bp, Zea mays
  unsure (1)..(345): unsure at all n locations
cccacgcgtccgcccacgcgtccgcccacgcgtccgcctcaaccatccttgggcaaatccatgtggtatatcttcgttcaggtcccaatcgcaggagcctcaccgaagatataccacatcgnggggtttctgcttccagttttttttcctgaacgcaagtgtggctagaatttgcagttttgcttcgtgtaaagtaccgcgtcagtttagcgtcatttgttccagtttttgtaatgttccaattcatgttagtattgatgcgtccgtgcgtcctcgagatcgtagtattctgtaggaagggggccactgagtttttgtgcttcccgtccatatattcatcattct

SEQ ID NO: 268494 - DNA, 824 bp, Zea mays
cccacgcgtccgggccgctccaccaacgaggcgatgctggtcatcgaggcctaccgcacgctgcgcgaccgcgggccctacccggccgaccaggtcgtcaaggacctcgccggcgccttcgccttcgtcgtcttcgacagccgctccggcgccgtcttcgccgccctcggcgccgccgacgccgggggagcgccggtgccgctgtactggggcgtcgcggccgacgggtccgcggtgatcagcgacgaccgggacctggtcaagcgcggctgcggcaagtcctacgcgcccttccccgcgggctgcatgttccacagcgacggagggctcaagagcttcgagcaccccatgaacaggctcaaggccatgccgcgcgtcgacagcgagggcgccatgtgcggcgccaccttcaaggtcgacaccttcaccaagatcaactccatgccccgtgttggcagcgccgccaactgggccgcctgggacgaagccatatagtagatctagccttgccatgtacactgcgctgcctgcaacccgttcgccggtgcccctgcccctgcccgtggtcttttatcatccttccaaccacgagactttgcttctaaaccagaggctccatctgtgtgccgccttgttttactagaaatctttttttttattcctttttcacttttcctgcctagtttttccccttatcctggcattgtacaaataatttctccagtgcttgtagcttgtggacttgggttgtccaacatgtcatgaatacaaactgagtttgcttcaaaaaaaaaaacccacgcgttaataggagtcactttaga

SEQ ID NO: 268495 - DNA, 467 bp, Zea mays
cccacgcgtccgcggacgcgtggggaacaggctcaaggccatgccgcgcgtcgtcagcgagggcgccatgtgcggcgccaccttcaaggtcgacaccttcaccaagatcaactccatgccccgtgttggcagcgccgccaactgggccgcctgggacgaagccatctagtagatctagccttgccatgtacactgcgctgcctgcaacccgttcgccggtgcccctgcctgcccctgcccgtggtcttttatcatccttccagccacgagactttgcttctaaaccagaggctccatctgtgtgccgccttgttttactagaaatcctttttttttattttatcctttttcacttttcctgcctagtttttccccttatcctggcattgtacaaataatttctccagtgcttgtagcttgtggacttggcttgtccaacatgtcatgaatacaaactgagtttgctt

SEQ ID NO: 268496 - DNA, 679 bp, Zea mays
accggtcttgaattcccgggtcgaccgcacgcgtccgtcttgatgctgcgaaggctgtgagattgattatactagcgagagtccgaagtcctgagttggcaactcaaaacttaggggggcttcctgacgatgatgaatttgtcttttcttgtttcaccttgaaagcttctccgcagcaagggtagcttggcaggatgctgagccggttcggaagcgctttgctacgacttgtttctccgactggcatgctgttcaacaaaaacttcaaccaggtcgagtacattgaggcaaaaacgacatgaagatgcactgtacccatcacaagaggtgggatgatgaagatgtagaaaatgaggcacagaaacctggaaagatgaatagatgcaaaaggattcgcaaaaaccatgggaagatcatttgggcaaatcacttccgtccagaaggggatcagagttggctacgatcacttccattcgtcctaggaactatataccccctcacagactcatggaagctgagaactgtagtagtggctacgctttccaacacttggcagtttgcgcccgtagaatggagttaaactgggtgctaaatttgtttcttgttactaaccgttaagaatcacgagatggttaaaaatggttgagcttgtccagaaaacatggataagtgaggtctc

SEQ ID NO: 268497 - DNA, 504 bp, Zea mays
attcgcgggtcgaccgacgcgacccctgacgcgtttgcacgagctgactgaattttttggtaaaatagacattaaatcagcttcagatacaattccaagagtggcaagttacacattttagaaatcatttcaccttggttacagttcacactaacaagttgtcattgcatggctaatcgaactgcaaataacactaacatggtgctatgatacatcgacgtgacagagaacgtaccccggtatcagatgacccagaaccaagccacaatggaaccaatgacaaggccaacaacgaggaacagcacgatgacaatcccggcagtctccgagtggtggatgggcacagccttgggcgcgaggatcatgaggacggaggtcaggtacccgttagtgagccccaggaggcacgtcagcacggtgacggggatctcggtgcggaaaaagctcggcccgtgcaggcagccgtagaagagcgggtagaacaggagcctcgcaaaggacccc

SEQ ID NO: 268498 - DNA, 584 bp, Zea mays
aattctctatcatccaatgaatgtacggtgtatgtttcattgctgaacgtggttggtggtggcattgtgtctgtaaggttacggctagtgtataaatacctggtttgaggatgagggaggtaccaaacaaggaggaactggcatcagctggttgctaccaaggataaccaccagtgcatcctgataaacaccccagcctgcattcatgggtcgccatgcgcttgcgaaatcggcagctctgctccgggaactttggtccaagcaaaggactaaccttgtgaagcgactggagcctacagaagcgaggtctccacaaacatcattgtgggtaccacacccaaggacagggatctactaccccaagggctttgaatgggtcatggaggatgtccccagcagcgcagcttcattccagcagtcatactggttcaagactggggaggcagagccagcaagctctattacatcaaagaatgattctacttgctttgaccatccatttgcttgatatatgagaggctttgcactggaataaaaaccattgaaagacacagctgtgtgctttcaggaagaaaagagataca

SEQ ID NO: 268499 - DNA, 413 bp, Zea mays
tcgctcctgaattcccgggtcgaccgacgcgtgcgggaacgggtgctatattctgttcagcctttgcagttatgtggtgtacctctctgatggtagcactggcatctcacagtgagccggactttgtaaattgttgtacagaaaacgtacatatgatgatgccgtgttaccctgatattcatgacaccgttgtttaccacataaaaaaaaaaaaaaaaaaaaaaaaaaaaaaaaaaaaaaaaaaaaaaaaaaaaaaaaaaatatttaaaaaaataaaaaaataaaaaaataataaaaagtaaaaaaaaataataaaattaaaaaaaaaagggggggggcctttttaggggatcaaagtttacttccccggctttgcaagtttaaactttttttttgggggccctaaaattaaa

SEQ ID NO: 268500 - DNA, 405 bp, Zea mays
gtaccggtttcggaattcccgggtggacgccacgcgtccgagccgaagttcagaaactcaagggacaatacgaagaattgcagaagaagcaggaagaagtattggagatgcagaaaacccaggtcgtggaagtgatcagcaatccatacgcccaaaagaaacggtgcctgcggagaacattgacaggtccctggtaaccgagctgttgacgaccgaccgggcttgacaggatatttaacattatggcacctgtacatatataccttgaggatttggagaacccgagtttccggtgtatattagcgaccaacagagtgtgagtgtaccttcgcttgacttaaaaaaaaaaaaattttttttttattttttttatttatttttatatttatatatttttttttaatt

SEQ ID NO: 268501 - DNA, 538 bp, Zea mays
acccacgagaccagggggttcgaagcgctaacaaaggacgagcctgcgttatcaataattcaatccggacggacgatcgactgttccgattcacctcattttaccagtccatgaatcaaaacaacagaatcatcacctacaccgaaatacttatgcccgatccaatcgcagcacgaatgaatgcgtcgacaatttctcatgcgaccacgaaggcacgaactacacacttttttttgttgccggtctcacagcaatcgtctcctactcccggcattgctgtaggggagctcaaagatcccgagcttgctgtgagcgcgacgacggccgtggccgcttcactcacttggcgccgacgccgagcgtgagctcgagctcctcggcggcgacctcgtggatgcgctcgccttcccacggcgtgacgcggcccttgtcgaactcgaactccgcgcccgccaccccgttcagctccatggagtcggaagcggacgcgccgtcgtcgtcaccgggcggtttgacgaggttgtacgcgggcgacgcg

SEQ ID NO: 268502 - DNA, 767 bp, Zea mays
cagaaggaagccgcggctgctgcggctgctgcgtctgattcagaggactccgatgatgcggctggcggcaataatcacaaattgccccggtcgccttcgcgctcggtgtcgtcactctctgccagtaacaagaagcgctgcagagatgaggctggcagcagtgctgacaaaggtttcagagagttagcaagggcgatcgaagcttttgcggagatgtatgagcgtgtggagagtgctaagcaaaagcatgtggtggagatggagcgccagcgaattgaattcctgaagcaactggaggtgaaacgcatggagaatttcgttgatgcccatgtgaagctggctagagcaaagcgcacgaagaagactacagggggtgctgccgacggtgctggtggtatggagttggttgccaccgttgctgcgctgcctttcgtctccacctccaccttcctctgatattgaggaagagtttagatcatcagtgtcgatctcagtgtgatggcatcctgtccagtgaaaggactgcttggcagtaaacactactgcccttggttactctaaagacggacatgttcttaggttcatcgcagtttgtaatccagtacatgattaattgaagactagagattcctagcgtaaagctctgctgagaccgtttgtcctggctgttcgcctgatggttgtattgactgtagctcagagtgtctgaccgtatctggaaaaatatggtgacggaaaatggtcttggagtcaaaaaaaaaaatatt

SEQ ID NO: 268503 - DNA, 298 bp, Zea mays
tactcggcgcggaattcccgggtcgaccgacgcgtgcacccatgcgtacacaggatttcaccgattcctgctgcaaatgaagttgaaagctaaacttactcagatgcgcacaagacattggtgtgtaggagtccgattaatgtaaatcaattgccacaccaggtgctgatctatgaacatttgggtgggctatatcagtagctaaacttcagctgctaaggtcctacgcataaataatcttgacttcccaaagcatgagatcagacggaaggtgtattatgttcacctttatcaacac

SEQ ID NO: 268504 - DNA, 471 bp, Zea mays
  unsure (1)..(471): unsure at all n locations
cggaannnnngggtggaccgcacgcgtgcgcccacgcgtccggtcaagcttgaggagcagagggttgagtgcattgctcagctagaagagaacaatatgttgagaagtgaactcaaagacattgctgatcagtataacattactcagcagaaatatgctcaccaattgaaagagaaaatgatggaacttgagcttgctgatctgagacttcaacaacatcaagagaaggctgctcacgaacatacccaaatgcaattgtatgccgagcaagtttctcagcttatgactactgagaagaacctgcggttgcaactagcttcggatggagaaagatttcagcactttcaggatgccctgtcaaaaagcaatgaagttctttgaaacttacaagcaggagatggaaaaaatgattttggtgataaaaaatcttaagaaggacaatgaatttctgaaaggaaaatgtgagaactc

SEQ ID NO: 268505 - DNA, 574 bp, Zea mays
ggatccttgaaggaaaatcgtgcatcagagcaagtgggcgctccaagtgatcaaaaggggggcggtgagccaaaacgcaaggtcatcaagcatagcaagcttgagaaggacaaagagttatttcaactagcccagcaataccacaaagtggttgcagaaagggatcaagccattgcagtcaaagatagactagaatctctttgtagggaatttcagcgtcaaaacaaaatgctaaaggaagagtgccaaagggtatcgacagagggacagaacatgcgtacggaattgtctgaaaaatttgatcatgccataaagggtgtcagtgccaaacttgaggagcagagagttgagcgcatttctcagctagaagagaacaatacgttgagaagtaaactgaaagaccttgctgatcaatataacattactcagcagaaatatgctcaccaattgaaagagaaaatgctggaacttgagcttgctgatctgagacttcaacaacatcaagagaaggctgctcacgaacatacacaaatgcagttgtatgctgagcaagtttctcagcttatgactactg

SEQ ID NO: 268506 - DNA, 758 bp, Zea mays
cccagcaccaaaccgtgcaggttctgttgataattccagaaaccacacacaagtcgatgtcgaccttccaccacctgctctggatgatttctacaatggcaattggttccctccccaatgaattcagtatgggaggaaacaaatgcaataacattttgtacctgtgaaaaacaaatcagagaaggctaatggccagattacaaagcaatggtcgtgcgctaatgatttctacaatgacagttggttccctcccccaatgaattccgtgtagggaggggggaaaatgcaatgacattttttagctgcggaaaggcaaatcagagaaggctagcggccaaatcccaaagcatcaatcgtgcactcttgttagcactctgaactgaatgtgtcatcccggaggacacattttgtaaaaaaaaacagtagctttatagccttattagactgttaaaacacactcgactgaatgatgtccggttccatcaacaaggcttcacggagactgtcgagtacctgatctgggtcatgttttccatagtttgcttctgtgcagttgcctaataagcccattcgttgtaaactagctagttctaacttaagaaagctccctcagggcctatgcatgagtctctgattattgtgcagatgaactgttctggacattttgaacatgcaaatgtggaagcgtcactgtcagttgaattatgtttcagccgaattgagaagcgctcatcccctgtttgtgtagaccccgctgg

SEQ ID NO: 268507 - DNA, 743 bp, Zea mays
cactattcttgaaacgagcttatacttgctcgagctcagctgggcatttgtggaagcattcagtggctcctgataagggtgagcttcacatcttcagaacagacacgttgaaggaaatgagtatccgagtaccaagaatgaaagaagagcttttggatacaaatggcttctacaatgagcttaaaatatacacaggatgtcggaacgttctgagagcgcaactgaaaagattatgagcagcatcatggataccattgctgacaaccttcctaagcagaagtctgggaaatttgatccaggttcagtctctgacaaagtgaagaacaagctgtttggtcgtcagaagaccttgcatggagttctgggtggtggaaaacctgctgatgtgctgttatggaggaacaaaaagatatcatcgagtgttctggctcttgcaacagctatttgggttttctttgagtggctcgactaccactttctgacaattgtttcatttgcccttgttcttggaatggttgtccagtttgtttggtccaacttctcaaacatgctaagcagcggatcccgttctcaggtgccccgagttgaattgcctgatgagttatttgtgaacattgccgttgcaatcggtgcccaaataaacaagttcctgtgcttccttcaggatgtttcttgtgaaagaaacttgaagcattttgtagtggcgatcgcaggactgtgggctgctgcggtgattggaagtt

SEQ ID NO: 268508 - DNA, 493 bp, Zea mays
gggtcgaggcacgcgtccgcccacgcgtccgatttcatccacgctgctcgtgctcgctgccggcttctcgcgcgatcgtctcgggctctcgggactctagagtggcggccggctctccgcctgttcttgtcgtcgctgctcctttccctgtgagcttaaaatatacacaggatgtcggaacgttctgagagtgcaactgaaaagattatgagcagcatcatggataccattgctgacaaccttcctaagcagaagtctgggaaatttgatccaggttcagtctctgacaaagtgaagaacaagctgtttggtcgtcagaagaccttgcatggagttctgggtggtggaaaacctgctgatgtgctgttatggaggaacaaaaagatatcatcgagtgttctggctcttgcaacagctatctgggttttctttgagtggctcgactaccactctctgacacttgtttcatgtgcccttgttcttggaatggttg

SEQ ID NO: 268509 - DNA, 486 bp, Zea mays
gctagtacgatttcttctctcctccaaaccggccaagccaccaaccagcgccccccaccgccgcctttttatttcatccacgctgctcgtgctcgctgcctgcttctcgcgcgatcgtcccggcctctcgggattctagagtggcggccggctctccgcctgttcttgtcgtcgctgctcctttcccaggatgtcggaacgttctgagagcgcaactgaaaagattatgagcagcatcatggataccattgctgacaaccttcctaagcagaagtctgggaaatttgatccaggttcagtctctgacaaagtgaagaataagctgtttggtcgtcagaagaccttgcatggagttctgggtggtggaaaacctgctgatgtgctgttatggaggaacaaaaagatatcatcgagtgttctggctcttgcaacagctatttgggttttctttgagtggctcgactaccacttactgacaattgtttc

SEQ ID NO: 268510 - DNA, 818 bp, Zea mays
acttcagtggtagaaagataggggagaacagagaggcaaattatttctgaagatccagagcactcttcggcgtattgtcttgcatttagagtggttaatcccaatcatcttcctcctttaaaggagttgaggaagttgatgagaatccaatctctccgttgcaatgcattatataaccacagcgctaccagattatctgtagtccctatccacgcatcacgctctcaggccctaaggtacctgtgtatacgattggggatagaagtgccaaatgttgcagtcctcgtgggtgaaagcggcgattcagattacgaggaactgctggggggtctccataggaccgttatcctaaagggcgagttcaacatcgccgcaaacaggatccacacggtgaggagataccccctgcaggatgtcgtcgccctcgatagctcaaacatcatcggtgtcgacggctacaccacggatgatctgaggtctgccctgcagcagatgggtatactggcacggtaacaccttccggagcttccgtttccactaccaggtcaacgaagagaaacgagaaaacagacagaatggtgacgaaacaagtgcgaccgtttccatgctcgatgggaatgccgattttgcattgtaggctgtaccggttgtgttcgtgtgtgtgtgcccgcgcccggtggtggcctattcttgtgctgtgaatagctgcccctcctttgtttgtgatatgccaaaattttgaagtgagtacagttcagccaaacatgttgatgatggaaaaacgaatggacaaaggggaaaaacacccccaaatggtt

SEQ ID NO: 268511 - DNA, 1413 bp, Zea mays
  unsure (1)..(1413): unsure at all n locations
cccacgcgtccggcaaagggttgacttaggattgtggagatctcattcttcagataattctgggatgcaaattgatgcgaatgctgatgatttaataagaagtaaaaatcatgaatcagaatcacttactgagagcaggaacatagtacaatcacctcttggattatttcctcagccttggccacctactgctgctgcatcagaaggtagcaaattcttcaaagttgtcgagtatttccgcttagttggtcgagtgatggcaaaagcattgcaagatggaaggcttctcgatttgcctttgtcgacagcattttacaaacttttgcttggacaagaacttgatttatatgatatattatcttttgataccgagttcggaaagacattgcaagaattgcaaattctcgttgcacgtaaacaatttttggactcctgctctagtgagagccaaaagatagatctatgtttccgtggtgctcccgttgaagatttatatttggacttcactcttccgggctatcctgaatatgttctcaaggaaggtggagagaatgcagaggtcaacatttgtaacttagaagagtatatttctttggttgtggatgctactgttaagaccggcataatgcggcaagtagaggcatttaaggcaggattcaatcaggtgtttgacatatcatcactgcaaatattttctcctcaagaacttgattatctgatttgtggtcgctgtgaactttgggagccggaaacactgcctgaacatataaaattcgaccatggttatacctctaagagtcctgcaattgttaattttcttgagatcatggcagaatttactcctgagcagcaacatgctttctgccagtttgtgaccggtgctcctcggcttccacctgggggtttggctgctctaaatcctaagttgaccattgttaggaagcactcttctgtggcaaataataattcaaatgcaactggagcgacagagtctgcagatgatgatttgcctagtgtcatgacttgcgccaactatcttaaactaccaccatactccaccaaggctatcatgctaaagaaactgctttatgcgatcaacgaaggccaagggtcatttgatctttcgtgaatctcaacactaacataggtattggtccacctagaaatctgcgtcattgttacccagagttagtttctacctcattcatgtatgacataggttaaactcagctctccggagtcccaccgaaggtttggagcccgtacctttgggtgtggatgtctatactctcttttcttcttggttgtatattcttgcggatctttatagtgaataatagtaataaattgttttgcgcttccaaatatgctcccnaaaaaaaaaaaaaaaaaaaaaaggcgcggccgccccgg

SEQ ID NO: 268512 - DNA, 1046 bp, Zea mays
ttttctttaagaatagagcagcagagggctgatgcagatgttctgaagctattggctgaccaggagagggaaaaggaagatgtacttgctagaatgcttcaactagaaaaagagctgcatgagaagcagcagcttgagctcgaagtagaacggttgaatggtacactccaagtgatgaaacatttagagggagatgatgacgggggagatatccatgagaagatggagaagctgagcgaaagatttgagcgtgaaaagaagcgtctggaggatctgagtggggatctcgtgagagaagagcgtgaaagtaatgatgagctacaagaagcccgaaaagaactgataaagggtttggaggaagagctaaatggacggacagctatcgggatcaaaagaatgggggaactcgatgaaaagcctttccaaaatgcatgtaagacaaaatacggaaaggatgagtacgagatcaaagcagcagagctagtcacaagttggcaggatgaactaaagaagccatcctggcatccttttaagatggttgaggttaacggagaatataaggaaattctggatgacgatgacacaaaactgaagttcctgtggatcgagtacggcgatgatgtgtgcaatgcggtgaagaccgcactgatggagatcaacgagtataaccccagcgggaggtatgttgtgccggagctctggaacttcaggaaaggccggaaggcgacggtgaaggaggtgctcaagtacctgttcagtcagatggacacgacgaccaagcgcaggaggggctgaggaggtgcccttggccatgccgttgcagcccagtcgtgtgctgctcgatcccgtagtggcagtctgtcttgtactgtgtagtgacatctgacgtaataatgttcaggcttgggtatggtttgagctaacgagccatatagtgtgcttggctaggctcgtttacgagctctttagctcgcgagtcaggtgagaacagaaaaaacaatatgtatataataattaatttctagttacttttaaactaatttagc

SEQ ID NO: 268513 - DNA, 268 bp, Zea mays
gagctgtggaacttcaggaaaggcaggaaggcgacgatgaaggaggtgctcaagtacctgttcagtcagatggacacgacgaccaagcgcaggaggggctgagtaggtgcccttggccatgccgtcgaagcccagtcgttcgctgctcgatcccgtagtgccagtctgtcagagatgcctcctctttgtttactgtatagtgacatctgacgtaatgttcaggcttgggtatgcgtcatgttcgttaagctcacgaaccatacagtga

SEQ ID NO: 268514 - DNA, 352 bp, Zea mays
  unsure (1)..(352): unsure at all n locations
ccggaattnnngggtcgacgcacgcggccgcggacgcgtgggggcggcggcagctgctgctcatgcagttgcagaggcagaggctatcatggcagaagctgaagcagctgctagggaagcagaagctgcggaagcagaggcccgagctgcacaggcctttgctgaagcagcagttttgacactgaagaacagaaatgctgcgaaattggtatagctcgagtccatgaatcttagatatgccctcttgtccttccacacgtagaatccagttccgtagctctgtatgcaactaattggttactaaaagaacctgaaatcagaagttttcacaaacacaccgacttattcaccg

SEQ ID NO: 268515 - DNA, 913 bp, Zea mays
gaagtacccaacagaacagacctaaatttgtttctgcattctgccagtcaaattgtggtgatgttagtccaaatgtcctgggaactttctgtatagacactggccttccttgtgacttcaatcacagcacatgcaatgggaagaatgaattatgctatggacgagggccaggatatcctgatgaatttgaaagtactcgtatcattggcaataggcaatttcaaaaggctgtagatctttttagttcagcttctgaagaaatacaaggcaaaattgactacaggcatacttacctagatttctcaaaacttgaagtgaatgtccgtacaagtacaggaagtcagcaagttgtgaaaacatgcccagcagccatggggtttgcctttgctgctggaaccacagatggtcctggagcttttgactttaaacaaggagatgtcaagggaaaccctttctggagattagtaagaaacttacttaagacaccagggaaggagcaagtcgaatgtcaagcaccaaaacctatcttgctagacactggtgaaatgaaggaaccatatgattgggcgcctgcaattcttccaattcagatcataagaatcggccagctggctatcttgtgtgtgcctggagaattcacaacaatggctggcaggaggctacgtgatgccgtcaaagctgtacttacaagtgacaacagtggtgaatttaataacattcatgttgttcttgcggggctaacaaatacatattcgcagtatattacaacttttgaagaatatgagatccaaagataccagggagcatcgaccttgtatggcccccacacgttgagcgcctacattcaggagttccagaaacttgctacaaccattgtggcaaacaaagaagttccgaccaattttcaagcccc

SEQ ID NO: 268516 - DNA, 634 bp, Zea mays
  unsure (1)..(634): unsure at all n locations
gaantcccgggtcgacggacgcgtccgagctcgcccgctacagggtttcaaatggaagagatccgcacgaactgatcgaggaggaggagcttatgaggaggaaactggacgagagctaacgagatagaagccagctggcggaaaacctatcaagcctatgctccagcattctgaaggtcgctggagtttcggactcagcatctgacgctactcttttgaaagcatcggagtgcttggatcagctccagtgccgtatcgcttctttggaaggccaagttgaggtgcgacgtctgcagtgcaaactagtgcgtgaaaaggcccgcctgtgcgagctccggagcaactcgtcgtctctgcgcacaggggcgaagggcaatctgacatcgcccagtccggacacatcgccaagcatttcgtccttccgatgacacaagccgacggatacatcgccgagaagctagtgtacattagtacgtacataacacattccgtgtaactattctagtgcagccgggctgcttagggaggattagttcactccaacaatctccctttgctgattatatatatctgctgtacaatatatataccgtgtgtgtacttgatgcagttccattcaacacttgtcttctct

SEQ ID NO: 268517 - DNA, 659 bp, Zea mays
accggtccggaattcccggggcgacgcacgcgtgctcccacgcgtccgctatctgccgctccagcctttcgctagggtttatccaccggcggcgcgcgcgacggcggcaagatggtgcagcgtctgacctaccgcaagcggcacagctatgccacgaagtccaaccagacgcgggtcgtcaagacccctggtggcaagctcgtgtaccagtacaccaagaagagagccagcgggcccaagtgtcccgtgaccgggaagaagatccagggcattccccatctgaggccagctgagtacaaaaggtccaggttgtctaggaaccgcagaactgtgaaccgtccctatgggggagtactatctggaactgcagttagagaaaggatcatccgtgctttcctggttgaagagcagaagattgtcaagaaggtgttgaaattacagaagaccaaagacaagacttcctcaaaaaagtaactctgaaacagaagtgagccactcttctgcagcaagggaagacatttttgtcgacagttattatcaatggcttagtctcttctagctgttctattgttcttgtatcttgagcggacaactggtttctagggcaccttgaaatctgtctacgagatctctaagattatgagatgacatatgacccc

SEQ ID NO: 268518 - DNA, 385 bp, Zea mays
accggtccggaattgccggatcgacccacgcgttcgattgccttaggattcctatcaccaatggacgtctcaacatgggaacttggcagggtatttggctctgtgaacatcgagattatgctactcctcgacagattgtgatcacgctgaatgggatctagcctaaggtgatctatgttaagagctggaaatgcaatgcagcgacttcgacatgtttaaatcagatgcactgaaactgaaactgtctatggcccagttgtgataggcgttccagtggagaatgttatttgtaatatgatgctagcatgaggggaacaaaatctcttaacgagcttcttctcatgttgagcttgtttagctatcttgggtggtttaaaaaatatta

SEQ ID NO: 268519 - DNA, 364 bp, Zea mays
gaactacgactctgatgtccaggttgacactgaaacatttcttagtcgcattgttccagagggtccatctgctccatggaggcacaccatagaaggacctgatgacatgccagcacatatcaaatcatcaatgtttggttgttccctgatgattcctatcaccaatggacgtctcaacatgggaacctggcagggtatttggctctgtgaacatcgagattaagctactcctcgacagattgtgatcacgctcagtgggatctagcctaaggtgataaatgttaagagctggaaatgcaatgcagcgactccgacatgtttaaatcagatgcactgaaacagaaactggctttggcccaattgt

SEQ ID NO: 268520 - DNA, 655 bp, Zea mays
gtaccggtccggaattgccggatggacgcacgcgttcgggcgcggtgtgcatgaggcgaaggtggtggttagcgtgacggttgagggcagcgtctgcccggtgaaggccatggtcaggctgggcgccagcgtcggggaggccattgctgccgtggtcgagaggtacgccagggaggggagaagcccgcgcctggacccggccgcagccgagagcttccaacttcaccactcccacttcagccttgagagtctgaacaagaaggacagaatcggagacgtgggaggtaggaacttctacctgcacaagaacgattcaagcaacgacgggctctacctccagggccaggaggagcccggtgcagatccaagtggtggtgacatcagccggcactcctcctcaggagtaggacaagcatctggtggcgctacaagtcagcaccaggtcctcaccatcgtcagcagcaagctggatacgattgggcggcggacgaggcggatctggaggttcatcagctgcaacaactgcgcatggcgcagcacaatgcacattggatgtgcacatcgccacagggatgcggtggagctgtaagaagcacaggaaagggaacaagggcgtcatggacaagcacctcgtgtgccagaaaaagctgtgggc

SEQ ID NO: 268521 - DNA, 1066 bp, Zea mays
  unsure (1)..(1066): unsure at all n locations
cggacgcgtggcgcgacgcgtgggcaactacgtcaagttgtaccagaagatcttcaaggccgactaccaggtgccgccctgggtctccggcgacgcgcgccgcctcatcgcgcgcctgctcgtcgtcgaccccgccaagcgcgcctccatcgccgagatcatgtgcacgccgtggttcaggaagggcttcgtgccgcccgtcctttcgcccccggtgacgcccaagaaacagcagctggacgaaggcgctgccctcttcgacaacgacgacgacgacaacagcaacagcaaccactctggcgccacctcccctcggtcgtgcaacgcgttccagctcatctcgtccatgtcctccgggttcgacctgtcggggctgttcgagagcgagcagaagaccgcgaccgtgttcacggcccgcgcgccggcggccaccgtggtggagaagctggagtccgtggcgcgcgccctaggattcgaggtcaccagggggaaaggctggaaggtgaggatggaggccaaggccgagggcacgaacggacggctcgcggccaccgccgaggtgctcgaggtggccgtggacgtgaccgtggtcgagttcgtgcacgacgccggggacgcgctggactttaacaagttctgcgccgtcgacgtccgcccggggctcacggagatcgtctgggcgtggcagggcgacagcccccgccgccgccgtcggcaccgcgtgaacaagcgtccccgtctgtcacgtggaagttgtagcaactttgcgtaggagttaaacacggctgcactggcaccagctttttgtagcatgtaaagtttcaagttctcatcgttgcttcgagactgccatggtggctagttcgttgtgtgccatatgctgtacaggaaggaagagtcgaatcgagccggggagttttcgatcgacttgccaagttttgtacgatcgtaacctgtattttctggagatgtgtgcatacaaaattttgcccgtgatcaaaaaaaaaaaaaaaaaaaccccaaaaaaaaaataaaaaaaaaaaaaaaaaaaaaaaaaaggaggncg

SEQ ID NO: 268522 - DNA, 365 bp, Zea mays
gacgtccgtccggggctcgcggaaatcgtctgggcgtggcagggcgacagcccggccgccgtcgttgggaccgcgtgaacctacggccgcccgttcgtcctggcgtccacgcctgttggagccagccttacacggctgcatcggcatcatgtaaagtttccgttgttgcttcgagacagccatggctagttcgttatgagtcgtatgttgtacaggaagagaacaagtgcaaaactgaagagaggtttctgtcgacacgagagccgaatcgagccgggagtgttcgatcggcttgcaaagttttgtagatcatataatcgctattttgtggagatgcgcacatacacaattttgttttggtcgcc

SEQ ID NO: 268523 - DNA, 336 bp, Zea mays
tatcaacatccttagctctgcttctggagtccgctcaaggaaaatttgcaggacttatatatgtgttctctgttcactgatgcggctggagcgtcatgtcaactgctcaccctccccctaacaaattaaactacacggatgagtggagcttcatgttgggatgatccatgcaccttttaagttttggaacgtcgtactcaaatgtagcttgtgttggttgaacctattgtactttcttttcgatttaaattatatgatatttaaacattttttatgtttaatacttgtgttggatgctttatgcttcaaataatcatcacaattcgtttgataatt

SEQ ID NO: 268524 - DNA, 863 bp, Zea mays
ggtcgatacaagcctctagagaaaatcgtatgactgacagatttccagtgctggacattgggaagcacgccactggcggtgccccgtgcggactgtcagggtcttgcgtgactgctatcctgagaggttggggcttgcaatcctttaggactctcctaggcgatttgaatcattctggaagatagtgaagccgttcctagaccatgagacccgcaagaaggtgaagtttgtgtactccaacgacaaggagagccataagataatggcagaagtctttgacatggaggagctcgactcggcattcgggggaaagaacccagcgacatttgagtacaacagctacgcagagcagatgcaggaggacgacaagaagatgggatctttgcacggctcagccaatagcttgcttggatcagctgggaaggaggctaatggcgcagactcggacgcctcaagcgaggcctccttctacagtggaactgactctccgacacatgagaacggtgaacacagcatcgcgaagaagaatggttgagctgagctgagctgctttgattgctcaaactgagggagctgacgaatggagttggtcaacataacagttatatctagcttgaacgattgtcaggaccgatggcgatgacagattccaagctggttagatcaccttgtcgggtctaggcggaatgtatatttgctgctcatgatattatagtatgtaagaccataaacggtgagttggtgatgcgctatatatcttggaataaagttcaacttcttcgttttcttaaaacaaatacaaaaaaacacaaaacaacaaacaaaaaaacaaaaaaaaacggacgcgtgggcagacgtgtggg

SEQ ID NO: 268525 - DNA, 470 bp, Zea mays
agttccaagtcgggtggctcaagccgaggtgtggatgatagtaacatatggacgtgcgatcagtgcacatatgcaaaccccaaatctgccagagcctgccaggcttgtgatcaccagcatcgatagcgctgtcagtccttgctagagatttgaaccccatttgttgagaatcttctggtgctcccccgtgtaatacacaaacatacatgaaattgaatgctagctgatctctgggggtaattgcactaggaatgctgtaggttttcgtgtatctcggattgtttgtcgactgacatcgcctgagaagcctcaactcatcatccagttcgatttgtgtatataagtgtatcatctgtaacaatgttctttagatgagctaggaggcgtctgctgccaaaggaactgaactgttgtactgctgttgtaatataataatgcatttgtcaaattaaagaaagtttgccctcact

SEQ ID NO: 268526 - DNA, 464 bp, Zea mays
cggacgcgtgcgcggacgcgtgggcgcgatcagtgcacatatgcaaacccctaatctgccagagcctgccaggcctgtgatcgccagcatcgatagagatgtcagtcgttgctagagatttggaccccatttgtcgagaattttctggtgttgcgccgtgcgatacacaacatacatgaaaattgaatattagctgatctctgggggtagtgacgaggaatcctgcgtgcaggtaggttttcgtgtatcctggattgtttgccgactgactgagcatgtgaagcctcaactcagcatccactcccatttgtgtatataagtatatccatatctgtaacaatgttttgttcaatggaagtagcggagctaggaggcgtctgctgccaaaggaactcaactgttgtagcgctgccgccatgtaagatgcattgcccccctttaaagaaagttagtcaccctgttac

SEQ ID NO: 268527 - DNA, 432 bp, Zea mays
tagtaacatctggacatgcgatcagtgcacatatgcaaaccccaaatctgccagagcctgccaggcttgtgatcgccagcatcgatagcggtgtcagtcattgctagagatttggaccccatttgtcgagaattttctggtgttgcgccgtgcgatacacaacatacatgaaaattgaatattagctgatctctgggggtaggttttcgtgtatcatggattgtttgtcgactgactgcgcatgtgaagcctcaactcagcatccactcccatttgtgtatataagtatatccatatctgtaacaatgttttgttcaatggaagtagcggagctaggaggcgtctgctgccaaaggaactcaactgttgtagtgctgttgtaatgtaagatgcattggtcaaatttaaagaaagttagtcaccctgttacag

SEQ ID NO: 268528 - DNA, 700 bp, Zea mays
ccggtccggaattcccgggtcgacgcactcgtccgcccactcgttcgggcttctccaggtagaatgcatgcaggtccatgcgaatgagggtggcgttactcaaactcggggtggcatatattggataatcttgcccgctggatatctgggttcatctttttggggaatggtgttcatacttgcatccacaaatctcctcactacaagaattgcagcgggttgtttcatacttgcactgtttattgtcctttttgttgcagacaattggtttcttcgctggctctgccttggattcattgtgttcattgctgttgtttgggtcatacaagaatttacatctttccatattctgaaatatgtgatcttattcataggtgtgatgaacagcttattttcagtttacgatatttatgatgacttgatatcccgaagagttaacacaagtgatgctgaaaagtttgctgaaatctgcccttgcccctgcaatggttttgcatggggtgttatatggggattcatctcgtttatctttctctgcgcttcaatataccttggactggtcatattgtcttgagggttcgccattctgatctgacaatcgactctgattggctttttcgaagcttcgttgctcgaggttttggttcaagcttacatggttctggtggttgtacagtatacatgtgcagggtaaacatgt

SEQ ID NO: 268529 - DNA, 454 bp, Zea mays
gcgcacgcacacacgcacgtttccagttcgactcgagccagagccccgccccgggcagggggcgttcgctgtcgcgctcctcctcctcctcctgcacatcccctccccccgaattcgagccggaggaccgaagagtagatctgcgccgggcgaccagaggatggccgtcaactgggagctgcagggctgctgccaccgcgaccagaggatcttcatcgccgccgttggcgtctccaccgtcgtcatcctcctcctctggaggacgttcctgctcacgccgttcaagctcatcaccgtcttcctccacgagaccagccacgcgcttgcttgcaagctcacttgcggcgatgtagaaggcatgcaggtccatgcgaatgagggtggcgttactcaaacccggggtggcatatattggataatcttgcccgctggatatctgggttcatcattttgg

SEQ ID NO: 268530 - DNA, 425 bp, Zea mays
tcttcatacttgcatccacaaatatcctcactacaagaattgcagcgggttgtttcatacttgcattgtttattgttctttttgttgcagaaaatgtaagttcagtatttttatttatttattttgcaacttgtgacttcatttgtatttttccactcgtgcatactgtaatcatgatcatttaggtaagacttgtttgaattgtgcagtggtttcttcgctggctctgccttggtatgcatcaacttgacttggtctccatttaagatcttattctgcagcatgccacttatgatgtttttatccaggattcagggtattcagtgctggtgtttgggtcatacgagaatgtacaactttccatattctgaaatatgtgatcttattcataggtgagactgacgccgccgtccttcaatcatgtt

SEQ ID NO: 268531 - DNA, 450 bp, Zea mays
gtgatgtcaggtacaaaacaggtgtcatgggggtgaagcaagcagagcctcgtcttgaactcaagaagcacaggagggtgtctagaaagaagattaaccaatcgattcttgacgaaatcgaagatgatgttgatgacctcgatgatgactaccagtttgacgtcaagcagcgttctaggaaatgataatcttttttcatctgatgatctaacggcatgaaggaacctttgggtgctgtacacagttggttttgtagtgccaccaccatgcccttgagcagtatgctgatcactgtaagtagaagcgtaatggccggaacccggggtgtcttgacgttgctccagacgtttttctttgcggtagaacgttaagggcatgtttggaaacataatttttttagtatcaagataataccgtgatggcaacgactgctatacaagcagtctttct

SEQ ID NO: 268532 - DNA, 847 bp, Zea mays
cccacgcgtccgcggacggtgggtcagattctgaaaaatttacaatatttagctggttcctgattttttttcttgtacctgttactgttagaacacagaactttgacaataccttatcaagtcttttataattttttgcatacgtgattaatttgcttagcccaaaactctgatttaggctaaatagttctagaggctgctaactggttgcactgcacatcaaatgcaggcggagtggatggcaccagatatacttcgaaatgaaccatcagatgagaaatgtgacgtcttcagctatggggtcatattatgggagctctgtacattgctgcagccatgggaaggtatgaatcccatgcaggttgttggagctgttggttttcagcaacgacggcttgatattcctggtggtgtggatcctgctgtagcagagataataaggagatgctggcagactgatccaaggatgcggccatcattttcagagatcatggctactttgagaccattgttaaaaaacatgcctgccaaccaacctaccaggaagcgggcacaacaaacagatgattaagaatatattggtcagtatcagctgaagacacaggccaaagagagactgcattggtttgtcttgctcttgccttcccagcttcaagcaattggccatctgtaactattaccattgttttgtacagtacgccaaatgcgtatttgatgaagaacagatccatgaagccaaagaaaagaaagggaaaagaaaatttgcgaaagttcgtgcatactatttttgcagacacaatggttactggagtcagaagttgacatgtcatgttgtaacaggatcatc

SEQ ID NO: 268533 - DNA, 350 bp, Zea mays
gatcatggctactttgagaccattgttaaaaaacatgcctgccagccaacctaccaggaagcgggcacagcaaacagatgattaagaatatattggtcagtatcagctgaagacacaggccaaagagagactgcattggtttgtcttgctcttgccttcccagcttcaagcaattggccatctgtaactattaccattgttttgtacagtacgccaaatgcgtatttgatgaagaacaggtgaattttggtccttttgccttcagcgtttggttctccattggagccagcggaatgctgtctatatctatctgatgaaagccgacccaaatcccacagatccatgaagcc

SEQ ID NO: 268534 - DNA, 512 bp, Zea mays
ctcggtttcggaattcccggctcgacgcactcgttcgctcgtcggactctgctccgcgagggcgcttaccgcagggaacgcccagctgtctagggggagatgtacgatcgaacagggaagtgccactaaacatgtgctggataagggtgccagcaacatggtagcagcgtgtggggaacctgaggagctcccattataattgaagaatctcttggagagacagcagacgaggtaggggcaaataccggcgactagagtaaccgctgctaccacgagcatggtggtcgggacggcaccaccatgctcttcgctcttcaggtcaaccttcttcagcgctatcgcaagaagcaccgggcagaccatcaccaccactccttccgcgaaagcacggtaacggttcatccatgcatccatgggatctctggcagccatcaaagcttaacttggcgaggtcgtggtacctccgcaactgacgaccacacgcagacagagaacggagaagctgcggggcc

SEQ ID NO: 268535 - DNA, 636 bp, Zea mays
tacagatggtggaaataacaaaagtacatgtacagcctgaagtagaaaatgttactaatatccatgaaagagctgcttcaatggaagaaaagcagtccgtgccagagataggagatttggtgggaggtggagaaaaggtagttagtaaagaggttaagccagcaaaagatgaggtgatcgacaaggacctattgcaggccttcaggtactttgacataaatggagcaggatatctcaaggttgatgatttaaaatgtattcttcacaacatggggaagtttttatcaagcagggacgtgaaggacttggttcaaattgctcttgttgagagcaattctgcaagggacaatcgcataatctatcctaagcttgtgaagattgttgacctgtaatctggcactgcttggcccgcgtcagtccccttgaagttaaccatgctatgatcgttgagaagtcagttatgagaaactattttgtttacttattaatgggttcactgccatttttgtggctacctgtttctacgattatgctacaagcagctgcttttcgtttcgatgaatgttttttgtggaattataagtcatgaacttaatcgatgttgcctcatttcgtaaaaaaaaaataagtataaag

SEQ ID NO: 268536 - DNA, 788 bp, Zea mays
aattcccgggtcgacgcacgcgttcggcaacaatttgctatcggcgtcagtgatgtcacaagggttcttgagcgaatgccgcattctgtcactgctcatcctgctcaaatgtctagtgaagcaccaactgtctcaggccgacgtcaagctcctttggtgccattgcaggctgtccttgtagctgccgactgcaatcccaaatggttaacaaaacacataccaacactagcgtctacaaggcaggtaccggtattgtgcgtgaaggacaacaagggaggctcagtaaggttaggccatgtggtgaatgtcagaacagcccttgccattggagtaaaggccaaagatagcgttctcaacaagaccattgatgagttcctgaaagacagtaaactggttgccaatgaaccataaagtaaccccaagtctagtgacacgtttgtactaaaaagcctgtacttctgggcatgcaacatcccaggatcatctcataaatgggtttaagtttgagaaggggatcaagtatcttgagcagattgtggcaatatcaatttggagggacttcttgagagaacagtcatgggaaataggacagactatttgtttggtccgtgcaatattgtttgactggtgaacctagttatccattgtgatctagaacttgtatcaaactccgatgtaacgagatgttaggatccccgtttattgggtacagttttttcttcaaaaaaaaaaaaaaaaaaaaaaaaaaaaaaaaaaaaaaaaagggcggccgtcacgatctaaaacaa

SEQ ID NO: 268537 - DNA, 927 bp, Zea mays
aaatatgaatgctcttcaacaatatgctcaaggtccaagtgaccgacatattgagcaaatgtaccatggatccagttttcagcaggatactggaggtactactccctctaattattttgaagaaggaagagtagacggtggctcacagttatacccatctgatggtgatgctttacctggtattgagggatttcaaattgctggtgaacctagaccaggatgtcaattaacagcatgcggtttccctacaaatggtactaccctttgcaatttccaggtatgttgttttctgctcttttgttatgattttttataattgctataaatgtcaattcttgtaaataaaacctttcaccccattgatgttgctgttttagtgggttcgccatcttgaaaatggtatcaaacagtctatcgaaggtgccacgatgtatgactatgtggtgactgcagatgatgttggtactcttcttgctgtagactgtacgcctatggatgacaatggccgccagggtgatttggtgacagaatttgctaataatgggaataagataacatgtgatccagagatgcagagtcatatcgatgcatgtatttctaaagggagagctgaatttgaagtttttgtcctgcaggcttattctcctgaggaatgggaactggctacattggtgctcacacgacctaattatcagattaagttcaaacagaccggtaatgttgtaattgacgagaagtactcacaaagtctacagacaaaaattcctaatgggcgcacaactcagtttgttttaataactgcgggtacaactctttcatttaacacacatggaatttcatagccaaacaatgaggatttctatgttaggttacgtgatctaatcgtattagtcatgataacttttcagaaaaaggctctagatgcct

SEQ ID NO: 268538 - DNA, 1109 bp, Zea mays
aagacacggccgagtcgtctttcccgacgcaaaagtcgacgacgcgtgcgccttgctcgctcgctcgccgtctgccgtcgttctaggtttagagccaggtcaccagcgctaggagggcgcgaagtcgagtagacggccgggcctctcccgttctccacggacggctagcgctactggaggcgacgcctggacggcgaccccgcacactcacagccacaccctccacctgtgtgactattcaagggcttaggccgagccgcccggccaatcgccgtccgccggaccgctgaggaatttttctttctcgtcaaaagttactgcattcattttacagtaatggctatggggttgattaatgctaatcctataatccatgagaaaaaagagaggcgtgccagacaggcaccagagaccacagatgaaaatgcagcagagcccatagatcagctggaaatatttgatcacattagagatataaaggatccagagcacccgtactcactggaacagctgaatgtggtgactgaagattcaattgaactcaatgatgaaagcaatcatgtcagggttactttcaccccaacagtggagcactgcagtatggcaactattattggcctttgcatacgcgtgaaacttgtacggagtctccctcctcgttacaaggtggacataagggttgcccctggatcacatgcaactgaagctgctgtgaataagcaactgaacgacaaagaacgtgttgcggctgcattggagaacccaaacctactggacatggtcgaagagtgcttatcaccaacatttgattgaggcctgaatatcaatatatcggtgtgacatggtgttgatgttcaggagccacacatgctcattgccaatggagttcactcctgtctttcgagaaccaaaatgccttgggtgttaagtgacgtgttgcatgatttttttcctccgccccgttcagttattatatatgctactatggcgctaccctttttggacgtttttggtgcttgtgacctcactgatcaatgcgagatgtaatcagctcttgtgctggagctttcagagtgctgtcgctgtcactgtcagtgccacgccatttt

SEQ ID NO: 268539 - DNA, 537 bp, Zea mays
cgtccgccgtctccgctccggttttcgctctctcgctgccgtcctaggtttggagccaggtcagcggcgctgggagggcgtgaaatcgagtcgacggtcggcactcggcactcacgcgttctccacctactgctggcgctcctgtgaggcgacgccggaccggccaccccgcatgcgaacagcgcacggaccggccaccggtgtgactcctccatccaaggcttcagctccagacggagccgccccgccaatcgccgtccgccgaaccgcctaggaatttggtttcctcatctaaagttactgcattatattccatagaaatggctatggggttgattaatgctaatcctataatccatgagaaaaaagaaagacgcattcgacaggcaccagagaccacagatgaaaatgcggcagagtccatagaccagctggaaatatttgatcacattagagatataaaggatccagagcacccatacttactggaacagcttaatgtggtgacttgagacttaattgaacttaatggtgaaa

SEQ ID NO: 268540 - DNA, 649 bp, Zea mays
agcaaaaacagatgaatggaaggctgaatctctccatctcatcttcaggcagagaaaaagatcgcaaaggcgcacaaaggactatgtcgaggccatatcagatactgacctataactcgacatccatctacttatcacgcttctatcatgcgacgccggaccgtacaccacacattcgaacagcgcacggaccggccaccggtgtgactcctccatccaaggctttagctccatacggagccgccccgccaattgccgttcgtcgaaccgtctaggaatttgttttcctcatctaaagttactgcattatattccatagaaatggctatggggttgattaatgctaatcctataatccatgagaaaaaacagaggcgtgccattcgacaggcaccagagaccacagatgaaaatgcagcagagcccatagatcagctggaaatatttgatatccttcttaatgatttcttcaaatgtagtgaagattgctgttctatttatctgagttctctatcctagccatttaattgtggtccttattgttcttacatcacattagagatataaaggatccagagcacccgtacttactggaacagctgaatgtggcgactgaagatttcattgaactcaatgttgaaagtaatta

SEQ ID NO: 268541 - DNA, 690 bp, Zea mays
  unsure (1)..(690): unsure at all n locations
cgcgtccgcgacgagcaggcgctcgtcaaggccctcgtccatctcagcccgtcagcgtcgccatctaggggtgggggaggcacttcgagtggtagagcggtgtcntgttctatggaccgtgcgggtcggagctggaccacggcgtggcggcggtgggctacggcagcagcaaggggcaggactacatcatcgtcaagaactcgtggggcacccactggggcgagaagggctacatccgcatgaagaggggcaccggcaagccggagggcctctgcggcatcaacaagatggcatcctacccgaccaaggaccattgatggatcatggacgacggagatcatatctatcttcccttccctttcatccgactctttcgatttccatcgtttgcccccttttcctgaatgtgtgtgtttttttttatatattactgtgtcaagtaatttctcgatggatcgatcgaggaagaacgacaaacatgcactcaagcacgagcgcagcaatgtcatctttctcttcatttggtgcgttgaaatgacgaatatcaaataaagtggtttattttttgtcttgctggtgcgatggcgtatgcattttttctatatgcatttttcgagtttgagtctctatattgcatcccaaagtttgcatgtgatgtgagtttatatgtgaaatatgaatgcgctgcag

SEQ ID NO: 268542 - DNA, 720 bp, Zea mays
gaattcccgggtcgaccgacgcgtacgcccacgcgttcgggccttgaaagatcagctaattgatgcaataaatcatgtgcacaaagtgtctgaagtacatgtttggtgagccatatgcctaggtttttgggaccggatgggacaggatgtgctgagtttcctggagaatcgcaaagaaaacaaagcctggtataaaggtgcacgagtcgcaatctcagtattggatgatacttttgcatcccagctgcaacagctgctaggtaatacagtcccaccgaaggacctagagccacccagatctatcgtggaagttcgctctattctctgcaaagatgcaccccgccagaagaattctagtttctattattgatgatcaggcttaactgtacatagtagccatgcgctgcgcgtgcagcttttctcttggagagaaaagctccaaagtgcccaaatagccggatctttataaagaaactagaggaggctcaatggtatctgagaagcttgccttgtgttacaccatatctttttgctagttaaattggctatgttcccattgcctgtggatgtggactacattcggaaagtggattgtgcttcagagtgtagtccaattgacattgtaggttagcttcattggtaacacttacctgtggttaagcagttgctctatttgttcttagggatttttttgaaacaacaaaaaagaactttctggtt

SEQ ID NO: 268543 - DNA, 503 bp, Zea mays
ggaattcccgggtcgaccgacgcgtacggcctggggaactgtaattgtcacagcaggccgtggaggtcagatcagagcatttcagaagtttgggtttcctgctcgagtatagtactgtagctatgagaccgctgcctggtcttggcgtctgccctgcagcaagacgggtgatttttgtgtatagataggtgaaagtttgggtgatctgcacgcagtctgggactggattctgttgctgctcctaggtgcacctgcctgcgaacttcaactaacctacgacctggtactcaaggtacggcgaattcgtttgcccggaattgtatatgagaatggagcccgggaaggacgagcgggcgtcggccggttggagctagatctttgggatccttttgccagccatcttttcaatctgttttctccattgagtccaggttagctttttcatttttttttactttatgtttaccagctattatatatttttgtaagaaatcttagttcta

SEQ ID NO: 268544 - DNA, 884 bp, Zea mays
cttggttctgctgttggtggtgcagttataactttaataatagctgctgttattttattcattgtcttgcggaaaatgcctaagaagaagaagttaaaggatgtagaagaaaataagtgggcaaagactattaagggagcaaaaggagcaaaggtatcattgtttgagaaatcagtttcaaagatgaacttgaatgatcttatgaaagcaacagatgattttacaaaggacaatattattggaactggtcgatcaggaactatgtacagagcaacacttccagatggttcattccttgctatcaagaggttgcaggacactcagcattcagaggaccaatttacatctgagatgtcaactctgggaagtgtaaggcaacgtaacttagtgccgcttttgggatactgcattgtcaagaatgagaggctcttggtgtataagtacatgccaaagggttcactttatgataatttacaccagcaaaacagtgacaaaaaggcattagaatggccattgaggctaaaaattgccattgggagtgctagaggtttggcgtggcttcatcacagttgcaaccctcgcattcttcataggaacattagttccaagtgcatattgcttgatgatgactatgagcctaagatttctgattttggcttggcaaggcttatgaatcccatcgacacccacctgagcacatttgtgaatggtgagtttggtgacttagggtatgtagctccggagtatacacgcactcttgtggccactccaaaaggggatgtgtatagctttggagttgtcttacttgaacttgttactcgtgaagagcccacacatgtgtcaaatgcgccaaaaaacttcaaagggagtttggtggattggat

SEQ ID NO: 268545 - DNA, 1093 bp, Zea mays
gatgttctcaagtcggtgggtaagctaacaaacagcgagctgcatcaggtgttctctgagtggaacaagggtgagctcctcagtttcttgattgagatcacggccgacatctttggtatcaaggatgacaagggtgaaggctacctggtcgacaaggtcctggacaagaccgggatgaagggaactgggaaatggacagtccagcaggctgctgagctttctgtagctgctcctacaatcgaggcgtccttggactccaggttcctcagcggtctgaaggacgagcgcgttgaggcttccaaaatcttccaaggtgactactccactggcctaccggtggacaaggcacagctgatcgaggacgtgaggcaagctctatatgcctccaagatctgcagttacgcgcagggcatgaacatcatcaaggccaagagctcagagaaaggatggggcctcaaccttggtgagctagcgaggatctggaagggagggtgcatcatccgtgccatcttcctcgaccgcatcaagaaggcgtacgataggaaccctaaccttgccaacctcctcgttgaccccgagttcgcccaggagatcatagacaggcaagctgcctggcgcagggttgtctgccttgccatcaacaatggcgttagcaccccaggcatgtctgcaagtctggcctacttcgactcgtaccgcagggacaggcttcccgccaacctggtgcaggctcagagagactacttcggcgctcacacgtacgagagggttgacatgcctggttctttccacaccgagtggttcaagattgcgcgcaactccaagatctgaacatggcctcgtgtttgcatatgccagtatgccaccgtgtcgagtaatcaatcatattactgcttgcagggaggaactgtgtttgatttttattttccatgcgcaatgcttaatttaggtcaggaagtccaaagtctctcccattgttttcctgtaagagctaagcagtaccagatggagaaccttatatttgctggaacatgaataaaagcatttgacatgcttgtgtttagaaaaaaaaaaaaaaaaaaaaggagggcgg

SEQ ID NO: 268546 - DNA, 745 bp, Zea mays
aactactggagcagtgaaaaagaaattgaaggagcggatggatgactttcagaccttgagagaagcaatcaggcaagagtatcgggaggttgtcgaaagaagggtttttactgtaactggtaatcgtcctgatgaagagacaattgatgacttgatagagaccggaaaaagtgagcaaatattcagagatgctatccaacatcagggaagaggccagatactagacactgttgctgaaatacaggagcgacatgatgctgtaagggatctagagaggaagcttctggagttgcaacagatattcatggacatggcagttcttgttgaggcgcaaggagacatgatcaacaacatcgagacccatgtctcgaacgccaccaaccacatacagcaaggtgtgagcgcgctccagaacgcgaagaaactgcagaggaattcgaggaagtggatgtgctacgccatcatcatactgctggtgatagtcgtggtcattgtcgtcgcagtcatccagccatggaagtagggcacctagcgtggtggcgccttttttcctgtctgtgtaatatgtgtgcagttttttgtgtgggtgattcgtgatttggtgttggacctatagtgtcctgcagcaggagctctggcgtttcgattcattctgtctagtgaacaggactctgccttcgtatcccgatgtgtaaagaagcaaagtgtatgaggctcgaacaaaaaaaaaaaaaaagggcggccg

SEQ ID NO: 268547 - DNA, 494 bp, Zea mays
  unsure (1)..(494): unsure at all n locations
ttttaccttatttttagggtagacaccagctagctgcccagttctgttatttctccctctattccaagngaacagcacaaaactttcaaagtgaaaaaaaaaagattatgtgactaacagtttgctgtacaattatacaacatgaactctcttgagtcacgagtttggtggtggtttggatatgccctctgatccaagaaaagaactcctgagcccccacctggacctttgaaaggggggcaaggggggcaaggagaaaccgaaaaaagccgaataaggttgcaagttgctcagcagctgcatgtttaccttcggatcagcattcacagtgaaaggcagagctaggcaaacatctattgtcgggtgctacctttctaatgcttatctcgctaattgctcggaccatgtgaggggagatatgtattcggtccattaggttaactttgggggcctcgagaatagccttgggaggagaaactgcatactggatcgcc

SEQ ID NO: 268548 - DNA, 565 bp, Zea mays
aattcccggctcgacgtactctttcgggctgctggatacaggttttcacaattcactattgtctgggtcggatctacaaactgaagcctcatatgaacagagtcagagggaaactgaaatttaaatctagtttaaaagcaagttttatgcgtaaaactggtggaaagaagagcccatggaaatagagactacaaaggcagggtgctggagtcactagtcagcacagttactatcctgagaaaaccatgaattcatcaaaaggagttagattaaaagcttagcattggtgtgttctttgttattgtcatggagcagattataggggtgcttcatgtttttttttgacatttgatctccttaatggcattataggggtctgataaaagttgtggtaggttctcgagtgaggctttatccccattttaaacaaaatggactttgtttataggaacctgactgagcgcctggccgtttggaaacatctttaaaggttgtttggtttgaagaatatggtagcctatcttttcttttaggctcccttttggaatgaaagattttttttcct

SEQ ID NO: 268549 - DNA, 490 bp, Zea mays
cagaatgctgcttccatgatgcttcgagcttgctgatcctttacccatgcggtcatatggttttggccagcagcacaccggtgtttctgctgcaaagattttctggatatatgagtttcttgtatagccttatttatagatcacgacgcatcaactggaggggtttttaacatcttgctgttggtcctttgtcgttgcagcctttagacaatcgacaatatgataacaagagttatcgtgaaagtagtcttcatttacttttgttttctccccattgtgttgctttgtaattaaactctagccttttcgtttagttagttgaaatggtgtcgtctagtagaacaactgttgtccaaagaaaatgtcagatagcccccttagttaaaaaaaaaaaaaaaaaaaagggcgggcgttttataggttccaagcttacttacgcgtccattcgacgtcatatctcttttatagtggcacctaaattcaatttact

SEQ ID NO: 268550 - DNA, 897 bp, Zea mays
ggccgacggaggcgtacgggctgcaaaagagcttgttaataagctagttatcaatggcgtgcgccggaagctgatgtggggcaagcctcaggccccaaagcctgaggaggatgagtctgggaggctggggcaggtttcccacggagggctgctccctagggctgtcatatctcagcagcagagcggtgaccagcctcagccccccgggatggagggccaacagcaacaggctgcaccagcatcgtactacttcaacattccagcaccaccagcaacggagcggactgtgtatccatccatggatccacagaggatgggtgctatagtaaaaccacatgacagtgaaggcaaaccagggccgcagcaagccgggcaagctcaggcatcaagcaacccagcacaagggggcggctatcctgcaccaccgccatactaccatggtcagtatccaccatactatccacccccaccaccatacggtggctacatgcctccaccgcgcatgccctacccaccgcaatatccgccttaccagccgatgctagctcaaccagcacaggcacaggctagttcatctcggcaaccaccgcatgcaggtggagggcagcagcagccgcctgatggccctccagctcagcagcagccacagcagccaattcagaactgaagtcctgtcaagatgttgggtattggtactgctctaactgctcggcaggagaatgcaacccccgtgggtcaccagctttcgtaatttcttaatttgtggttaacagtaaaaactttgttgtattgcttatcaacgtttgaagaaaaaccgtgagatataccggatgtatccagcttctggattttgtggtaaaaaaaaacaaaaaaaaaaaaaaaaaaaaaaaaaaagga

SEQ ID NO: 268551 - DNA, 646 bp, Zea mays
aaagtttgtggcaattcatggggcttgcacatgccactcgtttgtccagatggtgctgttgtagcttatgcttggaagcgtcaactagcgggtcaggctggagcatctgctgtggacaggactaggttagtttttaagtttttcactgaccagaaaagaagattctttcctcatctagaagacgaagttgttagccatctccatgatggtcaacctggtgacactaacaagtcaaatttgtttaccagcaatggatatctagaggaaaaatctttgtctgacatactgaaaaatttagaacatgaagtatctaacataaaaatattcacatactggcatctggattggtcaaaaagagcttcctcattagcatctctgttggatgatgactttgtggatccatctaaagagctgaacctgcaaaatatgggcaaatcgagatctggtgctctgacaacttccatagaccaagtcgcagttattgaattgctggttccttcagtatttagagctgtagtgtcattgcatcctgctggatctactgatcctgatgcagtggcattcttttctcccactgagggaggaagctatcttcatgcaaggggcacgtcggtacatcacgtgtttaaacattgtaaggaacatg

SEQ ID NO: 268552 - DNA, 427 bp, Zea mays
gtttccccccgttccaaattcgccaacccacaccaccttcctctctctcgccgccgccctcagatcagatcaaagcggaacaccaactcctcctcctcgtagggtttggtgtgttcacctcacctctcgcggcgacggcgaagccttctcttctcttctcttcgctccgctccgctccgctcggtgtttcagccatgatgtcgcggtcgtacaccaacctgctcgacctcgcggagggcaacttcgcggcgctgggcccggccgccggcgccggcggcggcgggcggcagaggcaggggtcgttcgggctgaggcggatgtcgcgggtgatgacggtgccggggacgctctcggagctcgacggcgaggacgagtcggagccggcggccaccagcagcgtcgccttcgacgcgccctcgtccgtggc

SEQ ID NO: 268553 - DNA, 500 bp, Zea mays
ccggtctcggaattcccgggtcgacccactcgtccgcccactcgtccggggagccaacaattcttctgctttgttgccttggcctttggacgaagggtcgtcatcatggtgtatcaacttaagcagtgacaatcttctaaagaatgtcgaagaggactacttcacagctctgcaaagttcacctgccccagtataatgaagaaactgataaatatctaaaagggaacatgcaaatcaaggtgtaaatcttaacagtgccagaaatctggcagttttgggtgaggagattctacctgccatttttcggtttgtacataggagcctgtaacatttgtggttttttttatatgggccaggatagaacttctccattgtttgttcaaggcaagcagaattatcgcctgcatgttgtattttgtataaatgttcatcctttaactaaaactcagaagtgaagattgatataaagaaagaaaagaggaagaccagggaggagggga

SEQ ID NO: 268554 - DNA, 758 bp, Zea mays
ctcgccgccgggctcaccgtcatcgggcactaccaggacgaaaagatcccatgggccatcggcgtggccatcgcgtctaccatggcctacgtggccttcttctccatcggcctcggccccatcacgtgggtgtacagctcggaggtattcccgctgcatgtgcgcgcgatgggctgcgcgctgggcgtggcctccaaccgcctgaccagcggcgtgatctccatgaccttcatctcgctgtccaaggccatcaccatcggcggcgccttcttcctctacgccggcgtcgcggtgctcgcgtgggtgttcttcttcaccttcctcccggagacccgcggccggacgctggaggcgatgagcaagctgttcggcgccaccgacgacgagctgaaaccccaggacggggccacgacagacaagcagaagctcgaactggccgcctccggcaccaactaacttcacattattagagggtcttgttgagggtggtcgtgcgaagaacttgtgcagtaggcagctagctagctagctgccattgttgccatatgagctaagctaggctgaagcaacgtcggaagattcgctcgctggtccggcgcagctggagagcgacggccagcaagctcaggccggccagctcgtggctcttaaagttttttaaatcatgtctctaagttcgtggactgtatttcacactttgttttgcccgcaagttgttgatgaagtcgccgaggccgccaatggcaggtgcccaggtt

SEQ ID NO: 268555 - DNA, 435 bp, Zea mays
ccggtctcggaattcccgggtcgacgcacgcgtccgcgaccgcggcatggccgccggcctctcattcccccgcgccggggccccgttcatcctcctccgcacctcctgtttctctccgtgggcagctctggtgccccgccgtcgacttctctctgggcctcccactgccggtgatcccccgcccccggcgctcccgccaacttcgaagctcgccgccccgccggttgtgggaacgccggagcccccgctgccgtttagggccgtggaggcggagatccttcgcgatattgaccccgtcgtcctgctcatcaaggatatcctccactccgatagatacggggatggcgaatgtctctgcccaagggacgaaaatgtcgtcgtggagaatgctcctctcctaccatccacgcgcgcaggacaaaattgggtgtggac

SEQ ID NO: 268556 - DNA, 808 bp, Zea mays
cccttttctgttctttgggggttgagctctgaggttttcatacggggtttcatctctagcctaccccaacgtgcttgggacaaaaaggctttgttgttgttgttgttgtattccttttgtaggtctgcactgaagcatctcaaaattgagagagtcaagaagtttgactactgcatgccttactatatgccgctgcaacctcttgaagacgaggatgacactgctatcagtttcttatatcctctagaacccccgatagtagatgagtttgactgggaaatggacgattacgaggattttgctgatcagaaagttcaagaaggtggcctgccagaggatgagaaagaaaaattcaaggagttcctgaaggagaaggttagagaaaggaagagagagcttaaacaggctaaagaagccaggaggaaagctattgatgatatggatcctaaggtgaaagaggcattcgagaacatcaaattttacaaattttatcctgtgaaaaccccagacacgcctgatgtaaacaatgtaaaggcgaggtacatcaacagatactacaggaatgcccattatctgatgtgatggctttccttatcgcacgtgcttggcgagcttgtcacttgagaggagttgatatgaaaacagttcggtgttgtactagagttggccccagtttttcaccccccctgggcatcttttgctctccagtgtatacaatcatgaggatagattattgtgtagcactaagaggggcaaagtagtttgagactaaacaaatcattaaggaacaatttgttcccttttcatc

SEQ ID NO: 268557 - DNA, 556 bp, Zea mays
gtttctaggcgccgcccaagcccaagcccgagacggattacttcgccgagaaaagaaatctggaggatctatggttatctgcttttcctgtcggtactgagtgggaaaacattgataagataaaggagttcaactggagctttgaaaatttagagaaagccttagaagaagggggcgagcttcatggtaaaacagtttatctgtttggaagcactgagccccaactattggatgttaatggcgaatcaaagatagtgcttattccaatcgtagttgctgtagactgccctttccctccatcagacaaaattggcataaactctgtccaaagggaaaatgaggaaatagtgccaatgaaggcgatgaagatggcatgggtgccttatgttccccttgaggaccggcttagcaggattgacagtttgaaaacaaaaatattcactctcggatgcacgcagcggaggtctgcactgaagcatctcaaaattgagagagtcaagaagtttgactactgcatgccttactatatgccgctgcaacctcttgaagacgagaa

SEQ ID NO: 268558 - DNA, 617 bp, Zea mays
ttctttgtcgtcattgcccaaggctctgcagaaagtgtccagagttcatctgatctgttttctaataatgaaatgatgacaaccattccagtagatcaacaagtgattgcatttcgattgaattctaccaaagactgagagaagagtccttgacagcaatatcccggcacgtgaaggatcttaggggagcacagaagggatctacaatctctgatgaaaacaacaaagcgactgcaatgggaggggatattcaggaaatatatgacaaactaaaagattcttcattgcccgaaggctttttcacagaggaacagccttggaaggatatatatatcacagaactccttaattgtatcaaagaggaacatctgaaggattttgaacaagagtattgtttagcagaaaagatagaaggggcaacggaggacacagatattgcagttgaactttataagctcagtatttccaccctagatctattgaaactagcatccaaagaggaacagggtgattatgtcggtgcatggtacagtatgcttctgtcctgtgctcaagaattgaagcatggcgtggcactttggcaagagttttatcatgcaaatgtctgcgacagagta

SEQ ID NO: 268559 - DNA, 852 bp, Zea mays
gaagactgttgaaacccgagctccatcttttgatgaaaaagaaagagaaggatgcatgtcaaagtgcaaaagggaggaggcaaagatcactgcttgggaaaatctacagaaagcaaaagcagaggctgctatccgtaagctggagatgaaacttgaaaagaaacggtcatcatcaatggacaaaattttaggcaaactccgctctgctcagaagaaagcacaagacatgcgaagtgtagtttcttctagtgaaggtcagtgtagtgtgagggcaaccaagaagacatcttcctctgtcaaaactggcaggcctttcagctgctgctttacctaccgtgcttgctagttgtgatacacagttggtgcctgtggatacagcaatggatataggtctattcgacctcttctcaggcaacagttatggacgcgaaggaagtcagttgggttttgactacaaagcctaattgttaatgagatttgcactgatgaatgagatatcgttatggagcagcagacgaagaaagccacgcgaaatccactcatgtaactgatggagtggactaatgcagtctagtatgcgacgatcaatctctgtacacccggtagaaaaagttcatgagcttcatggcagttagaatcaggattgagctgatattcatcccgcttgatgtgtagctagcattcttgtaactggaattgtgtgtgtaatgcaaatcatgggcgcattagactgtaatgaagaaaaagtcagggctgcgcctttagaatgcagcttgctcaaaaaaaaaaaataaaaaaaaaaattaaatataaaatatattaaaaaataccaataatataaataaaaacttt

SEQ ID NO: 268560 - DNA, 752 bp, Zea mays
  unsure (1)..(752): unsure at all n locations
agagaggaagccagaggagaggccatttttgagcgggcgagccgcngaggacaaccgaagaggaacccaagnggatatcgagcccgcaagggccagcggcgagcccacaccccangagaagcncagncgagaaaaggagggagcggcactagccgaccgacggaagaggggggaaaagaaaaaaaagcacggggcaacaagaaagcccagaaaggcagagaacggacgcgctagtcttacacaatattgttctttgccatttcgaaaaaagagaactcttatactgaggatataaatctgctacattttgtatgtagagacctgtttattcgtgtttgaaggtgcaaaagggaggaagcaaagatcacagcttgggaaaatctacagaaagcagaagcagaggcagctatccgtaagctggagatgaaacttgaaaagaaacggtcatcatcaatggacaaaattttaggcaaactccgctctgctcagaagaaagcacaagacatgcgaagtgtagtttcttctagtgaaggtcagtgtagtgtgagggcaaccaagaagacatcttcctctgtcaaaactggcaggcctttcagctgctgctttacctaccgtgcttgctagttgtgatacacagttggtgcctgtggatacagcaatggatataggtctattcggtgagtcccactggcatttgtattatgtgtaatttaacatctaaaactcacactagttcagcattaatgctttac

SEQ ID NO: 268561 - DNA, 478 bp, Zea mays
aatttccgggtcgaccgacgcgtacggttcgtggtggatgcaggccttggtaccccaaaaatttgtatgcaagatgagcttacaggactgccaatcaagcgagccaccaggtttgagaataaggtgggattcaagaatgtagtggctggtgaatcactgatcaaaaagcggatttttgagagattcttcatcgatctagtggccggtgaatcactgatcaaagagcgagcagccgccgggtttaatgattttgtgggatccctggatgtagcggctggcgaaccgcttcttcttccacaaagattcagacaaaaccgagcttggatagaactgaagaagatttggcgaacgaagaaaaaggtaaaagggtttcaaattaataaaatagaaggaggttatttagtagccatcgcaggtttcattacttttctttcatttcaaagcttaaaaaaaaataaaaatggctggcccctttttt

SEQ ID NO: 268562 - DNA, 644 bp, Zea mays
gaaataaggaagcaaaaggatataaacataaggttgtgaagttttaggatctactcagcctagtgtacaataaagatcaatcaaatggagagggtgctaaaacagcagctgaaagttcaaaggaaatgacaaaagagaatgataccggaggcaaggatgctccatattctgtatcttcctcgagtagtttaaaaagacaaagattagatgattcatttaattctatgtggtgtgataagtttgacatgcttacatctgcattgaaagatgacggtccgaagctaccctcttccgccgaagttctcgccgcattacaagaggttgagggacttgatgaagacacataacttgagctttatgacatcctcacctctaatgcacgcaagtttgagtcgatgatggcactcccaatggaaaggaggaagatgtggcttatgatgcagctaaggaagtgaaacagcttatatgtgaacttagatctctgtgttgaactgattgtgtgaacttgtctttgtgaaacttttgtgtgtgaacttgatggctatgtgaaactgttgtgtgcgaacttgatggctttatgaaattgttatgtgaagattacccgcctttgtattaattaaacccgcccacttgatgtctttgtg

SEQ ID NO: 268563 - DNA, 1095 bp, Zea mays
gttcagggctcagttcttctgcggcggttggcatcgcctacttgctggctttagaacatgtaaatgatctggttatatcaccagtagataacattcagttagacaagtacattgaaaataaatacttgggtctcgaaaatggcattctagatccatctgccattttgctttcacggtatggctatctcaccttcatggactgcaagactgcttcaccttcctacgtctgcttctcggagctgaataaaagccaacagcctcagggacagctaccattcaagattttgttggcattttcaggactccaacataatctgccaaagaagcgtggatataatacacgagtttctgagtgcaaagaggctgcccgtgctcttttgcatgcttcaggctgtgaagatacaccaaatatactttgcaatgttgacccagttgtatatgagacccagaagtgtgtattggaagaaaatctttccaggagagctgaacactacttttttgaaatgaagcgggttacaaagggcagggatgcatgggctcatgggaacctacaagaacttggacagctgatctctgaatctggtcgcagctccatactcaactacgaatgtgggagcaaagagatgatccagctgtacgagatcctgctgaaggcccccggcgccctcggcgcccggttcagcggcgccggcttcaggggctgctgcctggccatcgtggagagcgaccgcgcggaggatgcggctgcatacgtccgtgccgagtacgaaaaggcccagcccgagctggtctccaggatccccgcggatcgccgtgttctggtctgcgagcccggggactccgcgcgcgtcatattgcctgatcctcacctgagctcctgatgccatttcgtggcccggacagacggaatgatgactctactagtccattcgctgcgtttggattcgtttttagttaagccccttttgagcatcggatattttcctttcctttattgtttctaataaaaataaattaatttctgtaaactttatataaggttctagcttttttagataaaagtatataatatctatccccttctctactatactt

SEQ ID NO: 268564 - DNA, 912 bp, Zea mays
gaatgcatcttcacccacggtcctgtgtgctagttaggttcgtcctccgcccaacaatgtgcaccgatgggtggtgtgcacatgatacttcgcctttagtcatttttgttctagcgggcaataaatatttgagaatagaggcttgtttttatacagatcttaatttgcagctcgatcaataagctgcagtgctaatatcaggagaacatccataatctgttactaatatcaggagaacatccataatctgttagagacgatgctctagcacaactgggttgaatcctgaggaagctcgaaaacaagtctgttaatgttctaaaccctgtagctgtaggttttgttgtccattgatgatgatgaatgatgagaagcgtagttcgactggaacacaagttttgatttattccaacgcatcatccggaacatggtacccaatacaaggatcgatcagtaggagtttatgagatgaaccaaattagttaaatccgacccagcagattcatcgatgcccttgtccgcagcgatcttgagctcgttcatcctcttcctgatgccctccccttcctcgctgccgcccatgagcctgtcgatggcggccttgatctcccctctctccagctggtccccggcgacctccgtgcccaccttccagacgtggcacacgtacctcgcgttgccgtactggtccccgtggcgcgggtggcagatcatgggcacgcccttcgacacggcctccacggtggagttccagccgcagtgggtgaagaagccgcccacggccgggtgcgcgagcacctcctctgcggcgcccagctgacgacgacgccgcggccgcgcacccggtcctccacgccgtcgggcagcgcgcccgactcgaagccgcggatgaggttgggccggaccacccac

SEQ ID NO: 268565 - DNA, 863 bp, Zea mays
agcagcgccagcggcggtcagcgtcagcgtcagcgcccgaccaaatttcccccctcacctccccctctcccgtcgtcggcatggccaccgacgtgctgcgcgcgcgcaacgtcctcttgccggcgccgccgcagaggatccgggcggcggcgccggcgcgcggtaggggagctcgccccgccagtcaccaccccggcgccacccgcaccaggaggaggtcgccgccggccgggacatcgtcccccgcggcggggcgaagacaccccggcggcaggagggcgaggcctgcggcggaggtgtacgccggcccatcgttctcgacgtcccccgacccgagcttgctgccgctaccgcagttccctgccaggaaggccgtggccgtggccatgacgaccgccgtcgacgccgtcgccgccgcgacgcgcgacctcaggcttatcctgcggctggagtagccatcaggacacatagctcgtctgctggctctaacgctggcttcgatttctcttcttaattcttccttctttattagctcctactcctagtccttgtcgacgcatcatcgatcgagctgcacgttggttctggctgctctcctggtatgggtcccacgctgccgcggcgaggcttccggctcagttttattgtgtggtcggcggcgaggcacgcggcggccatgggatcccaccgcgacggcggtgtagaatgatagcagctgtaatacactactctgtactgtgatgtgcaagtagatagtactagttactagttagccagtgtagggttcctccgtgtaacaagtcatcagcgtgtgatcctcttcgtctgttcatcaatatacacatttctatatgtttcaacaa

SEQ ID NO: 268566 - DNA, 1118 bp, Zea mays
aggtaggcgacgagtcgtcgacgctgggcaacctccggctccggctaagcgaggagagcgcgtcggtgcagcagcagcggtcctgcagccagaggtcgtcgcgcccgccgccagcgttccgggtcaaggaggagtgggacgacagcacggtgagctccaacgtgtccaggatgaggatccagaacaggatcgaggccaccacgcggcgcgagcgagcgctcgcctacgcgttctcgcagcagcttcggagctgcggcggcggcaccagcaagaagcggtcgtcggcgcgcgcggaggggcagggggagttcaacgtggggtggagctggctggagcggtggatggcgacgcggcaggcggagcccgcggacgactgcgcgagccgcaacgcggacacgggctccgccacggggcggcgggtgggtggtcgtcaggagcgcgcggcgacctcgccgtcgaggagaaggagagctgcgcctccaacgacgtctcggtcgtcagctgcgacgcctcctccggcctcgcctgccataggcccacgggcaacaagagccggctcaagggcggccggagcttgccgcgccggatgcaggtggcggcgtcggcgtctgcgtcggaccaccgcttccaggaaagatcacacaaggtgagcaagaaggggcaccagcgagtggagcaggagccgcacaaggaccgattcgacgccgtcgccgccctggacgacgacgcttgccagcctcccacggattactgagacgacctgctctgtacatagatttggaaggatttgcagcgctagctgacgatttgtttcggcttgcactagtctgaaagactgcacggttactgtctgctgagtgactgtacgtgtcgtgtcggtcatgtaaaagttcctcgctacacgtacgtcgtatcaaacgtcactcactgtaaaacgtcacggccacatacacgatgacgagttccggttccctagacacggcaaggagaagcaatcagtgacagtatttgtgatatcatatccatccaggcatccagctccgtttgttttgcgttagcacctaaagtacgactgcactgtaccgccacaacagtttacttatggtgtgtttcgtttt

SEQ ID NO: 268567 - DNA, 422 bp, Zea mays
cccccctgaagcccatcccaggttccctggcctagacttgcccccagtgcagacctacatggatgtgatatccgggtcttcccccaaaaatggttgccccccgattgatgtcgattctgttttttcctctggccccccaccccccatggagctattgtttgaggaacctgtaaccaaagagatgtcgtgggaaaggaacgtgtcgtcccccctagatctttccccttggcgaattaggaggcaggtgtgataaataagagtcttgctagttcgtcgtcgtcgtccatgttgtcatagaccccgtcttgggggttcatgttactgggatccaggcaatggtgtgttgtgtactggcgttaaaaaaaaaaataaaaaaataaaaaaaaaaaaaaaagggcggcttttcgcgatctagaactagt

SEQ ID NO: 268568 - DNA, 626 bp, Zea mays
cagctgagggagctggcgattctaaatggcacactgagagaggaaagcccaagccctcacctcagccctagtgtgtcccccttcaactccaccgggatgaagcgcgcaaaaacagggcggtaatctctgttctgaaagccttcatccccccaaatcaatcatggttcaatgcccaattattacacaagctactgctggagatgattggtgatgcatatgctgggatcatcagtgatggcctatgcctgtcatgatctgtgcgctttatcgacaggcacaaaaacatgcctgtgctgtgcttggacgaatggtctccgggcttgttgtttgactctactattatttattctttgtgcttctgactgcctaagtattattaacattattggtttgggaaagttaacaaggcccggttggccagtcgctgtagaaagcttggggagaggagggggggggggggggtgtcaatgtgacggacaataataaggtttcgttggtgtacctgagatagttgtaatatgtcatgtgctgatgcttttgtgtggtgctagtacaagacaaccagccagctatagttgaggcaatgattattttgcgttcataaaaaaaatattaattatattttt

SEQ ID NO: 268569 - DNA, 515 bp, Zea mays
  unsure (1)..(515): unsure at all n locations
ggagagagcactgactcgtctcccttctcgtctccagcgacggcgaaggcgaagcggaggagcgggagcagaaacagaagaggcagccatggccgtgatggagaagctcaagatcttcgttgtgaaggagcctgttgtcgcagcttcctgtctcatcgccggattcggtctctttcttccagcagttgtccggccaatcctggattcatgggagaccgcagaaaaagttcctccaccacctctaaatgatgtggttgcgggtgtcaccggcaagaaaaagtagtgaacttgcattgttttctcatgtcgatgctgtcccacattttcttccccatgtttttctggcgtccagattggaaggctctccaaagtcacggtctccaaagtgacagcttgcttgattttaaacagtgtcgacagtgttttgtcatataccggtttaaacagttcgctttaatctgaagcaaacaggctattatacctgaatcatatactgcaatgtgtcangtttagaa

SEQ ID NO: 268570 - DNA, 568 bp, Zea mays
cggacgcgtgggcggacgcgtgggctggcttgtatccctctctcgtctctccagcgacggcagcgggcgagggttacgcgaaggcgaagcggagtagtggaagcagaggcggcagccatggccgtgatggagaagctcaagatctttgtcgttaaggagcccgtagtcgcggcctcctgcctcatcgctggattcggtctctttcttccagcagttgtccggccaatcctggattcatggcagaccgcggaacaagttcctccacctcttctaaatgatgtggttgcaggtgtcaccggcaagaaaaagtagtgaacttgcattgttttctcatgccaatgttgccccacattttcttccccgtgttttttctggcgaccagattggaaggcttttcccaagagtcacggtcttgaactctagatggtatccgcggaataatcattgtacctgaatcatatactgcaatgtggcagttttgaaaatgtttcccctcctacaaaggttgatagaatgccataccctttgaactgtgttcgagatgtcatcgtttatgatttctcggtcg

SEQ ID NO: 268571 - DNA, 977 bp, Zea mays
  unsure (1)..(977): unsure at all n locations
cccacgcgtccgcccacacgtccgcccacgcgtccggttatgatcaagtcaagcagtcaattttgaaacgtccctgggttcaaagatgatgtggtcacccacctttttgctggtcttggtgctggcttctttgctgtttgtgttggttccccagttgatgtggttaagtcgagaatgatgggtgactcagcctacaaaagcactctcgattgttttgtgaagacgctaaagaatgatggccctttggcattttacaaaggcttcctgccaaactttgcaagactgggatcttggaatgtgattatgttcttgacattggagcaggttcaaaagctgtttgtgaggaaagcgacaagctgaagatagagtttttgcagtcaggtggcgtacaattgacgcacagggtttttcttctatagacaaaaggggagaaatgacacctcccccctcgagaattggggaacaaggacagatctgacacctcaattgcgagaaataaaaataacagccgacagttgcatgatccctgaacgaataaattcagaactagaaaacagatgtcagtaaacaacatgtggtgaatgttggaacttgaactgctctagttcagtgggcatctgttgttgcatgcttgggatggatttaatgtttcgttttttttcttccttgtactgaagtgctctgatcggtaacgatcactgtgtgtgaagtgcttgattgttatgtggtatcatgagaatgaataaacataataatggagctgtttttttttttttttttactgaagaagcaagctgctgccattacattcctgacagggagtcgagaagcagagcacacgacaacaaacacagcactgtgtgcacacatgctccaattcagatgtngctcctgatcttcatcttgccgaagagcgagtgccttccctcggcgaccaccttgcccgtggcggcgttggcgaccatgaactgcgtgcc

SEQ ID NO: 268572 - DNA, 443 bp, Zea mays
gctaggctgcagcttgatcggtgggacttctgagcttggaaattctcacatggctgcctgcgtctgcttagtgctggttcagttagctctcaatccatgtggattgaatgagattatatgggtttaaatcccaaacaagtcaaactgcttaattcttttcaatcccatccaacccatgtgtattaggaataaccgaacaaccccttagggcttgttcggttagctctcaatccatatggattgagtgagattgggtgggattaaatcctaagcaagtcaaagttcttctaatctttttccaataaatactcaaagaacaaacaatgataggtgacaccggtggtgctgctgatagggtgttgaaaccagctgcttactgagatggatggcaaagaatgcgggcggcccttttaaaggttccaagtttacgtacccgtccatgc

SEQ ID NO: 268573 - DNA, 577 bp, Zea mays
atgagcttgcgctcgtcttccaggaaatcatgagctgactgacgacataccagacacacagaattagatgggacgttcttccctctgctggcaccgagattggatatcagctgcccatggagcgctaagagctactcagtcttagcgccgtcatcaagcgccaaggccacagcagcggtgaagggcattttgctgctgctgttcccgcagtctgtacacatgctaacacataatccgtgtcatttgtgaagagaagctgctgccatggacaatggacttcagccacaatattatgtggatgtcgtttcatgggctaccggcgatgctacaggccccgatcgaatgatgatcagcagatgggaactcgtagttccttgctgtctgcagcatctttctcatgtaccgttagcatgtgcgtgtttgtggttgggttgggttgtttggccgatttactgatcattggcgaatgaagtgagccatgtacatcattttgaagaattaatatcttttcttcttctgagtacctccctttgtcatgccctgcattgagtgaaaatgatatcatgtggtgttccct

SEQ ID NO: 268574 - DNA, 1556 bp, Zea mays
agaaaatgggactcctgtcgaagtgcagaacagggacacaaacattactgaaatcaacaatgagattaaagctgaacctccctctacatcccattctacctctcccggagacctcctcctggcagatcttttgggtcctcttgcgatagaaggccctcctgctgtagagcaaaatcctgcccaaggattgaatgctaatcaaagtccagctggtgacttggcacttgctacccttgatgatcagtccaactcagttcagccaattgtcaacgtcgaggagaagtttcatattttgtgcacaaaagatagtggggtgctgtacgaggatccttacatccagattggcttgaaagcggagtggcgtgcccatcatggccgtcttgttcttttcctgggtaacaaaaatacttcagcccttacgtcagtgcgggcgctgattttgcctcctagtcatttgaaaatggaactttcgtcagttcctgatactattcctccaagagcgcaggtgcaagttccccttgaggttgcgaatctccttgcaagtagagatgttgcggttctagatttctcgtatgcttttgggacttcactggtggatgccaaacttcgacttcctgttgtattgaataaatttttgcagcctataactcttacccctgaagaatttttcctccagtggaaagcgctgactgttcacttgctgaaggttcaagaagtggttaaaggtgtgaaaccaatgcctctttctgagatggctaatcttttcatgagccttcacttggcggtcgctcctggacttgataacaacccgaacaatctggttgcatgcacgacattcttttctgaagcaacacgggccatgctttgtctgataagacttgaaacagatccacaagacaggacccaactgcggctgacagttgcctcgggcgatcaatatttgacattcgagttgaaagagttcatcaaggaacatctggttgatatcccaaggactcaggtcgccccacctcgcgcagcagtccagccacagttgcctactacagcacctgccacatacaatgaccctggtaccatgcttgctggattgctatgagaagtaacccgaaggaatagtgttttgatgtacatgacagttatttaatacgaggatctaacatctccacaagcatcttgctgccaagacgtacacgtggagcaaccaagaaagagctggcggagtgtagtctccatgaggattctaaaccgagaaagagcttagattctttttgtgcggtttgaaggccccctccctctccatgtagcagttgccgtattgtgtaagcgtaacttgttgtttctcattattatcatccccttttggtccatttgtataacctgtatcgcccatgtctggtggtggacaatcggtagtttttgtgtgttaatataaggtgctaggttttcccaccatgccgattgtaaagttgccctggtgcgcattgcactgcgatttgtacggaatagggaaggaaaaatttataggttttgctttgtgcatgttctatggtttgcat

SEQ ID NO: 268575 - DNA, 560 bp, Zea mays
gccatgctttgtctgataagacttgaaacagatccacaagacaggacccaactgcggctgacagttgcctcgggcgatcaacatttgacattcgagttgaaagagttcgtcaaggaacatttgattgatatcccaaggactcaggctgccccacctatggcaatggtccagccacagttgcttactgcagcacctgccacatacaatgaccctggtgccatgcttgctggattgctatgagaagtaaaaaaacaaaagccatagtgttttgatgtacatgacagatgttgatctaacatctccaaaagcatcttgctgccaagacgaacacgtggagcaacgaaagggctggcggagtagtcttcagctggattctaaaccgagaaaaagctagattcttttgggcggtttgaaggcctccttccccttcatggagcagtccccatattgtgtaagcgtaatttggtgtttctcatttatcatgcccttttggcccatttatataacttgtattgaccaagtctgttcgaggacagtcggtagttatgtgtgttaatata

SEQ ID NO: 268576 - DNA, 507 bp, Zea mays
ccacgcgtccgtggcgcagtatatgccacttgacaatcaaggagaggtcccaaatcatacacatgacgaagatcgttcataagtgtgcagatcattacgtggtgggcccatatggcctaatctgacaccaatgcagatcgtcgtgagctctacaaacagaagctacaggccaataatagcttgatttttagagtacaaaaatctgttatttgcctgatagtttatctggagcagtttcattttacatatgactgtaatttgtgagaatgcacatcttacgatttttgttgaccagtattcataggtttttagttagcaatgtgttgttggcccgttgctagtccttgtaatacaagcccacctgtttttttgcgcacggcaagacttaacctggcaacattttgtagtacattttattttgtatcacctgctctatacacgagttttcttggaacatcggaaataataatgccctccagtatcttgcgaccaaaaaaaaattaaagg

SEQ ID NO: 268577 - DNA, 442 bp, Zea mays
cgacccacgcgtacggctgccgcacatgcggtggctctgaagcctctcgagctctcgccgcgctccgcctggttcctgggcgacaacatcgggaggtacatggactcctcggcggtgaaggtcgtccagggcggccccgacgtcggagtgcagctcatggagcaccgctgggacaaggtcctcttcaccgggagcccccgcatcgcgcgcgccgtgatggccgcggcgtccaggcacctgacgcccgtcgcgctggagctgggcggcaagtgcccctgcatcttcgacgccatgggcagcgcccgggacctgcagatctcggtgaaccgcatgatcgcgggcaagtggtcgtcctgcgccggacaggcctgcatcgccatcgactacgtgctcgtcgaggagcgcttcgcgccatcctgatcaaggtgctcaagtcgacgct

SEQ ID NO: 268578 - DNA, 1427 bp, Zea mays
ccctcgcgtccgcccacgcgtccgctctcagacggcataagctcacatcggcaatgaaaaagcatccccgtctcccctgattctctccgcccagctcagctctgctccccgccgctcctctccgcgccccttcatcccggatctcggcatgggcaccgccaccaccaacggctcggcggagcaggcgtccgcgcccgtgccggcgctcaagttcctcatctacggccgcacgggctggatcggggggctgctgggcggcctctgcgccgcgcgcgggatccccttcgtctacggcgccggcaggctcgagaaccgcgcccagctcgaggccgacatcgacgccgccgcgcccacccacgtgttcaacgccgcgggcgtcacgggccgccccaacgtcgactggtgcgagacgcaccgcgccgagaccatccgcgccaacgtcgtgggcacgctcacgctcgccgacatctgccggggccgaggggtcctgctcatcaactacgccacgggctgcatcttcgagtacgacgccggccacccgctcggctccggggtcggcttcaaggaggaggacacgcccaacttcgtcggatcattctactccaaaaccaaggccatggtagaggaattgctcaagaactacgagaacgtatgcacccttcgtgtgaggatgcctatctcatcggatctctccaatcctcgcaacttcatcaccaaaatcacccggtacgataaggtcgtcaacatcccgaattcaatgacagtactggacgagctccttcccatctcgatcgaaatggcgaagagaaacctcacgggaatatggaatttcactaaccccggcgtggtgagccacaacgagatactagagatgtacagagactacatcgatccaggcttctcctggaaaaacttcaacctggaggagcaggcaaaggtcatagtcgcaccgaggagcaacaatgagcttgaccagaccaaactgaagagagagttcccggagcttttgtcgatcaaggagtcgctggtaaaatatgttttcgaaccaaactgtaaggcgtccaaggcttgacaagtggaggtgcgcacagctgtatgttgacgctatttgttccatctgaattgacattactctctccgggaactctcaataagcacaccccctgtttcgtgtgcaatgcatttgaaacggttaggtttctcataggagatgtcatgctgccatactcctttgtactttcagattattgaacggagcggggcaagcaaggtgtaatttagctcaactttcgcattggctcctggcctcctggggcgttatcataccgtgcggttggaatgaactgaggagcttcatgcctgcctgcttttgttgtgccatagaatttgtagttcgcaatgtttcatttgtaaccttttattgaata

SEQ ID NO: 268579 - DNA, 585 bp, Zea mays
cccacgcgtccgctgttgctttggcggttgtattcgttattattactgcaggaatcgctgtcgtcaagttgataggtggacaaattccaatgcccaagttgtttcccactggtgctggtttggcatctgttggggaaccttttacagcagtgccggttcttgtcactgcttacgtttgccattacaatgttcacccaattcttaatgagctaaaggactctacccagattaagccaatagtacacacatcattgacactatgctcgaccatctacatcacaacaagtttctttggatatctcctctttggtgaatctacactctctgatgtgctctccaactttgattcaaatcttgggatcccatacagttcagtcctcaatgatgctgtcagagtgagctatgctgttcacctgatgcttgtgttccccatgagatgccatgcattgaggcttaatttggatgggctcctcttcgcctcggcaaggcctctgtcttctgacaacagaagattcggcataattacagcatcgctcctcctagtgatttttgggtctgcaatcttcattcctagtatttgggatg

SEQ ID NO: 268580 - DNA, 511 bp, Zea mays
  unsure (1)..(511): unsure at all n locations
agctgctgctggtcgccggcctgggcggcggcttccagtgagcttctgcgtgtgcgtggctggtgtttgggcagcaggccacgcgaatccggtccgtggcaaggcgaaaaacgtcctcatgtcatgtgcggtgcggcacaccccgcccggtcggtcagacgcgtgaccgccgccatacctgctcgtccttcactcaacaactctgcagcagtcgtttgatcgtgtctccgtcggtgaaaagagaaaccaacggcagaggagggcgcgccctggtttttacagcggctgcggctcccaacttcccaccaagtgagaaaaaaagaagaagaggcgaaacagaccaagaccagccctagaaaactagctagccaagtactatgttgatctgtaggccgctttggcgattccgtcttccaaacctgtggagttgtgaatccttttgcagatttaagtaaagttcgttagccccnnnnaaaaannaaaaaaaaataataaaaaatataaataaaat

SEQ ID NO: 268581 - DNA, 500 bp, Zea mays
ctcgagccgaatcggctcgaggcggcatactcctggtcatcgttgtcgcgtggctaggcgacggcgagctcgttggacaagcagttctcgagcctggctaagcaagacatggagagggagaaggctgcccaagaccaagggaaactagaacgctcgctactcagtaagcctgcagaaggcggcactggtgatgtactggtggagcagcagacaaatgggtcggcgacgagcaaagcaactggaacagagagctcgccatcgaactcatcggccccattcaatagatcgtagttaggagagtgattacagcgagcagagatagtcggcatttaaaataattcgtggctttcgagtttgtaacagcgtgcggcttcaagcctgcccgtaatcttcctttgtaataataacatgagcaagatcttgaccgccggcagcgaaaaattaataaaaaaattaaaaaaaaaataaaataaaaaaaaaaataaaattataaaatttaa

SEQ ID NO: 268582 - DNA, 1834 bp, Zea mays
gctgattccttggaagctaaggagctcaagaagcattgtgaggatttagctattcgcaacctcgattacattttcacagtgggagctccttcaattatgaatgcttcttctgaaattcttgtgaacttagagaaattgctagatgagaaatcctcagagccttggagtcagcgccgtcttcccacaatgacagctacctatcctgctgtcattgacagtgatgtagaggaagatgaagcaagagaattccccaagacccgtaaatgtgggaaatctgcatcaaggccatctgcgatgtctagtgatgacagcttccttcagaaagactgcaccgctgaacaagccgtctctaagcagatcagagcacttcgcaagaagctgcaacagattgagattctcgaggctaaacaacttgcaggtcatcagcttgacagtcagcaggtagcgaagctcgagtctagggctgcccttgaaggtgaacttgctgaacttggcattccctcagagatatactcaacttcctctgcttgtccagcagaaggtaggacaaacagaaaacctgaggtttctaagaaacagaagagaaagaacaagcagtcaacacagaccccgtcagtgaaaaatgagcctgggcaacaaatccccattacggaacttcaagttctacaagtcaatgtctctgctgaaaaggaggcgtatgccgctgatccaattaaacctatggaggctgccgcgttcagcaacacaaaggacaccgcttctccaccggagaagaaaccttcccaaccaactccatcaaagaagaagaacagaaaaggcggcctgtcgctgttcctgagcggcgctctcgacgacaccccaaaaccaagcctccctgcccccgctgtgcctgccacaccgaagcccgaaggacccgcctggggcggcgtgaagataaccaagggacccgcttcgcttcgagacatccagaccgagcagagcagaacaaacgagcccgcgtcggccaaggcgaaggaccgccacgagaactcgccggacagcgccggccgcgcgacgagactctcctcgttcattcccgacgcgcgttccagtccagtagccgtcgtggcgcctgctcgcgcagcggcggcggcgccttcttgcgaaggtgacaggagcacgccgccgtggtcgtcctctgccacctcgcccaacgtgtcgcagccttcgctcagggacatacaacagatgcagcagaagaggcaccatggcggcgtctcccacagcccaaaaacccagacatcgggcttctctataccgccccacagcggagcgccagaggccgctgtggggcggtatagagaagccccacagcggagcgccagaggccgctggcggtcgcggcgtgaaggacaacgtgcccaaccggtggttcaggccggagaccgacgccccgtcctccatccgctccatccagatcgaggagcaggctatgaaggacttcaggcgcttctacagcagcgtgaggatcgtcaagccgcatgtctagtagcactggcggcggccggcggcggcggccttggcggagagtgactgatggcacacacaaccccctttaggctcaccctcccatttgacactggctcgttgtacattcgagtgtacagttggttctgttcgccataggttccttgagctgaacaataaacaaacaccctttgctgctgctgctgctgctgctttcgcagtgagtggtctcgtttagttgtaacagaagattgtacaggccatgtgagatcaccaccccccagctttggcttaacagtttaacttgagccaatgcttcttttttttt

SEQ ID NO: 268583 - DNA, 671 bp, Zea mays
gaccggtttggaatttccgggttgactttcgccgcccgacggttcccctcaggggaaaaaggaccttggccacgaaaccctattaacggaacttcgtttttttcaagccaaggcctttgctgaaaaggaggcgtatgccgctgatccaattaaacctatggaggctgccgcgttcagcaacacaaaagacaccgcttctccaccggagaagaaaccttcccaaccaactccatcaaagaagaagaacagaaaaggcggcctgtcgctgttcctgagcggcgctctcgacgacaccccaaaaccaagcctccctgcccccgctgtgcctgccacaccgaagcccgaaggacccgcctggggcggcgtgaagataaccaagggacccgcttcgcttcgagacatccagaccgagcagagcagaacaaacgagcccgcgtcggccaaggcgaaggaccgccacgagaactcgccggacagcgccggccgcgcgacgagactctccttgttcattcccgacgcgcgttccaatcgagtgttccgtcgtggcgcctgctcgcgcagcggcggcggcgccttcttgcaaaagtgtcaggagcaccccgttgtttcctcgcgacccgaagaggcctaacgtgttttatactgcgttcaaggacctgcatttgatgcat

SEQ ID NO: 268584 - DNA, 508 bp, Zea mays
cggctcgagatggcgccgtctcccacagcccaaaaacccagacatcgggcttctctataccgccccacagcggagcgccagaggccgctggcggtggcggcgtgaaggacaacgtgcccaaccggtggttcaggccggagaccgacgccccgtcctccatccgctccatccagatcgaggagcaggctatgaaggacttcaggcgcttctacagcagcgtgaggatcgtcaagccgcaggtctagtagcactggcggcggcggcggccttggcggagagtgactgatggcacacacaccccctttaggctcaccctcccatttgacactggctcgttgtacattcgagtgtacagttggttctgttcgccataggttccttgagctgaacaataaacaaacaccctttgctgctgctgctgctgctgctttcgcagtgagtggtctcgtttagttgtaacagaagattgtacaggccatgtgagatcaccaccccccagctttggctt

SEQ ID NO: 268585 - DNA, 302 bp, Zea mays
atcgtctacccgccccgaaaaccctagttatatatatatatatatatatatatagacatatgctgattgtaacctaaattagcctgcagccagttaagcagggactgcctactctgctaggaggacgtgtgtaatcatgtggcctgcgcaaacagtaatttgtgctggctgctgtgtattcatgctgctctgataatcgtgtcgtggtaataataatatcctatttattctactactagtaatcggaaacaaatacagaaaactgaaagaaaaaaaaaaaaaggcacattaaaaaagaaatt

SEQ ID NO: 268586 - DNA, 703 bp, Zea mays
cggctcgaggttgttctaaacccccaaaccctccgtcctaacctctgcgccaccggcgtcaccaccgccggagccgcagccatgaacgccttcaggttcctcggggacatgacccacctcttctcggtcctcgtcctcctcctcaagatctacgccaccaagtcctgctcaggggtgtcgaggaagacgcaggagctgtacatgttggtgttcgtggcgaggtacctggacctcttcacggattatgtctcgctctacaactcggtgatgaaggtggtgttcatcaccagctcggcggccatcgtgtggtgcatgcgccgccacccgcaggtacgaaggacgtacgacaaggagcaggacaccttccgccacacggtgctcgtcgccgccgcattcctgctcgcgctgatattccacgagcggttcaccttccgcgagatatgctgggcattttcaatctatttggaggcaggggctattcttccacaattagtgttgctccagagaagcagaaatgtggataacttaactggacaatatgttttcttccttggggcctaccgtgcgttttacattctaaactggatttatcgttatttcacggagggtcatcgcatcagatggatcccttggcttgctgctttcgtgcaaacagatctgtatgcatattgctaccactattaaatcttaaggtcgaagaaca

SEQ ID NO: 268587 - DNA, 982 bp, Zea mays
ctcgctctgcgccgtcggccctgccgcgctcgccgacccctcgcccttaggtgatgaggaggtggggattgatggttggaacatcatggagaattgttgcgcctttttgtatagcaaggaggagaagggcaagaagaaaagggtactagtgaaatgtctggtgatcggtgaagtacttgcaattgatgtcttggatcttgaggcacaagataaggcgccttataatatccagattaatgtgaaagacttctttgtcgaagagcagccaaagaattatggggatatgtacaagaattttacaagtctcattgagactgtgaactcaaatgtgttgtgcaaattggatggagacggttccggtgctgaggctgctaagagcactgccgccgctgctgctaagaactctgatgggagaagttcaccaatacagagctctggagatccaggtcctagaactgctgacccttccggcctaatttatcctccaatagcaccgattggttctgatgatctctaccctgggcctggtgcaggcttctaccctcacagtggcattgggagcggtggcagcatgcatgttggtcctaatgatccgcgcttctttccttctaatcccttctctgccccatttggtgggcttgggagtgttccaccaggtagtcgctatgatccaattggcccacctgacgtcccagggtttgagccatctagctttgttaggcgtccaaggcggcctccaggcgggagcacccaccccgacctcgagttcttccagcaaggcccagacttctgagagtcgcgcagaggccggccggagcctcgccctaccctcacgaaataacttcaaaatgctgagccctcgagctagatatcccgctcgcttggcgtgattgcaactgctgtatcgagtatagtcctagtgcgctttggctgtgaagatggatgtgaacatcggcctagtgtatctactcttaaattccag

SEQ ID NO: 268588 - DNA, 762 bp, Zea mays
agggccgacccagagcgtccgtagccggcggatctccgcgggcggcagtcaggagtggaggcgtggtcgcacgggcgaggtcgcaataggagaggctcagagagatggggcggccttacgcggtgaaggggcggaagaagaagcgcaagctcgaggaggcggcggcggcctcggacgctgccccgcccgtcgaagaagcggaggagctgccaccgccagaggtgagaagcggcgaggaaaagagcagcgaggaggatgaggcagcagcgggggaggaggagcacgcggcggcggacgggctcccaatcctacccaggacggttgatgggaagcggcgacccggcgccatcttcgtactcgagagggcctgcctcgaggtcggcaaagtcggcaagactatgcaaattttgaactccgatgatcatgcgaattatttgaggaagcagaatcgcaatcctgcagattataggcctgatatcattcatcaggctctactagcaatatttgatagccctctaactaaggctggaaggttacaggctgtttatgtgagaactgaaaagggcgtattgtttgaaatcaaacctcatgtccgcatgccaagaacctttaaacgtttctgtggtttaatgtcacaattgttgcaaaaactgagcattacggcagttggaaagcgtgagaagcttctcaacgttgttaaaaatcctgtcactcgttatctacctgttggtgcacgtaagattggcctttcatttagtgctg

SEQ ID NO: 268589 - DNA, 609 bp, Zea mays
cggaattcccgggtcgacccacgccgtccgcggacgcgtgggggtccccgcccgagcacatctcgcgcgccatcaaggccgggctgaaggacaagggcctcgacgccatgctggcgctggttgaggacgagacgctatcgtcggtccctctcctccgcgtcctcctcgtccgacgaagaggcaggccggacgcagctgaggcgcccgtcgtcggggagctacgggcggcggtcagccgaggagccggtggtgtgcagccccgcgagctcgctggtggccgtcatggtgcaggccctcgcgcacagggtgagctacgtgtgggtcctcgacgaggacagcgactgccgccttgctggcatcgtcacgttcgcggacgtactgagggtgttccgggagcagctgctgtgagatctggaagagtgtttgctgtttcctcctcgatcgcatcttgtgctgtaatgagagaagaacatgagctcttgtcacggaccgagcgccttcgtttctcaaaaaacattttggtttggatcagagtatgtatgtgtttgcttgcttaaaaaaaaaaaaaaaaaaaaaaacaaaaacaaaaaaaaaaaaaaaacccaaaaa

SEQ ID NO: 268590 - DNA, 657 bp, Zea mays
  unsure (1)..(657): unsure at all n locations
accggttnggaattaccggctcgacgcacgcgtccgcccacgcgtccggaattcttgattttgtttccaacgaaaactcagggcgtatgggtgagggccaaacatttacaattgaacctatactcacaatggagaaaacagagtgtgttacatgggaagatggatggacgactgtcactgctgatggtagctgggctgcgcagtttgagcataccatactggtgactagggacggtgcagaaatactgacgaaagtctgagctattctcctgcccgataattattgtcagaattctcagctatggttcctgtcccaaggcatcctggtcatgtccgttgctcgccgcaatactcatttcagagttttgagatctgctgcaggccgacatacgggaaaggtttcccccatgtagcagcaacttgcaggtgataggtgagggcacacacacacacagagacacggctgcatctctgtgattaacacattactggtctcctgcagcctgctgtagtggtgttgctgtgcctttggattctagaagacattctgtatataaaacagcactcctaacagttcagtctagaacctagaagtagaaactgttattgttatgatacggaagcactttaggggaacagttggagacacatttttat

SEQ ID NO: 268591 - DNA, 496 bp, Zea mays
gcgacacgctcttcaacgccgtgccggggctggacggcgcgccgggctccgtgtccctggagcttgccaccaggccggggtggttcgtggcgacggcccccacagcgatgcacgcgaacgccaccacgcaggtcgtctgccgagccaacaagggcggcgcggcgttccggcgagcggcgagcttcgcgcgcgcgccgccgctgaggcgttaccacccgctgagcttcgcggcgcgcgggacggcgcggaacttcctgctggagccgctgcggagcctgcaggatgagttctacaccgtctattttagcctcgtctccgacggcgagagctgattgatcggtgtgctcctgaacgaacgctccgctagtttcgctgtgcaatgagccattgacgctctgtatcccccatgaactatgtgcaatttggagtggagtaaaaatgtatggcgctagttccatgaatccatcaaaattcccttaaaaaaaaaaaaaaagaa

SEQ ID NO: 268592 - DNA, 491 bp, Zea mays
tctagaccgccagcgacccgcctggtaatttgatgtctctgaaattataaaaaaaataggggcatctatcatgaccacaaaagatgaatatacaatttaaatcttcctcacatgccatacaattcaatgacaggcagcatcagacgcaactttgtacacattaactgactcaagtactggccatcaaaaccgaaatagaataaaggaacaatggagagggaaaatagaagaggattcacacagaatccagcaagaattccaaataaaaaacaaggaaaaagattattaacaacaaacgatgatttgatgccttcaggacgatgagatttttgaaccatcaaacaggcactgaaagtttgcttggcaaagcaagcagtccaccttttgacattcattagttttcagaaattcaggtatcctcgacctgagaatggaagccaaaactcgaaaatgttccacgcgtccgcccacgcgtccgcggacgcgtgggt

SEQ ID NO: 268593 - DNA, 777 bp, Zea mays
tactacattgcagatgatctgggcaatgtggatgacggcacagtggggcactccttcacattcaatggcagcaacttggaggagctcgcccacaagttgcaggaggagaccggtctggaggacatcattgtatgcacacgcagccctatcaacgggaagctcactcctctccgtctgcagctgccaccgaacaacgcagcgatgcatatcgtgctcgtccaggagtcctcaaaggtggccaaatcatttccttggccatatggttcataaaccacaaataaccttttggcggagacagggccttgagttctggtggattgttcatctcttctgaagccccccgcacatcatccgatcagggcatgccggttgtgcagttacaccgggctatcagaagcaagctaccgtaaacttcatccgtgtacagtaaaaagatgcacctcctgtagtatatatagcctaaaaccagcggagattagtcgtgtggtatactgagagatgtgttccattaattaatttataccctgaatcgtgtatccttggttttatattggttgcacatactcgttgcagagtcggctcattcttcctatagaaaataggagtatcaaaacatttatatttttcaaataggattattataaaaatatactccatacttaatttattattagtgtatatttatgtatagatttagttaaactttgtaaaatcctgaccagtgaaaagcgacatgcgcgttcattttccaaaaaaaaaaaaacaaaaaaaagggaa

SEQ ID NO: 268594 - DNA, 470 bp, Zea mays
atcatcatatgcacacgcagccctatcaacgggaagctcactcctctccgtctgcaactgccaccaaacaatgcagcgatgcatattgtgctcgtccaggagtcctctccggtggctagatcatttgcacggccgttcggttcataaatcacaaaccttcggcgaagacacggtggggccttgagttctggtggagtgtgcttgtgcgtgtcgctcgaagcccgtacatcattggatcaggtcatgccggttgtgcggtcacgctgggtgtcagaagcaacctagcttaaacctcattcgtgtacatgtaaaaggatcccccctacagtatagttaaaaccagcggagattcatcgcgtgatatgtggagagatgagttccattgattaatttatttatactagttgagattctggccctgtatcgtacgtatatcattggttttgtattagttggtcaatagaatttct

SEQ ID NO: 268595 - DNA, 237 bp, Zea mays
acggccaaatcatttccttggccatatggttcataaacctcaaacctgtggcggagacagggccttgagttctggtggagaaaatgccggttgggcagttacaccgggctatcagaagcaacctaccgtaaacttcatccgtgtacagtaaaaagaggcacctccgctagtatatatagcgtaaaaccagcggagattagtcgtgcggtatactgagagatgtgttccattaattaa

SEQ ID NO: 268596 - DNA, 1365 bp, Zea mays
cggacgcgtgggcgactattaacatgctacgcagggttgagccatatgcaacatatggccatctcgcccgtcacccgtcaggacccggaccaaaccaatcaggcggctcgggcgcggcggcgacacagggcaaggaggccggacgttggggggaccggggctcgacgccagccgtggatcgcgtgcggagggggacaagcgtctgcctcatgtcccgcgacggcggggaatagggcgacggcgtcggcggcggggatcggttgcggcggcgtgacgaggcggctgcggcggcggctcgggagggaggcggcaccatgtctgcggtagtctgtggcaagaggtcctcctccatcttcgccgacgagctcctcccgccgtctccttcctcccctcactcctcccaccagccggcggccaagaggtcccgccgctccccctcgcaccgcggcggctccgacggactccgaccggaggcgctcgtcgactatctacttgccctcttccccgacatggatccacagttgcttgaaaaagctctggaagcatctggagatgacttggattctgcgataaaaagtttgaatttgctacgcttagagtcagcagaggctatcttgtcatctactggtttcaaatctgaaaatggtcagcatactgcaattcagcctgctgttgaaggaatttctaatggtggtgtggatacgactacagaacatcatcctactgtagataattaccagacaagtaaaaatggctctgaatgggttgagctatttgtcagggagatgacaaatgcttctgacatagatgatgcacgggctcgtgcgtccagagctttggaggctttggagaaatcaattgtagagcgtgcaggagctgaagctacacagaacctgcataaggaaaacatgatgctcaaagagcagttgactgttgttctgcgagagaactccgtgctgaagcgggcagtcgccattcagcacgagcgccaaaaggagttcgacgagaggtctcacgaggtccagaacttgaagcaacttgttctgcagtaccaggagcaagttaggactctagagatgaacaactacgccctcacaatgcatctcaagcaggctcaacagaacagctccatacctgggcgtttcaaccctgatgttttctaagcgtagtagctgctgaacggtccgccccagattaataagctatgtatgaatatatcttgttctaccaactgctcctgagatggggatatccgataggtggattaaccgcccaagggtccagaattttcaagtcactatgtttttgatttcgatatactccgtatttatttaaacgtgttgctttcatgcaattggctatcgg

SEQ ID NO: 268597 - DNA, 520 bp, Zea mays
ctcaggacccggaccagacaccaatcaagggcgtctcggctcatcacaggcgctgcggcaaccagggcacgcggcacggaggtcgattggccgaagttgggggaccggcgctcgacgccccagccgcggatcgcgtgcggagggggacaacgcgtctgccccatgtcccgcgacggcggggaatagggcgactgcgtcggcggcggggatcggctgcgccggcgcgacgaggcggcggcggcggcggctcgggtgggcggcggcaccatgtctgcggtagtctgtggcaagagctcctccccctcgcaccgagagggctccgacggactccgaccggaggcgctcgtcgactatctacttgccctcttccccgacatggatccacagctgcttgaaaaagctctggaagcatctggagatgacttggattctgcaataaaaagtttgaatttgctgcgcttagagtcagcagaagctatcttggcatcgactggtttcaaaccctgaaaatgtttgcaaa

SEQ ID NO: 268598 - DNA, 679 bp, Zea mays
gacccactcgtccgatgcgttctttcttccagcacatctgccatactagtattatcagcaattgtccatcgcagcgcatatgtctttctcatcgtgaatggaggtgggtatagtaccagacaacatggcaacaacagacatgccaagctccggtatcctgctgacgcctgctggggccatcagcctgttctcgtcgggtccttcgctccagatgccgcttcacttggcctccatggacagggaggccagggtgctgaggtacagggagaagaagaagagcacgaagtttgacaagaccatacggtatgccacgaggaagacgtacgcagaagcacggccgaggatcaagggacgcttcgcgaaaagatcgtctgatatggatgtcgaagtggatcagatgttctcagctgcggctctgtcgtctgatggtagctatggtaccgttccatggttctgaaggaactttagtgagacattatatgtatcatacagtataataattgtaacatgcgttgaccatatatagtggtaaggtcaagtacaagtagttctaggaaaccgatggtaatgagtgatattgtggttgttttgaaagataaatgaacaaatatcttagcatttgagttttggtttgtaattgcatgcacatatcaggtctatacagaattttcagtcactt

SEQ ID NO: 268599 - DNA, 1317 bp, Zea mays
gtctgcttccattctgttcaagttagcgccgctaatccgctccctattcaccatccaatccaatcggcttcccccaggcacccatggcgacggcggtggaggttcccgtggaggcgccggtgaggacagtgaaggtcaccaatgtctctcttagtgcaactgtgcaagacattaaggagttcttttccttttcaggagatattgatcatgtggagatgcagagtggtgatgagtggtcccaagttgcatatgtcactttcaaagatgcacaaggcgcagaaacagcacttcttctttcgggtgccacaatagttgatctttctgtcatcattgcacctgctccagagtatcagccacctcctactgcctctgctccaccaatgagtggaaccagagttccagttggtggtggagacaacaacgttgttcacaaagccgaggacgttgtgagcactatgcttgccaagggtttcgtgctaggcaaagacgcggttggcaaggccaaagcattcgatgagaagcatggcttcacatccacagccggtgctacagtggcctcaattgacaagaagattgggctgactgataagatcacgacaggcacttccttggttagcgggaaggtgaaggagatggaccagaagttccaggtctccgacaagaccaagtctgcactcgctgccgccgagcagaaggtgagcagtgccgggtctgccatcatgaagaacaggtacgtcttcaccggcgcgtcatgggtcaccagcgcgttcaacaaggtcgccaagaccgccacggacgtcgggacgatgaccaaggagaagatggccgccgaggagcatcacaagggctctggcccgtcttctggcggccactcgtacacgcccatccgatgattcatgcattggcttgctgttacgtgcctcactcaaacggtgttgtactgcatattggtggatgtaaaacatggtcttttagtcccaactcttattatgttgtggttagctagagttgaaacctaatagaaaccacaagttaaggttcaagcacatgaatacctattttccatacacatatatttaaagttaaattttgtactcttatcattttaagtcttctttatcgtctttccacatattaaagttggtatttctctatatctctttccatagctgtcgcgctttaggatactactatgtacgagtgcttctagcactctgaaggtctcttaaccggctgtgaagtttttttttcaaaaaaaataatggactacacaaacatttattctaatgacttaaatattaagaatcaatctgagct

SEQ ID NO: 268600 - DNA, 553 bp, Zea mays
aagggatttaggacgtcgtttggtctctttgccttcttcctccttcctccaccctgccttgcccaaagtagtcagtcgtcatcgtctcttccgatcgcctcgagttcattacagttagcgccgctaatcccctccctaatcaccatccatccatccatccggtaggattccccagccatgtcggcgactgcggtgaagtttcccgtggaggcgccgccgaggacagtgaaggtcaccaacgtctctcttagtgcaaccgtgcaagacattaaggagttcttttccttttcaggagatattgaacatgtggagatgcagagtggtgatgagtggtctcaaattgcatatgtcactttcaaagatgcacatggcgcagaaactgcacttcttctttcgggtgccacaatagttgatctttctgtgatcattggacctgctccagagtatcagccaccccctattgcctctgcttcaccaatgagtggaaccagagttccagttggtggagacaacaacgttgtccacaaggccgaggatgttgtgagcactatgc

SEQ ID NO: 268601 - DNA, 775 bp, Zea mays
gttaacgttaattcgatcatgcacactgggggttttgtcgacgccgaagatatgaacttgagaaaacataaatatagaagttggttaggatactcaaatagcaagctggcacaggtaaaattcagtagcatgcttcacaagaaaattcctgcagaggctggcatcggtgtagtttgcgcttctcctggaattgtcgacacgaacgttgcaagagatcttcctaagattgtcgtagccgcgtaccatttgattccctacttcatatttgacgctcaagaaggttctaggagtgcactgtttgcagcatccgatccccaagtcccggaatactgcgagacgctcaagtcggaggactggccagtttgtgcctgcattaactatgactgtagtccgatgaatgcgtctgaagaagcgcacaatcttgagacctcgcagctggtctgggagaagacactggagatggtcggccttccgccggatgccctggagaagctcatcgccggagaatcagttcagtgccgttacggacaacaggatacaactttttagttagcagtttagaggtggtttgttcggttgttatgtcattttgatcctaaatttgcagggaggaaaacacagggaagggagaaaaagaatttgttgacagctaccaatctttgctctttttctgtatgtgtgcaagatgttgtgaaggaggcgtagaaacacatctcccccattatttgactattcctaatcaatgatatccttgagacagaaattaagagatact

SEQ ID NO: 268602 - DNA, 689 bp, Zea mays
tcaccaccggcgctcgccgtgctgtccgagccggcgaacgcgctctcgctgcccacctgggccgtccacgtctccagcgtcgccgagtgggtgacggcgatgtggctggtttgggactacggcgagaagacggggctcaagggttggaaaggcctctcgtgggggatggttccacttctaggtggagcaatgtgtgcttgcacgtggcatttcttctacaattcagagtctcttgaagtccttgtagcccttcaaggtgctctgacagtggttggtaacataacaatgtgcatagctgcataccgcatattcaaagcatcccaggaaggctcaaaaacttcgtaggctgcaagattggatcttacagccggtttggcaagggatgctcagccgcatttgaagattgacgttgctgagaacctgagacgatgataggagaagatacagatagccggtcggttggctttaccttgtgaaacagtatgattgtgatggagttgaagaagaacaaagttgcgtctctcctgtaaatacctgtgaaagtaaaccctgaatccggttacagtcttagactatctccagcaaaaaaaaaaaaaaaaaaaaaaaaaaaaaaaattaaaaaaataaaaaataaaaaaaaaaaaagggcggacgttctagaggttccaagtttacttccgcgtgcatgc

SEQ ID NO: 268603 - DNA, 428 bp, Zea mays
tttggccttcttgttgaccttggttggacccaagggtttggagttcgaacgctactctttggactataacaccattcggaattatctgcatgttaggcgggcatggggaaagcaaagagctgagcagcacatccccggggtatgccaagaagatcgggggggcctccgacaaggacggacggatccaggcaatggttacgcagtcaggtgactgactcacaccattcacactctactagctggtagtatttgtactgcattgtagtaaagattaaggaatgtagaagcattgtttgtaatgtgacgtagtggccatgtatacagtagaatgtataggctgcatggcagcagctcagatctgtatgtacatcctgcgctcgccagtttaaaccaaaaaaaaaaaaaaaaaaaaaaaaaaaaaaaacgaa

SEQ ID NO: 268604 - DNA, 817 bp, Zea mays
aaagatacgagggagcatcgacgttgtatggcccccacacgttgagcgcctacattcagggagttccagaaacttgctacagccatggtggcaaacaaagaggtcccgacaaattttcagcccccagacatgttggacaagcaaataggactcctcccaggcgttgtgttcgactccacacctcctggggtggagttcggagatgtcagctcagacgtccccgcaagctcaactttcaggaagggcagtgtcgtgaacgctacattctactcggcgtgcccgaggaatgaccttctcacggacggcacgttcgcgctcgttgagaagctggacggcagcaacagctgggttcctgcctacgacgacgacgactggtcactacgcttcaagtggtcgagaccgtcgaagctgagcccgagaagctttgcgacgctggaatggaccgttcctggagacgccccgtcgggcgtttataggttgaggcattttggtgcctccaaaccactgattgggtccatcaaacattttacagggacctctcgggcgttcgcagtgcgttaggttgcacaccgttgcgttgcgttcgacggcacacctgtcagagaatcgacaccgggtcatatatttactttgcatacctgccacagtatatggacatgttttccctatagtttttacatgctcctgatattaataacgctgtccatcgcccgttctgtttggtcatgacaaatacccaaatcgccatatagctacagactcgatgtgtgtgaaatttctatatattaaagcaggaaagaaatctgttctcaccttc

SEQ ID NO: 268605 - DNA, 865 bp, Zea mays
  unsure (1)..(865): unsure at all n locations
tcgacacaccatacattaagcacttcacgagggaagtggcaaggcggtcttatgacaccgatttgattgttgatggctatgaagattacattactgaggctatagagttcaaggaagagtacgatttcaggctgggtaatcttatggaccactatggcataaaaagtgaagctgagataataagtggatgtattctaaagatggcaaagaatttcaccaagagtagtgatgctgatgcaattagaatggcggtgagatctttgaggaaagaagctaggtcgtggttcaatgagatgagcacaggagaggatggccaagatgccatggaggccaaggcctctgcttggtaccatgttacttatcatcagcagtactggggcagctacaatgaagggtatgatcggccgcatcttattagcttcccatggtgcgtatatgacaagcttgtggccatcaagcaggggaggaatctcctcacgcggatggatcgaaacttgaggttccgttgagcattgccagcaggtttgctcctgtacatatccctgatcgtttgcactcagcactgccagcaagtgtgcatgaacgatctgatgaattaagacgggcaaactgccgcaagctgacgctctggcctacgtgcgtcttgaaactttcggatgctgccgtctaactaaatgcatgttccttgatttccactgggaccttgagtttgaagtgtgtaaatatgctgcttatgatgtttttagtattggacctctatcaactgccgttctagttagtaacaatggttgccagtcatggattaccaggttttcgccgataaaaaaaaannanattaaacaaaaaaaaatgaaaaacttacttt

SEQ ID NO: 268606 - DNA, 269 bp, Zea mays
atcagcagtactggggcagctgatgataagtaacatggtaccaagcagaggccttggcctccatggcatcttggccatcctctcctgtgctcatcagcagtactggggcagctacaatgaagggtatgatcggccgcatcttattagcttcccatggtgcgtatatgacaagcttgtggccatcaagcaggggaggaatctcctcacgcggatggatcgaaacttgaggttccgttgagcattgccagcaggtctgctcctgtacatat

SEQ ID NO: 268607 - DNA, 939 bp, Zea mays
ttcttctcgtccggtgcagtgcttctcgacgaggattatgatgctcggatcacggatgttgggctcacaaggttggtccggatggcgcctggcgagggtggtgataccagtcctttcctgaacggggactttggggagtttggctatgttgctccagagtatgctagcaatccagttggtacgatgaaaggcgatgcgtatgcatttggggtgatattgtttgagcttgttagcgggcaggaggctgctgctgtggttactgacgtgacgggtgaaggattcaaggggacattggtggactgggttaaccagctcaaggcttctggtcgaatcagtgatgctattgataaaccattgcgtggaaagggccatgaggcagagattcaggagttcttgaagatagcttttgcttgcacccagccccgtgtgacggagaggcattcaatgtatcgggttttccacgctctgaagagcatcggagagggctgcgatgtcacggagcagtttgatgagttcccattggcctataacaaggatgattcagacgctatttagctgatgatgctgattgccaattcgattgtggaaaatgtttggtcatgcttattgatgatatatatatttagccttgctatggacagaccggaagcataaatgagtgataagagaacaatatcgaggcaccaaatctagcgccggatgccgggtggtcaattacatcgttgcatcgacaggggatgtgataaccatgtaagctgtaatatcagtttacaattctgtatgttgttttaaagttactgttagtgcctgtagtatctgtgtggaactgcaattcttgatggccaaaatcctagtgtcacctttcgaagttccttcttggaacaaccagcatgttgttcagtcattggattggcactcaatgtttcattaccttcttgg

SEQ ID NO: 268608 - DNA, 515 bp, Zea mays
ttccttcgcgtccggccacgcgtccgcccacgcgtccgcccacgcgtccgcggaaagaaccaaaaaataaccagacaatgagcttaacgcttctccagggctactcctccgctgaggacgacgacgatcccgccgccggcgccggcgctggcaccgagctgagcgagtctggtgattcgtcagccgaggaagccggatcggacgaagacgaggagtccgctcctccaaagccgccccccaagctccgccgccgaccaaaccctaaggggggagatgccggcggcagcgacgggggctccttgctgccctccgcgctggaggccttcgctgatgtctcgggaccaccagattttttgaggcacagggttgccgagccagaggaagggacggaggccctcggtgtactcgatcgccgtgggaaaagaggggagcaaacagccgccttcaggtgctgttgtggtggcaaaaccacagatagttgctatccgcgagcgagttaccacaactggagccaa

SEQ ID NO: 268609 - DNA, 566 bp, Zea mays
cccacgcgtccggccgaggaagccggatcggacggcgacgaggggtccgctcctccgaagtcggccttcaagccccgccgccgaccaaaccgtaagaagggagatgccggcggcggcgacggggactcctgtctgccctccgctctggaggccttctccgatatctcgggaccaccggagttcttgaggcacagggttgcggagcctgaggaagggacggaggccctcggtgtactcgatcgccgtgggaaagaggggagcaagctgccgcctccaggagctgttgtggtggcaaaactcgcagttggttaccacaattggagccaaccctccaggttcagtgacatctggttctgttgatggaaaaagaataataggtgccgcaaatcctggtccagaagatgcagctgatctttggggatgtgtctcaatgtggtgtaccaaagacctactcacatggaagggatgggtttgccctcatggtggtgatagaccggcgctgacaaaagagcccgaaaagaagaagggttccactgtcaaagacatggagaagatcaagaggatga

SEQ ID NO: 268610 - DNA, 522 bp, Zea mays
agaaagcaaagtgcagagcacgagcagcagcaccagtccaccaggccggcgccgcccaaaatctccgcgtccccccacccccccaccaccatggcctccttctttgcggacgacggcgccgacgacctcccgcgcgccacctcccaccccttcgactccgacgacttcggcgccgccgcagccgacgacgctagcgccggcgggtacgcctccttcgccgacggtggcgtcgaggaggtggacgaggagatcaccgtagagtcctacggcgtcccgatccgccacgtctccgggggatactcgccctcgccattctcccccgacctcgagcccaacggcagcgacggcccgaccctgccgccgcccaccgagatggggcgggaggagggaatcctcctccgcgagtggcggaggaaaaatgctatggaacttgagaaaaaagaacagaaggagaaggagctacgtgcccaaataattgctgaagcagaagaattcatgaaagctttttttgagaagaggata

SEQ ID NO: 268611 - DNA, 1622 bp, Zea mays
cccacgcgtccgcccttccacagcgcactccctcaccttcctccacggctccaccatcccctctcccctgccctgcccccaccgccccgcttccttccgccttgctccgttgcttcctcccaccacagtccactccactcgccggccctgcagctcagtatttgactgagactggtggtggagctgctagcagcgagcctgctacttcctggtcctgacggtgcgttcagacctcagaccagtgccgacgacgagctgtgaggagagggcaaggaaacaagcctgtgaggaaggcggcgatggagaggtacgaggtgatcaaggacataggatcgggcaacttcggggtggccaagctggtccgggacgtcaggaccaaggagctcttcgccgtcaagttcatcgagcgggggatgaagattgatgagaatgtccaaagggagatcatgaaccacaggtcactgaggcatccaaacatagttaaatttaaggaggttgtgctaactcccacacatttggccatagttatggaatatgctgctggtggtgagctatttgaaaggatctgtaatgctggaagatttagtgaggatgaggcgagatttttcttccaacaactgatttcaggagttagttattgccactcaatgcaaatatgccatagagatttgaaactagaaaacactctcctggatgatagtatagcacctcggctaaagatatgtgattttggttactccaagtcctctgtgttgcactctcaaccaaaatcaactgtcgggacaccagcttacattgctcctgaggtccttgctagaaaggaatatgatggaaaggtcgccgatgtttggtcatgtggagttactctgtatgtgatgcttgttggtgcctatccctttgaggaccccgacgaaccgaagaatttccgcaagacgcttactcggattatcagcgtccagtacgcggttcctgattttgtccgagtttcaatggagtgcaggcatctgctgtctcggatctttgtggcgaaacctgagcaacggataaccatcccagagatcaagaaccacccatggttcttgaagaacctgcccatcgagatgaccgacgagtaccagatgaacctacagctagtcgacatgaatgtcccctcgcaaagcctggaggagatcatgtccatcatactggaggcccggaagcccggcgacgggctgaagcatgcgggacagctccccggccttgggagcatggagctggatgacattgatgttgacgacatagacgttgaggacagtggcgactttgtatgtgccttgtgacgcggttcaggctgtccggcaccgttgctgcggtggactctcccccactctcctggtctttgtgtcttgctgttattccatgttgtttgtttcagcgagctccgagctcccattttgttgttgtaatatcacatgttttgtgtaaccaaggtagtgacgctgtggataaataatagacgttatgtgttgtattcttgctgaattgttgttcagctccttctgtttgccctgtatgaactgggcagtttcatgagtaccacaatgtgtatgttgatggctcaaaaaaaaaaaaaaaaaaaagaa

SEQ ID NO: 268612 - DNA, 2050 bp, Zea mays
  unsure (1)..(2050): unsure at all n locations
ctacaagcacgtgtcgaatttgagagctactgcaagaccagcaccagatggtaaaccagagccgtttgcgcccctggtgagagatatccctagaccgtctccagatgaaactataaaggactctgtagactcatattttcgagcccttcacccaaatactttctacagatcaatggctgtgacagatcacacaaaggctgataagatataccaagagatcgaaggtcacaagcagataattgctcgcgcccaagtcgcatatgcaaactcgaaaactgaaagtaatactgagggcacaaggcctactcataggactggattccttggtcttattggtacaaaggttgacaccattgaatactgtagtgagcagattaaggaattactgcccaaactggaggctgaacagaagactacccttcatgagaaacagcagcgggctgccattgtcgtcttcaatagtaggtctgccgcagctttcgcatctcagactctccatgctcaagtgtatgataaatggacagttatggaagctcctgaaccacgccagataatatggtccaaccttccaaggaaactatatgataggcaaatcagacaatgtgtggtttatggcattgtctttctcatagttgtgttctatatagttcctctcactgctatcgctgctgttacaaccctggaaaacctggaggcgaactgcccttcctgaagccagtggtggagcaaccagcaatcaagacggtcttggaggcctaccttccccagattgcactcattgtgttcctcgcattgctacctactcttcttatgtttctctcgaaacaagaggggatcccttcgcagggccatgcagtcagggcggcatcgggaaaatatttctatttcatcgttttcaacgtcttcctttgctatacgcttggaagcacattgttcaaatctttgacgaccattatcaatcaccctgctgagattgtgaatatgcttgccaagagcctgcctggaagcgcaacgttcttcctcacgtttgttgcgctgaagttcttggttggctatggccttgagctctctcgcctggttcctctcatcattttccacctgaaaaggaagtacctatgcaagacggaggaagaagtgagagcggcatgggctccagtggatctgggatataacaccagggtaccaaatgacatgctcatcgcaacagttgttctgtgctactcagtcattgcgcctttgattattccgttcggtgtcgcatactttgccctcggatggcttatagcaagaaatcagatcctgagagtttacgttcctagctacgagagctacggacgaatgtggccacacatgcacacgaggatcatcgcggctctgatggtttaccagaccaccatgatcggcttcatctccctgaagaagttcgcctacgcgtccgttctcgtgcccctgcttccagccagcataatcttcgcctacgtctgccacatgcgcttctacccggcgttcgccaagactcccctggaggtggtggtgcggcacgacctgaaggagactccgaacatggaggccatctacaccgcgtacataccgccgtgcttgaagcctgataagctcgaagatctggacgcgttcgaggacgcccagtcgcgcgccacctccagagtcccgtctatttagctgtgcacatcgttgacttccgcggaagacttgaagaaattctgttcacttgtcattacattcgtgtgggatttctgatggatttcaatgcttccacgttgaaccctctggacttgtttcaggataggaatctgatgtgaagaatgtacatatgctcgatctgtgtgtctgctgagcgtgtgtggatgtggactgctgtaggtaggtagatgctgtggatattggagggttctaagttgtcttcatttccatccatccatgcgcgtgtgtttactgcagactgtcaaccgtgttgctgtgttgtcggacggtcgttccagagccaaaccttaaagtcaatccccctaaatatagtttgatttanacaatt

SEQ ID NO: 268613 - DNA, 621 bp, Zea mays
ttgtttcgagcgaggaaaaggcaaagttgagcggcatggacatggatcagaggcttggatggctgtgggagaattgccgggagacctacgacgatgcaaagacaggcctacgaacaaactactacggcacaaagcaagtaatcgagactttactgcctctactgcaagcctcctccgatgggaggatcgttaacgtctcctcccacttcggccagctaaggcttttccgaaacgaggagctgaagcgggagctgaacgacattgacaacctcaccccggagaggctggatggcctgctggacatgttcttaaatgacttggaggccggcgaggtggagtcgtcgaacggctggccgatgtatttctcggcgtacaaggtggccaaggcggccatgaacgcgtactcgaggatcctggcgaggcggcaccccgagctgcgcgtcaactgcgtgcaccccggctatgtcaggaccgacatgaccatacactcggggctgttgacaccggaggaaggtgcagcagggtggccatggtggcgctgctgccgggaggcgggccaaccggcgcgttctttgaagattttcaacagtcgtcgttcgtgtgatgttgaacatgcagctg

SEQ ID NO: 268614 - DNA, 849 bp, Zea mays
cccacgcgtccgggaacagatcaagggcatggacgcgttccagatggcggagctgatgcggaagagctgccgggagacaaacgacaccgcaaaggcaggcgtccagacgaactactacggagtgaagaacgtgaccgaggcgctgctgcctctgctcctgcaggcctcctcctccggcggaggaagggtcgtcaacgtctcctccgacttcgggctgctacgctatctcaggaacgaggaggtaaagcatgagctggacgacattgagggcctgacggaggagaggttggacgagctgctgagcacgttcctccgggacttcgaggccggcgcgctggaagcccgcgggtggccgacggagttcgccgcgtacaaggtggccaaggccgccctgaactcctactcgagggtcctggcgaggcggcaccccgagctgcgcgtcaactgcgcgcacccgggctacgtgaagaccgacatgaccaggcagacgggcctgctgaagcccgcgcagggcgcggccaacgtcgtcaaggtggcgctgctcccggaaggcggccccaccggagctttcttcgcgctaggcaaggaggcgccgttcgtgtgacgctgccgtactgggctggcggtggtggggacttcacggtccggcgctagtgcgccgcctctccgacttgcctggcgcctgctatctactacctctctgctctctgtgctgcgcagcgtaatttgctggtttgggacggcgaataaagaaaggatcgctgctgcctcttagttagttgggttctgtcagtactaagcttcggtaataaaatacccctagatatgaccaaaaaacggacgcgtggg

SEQ ID NO: 268615 - DNA, 1733 bp, Zea mays
taaatcagccacacgctcgccacccatggccgccaccaccaccaccaccacagcacaggcccactgccaccgctaccgctaaccatggcctcctcagcgcccctgcagcggttcctcctgccctccccgcacgcggcggcgacggcggcctcgccgtcctcccggctgcgccgcacagggcgcgcccgcgcggccgtctccgtgccgccgccggcggcggcgggggagcaggtcccgacggagcggctggagccgagggtcgaggagcgggcgggcgggtactgggtcctcaaggataagtaccgggcggggctgaacccgcaggagaaggtgaagctggagaaggagcccatggcgctgttcatggagggcggcatccaggacctggccagggtccccatggagcagatcgacgccgccaagctcaccaaggacgacgtcgacgtccgcctcaagtggctcggcctcttccaccgccgcaagcaccagtacgggcggttcatgatgcggctgaagctgcccaacggcgtgacgacgagcgagcagacgcggtacctggcgagcgtcatcgaggcgtacggcgccgacgggtgcgcggacgtgacgacccggcagaactggcagatccgcggggtgacgctcccggacgtcccggccatcctggacggcctccgcgccgtcggcctcaccagcctgcagagcggcatggacaacgtgcgcaaccccgtcggcaacccgctcgccggcgtcgacccccacgagatcgtcgacacgcgcccctacaccaacctgctctcctcctacatcacaagcaactcctatgggaacctcgccatcaccaacctgccgaggaaatggaacgtgtgcgtgatcggctcgcacgacctgtacgagcacccgcacatcaacgacctcgcctacatgccggccgtcaaggacggcaagttcggcttcaaccttctggtgggcgggttcatcagccccaagcggtgggccgaggccctgccgctcgacgcctgggtcgccggagacgacgtcgtccccgcgtgcaaggccatcctcgaggcgtacagggacctcggctccaggggcaaccggcagaagacgcgcatgatgtggctcatcgacgagctcgggatggaggtgttccggtcggaggtggagaagaggatgccgaacggggtgctggagcgcgccgcgtcggaggacctcgtcgacaagcgctgggagcggcgggactacctcggcgtgcacccgcagaagcaggaaggcctgtcgtacgtgggcctccacgtgccggtgggccggctgcaggccgcggacatgttcgagctggcgcggctcgccgacgagtacggcaccggcgagctccggctcacggtggagcagaacatcgtgctccccaacgtcagcaacgagaggctcgacgcgctgctcgcggagccgctgctgcaggagcagcggctctcgccgcggccgtcgatgctgctcagggggctggtggcgtgcacgggcaaccagttctgcgggcaggccatcatcgagaccaaggcgcgggcgctgcaggtggcgcgggaggtggagaagcgcgtggccgtgccgcggccggtccgcatgcactggaccggatgccccaacagctgcggccaggtgcaggtggcggacatcggcttcatgggctgcctcaccaaggacagcgacggcaagatcgtcgaggccgcggacatcttcgt

SEQ ID NO: 268616 - DNA, 1076 bp, Zea mays
ctgggaggggcctgggttgtggtggacagcaagatcaatccagaccacatcgagatgtatgccgagaggactgcgaaagggaatgtccttgagcccgaaggattggtggagatcaaattcaggccaaaggaactggaagattgcatgctaaggcttgacccagaattgattggtctgaatactaggctgaaagagatgaagaaacaaaatgccagcatctcggaaatggagaccatacggaggagtatgactattcggatgaagcagttgatgcctatttatactcatgttgccacacgatttgccgaattgcatgacacctctgctagaatggccgccaaaggtgtgatcggtaaggttgttgattggaaagagtctcgggccttcttctacaggagattgcgaaggagagttgctgaggatgccctggccaaggaagttaaagaagctgctggcgagcagctttcccacagatcagcattagactgtatcaagaaatggtatctagcgtccaaaggaactgaaggtgatggtgaaatgtggaatgatgatgaatctttctttgcttggaaggatgatcccaaaaactatgagaattatcttgaggagttgaaggctgaaagagtatcgaactggttctcgcatcttgctgaaagttcagacgtgaaagctctaccaaacggtctttcgctgctccttaacaagatgaatcctttgaagagggagcaggtcattgatggcctcaggcagcttcttggttgatcgatggtggcaaagtggagcatgaagccctgtttagttgggaacggattgttctggttgtagtcatgtatttagctgtttaacatgtatttaattgggtggcgttactccacgtcatacggtacaacagcaatcctgatcaagtgattatttattcttcaatcgaagtagtacatgattttcatcagtaagctttgtgcttgcaattagggataaaatcggatgcaaatgaactgaaagaacacttattttcgtttctatatattttttttatgaaaagcaaaataaaaaaaagggcggccgtcgcgatctag

SEQ ID NO: 268617 - DNA, 500 bp, Zea mays
cgctgacagcgaagctgaggagaatcccaagaaacagagctggtgaaattgcattgtcgcaacaggcaagcgaagaggagaagaaagaaatggctgcaatacctgcagcgatcccgggctgctgctcttcgtctcgcctgcctcagcttgctggcctccctgcctccacaagcagaaggcgcttcaaggtcacggccatggcgcccaaaaagaaggtgaaccgctacgacgagagctggtcgaagcagtggttcggcgcgggcatcttcgcggagggcagcgaggaggtgtccgtggacgtgttcaagaagctggagcggcgcaaggtgctgagcaccgtggagaaggccggcctgctgtccaaggccgaggagctgggcctgacgctctcctcgctggagaagctgggcctgctctccaaggccgaggacctgggcctgctcagcctcgtcgagaccgcggcggggacgtccccgtccgtcctcgcctccatctcgctg

SEQ ID NO: 268618 - DNA, 1522 bp, Zea mays
cggacgcgtgggcggacgcgtgggttctcctccaccgtcggagctccggcctccaccccgaccaggagcagcttcctcgggaagaagctcaacaagccgcaggtgtccgcggccgtgacctagcatggcaagagctccagcagcaacagcaggttcaaggcgatggctgccaaggaggtggacgagacgaagcagaccgacgaggacaggtggaatggcctggcctacgacatctcggacgaccagcaggacatcaccaggggcaagggcctcgtcgacaacctcttccaggcgcctatgggggacggcacccacgtcgccgtgctcagctcctacgactacatcagccagggccaaaagtcttacaacttcgacaacatgatggatggcttctacatagccaagggcttcatggacaagctcgtcgtccacctctccaagaacttcatgaccctgccaaacatcaaggttcccctcatcctgggtatctggggaggcaaaggccagggaaaatcgttccaatgcgagctggtcttcgccaagatgggcatcacccccatcatgatgagcgccggcgagctggagagcggcaacgccggagagcccgccaagctcatcaggcagcgctaccgtgaggcctccgacctcatcaagaagggcaagatgtcctgcctcttcatcaacgacctcgacgccggcgcgggtcgcatgggcggcaccacccagtacacggtgaacaaccagatggtcaacgccaccctgatgaacatcgccgacaaccccaccaacgtgcagctcccggggatgtacaacaaggaggacaacccccgcgtgcccatcatcgtcaccggcaacgacttctccacgctgtacgcgccgctcatccgcgacggccgcatggagaagttctactgggcgcccacccgcgaggaccgcatcggcgtctgcaagggcatcttccgcaccgacggcgtcgacgaggagcacgtcgtccagctggtcgacaccttccctggccagtccatcgacttcttcggcgcgctgcgtgcccgggtctacgacgacgaggtccgacggtgggtgagcgagaccggcgtcgagaacatcgccaggaagctcgtcaactccaaggagggcccgcccacgttcgagcagcccaagataacgatcgagaagctcttggagtacggacacatgctggtggcggagcaggagaacgtcaagcgtgtgcagcttgctgacaagtacctcaacgaggctgctcttggtgaagccaacgaggacgccatgaagactggctccttcttcaagtagaaagcaactctttgctattgctagctaggcgcgaggccggcataggatcgaggaggtgaatatatatattacttggatagttttgtaatatatatatatatatgatactgaaccaggacatgcatacatatattcgtctatataatggatcatgtatatttcaaaaaaaaaaaaaaagggcggccgctcgcgatctcggacgcgtggg

SEQ ID NO: 268619 - DNA, 564 bp, Zea mays
taacgatcgagaagctcttggagtactgtcacatgctggtggcggagcaggagaacgtcaagcgtgtgcagcttgctgacaagtacctcaacgaggctgctcttggtgaagccaacgaggacgccatgaagactggctccttcttcaagtagaaagcaactctttgctattgctagctaggcgcgaggccggcataggatcgaggagggcgccaccaaaatgcattggagctaacgaacagcgaggggcgatcatggcagcagctgccactacatcttctaaacttgccatttttattatccctgatccatgtattactcttaatttgtacgtactacaatacgggatctggccaagcgcgatatatagctgggcatgcaaagtttttgtcgatgttttttttttgaaagaaacaaggtagaagggctagctgtgcttgttaaattaaaaagaaggtgagccaagactagcagaacaaggctgtacaaaaaaaactacacaaagtgtgccaaagaagaactctcagtgtcggcctatatatctaaattgcatatgttttactcc

SEQ ID NO: 268620 - DNA, 519 bp, Zea mays
cagaatcaaaaatatctgcctgcccccctaccgatggccgccgcgttgtagttgtagtgtaacctagccacacgacgcatccgcggttcatcggcctcgcaggaaacgagcgtcgagcaaaaggtcgaattctcaactctcaagcaccagcaggaatcgagcgagcgagcgagcagtgtccgccccccatggccatggtcgcgtccacctccttcgcgtaccacaagccgcgtttcgcggtggtgtgcaggaagaacagggacggccgggacagggagcgggacggcaaggagcacaagcaccccttcaaggtcgtcgagatcacgccgcctccgcggtgcctcggcgtccgctgctttcccaccaacatccactgcggcgagagcgtgacgatcgaggggcaagcgtacacggtgtcggcggtgacgcaccggtaccagctgcgcaaggggcggtacgagccgagcgagaagcgcctcgacgtcctcttcaccggcagatacattctcaacctttacc

SEQ ID NO: 268621 - DNA, 995 bp, Zea mays
gcgtggccgcctgcagcgcgccggggcgtaattgccgggatccgcaccgcgtccgccctctcttcctctcccctccgccgctccccccagtccccacctcacctcgtcaaccccctccttggatagggttagagttcccccggcacgagcgcgagccatggcctccttcacctgctcccaggtcggcgctgcggcagcgggcggagcctcgcccttcctcggctaccggcggcggagcggccccgggggcgccattccgtcgagctccctcttcgtgggccggcggttggcggcggtgcagatgcgcgcgccctctcgcggggtccgcgggggctccgcgctgcgggtcacgtgcgagaaggtggtggggatcgacctgggcaccaccaactccgcggtcgccgccatggagggcggcaagccgaccgtcgtcaccaacgccgagggcgcgcgcacgactccctccgtagtggcgtacaccaagacaggggagcgcctggtggggcagatcgctaagcgccaggcggtcgtgaaccccgagaacaccttcttctctgtcaagcgcttcatcggccgcaagatgtctgaggtcgacgacgaggccaagcaggtctcgtacggcgttgtcaaagacgagaacggcaacgtcaaactcgactgccccgctattggcaaacagtttgctgccgaggagatctctgcgcaggttttgaggaagttggtggatgatgcatctaagtttcttaatgagaaaattacaaaagcagtggttacagtaccagcatacttcaatgattcacaaaggacagcaactaaagatgctggccgcattgcaggactggaagttctccgtattataaatgaaccaactgctgcatcattggcctatgggttcgagaagaaaaataatgaaacaattctagtgtttgatttgggaggtggtacctttgatgtctctgtattggaagttggagatggtgtgtttgaggtgcttt

SEQ ID NO: 268622 - DNA, 415 bp, Zea mays
gttcctaccttcctccccgtcctatcctctccctcgccatcctcgtctccgccgccgccgctccccctcggtccccgccccacctcccgttctctccctccttggatagggttagagactgagctcccccgcacgcgcgcgagccatggtctccttcacctgttcccaggtcggcgcgacggcagcgggcggagcctcgcccttcctcggctaccggtggcggagcggccccgggggagccaccccgtcgagctccctcttcgttggccggcggctggcagcggtgcagatgcgcgcgccatctcgcggggcccgcgggggctccgcgctgcgggtcacgtgcgagaaggtgggggggatccacctgggcaccaccaactccgcggtcgccgccatggagggcggcaagccgacc

SEQ ID NO: 268623 - DNA, 1091 bp, Zea mays
cccacgcgtccgcccacgcgtccggcggaacgacgcacgcggacgcctccttgttccgggtcctactcccgccgcctagaggcctcgccctcccccctccggcgaaaaccgattctctccggcgtttcctggtcccttagtgcaagcaaggacaccgctcctctagcgagctccgttctgaagcggcaagaaagatgattaatcttttcaaaataaagggtcaaaagaaagaggaggcagcaagtgctgctggaaaggcccctgttaagaaacagtctgctggggagctccgtcttcataaagatattagtgagctcaacctgccgaagaccacatcaatttcttttcccaatggcaaggatgatctgatgaattttgagaccaccatccgacctgatgaaggatattacatgggaggcactttcgttttcacctttcaagtgtccccatcttatcctcatgatcctccgaaggtcaaatgcaagaccaaggtgtaccatccaaatattgatctggaaggcaatgtctgtctgaacattctgcgcgaagattggaagcctgttctcaacatcaacactgttatttatggcctgaatcttctttttacgcaaccaaacgacgaggatcctctgaaccacgaagctgcagttgtccttcgtgacaatccaaagatgtttgaggcaaatgtgagaagagccatggctggaggctacgtcggccaacactatttccaaagatgtgcttgacttgatgtggtggtggcttgaaaacgatcaacagagcccctccccctgtatcagcaccagcgcgcccagctttgtgtgcggaaagtacttctggaagcaaaatccaaaccgttcatggtgtgatactgtgatgcatctgtttgcccgcctttgtgatgtgtggtatagtggtggtgcataatgacatggaaatgcttctctaactgtatcattcattccataaatcctaaacgaggaatgggaagtggattgttaagcagattccttctgcagatgttgatatcgtaatcggcggtattcattgtcgcattttccaggtcgacgttgacatgcacgtttagcttt

SEQ ID NO: 268624 - DNA, 622 bp, Zea mays
  unsure (1)..(622): unsure at all n locations
cggacgcgtgggcggacgcgtgggccagaggcacagacgagacgacagagatgaaggacggaacgtcgtcggggggaggggcgttcgctgcgggcagcgatccaaggcagccgtcgacggcgaagccatacgcgccgccgaagctgtcgccccaggacctacccatcgactatgcaggcttcctcgccgtcgccttcggcgtcctcggcgtcatgctccgctacaaggtgtgctcgtggatcgcaatcatcttctgcgctcagtcgttggcaaacatgaagaactttgagaacgatctgaagcagctttctatggccttcatgtttgctgttatgggtctggtgacgaactattttggccccgctcgtccaggcagtacaaagcgctaaactgcggaagaacatgtgctacattcttcataggactttttggtgcttccgatagctttgccatcggtgctgacattatgtatgtccaatttgagcaaacgtcataggtatgggcatcaaattaatggaccggtacatgtatgatgctcaataatntatttgtgcaatactagtaaacgcataaactgtttgaacgaatacttggtttctcccgatatgttgatcaatgtttc

SEQ ID NO: 268625 - DNA, 669 bp, Zea mays
cggactcgtggtcggactcgtgggcggactcgtgggtgagatctgcggtggggccagggatctgatgtaaatagattattcagggggtttttcccctttgagcaacaccccggaggcgctatggcagctatttgtgcagtgatcagctaagcacctattgctgtattatttgtttgttgcagcagagttgaatgtgcattcttcgccttatggaggaggaatttatacagtgtggggttgccttcccctgcactttggcaggttagtgaagtgtgccctagaggaaagtggcatgtttgagagcaatgagattgcagggggctaaaatcccctttgttatttaaaattaaatagaagaggaatttagcctctcggatcccctcaattcccctgtatcccaaacaaaccttgaagtgttttctacagctttaggaaatgtggtttacttctatggtaggtacatgggcaaccaatgtatatacatttatttttacagcatcctggccccgttcatccacaacgtgttgcacatgtctagcctctccattgcaagggcgtacagatatttatataaaaatctacacaatgcatgcgcatgcaccgtagtgtatctgtatcgaccatgaaaggtttggttcaaatctgaaaaagtatacatttgttgtctaa

SEQ ID NO: 268626 - DNA, 565 bp, Zea mays
ggatcttagggtatgtcctttccatggaccgattgtcccacgtgatgcagaaggaaatccaattgagcagaacagtggtagttctgatgcagaagtaaatcctgttgagcacttagacattggaggacattcaaatgagcttaatggaatcagtgatgatgattgtatggagggaacctcttcaagaatggcaggtgtcaataatgattatggtgacatagcgggaacttgtgatctaggtaagattactgcagagcagttagcaagacaatcagttaagaatgtccggcaaagagaaatggatcgcaaggcacaggaaagggcccaacgtgcaagaatccgtcagcacaatgaagatgtcctgcgaaatgcggctcttgcttcaacttcctattctgcatcatcctatgagcagcctacagaagcacatggtcggcgaggacgccgatgtaaggcaaatgcaccaacgctggcatcgatgctgaaaaagaaagttaccaccaaagacataattgcatagaggcttttgaacactcgagccacagatgccacattaagggatgtt

SEQ ID NO: 268627 - DNA, 318 bp, Zea mays
attttgaagaagctgcttttgcttcggctacatgctatactctcttttggtttattactcgcacgcgaactcggttggtgtgaaagaaattgttttctacaaaaggaattataatatgtgggttcccttgtcatgaagtattacagtcaaccttatcaacatcatgagtatcgtataggtctaccatcatatcactcttgtctctctgtgtgtactcgcttgtcaatggatggcttgtaacctcaacgattattactcaaaaaatatatcttttctgaatttgtggtttcacagacttgtttgcacgagaaatgtcat

SEQ ID NO: 268628 - DNA, 523 bp, Zea mays
caagttctagatcgcggccggctcgcgatctagaactcacacggaacactcagtgcctgcacgcacgagcgaattaccaggcgtttgcgatgggcggagaggccacgaatgccggcggcgggggtatccgcgcgcggatggagcactacctttacagtggcgagaagaagcacgtcgtcgccggcatcgccatcttcgctgccgtcttcggcgtcccatggtacttcatgacgcgaggggcaaagcatcaatctcaccaagattacatggaaaaggctaacaaggcgagatcagagaggctttcttctggacagtcatctgcactaaaagaatgaatgttgtattgcctattctggtccctgaccttcagagcttgtcatagatcatacactgtattgatttgcactcaacggatttgatctgttgttaaataagcagggtatctttctttctaatatcaggtgtggaaacgaggtacgttccaagaattttgtctactggtgatctttttttgggtctaatg

SEQ ID NO: 268629 - DNA, 632 bp, Zea mays
gcagttcaacacgggaacgactgcgcctttcatcataaagtgcggagcaaattccagtggtgaactggtgattaaggctgatctgcgagtccaggagcctaaaggtggcgaggtgatccgtgttgttccaagaccaacagttcttgccgacttgagttttgaggaaataaaaggtgtgtttgagcaattgccagaggcagttagcttgcttgccttggcacgaacagcagatggtacaagggccaggtattcaagattgtacagaaccttagccagcaaagtgacggccttgaaagagactgttgcagagatggagagaggtggtgttttcaaagatgtacgataaatgctgtgttattgtagagttatttatgatattgatgttgtatatggatgccatttgtcggcatcccttgtaactgtatttgtttttactatgtggaaacctatgttgtaacactattctttggcaagagatgagccttgcctgccccaacccgtaatactatggttgtgcaaggcatcaatgtaaattgtagctgcagctgataaatgtctgcagtgctgcaagtctgaacttatcaggctatggaactattcaatgtttatttgtattaagcttttaagatgtt

SEQ ID NO: 268630 - DNA, 816 bp, Zea mays
gacacacgcgctagctagcttaccttgccatcacctcttcgcctagctagcctgccagtgccagcaggtgccaccgccatctctgctctgctctcgcaacgcaagcacacgcccggccgcctgccacagttgccatggcgaccatagccacgatggcgctgctgaagcccgccgccaaggccgcggcgcggtcggcgccgtccaccagcagcggcagcgtctcgctgcgcgtccggacggggcaggccgccaagaaggctgcgctgtccgtgtccgcgtcgtccacgctggcgggcgccttcctcgcggcgctggcgtcgtcgcccgacgctgcgctggcggacgtggcggcggcggacgccggcggcgacagccgcggccagctgctgctcgtcgtggtggcgcccgccatcgggtgggtgctgtacaacatcctgcagccggcgctgaaccagctgaaccgcatgcgcagcagccaggccgttggccgccggcctgggcctcggcgccgccgccgccgtcgggatggcggccccgcccgaagcctccgtcgccgtggtgcaggacctcgcggcaatcgccgccgccgcgcccgccgacgacagccgcggcctcctcctgctcatcgtcgtcgcgcccgccatcggctgggtgctcttcaacatcctccagccggcgctcaaccagctcaaccgcatgcggtccgactgaagctagctagctagcgtccgtttccgtatccgcggcgtgcgttgtagacgtgaagcacgtggttggttgatcaacgtacgtggacgtggcctgtctttccatctt

SEQ ID NO: 268631 - DNA, 446 bp, Zea mays
ctcacaggagctagcttgccaattgccattgcactgcgcgcgcgcacctcacatccgccgccagcaggtgccaccgccatctctgctttctctctctctctctctctctctctctcaagcaacgcccgcctgcccgcccgccatggcgaccatagccacgatggccctgctgaagcccgccaggatcgtggcgcggtcggcgccgccgtccaccagcggcagcgtctcgctgcgcgtcccggcgcgggccaagaaggccgcggtgtccgtgtccgtgtcgtccgcgctggcgggcgccttcttctcggcgctggcgtcgtcggacgcggcgctggcggcgcagcgcgtggcggacgtcgcggcggcggccgacgccgggagcgacaaccgcgggcagctgctgctcttcgtggtggcgcccgccatcgggtgggtgctctacaaca

SEQ ID NO: 268632 - DNA, 429 bp, Zea mays
acgcgcatccgccgccagcaggtgccaccgccatctctgctctctctctctctctcaagcaacgcccgccagggcgacgcgatagccacgatggccctgctgaagcccgccaggatcgtggcgcggtcggcgccgccgtccaccagcggcagcgtctcgctgcgcgtcccggcgcgggccaagaaggccgcggtgtccgcgtccgtgtcgtccgcgctggcgggcgccttcttctcggcgctggcgtcgtcggacgcggcgctggcggcgcagcgcgtggcggacgtggcggcggcggccgactccgggagcgacaaccgcgggcagctgctgctcttcgtggtggcgcccgccatcgggtgggtgctctacaacatcctgcagccggcgctgaaccagctcaaccgcatgcgcagccaggccgtggtc

SEQ ID NO: 268633 - DNA, 378 bp, Zea mays
cgtaagcttggatcctctagaacggccgcgcccgccgacgacaatcgggggctcctgctgctcatcgtcgtcacgcccgccatcggctgggtgctcttcaacatcctccagccggcgctcaaccagatcaaccgcatgaagtccgactgagctgctagctggcaacaacaccggggacggcggagtgtgcgtatcagcggctggacggttgtaatttatagcgtgaagcatggttggtctacgtgccttgttttttccatcttcgaatcttgagcaaatgcagtacatgtacagctccctccctctcgtctcaatctgttacatacatatacacaaaaaaaaaacaagaaaaaaaagaaaaaaaaaaagaagaaaaga

SEQ ID NO: 268634 - DNA, 421 bp, Zea mays
atcttgagcaaatgcagtacatgtacagctccctccctctcgtctcaatctgttacatacatatacacacataccgtatcctctgtggtggttggtcaacgcaaacgctcctcgacgctggacaactcgccggcgagcgctccctgaacgccggcgccggcgtgaaccgtgatagacaagatgcgcgtcgtgcagcgccgcgcgcccctcaccgtcgtcatcggactcgcccctctgccggcgttgcgcgcgcccagctcgcagcagaggcactcacgagttgcgtgtagcctctgtgcttctcctccccgtcgcgtcatgcgcatgcgcttcatgttcgtctaaacagagtgcattgctatatggaacatattaaacagttatgttttttccgtatgcttaattattctagcttttatct

SEQ ID NO: 268635 - DNA, 419 bp, Zea mays
gtcagcatgcctgattgccgtctcggggagtgagtccttgcgtgtgtcagcctcaacgacggctggtactgcgtggatgcgagagctgatcaccagcaccgatgcggaggcgaggaggtgtctcctaagatcctccatggccactgcatgacgaaagaactgaacaaatttaaggtgccaaggtcttattaccagttgaggcagccatttccggtgaccaccacggggtagatcagaacggaggagctgaagatggaactcctggcagcaatttgactgcccatcaacctgtacttttttaggcgatgatctgttttggaacaaatcttggttaatatgactccgatggaagctttttgatttttttgtgttgaagatgcctttaacctttaacttgatggaagtttagaaaccaaaaa

SEQ ID NO: 268636 - DNA, 1108 bp, Zea mays
  unsure (1)..(1108): unsure at all n locations
nttcaactcatcgaactagggatgaccttgcatttgacccttatgtgccaatggagaaggttgctgatgcaaggaaatcacatgtgaagattgcacatgctaacgatatgtccatgacaactgataagtccaaagatttgatacagtcaagttcaatgctggaggcacaaaaggctacatcaggtgctgctggatcaaatactacaggtcaacccgaaggtggctctgattctagaactgtctttgttagcaacgtacattttggtgcaacaaaagatgctctttctcgacacttcaataagtttggagcgatcttgaagacccatattgtgaccgatggtgtcactggtcagtcaactggctcagcgtatattgagttcttgcacaaagaatcagcagagcaggcgtgaaccctgaacggggcatcatttatgttacgcattttgaaggtcgttcggaaaaactccactgaagcaacccgatcgcctggcttgcttcgtgtttcgcggggatcaccatttgcttcaaggctcattagaactgcatacccaaggccaacgtttcctggtgcaatccgtggacgactgccactcaggggtgttgcccagagcttacagtggaagcgcagtgccactgattcctcaaatgctggaaaaccaagtcaggctgcacctgcagctcctgggaatcagttggtcaccccgaccccacgaagcttcacctacacacgcacggagccaaaaccaaatgacggtgcgatggcttgactgctcagctgcagcatgccgcagctcctgatgaatctcgcagaaagagttcgtgatactgttacgtggttcattcagctgcttttggtaaatatttaagtagctgcagatgttagtttgtagcaggctggtttttgtggaccaaaacctttgagcgatattctgtgaggttttctgtgctgtttttcaccgtcagcacatattctgtgctggctggctgttcggagttcgtggatggagagtaaaatatatataaaaaaagtggtagtaagggaaaacccggacgcgataaaaacgttgcaacatttgttattattttttgatggattatttagcccccc

SEQ ID NO: 268637 - DNA, 349 bp, Zea mays
ctgggaatcagttggtcaccccggccacacgaaacttcacctacacacgcacggagccaaaaacaaatgcgggagcgatggcatgactgatcagctgtagcatgccgcagcgtcgcagaaagagatcgtgattgatgactgtttcgtagtccattcagctgcttttggtaaatatttaagtagctgcagatcttagtttgtagcaggctggtttttgtggacctcaaccttgagtaatattctgtgaggttttctgtgctgatttttcaccgtcagcacacccgttgttctgctggctgttcggagttcgtggatacaccgtaaaatatataaaaagccgcttttaatg

SEQ ID NO: 268638 - DNA, 928 bp, Zea mays
ggagaagctaagctgtcttctaactctctctcgagttcatagtttttgctcttcctctctcatggtcacaatgcttgcagctagttctctagtgaacagcaacctcgcttgctcatcaaggatatcatcctgttcagacttcacatatagccactcctggcgtcccatacatgctatgaaactccatcagatgcgtgctgtgagctcaatacgtataagttgtgctgccactaaacctgcaaagactcctgctgaagaagaatggaaagttaagcggcaactgctatcagaaaagcgggtacgaagtgtcgatgtgaaggaagcactgcgccttcaaaaggaaaacaactttgtcattcttgatgtcaggccagaagcagagtttaaagaggctcatccacctggcgccatcaatgtacaaatatacagattaatcaaggaatggacagcgtgggatattgcgaggcgtgcagcgtttgcgttcttcggcatatttgctggaacagaagagaatcctgagttcatacagagtgttgatacgaaggttgggaaagatgcgaagataattgtggcatgctctacaggagggacactgaagccaacgcaaaatttccctgatgggaagcaatctcggtccctgatagctgcgtacttgttggtcctgaatggctacagcaacgtgtaccatctggaaggaggactttacacatggttcaaagaaggactaccagctgttgcaggagaagagtaagagagacattacgaacatagtgttcgcatgctggagagagtggagagtggagactagagttgcgaggacttgtagtgatgtgcttgcttcacagtcacagggttgtcgattgttgtgtacggattgagatgtcgaagatttctcctgccaatgtgatgctgtcctagattttctcgc

SEQ ID NO: 268639 - DNA, 888 bp, Zea mays
gcgagatggagcgcctctccgccaaggagtcattgctcctcgcctttaaagatgctgggggtttcgaggccttagtcagcgggaagaccactgagatgctagtggatcgatgtcaatgagcgaatcgcccgacttgcgcgcctgaatcccacaccgcgccccacaacatcgccgtttctggagggtcgatggaactttgaatggtttggtgatagcagtcctggagcatttgcggcccgtcttttgtttgagaggtcgcctacatcggttgcacactttatgggacttgatgtgttgatcaaggatggatactccaagctctcatctaacctcaagtttctaaacacgatacaaagcaaattcctactgactactcaattgtccgttgagggccccatcaggatgaaagaggaatatgttgagggccttatagcgattcccagaatcaatgaagaatcattgcctgaacagttgaagggcttgcttggccaaactgcaggagctctacaacaacttcctagccctataagggatgctgtttcagaggggcttaaattgccacttagtggatcatttcaacgcttattcatgatctcttacttggatgaagaaatattgattatcagagatgctgctggagcacctgacgtcttaaccagacttgaggggccgcaaccgaatccaggtgacggcacagcagatgcagtgatatcggaatatgaaagctaatgcctcagtgctgactgtagctccgcacctagctcctgtttatggctcctttctcctctttggtcattttctcagtctcgcgcgtatataaagctttctagttctagtgttgtcaaaaaaaaaaaaacttacagaagcaaagcgtagcataataaaaat

SEQ ID NO: 268640 - DNA, 513 bp, Zea mays
cggacgcgtgggcggacgcgtgggggcgtactcctcacggatgccgcaaggaagagggccgggtgcgaggaggcggccgccagcgagcggcccattaagatgatcagaatcggcgagccgtggatcggcgtcccgtcgtcgggcccggggcggtgcggcggcgggaattaagtaaggtatggttggaactgatgcgccacggccggccgtgtgacagctttattacagcgagcgcatgttcgagtcgtggatgctttttgtgcgtgtttgtatttgtcatccaaggtgaggttgatggcaaggataattccagtgctgtggtaaaactgtgaaggcagaacacagggcacaggagataaccgtaacgcatgttaaaagttaattatgggatgctttggaggtagcaagattgaaagtagggaactagggatgaccggatgagtagacggtctagaaagacaagcccatatgtttggaatggaatattatcgtttttataaaaaaaaaaaagaa

SEQ ID NO: 268641 - DNA, 999 bp, Zea mays
attggccgtgcgtccgtggctttgcatctgcaaccccgcccgatcaatcttcctcgttccgccgctccctcgcctccggcagcgaggtgaggccaccgatcggaccttccctagcggcggcgcctaccaacctcaaggagcgatggctctgtctgcgacgctacggatttctcttagcgtcgcgttctttggggttctggcgttcgtgcttggtgtcatcgccgaaaacaaaaagcctgcttccgggactcctatcctaggaaaggatgtcgtcatctgcacgtttccaagtgatccgactcttgcgatggggagcctgtccattgtggcacttgtggtagctgccatcgtaggccatgttgccatcttctttccatactcgggcaagtcagttcctcgtggagcgctgtttcaaagcaccagcttgacagtgttctttgttgttgctgagcttgtctcagccctggctcttgcaatgtcgctgtgggcaactgtcaccgagggtcttcaccgcagcaagaacatccaccacgacatggactaccagtgccctactgccaagaccggcctgttcggcggcgccgctttcctcgcccttgacgctgctctcttctggcttgtttgccagatgctggccctcaatgcaagggctgactaccttgacgaggatgacggcaagggagaatatggccagatttatgctgctcaagtcgatgatggctcgaaggtctgagcctatgtggtcatgctcggcagggttctatgattagtgtcatttggctacattatgccatcaacaaagtcgctttagctctcagtaaatttgtatataagttgcaaagtcttacataaggctggtggttattgcactttcgtgtttcagtgtgatcgataaacagtatctcagtacaatcggtttgctatgccccttggcgaacttgtccttgagttttctggtgtctgaatggcactatcacataatatactccctctgttccc

SEQ ID NO: 268642 - DNA, 256 bp, Zea mays
ccgcccgatcaatcttcctcgttccgccgctccctcgcctccggcagcgaggtgaggccaccgatcggaccttccctagcggcggcgcctaccaacctcaaggagcgatggctctgtctgcgacgctacggatttctcttagcgtcgcgttctttggggttctggcgttcgtgcttggtgtcatcgccgaaaacaaaaaggtctgccctttctcctgttacatgagcactggtcattatgccttttcgttttcctc

SEQ ID NO: 268643 - DNA, 769 bp, Zea mays
gctagcgatagtgagacagatatggcaataagtacggctaacagcattgtctctgcgctgaacagctacagcaagctaactggtctagtggtgagcaggaagagatgtgactcgattggcatcccagcactcagttcgtcgttaaaactctctcttggtagaatcaaacagagctttgtattgactgactcccgcttgcctgacatgccaattatttatgctagtgatgcttttacatcattaacaggttactcaagagaagaaatattgggctgtaactgcaaagtcttaaatgggccaggcactagcttggaggttttagaggagataaatcagcatatttgttctgagcaggcatgcacggtggatctactgagttacaggaaagatggaagttcattctgcgatcatctacatgtatctcctatccgagatacttcgggcaaggtggcctttcatatctgggttccccttgacatgggggcaaagcccgattttagtgggctgacccccgagaaatggctgcttggcgctgttggtgcggtgagggttgctgtgaaaggcttgtcggcatcaggtagcctgttgagacccccatcccaatatcagttttagtctcctcgccgtttcatgaccacggcgaccggccttccacgatgtacattgctgcttgctattctgtgtaaagcaactgcttagcatgacaaagtaaatgagttcgttttgaaggaaaatccatggtaaatacaagatgttggtgtgattatat

SEQ ID NO: 268644 - DNA, 537 bp, Zea mays
  unsure (1)..(537): unsure at all n locations
cgggccaagccacccttcgagaggaaccatttaacccaggttaatccaacaggaaaaatttttcgaaggaaccctttccggccttggccaaattaaaaaaccccctgggaaaattcaccaatggcccttcctcccttggccatttaattcgggtgaactttccttagttaccttccaccaaaaggttccaaatacccaatccaattataaagaactatgacgtcacanaggggcagaccaacttcagaaattcatcgangaagtgaacaatgggatcgatgcgtacacacagactaaactggacccgcagtttttgcttgagcaaacaaagaagcggcttgggattgcttaaagcctgtgaccaaggacgagcctttcgccagaagcaccagcgtagtagatcggagctcgttttagtcggctgtgtgcttggatattacatctggtcttcaataaggcatggccttctgtaatggctgtgcttctgaaaataaataaactagttggcctggtcgcaaaaaactctacctccaaaaa

SEQ ID NO: 268645 - DNA, 492 bp, Zea mays
gcagtgtgttctgtgccaatataaagaactatgacgtcacaaagggcagacgcaaccttcagaaattcatcgaggtagctcacgccgatggatttcaaattgactaggatttatatctgtaatacgttcgttcgttcactaacattgtttgagacgatccttttgtcatgttgataatgcttcgttgatgagaaactttgtatgtctcaggaagtgaacaagatcgatgcgtacacacagactaaactggacccgcagtttttgcttgagcaaacaaagaagcggcttggggtagtttgacactccgtattttcttaattttgttctgccttgatatcgatcgatctatatttgttcagctaatttcaaaacatttgaccaaccttcgttttgaacctccagattgcttaaagcctgtgcacaaggacgagactttcgccagaagcaccagcgtagtagatcggagctcgttttagtcggttgtgtgcttgg

SEQ ID NO: 268646 - DNA, 1738 bp, Zea mays
ggagccgctcaccaaggaggacctcgtcgcctacctcgtctccgggtgcaagcccaaggagaactggagaattggcacggggcgcgatttgttcggtttcgaaggcgacactttacgccctataaaatatgatcagattcgtgacatactgaacgggctcgctgagagatttgattgggacaacataatggaaggaaacattgttatcggcctcaagcagggaaagcaaagcatctcactagaacctggaggccaatttgaacttagtggcgctcctctcgaaacgttacatcaaacttgtgctgaggtcaactcacatctatatcaggtcaaagcagttggagaagaaatgggaataggatttcttgggcttggctttcagccaaaatgggcactgagtgatataccaataatgccaaagggaagatacgaaataatgaggaattacatgcctaaagttggtacccttggccttgatatgatgttccggacatgtactgtgcaggttaatcttgacttcagttcagaacaggatatgataaggaaatttcgtgctggcctcgcattgcagcctattgcaactgcaatatttgccaattctccctttaaagaaggaaaaccaaatggatttctcagcctaaggagccatatctggacagataccgataacaaccgtgcagggatgctcccttttgtctttgacaactcatttgggtttgagcaatatgtggattatgcattagatgtccccatgtattttgtgtaccgaaataataagtatattgactgcaccggaatgtcatttcgggattttatgcaaggaaagctccgacaagctcctggggagttgcctactcttaatgattgggagaaccatctaacaacaatttttcctgaggttaggttaaagagataccttgagatgagaggtgctgatggtggcccatggaggagattgtgtgcgctgcctgcattttgggttgggctgctgtacgatgaggaatcattacaaagcattttagacatgacttttgactggacacaggaggaaagagagatgctaagacataaggtaccgttgactggtctgaagacaccatttcgcgatggatatgttagagatttagccgaggaagttctaaaactggccaagaatggattggaaagaagaggatacaaggaggtcggtttccttagagaggttgacgaagtggtgaggacaggagtgacacctgccgagagacttctgcatctgtacgagacgaagtggcaacgcaacgtcgaccatgttttcgagcacttgctatactgatgttgtagatgtaccctagtacaaaaatctcatctttgattcattcaacgccttgagtgggagggcacaggaacacagcttttggttaagttgctgaccgggggaacagctacccggtgctgcgtgcggtgcctacaaataacttcgctcgggacggatcactactctctagggagatggaacaaatcactgtttgtaccggccctttttgtttctgttttccttcagagatggagatgccgtattgaaaataagtccatcttctgtacgatgggaactgtctgttttccccccttctttcctttcagcattgttgggatgttcgtcccgtgttaacatgcaaaatcaattacgtgtacgataaataagctgatggtttgatcaaaaaaaaaaaaaaaagggcgtctgctcgcgatctagaactag

SEQ ID NO: 268647 - DNA, 256 bp, Zea mays
accaaatggatttctcagcctaaggagccatatctggacagataccgataacaaccgtgcagggatgctcccttttgtctttgacaactcatttgggttagcatttcttttgaactccccactcccccaccttgagtgccagtaatttgattgattgcttcattctctttaaagatgttttcaatgtgaaagcatcctaattatagtttcttttgggggtgcaggtttgagcaatatgtggattatgcattagatg

SEQ ID NO: 268648 - DNA, 436 bp, Zea mays
aaagagagatgttaagacggaaggtacgatcgactggtttgaagacgccgtttcgtgatggatatgtaagagatttagctgaggaagttctaaaactggccaagaatggactggaaagaagagggtacaaggaggttggtttccttagagaggtcgacgaagtagtgagaacaggagtgacgcctgcggagaggctgctgaacctgtacgagaccaagtggcaacgcaacgtcgaccatgttttcgagcatttgttatactgattactgaggatgacgccgccgaacgacgttggactgagcttgtagatgtaccccgtaccctaatacagagtctcgtcttgattcattcaatgcctgacccggaagggctcagttccaggcacacaggaccagaccttccggttggttgttgacgggggcaaccgctgcacagc

SEQ ID NO: 268649 - DNA, 793 bp, Zea mays
cccacgcgtccgcccacgcgtccggccgtgtgcatataggtcattgttgtcggattctcgtcagacatcggagctgctctaggggacacgaaggaacactgcagcctctaccacggtcctcgttggcacgctgcgatcgtgtacgttctggggttttggctccttgacttctccaacaacactgtgcaaggtccagcgcgtgctatgatggctgatctgtgcggtcatcatgggcctagtgcagccaactcaatcttctgttcttggatggcgctgggaaacatcctaggctattcctctggctccacaaacaactggcacaagtggtttccgttccttatgacaaacgcctgctgtgaagcctgcgcaaacctgaaaggcgcgtttctggtggctgtggtgttcctagtcatgtgcttgactataaccctgttcttcgccaaggaggtgccctacagaggaaaccagaacctcccaacgaaggcaaacggcgaggtcgagactgaaccttccggcccactcgctgtgctcaagggcttcaagaacttgcccacggggatgccgtccgtgctcctcgtaactggactcacctggctctcttggttcccgttcatcctctacgacaccgactggatgggccgtgagatctaccacggcgaccccaagggtagcaacgctcagatctcggcgttcgacgaaggcgtcagagttggctcgttcgggctgctgctcaactcgatcgttctatgattcagctcggtcctgatcgagcccatgtgcccgaaggtcgggc

SEQ ID NO: 268650 - DNA, 388 bp, Zea mays
  unsure (1)..(388): unsure at all n locations
cccacacgggcgcccacccgtccccccacgcgtccgcgccgaggtggtgccgtacagggcgagcgagaacctcccgacgacgaacgccngcggcgaggtcgagactgagcctaccgggccacttgccgtgctcaagggcttcaaggacctgcctcccgggatgccgtccgtgctcctcgtgactgccatcacctggctctcgtggttcccgttcatcctctacgacaccgactggatgggccgggagatctaccacggcgaccccaaggggagcaacgcccagatctcggcgttcaacgaacgtgtccgagtccgcgcgttcgggctgctactcaactcggttattctagggttcagctcgttcctgatcgagcccatgtgccggaag

SEQ ID NO: 268651 - DNA, 669 bp, Zea mays
cccacgcgtccggttacgcgggcgagtacttcggggacaagatccacggcttgggcgtgtacagcttcgccaacgggcactgctacgaaggctcgtggcacgaaggcaagaagcagggattcgggatgtacacgttccggaacggcgacaagcgatcgggggactgggattctgggacgctcaagacccccttgcccccggccgatccttctgtccagcgggccgtccaggctgcacagcgagctgcagagaacgcgtttcgcttgcctagagttgatgagcaggtccacagggcggtcatggccgcgaacagggcggccacggccgctcgagtggcggcgatcaaggcagtccagaacaggatggatgggaagttttgtgagacctatgtgtgaattgctgtgtgcgagaccatgtttcgctctctctctctctttctaactgtacattagggtagtgaaggacaataactaatcagtgaggtgagacgacgaccggggcagcacaaccgcgcgcttccgagtcagggttcagcaacgagacgacgggagcctgtctgacgaagagcggactggcagaaaccatttgcgagaaacggccatatcgccatggctgtcggaggggttccctcgcacctttccttgcaacaagctgtaactgtacatagat

SEQ ID NO: 268652 - DNA, 451 bp, Zea mays
cggacgcgtgggttttttttaggggtaacggttgcggatagcctaataatactaccagtattatacagcttgatttcatttcaatcacagcaggatattacaacatgagaaaagggggaaaaagggaaaacgccacaaaataaatgtctctctctcacacacagctcatccactgcctgactgaacaacctagctgctgctgctgcttgcttctgctcacagactcaacggtgccctcttgcacgtagccactcttttgtacagattctccatgggccttggaaatttcttttcttccttggttgcatggacggacggacaaaaacaattccatcgaaaacccaaaaagagaaaaagaaaacctcgttgattgatgaactaggacagattacctaactactcccacgacatcccactcaccaacctaatccaacgactaaccaatcctcct

SEQ ID NO: 268653 - DNA, 503 bp, Zea mays
agttattggtcgcaggggtagagaatctgacatggatatggaaattgtgattgaggggtgatgatgtttctgcaaaaatgacgcactaatatattggcgtgcgtataatctgatacacctaagtaatgcattacatttcgtaaacaggccaagcagcgcaagttccggactaaggatactccggagtttgcattaccttcctggtttgcttgtgatgaattggaattcgcctaaaactcttttagtcattagagttggaagtgaagacaactcccacccgtaacttgtgtatgtacagtatatatatgtattacctattcttcgctacatctttgaaggtgtatctgttgggattttcgggaggggctcaatttaaatgcggttaaatggcctttgggttttacggggtcacgagtgaggggagaagggaagggaagggaagggaagggaagggatggaggttgattcaaataataatgtctattaaatttgattatgctaaa

SEQ ID NO: 268654 - DNA, 529 bp, Zea mays
cccacgcgtccggccattgatcagcttggctggggtggttcaagcagacctgacttcacatgtaaaagtaccgaagaaactgaggcatggttcatagattctttcgaggagtggcgcaaggccaagaacctcagtaattttatattgcttggtcactcttttggaggatatgttgctgcaaaatatgcgctaaagcaccctgaacacgttcaacagttgattttggttggtcctgctggcttctcatcagaaacagagcatagctctgagtggttaaccaagtttcgagcaacatggaaaggcatgctaatgaatcatctttgggagtccaattttactccccaaagggttattaggggattgggtccttggggtccaggtctagtacagagatataccagcgccaggtttggtacaagttctactggtgaattactaacagatgaagaatcggcattgatgacagattatatgtactatacgttagctttcaaagctagtagagagctgtgcttgaaatatatatttt

SEQ ID NO: 268655 - DNA, 474 bp, Zea mays
tatgctgcttcttctgtggcatcttctacgtcattgtctgtcgtgggctacgcataaggaacggatgatgacagcgtttccaggagccagtcttggcctgtcaaccacgatgaagctggaccatctgctgacgcgcagtcattctcagacacgatcaaatctgggctgctgtcaggcgctacaaagtacaaggactccataacgaagagcacgcgcgggtggaaggagaggtggttcgcgcagagcagcgccatgtcgaatcttggctcggagatgaggagggaggtcggtgctgggatcgccgccgtttcccgcatgatcgagaagcagctggagacacggccggatgggagtgggacagcgccgtcgcctgctaccgcttcgtatccagctcacgcccaccctggttcggatgcaagtagtcagggtcagggagctgctgttcccgctacacctgcagccgctctgaataac

SEQ ID NO: 268656 - DNA, 760 bp, Zea mays
agcaaatttattgatcagttaccatcagtaatgaaccaggttacagaaggtgtgtctgaatttaaaccaacaccacctgaaaaccgtgaattctgcaagaattcctacagtgtacccaatacattattggtcaaattcactgtagatgctattgatgatacagacatagttgaagatgtcctgagaccccgcgttgattcaatcggtggacaaataaagaaggtcatactgtcaggaacacatctaactccatgtatacaggatgtcaaatggcaagttggttcagaatacactccagcagatgccattgcacaaggattgaaatcactggctcttagtgaaacaagagtcctctcaagaactattgctgattggtttacgtgccttggaattttgagttattcaatacatccgttgaagtttggagttcttcttacaaaggaatgccttcatcaggtctcaacttcccattttgttgacgcagtccactattgtaatgagatgtaaggatacaatgtattatgtatggcacataagagcagtgcatatttggggtgtgctgagctggtcgtgctcacccgcaggccctagccgtactacaaatatctgatcaagattggtggtttggggcctacgtggatcgtatttgcaagctataaaaagcatcgaacccaaaaagtccaagcagctcgatccttggtcaagttggccaaaccattctgttgcacgcagactacccaacagtggtttctgcatgctt

SEQ ID NO: 268657 - DNA, 669 bp, Zea mays
ctaaattcgacttcgcgaacaccacggcgctcttcttcgtccagctcttggtgatggggggcgctgaaaccaagaggtacatggacttcaaaaatccaggatcgcaagcagaggaagggtcattcatagggttagaggctgcactcgcaggtcaacagccaggctaccccgggggcccactgttcaatccactaggactcgcaaaggatatagagaatgctcatgacgagaagctcaaagaaatcaagaacgggaggttggcaatggtagccatgcttggcttcatggtgcaagcatccgtaactcatgccggccccatcgacaatctcttgacacacctttcggacccgttcaacaaaaatatcattcacacattctcctcttcctaagtactcgtcccaatgcccggatgctatggcggcacaaaaaggtcacaatgtttttgaacacaacagaacaacatgattattgatttacgtccttctccccaccgaataggggaaggaaggttagggaagcgttcaatcaattcaatgagatagtgtaatttatgccaactcggtacgtttgttttgggtgaggcttacttggtgcaatcattagttcccatttattcttttggccggcaaaaaaaaaaaaaaagggcgccgctcgcgatctagatctagt

SEQ ID NO: 268658 - DNA, 832 bp, Zea mays
  unsure (1)..(832): unsure at all n locations
acgggcttcggcgcctccgtcgcgcactggcgcaggaacattggggtgttgtctgaatcctataccgtctacgcgatcgatttgctggggtttggcgcgtcggacaagcctcctgggttttcttacacgatggagacatgggccgagctgatactggatttcttggaggaggtggtcaggaggcccacggtgcttgtcgggaactcggttggaagcctcgcgtgcgtcattgctgcatcagagtccagcagagaagccgtccgggggcttgtcctgctgaactgcgccggtggcatgaacaacaaggcgatcgtcgatgactggcggatcaagctgctcctgccactgctctggctgatcgacttcctgctgaaacagcggccgatagcatcagcgctctttaaccgcgtgaaaaacagggacaatctgaaggacatcttgctctctgtttatgggaacaaagatgctgtggacgatgaattggttgagatcatacgcggaccggctgacacggagggcgccctggacgcgttcgtgtcgacggtgaccggcccgccggggccaagcccgatagccctgatgccgcggctggccgacctgcccgtgctggtgctgtggggtgaccgggaccccttcaccccgatcgacgggcccgtggggaagttcttctcgaagctgccgtcggagctcccgaacgtgacgctctacatgctggagggcgtggggcactgcccgcacgacgaccggccggacctcgtccacgacaggctgctgccgtggcttgaagcgctcctgccgcccgccgncggcgcggtgactacgacgacgacga

SEQ ID NO: 268659 - DNA, 535 bp, Zea mays
cccacgcgtccgttttgatccaagcatctgggatactgttcataaggacaactttgttctccattacgaagcagtggagaagagacctgtccttccttctgctggccaaaatattaggcgagaactataaggtagcatgcttctatcatatataaaaggaatgtatagttatgtgtacgtttgactaattgacttccttccctgatgcacacatatttgcccttgctgcttgccctaggttctcctgcatttgaagttagtttggtttgatcagtagctgttgtcatggatgggatgagttcatacaaaatgattctataagaacttagtgccccccaggtggcagttgtagaaatgtagctgagatttagattttcttcataatttgttggcattatttagtagggccattgttgtaccaatgttgtgacttgatttgttgttgttgttgttgttgtaacccagtcaccgtgttaataataacccctttggccgttatgagtcagcgtgagaaaagaaaaaaaaaaaaaaagaa

SEQ ID NO: 268660 - DNA, 522 bp, Zea mays
aaacaagctcctgacaacccacgccacgacgacacaacaaagcaccgcagctactaaacccatggccggggtcgtggtggtgttcgacttcgacaagacgatcatcgacgtcgacagcgacaactgggtcgtggacagcctcggcttcaccgagccgttcgagcgcctcctgcccaccatgccctggaacacgctcatggacaccatgatgggggagctgcacgcgcacggcaggaccctggacgacgtcgccgaggcgctccgtgcggcgcccgtcgtcgcgggcgtccccgccgccatcaaggccgcctacgcgctcggctgcgacctgcgcgtcctcagcgacgccaacgccttcttcatcgacaccgtcctggcgcaccacggcctgctgggctgcttctgccagatcaacaccaaccccagtcaccccgacgccgacgccgacggtcgccttcgcatcgggccctaccacgacctgcacgggtgcggcgtctgcacctgcccgcccaacatgtgcaa

SEQ ID NO: 268661 - DNA, 1608 bp, Zea mays
ggcgcaatagttatattcagcagaatgaacattgggacgctagatgtcggggattttctcgctattggagctatcttttctgcaacggattctgtgtgcacgctgcaggtcctccatcaggatgagacgccctttctgtacagtctcgtgttcggtgagggagtcgtgaacgatgccacgtctgttgtgctcttcaacgcactccagaacttcgatcttaaccacatcgatgtagccgttgtgctgaatttcttgggaaacttctgttacttattcgtgtcaagcaccttacttggagtgtttactggattgctcagtgcctacataattaagaagctatatataggaaggcattccactgaccgtgatggtgcgcttatgatgctcatggcttacctctcctacatgctggccgagctgctagatctgagtggcattcttaccgtattcttctgcggcatcgtgatgtcgcattacacctggcacaatgtgacagagagctcaagagtcacaaccaagcatgcctttgctactttgtccttcatcgctgagacttttctcttcctgtatgttgggatggatgccctcgacatcgagaagtgggagtttgccagtgacagccccggcaaatccattggcataagctcgattttgctaggattggttctgctggggagagctgcatttgttttcccattgtcgtttttgtccaacctgacaaagaagtctccattggagaaaataacatttagacagcaaattgtaatatggtgggccggactgatgagaggtgccgtctccattgctctcgcttacaacaagttcacgagatctggacacactgagctgcacggcaacgcgataatgatcaccagcacgatcactgtggtcctgtttagcactatggtgtttgggatgatgacgaagccattgatccggctgctgctccctgcctgcagcaacacggccacctccgagccgtcctcacccaagtccctgcactcgcctctcctgacgagcatgcagggctcggacatcgagacggggtcggcacagattgtgagcccgtccagcctccggatgctcctaagcaagccaacccacacggtgcactactactggcgcaagttcgacgacgcgctcatgcggcccatgtttggcggccgcgggttcgtgcccttctcccctggatcgcccactgagcagagcgtccacgacggacggtgaacaaagccgcgtctgacaccaagagacgagcaggacatgcttttggctgctaatcgtcagatgatgatgtttttgtttgttgacagcttctgatggtgcgttagcaatggcaaggaggtgtcagttggtttggattagcaggatgaagaagagcaaccctggtaactggggctgggggattgagtttgtgcatgacaaggctgcaaacttttgtatgtagataaaaagaacacccatttggccatttgtattgtatgttattgtatgtaagctagcaggcctgtacaactgcttttaggtcttcgtttggatgggcgaaattctggcaaacagcagcacatccactctgtgttctgatctaaacatctttgttttgatttg

SEQ ID NO: 268662 - DNA, 1965 bp, Zea mays
cccacgcgtccgcatgtaccatggagggaccaacctcgaccgcagctcaggagggcccttcatcgccaccagttacgactacgatgcccccatcgacgagtacagactagtcaggcagccaaagtggggccacctaagggatgtgcacaaggccataaagctctgcgaaccagcgctcatagcaactgatccgtcatacacttctctaggtccaaatgttgaggcagcagtatacaaagttggttcagtttgcgcagcattccttgccaacatagatggtcaatctgataaaaccgtcaccttcaatgggaagatgtacaggcttcccgcctggtctgtcagcatccttcctgactgcaagaatgtggtacttaatacagctcagatcaattctcaaacgacaggttcagaaatgagatacttggagtcgagcaacgtcgcatcagatggctcatttgtcacgccagaactggcagtatctgactggagctacgccatagagcctgtaggtatcacaaaggacaatgcacttacaaaggctggactgatggagcagataaacaccacagcagatgccagtgatttcctctggtactcaacaagcatcacagttaaaggtgatgaaccctatctaaatggcagccagtctaatctggcagtcaactcacttggacatgttcttcaggtctacatcaatggtaaaattgcaggaagtgcacaaggtagtgcaagcagctcactcatctcatggcagaaaccaattgaacttgtacctgggaagaacaaaatagatcttctaagtgcaacagttgggctgtcgaattatggtgcattctttgacctggtaggtgctggaattactggcccagtaaaactgagtggactaaacggtgcgctcgatctgtcttctgcagaatggacatatcagattggactcagaggagaagatttgcacctatatgatccttcagaagcttcaccagaatgggtctcagccaatgcttatccaatcaatcatccactgatttggtacaagaccaagttcacacctcctgcaggtgatgatcctgtcgcgattgacttcacgggaatggggaaaggtgaagcatgggtgaatggacagagcattggtcgatactggccaacaaatctggctccacagagcggttgcgtcaactcttgcaactatagaggagcctacagttcaagcaaatgcctcaagaagtgtggccagccatcacagactttgtaccatgttccccgttcgtttctccaaccaggcagcaatgatctagtccttttcgagcattttggtggtgacccaagcaagatatcctttgtgatgaggcagacaggaagtgtgtgcgcacaagtatcagaggcacatccagcccaaattgatagttggagttctcaacagccgatgcagagatatggacctgcacttcgcctggaatgcccaaaagaaggccaggtcatcagcagcgtcaagtttgcaagctttgggacaccgagtggcacatgtggaagctacagccatggcgaatgcagcagcactcaggctctctcaattgttcaggaggcttgcatcggagtgagcagctgcagcgtgccagtgtcgtcgaattattttggaaatccatgtacaggggtcacaaaaagccttgcagttgaagctgcatgctcgtgacatgtctgattaatattggttcataggaagcaaatcccctaggacaaggtgaaaccttctctgtaggcaagcaggcaaaaaggaataaatgttcccatcctgatcaaaaggaataaaaatattctgaaaattgccacatccaagctattaaatggtatgcttaggaagtattgttattgttaagatataaatccatccatcatgacaaagaaggtgatctttttgtaatccttcttgaaaaaatagaatgatttgaatttcgcccagtttcctat

SEQ ID NO: 268663 - DNA, 459 bp, Zea mays
cacagttgtcctcggctcccaaaggaaaaattgctgggaagaaggttcaggttgatgaaagttcggagttggaggaactagagaagagactggctgctctaaaaaatgcataagatctgtttacaaccctctcctctatgcacatagcaagcctgtcgtgtaccttaattccaaatcttcattcgacacgcaaagtcactgtgatttgtatgtatcaaaaggaagatgatgcaaacccccaagtttttgggcgaatcgatgttgctgctgttcgtacacactcacgtataagatggggctgtgctgccttattagcgacatgattcagagcaagggattccatagtcttgtaaagaagtttgattatttttacatgacagctttttgtttttggtcgttcgttacatgacagcgtttttttagccttgtgggaacttacagtaacgccgcacgtcattt

SEQ ID NO: 268664 - DNA, 885 bp, Zea mays
cccgcaccctccgcgtcgaacacccgatccggacaccgctccaggctccacctctctcccatctcacgccaacgctcactggaccattcctccgtgctggggagcggcggagagctatccacctcgtctcaggcaccctctggcgtccccctccccccgccgcgtgccggcgagccgcggagatccggggttctgacctcgcctccttctgctgacttgtgaacgaggcagcatcatagttcagtttggaaacatgtcatcgaagaagatagagttggatcacaaggacatggtccatgattctgccatcgactactatggcaagcgccttgccactgcctcttcagacttcaccgtgaagatcgtcaacattggtgctgcaaatgccccatcccaggtccttgcaacgctaagtggccactatggtcctgtgtggcgtgttgcttgggcccatccaaagtatggtgcaatccttgcatcgtgcagttatgatggccgtgtcattatttggaaggaggatgcacgaggcaattggtctcaagtccacgtcttcagtgacaacaagtcatctgtcaactccattgcttgggctccgtatgaggttggcctctgccttgcctgtgcatcttctggtggaagaatatccatcttgacgatgcaagctgacgggggttgggatactgcaaccattgagcgagcacatcctgtcggtgcgactgccatatcctgggcccctgcaacagcgtcactagctggtgcaggggagcttgtttacaagcttgtctcaggagggtttgactctgttgttaaggtctggggattcaacaatggtagttggaagctggagagtgctcttatctctgacatgcacacagattgtgtgag

SEQ ID NO: 268665 - DNA, 376 bp, Zea mays
cagcaccgtggcgagacgcgtgggatccggccaccgctccacctctgtccatctcacgccaacgccacctggcgtcctagatcctccctgccggggagcggcggagagcttttcacctcgtcttagggacctctggcttccttccccctgccggcgatcggcggagatccgctgttctaacatcgtctcccgctgctgacttgtgaacaaggcagcagcatggttcagtttggaaacatgtcatcaaagaagatagagttggatcacaaggacatggtccatgattctgctatcgactactatggcaagcgccttgccactgcctcctcagactctaccgtgaagatcatcaacattggcgcggcaaatgccccat

SEQ ID NO: 268666 - DNA, 1227 bp, Zea mays
ggtatttttaacggtgaggatgttgccattaagcttttggagaggccagaggcagatccggagagagccgggttaatggaacagcagtttgtgcaagaagttatgatgcttgcaaccttgaggcaccagaatattgttaaatttattggagcatgcaggaagccagtggtttggtgcattgttacggagtatgccaagggcggatcagttaggcagtttctggcaaagaggcagaataggtcagttccactaaaactggcggttaagcaagcactggatgttgcaagggggatggcgtatgttcatggtcttggcttcattcatagggatcttaagtcagataacctcttgatatctggtgataaatctatcaagatagctgactttggagtagctcggattgaagtaaaaactgaggggatgacacctgaaacgggaacctatcgttggatggcaccagagatgattcagcacaggccatatgaccaaaaagttgatgtctacagctttggcattgtgctgtgggagctcataactggcatgctcccttttgctaatatgacagcagtgcaggctgctttcgctgtggtgaacaagggtgtccgcccagctataccccaggactgcctgcccacccttgctgagatcatgaccaggtgctgggatccaaatcctgatgtccgtccgccgttcactgaagttgtgaggatgctggagcatgctgaggtggagatcctgagcactgtccgcaaggcccgatttcggtgttgcatgtcccaaccgatgactaccgactgaatcaaacaagagagttgaaatgaactccatggaagcgtaattgagtgtatttatcatgtgtccaaacttcgctcagctgaagtagaaagcacacctgagtttatggctgtatgtgtgtatactcaggtgtaagccttgttgtctttgaaatattcctgcacttagaaatatacctagttcgcgttttcagactcttgagatgttttagggctagtctatgtcctgtcgaaacatcatgcagggttcctattcttgtaatgttcttgtgatcctgctactggaatgtgcctcctactggaggtggtctgttcatgttataaccctcctactggaatatgcacaaatacttcgttgcttgagcatatagcatgaaaaaaaaaagggcggcagctcgcgatctagaaccccacgcgtcacgccacgcgtccg

SEQ ID NO: 268667 - DNA, 618 bp, Zea mays
ggtgctgggatccaaatcctgatgtccgtccgccgttcactgaagttgtgaggatgctggagcatgctgaggtggagatcctgagcactgtccgcaaggcccgatttcggtgttgcatctcccaaccgatgaccaccgactgaatcaaacagaagagagtcgaaaagaactccatgcaagcataattgagtaaatttatcttgtgtccagacttcgctcagctgaagtagaaagcacacctgagtggctgagtgtatggccgtgtgtgtgtatactcaggtgtaagcatattgtctttgaaatattcctgccattagaaatatacctagttcgcggtttcagactcttgagatgttttagggctagcctatgccctgacgaaacatcatgcaggcttcctattcttgtaatgtcgttgtggccctgctgctttgttcatgttataaccctcctactggattatgcaaacactttgttgtttctgagtaaaaaaaaaaaaaaaaaaaaaaaaaaaaaaaaaaaaaaaaaaaaaaaaaaaacaaagataaaatataaaaaaaaaaaaaaaaagaaaataaaaaaaaaacaaaagggaaaagaaagcgcctaaaaagtaca

SEQ ID NO: 268668 - DNA, 309 bp, Zea mays
atcaaacaagagagttgaaatgaactccatggaagcgtaattgagtgtatttatcatgtgtgcaaactccgctcagctgagggagaaagcacacctgagtttatggctgtatgtgtgtatactcaggtgtaagccttgttgtctttgaaatattcctgcacttagaaatatacctagttcgcgttttcagactaaaaaaaaaaaaaaaaaaaaaaaaaaaaaattgaaaaacaataaaaaaaaataaaaaatattataatcaaatataaaatttattaaaaaaaaaaataataattacatagggggggg

SEQ ID NO: 268669 - DNA, 716 bp, Zea mays
cacaaggttggcataccagtttttgttactgggggcattggaggtgtgcatagacatggtgaacaaactatggatgtctcctcagacttaactgaacttggaaagactcctgtagctgttgtatcggcaggtgtgaagtccattttggacataccgcggacacttgaatacctggaaactgaaggggtgactgttgctgcttacagaaccaatgaatttcccgcgttcttcacagaaattagtggatgccaggtgccatgtcgtgttgattctccagaagagtgtgccaaaataatatatgcaaacaagaacctacgtcttggttctgggattctattgcagtaccgatccccaagcagcatgcaacttcagggaaaattatagagtctgcaatacagacagctctaaaagaggcaggggataaaaggataataggaaatgcgatcactcccttcatgcttgaaagagtaaaagaactaaccgcaggatcttccttggaagctaatattgcacttgttaagaacaatgctcttattggtgcgaacattgctgttgccctttctaaccttcagcagagagaaataagcagaatgggaagatccgcgttgtacggttatgctcgcggatggagtagcacaggaagcaaaccatttacgaggatggaagctagctgcacgttgggaactggatgtgattgcgatgtgtctgagtctgac

SEQ ID NO: 268670 - DNA, 462 bp, Zea mays
ggggccagcacgcgtccgagcctagctctatagctcgagtattgcttgctctccacaagaaacaaggcagagcaccaacaatggccgccgcctcctcgtcctcggtcctcctgctgctcctggccgccgccttggctggcatgagcgccaacgccgccaccttcaccatcaccaacaactgcgggttcaccgtgtggcccgcggccaccccggtgggcgggggcacgcagctgaacccgggcgggacgtggaccgtcaacgtgccggccggcaccagctccggccgcgtgtggggccgcaccggctgctccttcaacggcaacagcgggagctgccagacgggcgactgcggcggcgcgctggcctgcacgctgtcggggcagccgccgctgacgctggccgagttcaccatcggcggcagccaggacttctacgacatctcggtcatcgacggctacaacc

SEQ ID NO: 268671 - DNA, 500 bp, Zea mays
cgcctgccggtacctgtccaagcttcgcgggtcgaagcacgcgtcggcccacgcgtccgcccccttcctctctttctcctcgaggctcgagcattcgtgctgctccgaccccaccgccacaggctcggcggtccggcgatctcgctcaccggcgggaacatgactacttcaaggcgccttgctgacaggaagaccgcaaagttccagaagaacatcaccaggaggggttctgtgcctgaaaccactgtcaagaagggaaatgactaccctgttggccctctagtgcttgggttcttcatctttgtcgtcattggatcatcgttgtttcagatcatcaggacggcaaccagcggcggggtggcttgagagccggcccacatctaatccccagtatagagagttgcttgttatacatgcatccagctaggattgggtagcagctaaaatgttaaacgtgacaagactgccctgcattccgttcatttggtgggccttgaatc

SEQ ID NO: 268672 - DNA, 547 bp, Zea mays
gacccacgctgtccgctgatcactcgttctctcttccgtcccccgcttgctgtccgctgcctctcgctccctcgtcttccctgttgagtggcgagctctcgtgcgtgcacgtcgtgatattgacctacccttctaaggcgtctttgcttgacatggaatgagttgcataatgttccagtaagtaacattctacaaagtatggtggtttctgtgtcctgtagaccatcggtgtaaaaatgagcatatgacctaccctgttggacctatagttcttggattcttcatttttgtggtcattggatcatccttgttccagataatcaggacagcgacaagcggtgggctggcctgaattcactgagctaaaaccagaaatttatctgtccgtgagctgggaggcagtatctgtgttgtgtagcaaacttgttcatggatatgtagtgcgaatgtcactactgttctgtttgcagtatcaaaagagtttaaactgatgttgtaaccatgcaaaggctgaaaattttaaagagtatgggagaaaccttaatct

SEQ ID NO: 268673 - DNA, 450 bp, Zea mays
ctgactcgtgggcctgatcctcgttcctctccgccccgcttgcgccgcgcctccgcccccgtctcctgtgagatcagctccggcggcacgcggatatgactacttcaaggcgtcttgctgacaggaagagtgcaaagttccagaagaacatcacaaagaggggttctgtgcctgagaccacggtgaaaaagagcaatgactaccctgttggacctatagttcttggattcttcatttttgtggtcattggatcatccttgttccagataatcaggacagcgacaagcggtgggctggcctgaattcactgagctaaaaccagaaatttatctgtccgtgagctgggaggcagtatctgtgttgtgtagcaaacttgttcatggatatgtagtgcgaatgtcactacttgtctgtttgcagtatcaaaagagtttaaactgatgttgtaac

SEQ ID NO: 268674 - DNA, 1102 bp, Zea mays
ttgcagttccgtccggcctgctcgcgctcctggtgttctgcatgcccgagtcgcctcggtggctggtcttgaagggccgcctcgcggacgccagggctgtgctagagaagacctctgccacgccagaggaggccgccgagcggctggccgacatcaaggccgcggcggggattccgaagggcctcgacggggacgtggtcaccgtacccaacaaggggcgagacggcggcggtgagatgcaggtgtggaagcagctcatcctgtccccgaccccggcggtccgacgcatactgctgtcggccgtcggcctgcacttcttccagcaggcctctggcagcgactccgtcgtccagtacagcgcccgcctgttcaagagcgcggggatcaccgacgacaacaagctcctgggcgtcacctgcgcggtgggcgtcaccaagacgctcttcatcctggtggccacgttcctgctggaccgcgtggggcgtcggcctctgctactgaccagcacgggtggaatggtcatctcgctcatcagcctcgggacggcgctcaccgtcgtggggcatcacccggacgccaagatcccgtcggtcgtcgctctgtgcatcgcgtccaccctggccttcgtcgccttcttctctatcggcctcgggcccatcacgggagtgtacaactcggagatattcccactacagctgcgcgcgctgggctttgcggtcggcgtggcgtgcaaccgcgttaccagcgccgttatctccatgaccttcctgtctctctccaaggctattaccatcggcggcagcttctttctctactccggcatcgccgcggtcgggtgggttttcttcttcacgtgccttccggagacccgtggtcgtacgctggaagacatgggcaatctgttctccatgccagacactgacatggctgaagcagacgacaccgcatccaatgagaaagtggtgcaaatgtccaccaagtatgctagtaaatcgaactaaaatacaatattccgcgtgctcggccatataggcaatgattgttgcagcgtcccttacaagagcagagctcaaccaactcaaacaaaaaaaggaacaaaaac

SEQ ID NO: 268675 - DNA, 1026 bp, Zea mays
ctcttgccgacaagaatactgttgccatggtcattgtgaacccaggaaacccatgtggcaatgtgtactcctatgagcacctggccaaggtcgctgagaccgcgcgaaagcttggcatattcgtcatagcagatgaggtttacgcacacttgacatttggagagaggaaatttgtgccgatgggtgtgtttggggctgtggctccagtgttaacactggggtccatatcaaagagatggatggtgcctggatggcggcttggatggattgttaccaatgatccgaatggtgtatttcagaggactaaggtagtgcacagcatcaagagctaccttgatatctcctctgatcctgcaacatttgtccagggagcaataccaaaactcgtggagaacacaaaggaggaattcttcgaaaaaactatcgaaattctaaaacgatgtgtagatatatgctgtgaaaagctgaagggcatcaatgcaatcacgtgcccaagcaaaccagagggatccatgtttgtaatggtgaaactggatctgtcctgcctggagggcatcaaagatgacatggacttctgctgccggctggcaaaggaagaattagtggctgttctgccaggatgtgctgtcggatacaaggattggcttcgcatcacctttgcgattgatccatcttctctggaagaggggcttgacaggctcaagtccttctgcttgcgatacagaaagccaacaaagtgataagataaagtcaccagttctatgcaccagagacaaaaattgttatgaacttctgcccagatatatgatattggatcatcttccctcgaagatgacatgtttaatgctctttgtctatagtaaataaatgatgtctcttctctgtcatctacttatctactgtttgtaggcgcaacccaaattttaggggatatgaagtgtagaagactttgcctcttgcacgaaaccatcatgcaagtttggcataataactttcgaaatgaaatcaccccattgattttgctcc

SEQ ID NO: 268676 - DNA, 661 bp, Zea mays
ggtcagcggggccttcgacggcaagctcgatatcctggtcaacaacgctgcgctgctgctgctcaagccggcggcggagtgggcggcggaggactacgcgcggatcatggcgaccaacctggagtcgtgcttgcacatctcccagctcgcgcacccgctgctcctcaacgcctccgtcgccggaggggcgagcatcgtcaacgtctcctccatcgccagcgtccttggcttcccgcaggaagtcatgtacagcgtcaccaaaggaggactgaatcagatgacgaggagcctagctgtggagtgggcctgcgataggatccgtgtgaactgcgtcgcgccgggcgtgatcatgacggacatgggtaaagagctaccggcggcgttggtggagcaggagcggtcacgcatcccgctgcggcggaccggcgagccggaggaggtggcgtccctggtgtcgttcctctgcatgccggcggcgtcctacgtcaccgggcaggtcatcttcgtcgacggcggccggaccattagtggcgcctgatcgacgacgacggccagctatatatatatagcgaagaataaatgtgggtctattctactgtattttaatttcttttcgttcttgatcggccatgtatcaccgtcagacgtcagcggcaataat

SEQ ID NO: 268677 - DNA, 442 bp, Zea mays
ttttgaacaagaggcaacggtcttatcgattaggatttgttaagctggatacaattttacagggggaagatcaggaatatgagtacatcttatgaatttaatattattttactaaaccaacatcgcgggcgtgttattgccaaacattttttttgggttcggcaaatgctccaaatctaggttttagcccgctcttcttacaccttcaaaatggtacttacacaatagacacagatggctgaacctgatgattgcggataccagagcggaacaatgcccttcttaccttctataggcttcagccttcagatgtcaccacctccgcaccagcgatgtgagtagctcaaaaagctcaaaaggacttccacgccggtagacatcatcctgctgcttttgctggttggaaaacagttgtgataccaaagcacgccatgcagttaac

SEQ ID NO: 268678 - DNA, 2575 bp, Zea mays
cctcactcgtccgcgcccacttgcctgcgattgctttgcgccagagggcagaagccttggccctgccatcgctgttcttatccccccttcctcttttctttctcctccctcttgcggcttctctctggactcgcccctccctcctctcgtctcccaggtcatggcaaagctggagcacccgtgaaaatagcaagtgggagataaacaggaagagctagggtgaatactaactacaagtagcagtagaaggaagagagtcagtctgcccgtgactgcgagtgaatttgttgggtgtggtgtttgttgagatcacgatgatgggaggcgggctgttggtggatcagagcgtggtgttccctggcgtccacaacttcgtggatctcctgcagcagaacggcgacaagaacctgggcttcgggtctctgatgccgcagacgtcctctggcgaccagtgcgtgatgggggagggcgatctcgtggacccgcctccggatagcttcccggacgccggggaggacgacagcgacgatgacgtcgaggacatcgaggagctggagcgccgcatgtggcgcgaccgtatgaagctgaagcggctcagggaactgcagcagacccgcggcaaggactcgttggctagcggtgcgggactggctgatggctcgtccaagccaaggcagtcgcaggagcaggcccggcgcaagaagatgtcgcgcgcgcaggacggcatcctcaagtacatgctcaagatgatggaggtgtgccgcgcgcaggggtttgtgtatgggatcattccggagaagggcaagccagtgagtggtgcctccgacaacctccgtgcgtggtggaaggagaaggtccgcttcgaccgcaacggaccggccgccattgccaagtaccaggccgacaacgccgtccctggcgccgagaacgagctcgcctcgggcgctgccagcccccattccttgcaggagctgcaggacactacgctgggctcactgctctcagcgcttatgcagcactgcgagcccccacagcggcgctacccgctcgagaagggcgttcctccaccgtggtggcctaccggcgacgaggagtggtggccggaactcggcattcccaaggaccagggcccacccccgtacaagaagcctcatgaccttaagaaggcctggaaggtgagcgtgctcaccgctgtcatcaagcacatgtcaccggacatagagaagatccgtcgcctggttcgccagtccaagtgcctccaggacaagatgactgccaaggagatctcaacctggctggcggtcgtcaagcaggaagaggagctgtaccagaagctgaacccgggcgcacgcccaccggcgtctactggtggcatcgcaagtgccatatccttcaacaccagctcgagcgagtatgatgtggacatcatcgatgagtgcaagggggacgaggccggtaaccagaggacggcagtcactgacccaaccgcgttcaaccttggtgccgctatcctaagcgacaagttcctcgtgccgacgccgatgaaggaggagaccgccgacgtggagttcatccagaagaggaacgcccccgctgcagccgagccagagctgatgctaaacaaccgagtgtacacctgcaacaacgtccagtgcccgcacagtgactacagctatggattccttgaccggaatgcccgcaacagccaccagtacacctgtaagtacaacgatccgatcactcagagcgccgagaacaagcctctgccagcaccgccgcaaccacaagccttccagccggccttcagccaagccaatcaggcagtgaacaatctggacttcagcctgcctatggacgggcagaggtccatcgccgagctgatgaacatgtacgacaccaacttcgtgccgaacaagaacccgagcagtgacagcgtcgccgtcatggagaggccaaacgcgatgccccagcagaggatccagatggacgagggtttcttcgtacagggcaacggagccttcgacgacgtcaacaacagcatgatgcagcagcagcagcagcaggcgccagtgcagcagcagcagcagttcttcatccgcgacgacacgccattcgtgagccagatgggcgacatcgccgccagcgcgccggagttcaggttcggtcctggtttcaacatgtctagcggcgtcgactacccaggcgcggcacagaggaacgacgggaccaattggttctactgaagaataaataaacctgtagggctgagaaaagagagggagagagagagagagagagagagagagaaaagcgtcgttataagctttgggtctctccatggtgctcctgctccatggttctcctaagttgtcgagtgtcgagtctatagggtcttggtcgtataggtttctgcagtagctgcaaggcggctggaacttggaaactggtttatacttgtactacgtccgtccagccataaaaatcctctcttatggaaacttaatgctatatccctagttttaatgaatttgttagcttcaacgctgttcatatatatatacacgggctagctgtc

SEQ ID NO: 268679 - DNA, 579 bp, Zea mays
cccacgcgtccgcccacgcgtccgcttcgacgacgtcaatagcatgatgcagcaacaacagcagcaggcaccacccgtggtgcagcagcagcagcagcagcagttcttcatccgcgacgacacgccattcatgagccagatgggcgacatcaccagcacggcggagttcaggttcggctctggtttcaacatgtctagcaccgccgccgccgctgattacccaggcgcggcgcagaagaacgacgggaccaattggttctactgaagaataaaacttgtagggctcctcgttataagcttcggattcctccatggatctcccaagttgtcaagtcttataggtcttcgttatataggttttgcagtagctgcaagacggctggaacctggaactggtttatacttgtatgtccggccagccataaacctctcttatttgcaaacttaatgttattcctagctttaagttgttagtctcagtctgctgtccatgtatatggctgttaaaatgcttgtgcttgtttctgtactacctgctgtttggtgtctgaatgaagtgttttcttcagtggttctgtt

SEQ ID NO: 268680 - DNA, 524 bp, Zea mays
gggcagggcaggggccttggcgctacccccgttcttatccccacctcgtgcctcccctcctcccccccttcccctctctcgcccctcctccctccgtctcgtctcccaggtcatggcaaaagctggagcaccgggaaaaatagcaagtgggagataaacaggaagagctaggtgaatacttagagaaaaggtcccccacaccccccacgcaggtgaatactacaagtagcagtacaaggaagagagccaatctgcccgtgactgcgagtgaattgctagggtgtggtggttagttgaaaactcgggtcacgatgatgggaggcgggctgatgatggatcagagcgtggtgttccctggcgtccacaacttcgtggatctcctgcagcagaacggcgacaagaacctgggcttcgcctcactcatgccgcagacgtcctccggcgaccagtgcgtgatgggggagggtgatcttgtggacccaccgccagacagcttcccggacgccgtggaggacgacagcgat

SEQ ID NO: 268681 - DNA, 494 bp, Zea mays
  unsure (1)..(494): unsure at all n locations
gaacaatctggacttcagcctgcctatggacgggcagaggtccatcgccgagctgatgaacatgtacgacaccaacttcatgacgagcaagaccatgagcagtagtgacagcgtcaccatcatggagaggccgaacgcgatgccccagaggatccagatggacgagggcttcttcggacagggcaacggagtcttcgacgacgtcaatagcatgatgcagcaacaacagcagcaggcaccacccgtggtgcagcagcagcagcagcagcagttcttcatccgcgacgacacgccattcatgagccagatgggcgacatcaccagcacggcggagttcaggttcggctctggtttcaacatgtctagcaccgccgccgctgattacccaggcgcggcgcagaagaacgacggggccaattggttctactgaagaataaaacttgtagggctcctcgttataagcttcggattcctncatggctctcccaagttgt

SEQ ID NO: 268682 - DNA, 928 bp, Zea mays
cccacgcgtccgccgagaacaagccgccgtcagcaccgccacagccacaagccttccagccggccttcagccaacccaaccaggcactgaacagtctggatttcagcctgcccatggacgggcagaggtccatcgccgagctgatgaacatgtacgacaacaacttcgtgccgaacaagaacccgagcagcgacagcgtcgccgtcatggagaggccaaacgcgatgccccagcagaggatccagatggacgagggtttcttcgtacagggcaacggagccttcgacgacgtcaacaacagcatgatgcagcagcagcagcagcagcaacaccaggcgccagtgcagcagcagcagcagttcttcatccgcgacgacacgccattcgtgagccagatgggcgacatcgccgccagcgcgccggagttcaggttcggtcctggtttcaacatgtctagcggcgtcgactactcaggcgcggcacagaggaacgacgggaccaattggttctactgaagaataaataaacctgtagggctgagaaaagagaaagagagagagaaagcgtcgttataagctttgggtctctccatggtgctcctgctccatggttctcctaagttgtcgagtgtcgagtctatagggtcttggtcgtataggtttctgcagtagctccagcccggctggaacttggaaactggtttatactggtactccctaccggaatttggctctttgctgagtgccatataaaaaaaaaaaaaaaaaaaaaaaaaaaaaaaaaaaaaaaaaaaaaaaaaaaaaaaaaaaaaaaaaaaaaaaaaaaaaaaaaaaaaaaaaaaaaataaaaaaatataaaataaaattaaaaaaaaaaaaataatattatttattaaatattaattaaaaaggggggggggcttttttaa

SEQ ID NO: 268683 - DNA, 280 bp, Zea mays
ccacgaccagcacgcccacttgcctgcgattactttgcgccagatggcagaggccttggccctgccatcgttgttcttatccccccttcctctttctttctcctccctcttgcggcttctctctggactcgcccctccctccgtctcgtctcccaggtcatggcaaagctggaacacccgtgaatatagcaagtgggagataaacaggaagagctagggtgaatactaaatacaagtagcagtagaaggaaaagagtcagtccgcccgtgactacgagtg

SEQ ID NO: 268684 - DNA, 313 bp, Zea mays
cggaacggcattctcgagtcgagccacgcgtgcgcgtaagggactggttcggcacgtcgcttatcatggtcacgccgctcaaggccgtacccgtgccttcgtcccggtgatgcactgcggcggcttgctgtgcatgtccaggatatggttctacttagcccagtctcggcgaagacttctatagcgctgcgttataactatccgacaggtttcatcacgatgaaattgtcgctttataattgccctgtctaatcattaaatttggtaatgtatcagtgttaaatgtaaataaaactaagacaaaatttcaccg

SEQ ID NO: 268685 - DNA, 566 bp, Zea mays
gacaatgacttgaggttcatggtgcaagatgattccgctcagaaaaagtcccttttcacgagcagggaacattatggtcacatggtggatagtggggcacccttcgcaaggccgtttcaggagaatgatcctctgctggaccagatcgacggcaatatactcaagcgttggagccatggaccagttcctggtgcttggtgcacaggaaggaagaggtggttcagtgatccatgttcccagtggggcgatgtgaatgttttgagaccaggtcctcaagcagtgatgttgcaccaatatgtaaatcggaccttagaagaagcaaagtctagcagcaattcatgcaggcggtagcagcattggcgtctagaacctcatgtcccatggttgaaagctttgagctttttccgcttatccactaagggttctccactctgctgaataaatagctgccacatgtctaagctgaaacaagcactcgtcgcacctggaacaaagccatggagggatgttcttttctgatattttcatgatgactatcatagtcacggatcaggagtttcactttg

SEQ ID NO: 268686 - DNA, 560 bp, Zea mays
  unsure (1)..(560): unsure at all n locations
cggacgcgtgggcggacgcgtgggcggactcttgggcggacgcgttggcgctccttcggggggcggagagcattggtcgggcgcgctgcatcngctggcgacagggccgctccggccggtgcccttccagcggcgctgttgttcgattgcgatggtgtgctggtggacaccgagaaggatggccaccgcatctccttcaacgaaaccttcgctgagagggaattaggtgtcagctgggatgttgaactgtatggagaattgctcacgataggtggtggaaagtgaaaggatgacagcttacttcaaccagacaggatggccggctaaagcaccgaagacagatgacaaaagaaaggagttcatagcttctcttcacaagaggaaaacagaattattcatggccctaattgagaaaaagttgcttcctctccgtccaggtgttcaaaggttaatcgatgaagctttacgaaaggcagttaaagttgcagtgtgcagtacatcaaatgagaaagccggttcagcaatagtgtcgtacttattggggcctgatagagctgata

SEQ ID NO: 268687 - DNA, 363 bp, Zea mays
gagcaacaccaaacgccacctgtaaaatcctcacgccacatcttcagccacaggcgcgcgatatccccgctcaaaaaagccatgtcaatggcggcagccgccgcccccgccgcggcatcatccacgctgctgcgggcaagcaacttctctattgcgcgccccgtcccaagcggcgttgcctgctgcatccgcgccgtcagtgggcggagagcatcggtcgtgcgcgcggcagcggctggcgacagggccgcgccggccggtgcccttccagcggcgctgttgttcgattgcgatggtgtgctggtggacaccgagaaggatggccaccgcatctccttcaacgaaaccttcgctgagagggaa

SEQ ID NO: 268688 - DNA, 431 bp, Zea mays
gcgcttcaccgcctcggcccgcgcccgcatcgagaaggctggtggtgagactctcaccatcgacgaggttgccacccggggccccaccggtgccaacaccggcctcctccgtggacccaagaactcccgtgagtctggcaagcacttcggcttcggtccccactccaacaagaagccctacgtcgagtccaagggccgcaagttcgagcgcgctcgtggccgcagaaggtccaggggtttcaaggtctaagcgattgcttgagcttgaggtggaacgtttattccgggttgctggcgtggtcacggtcatgggaactgatttaccaagcgtgcatcacggctggtatgagcccttggctggttctcaaaaatatactcaatgtccgtatatgcaatggacgcacaccaatgagcactcgaggctcatggta

SEQ ID NO: 268689 - DNA, 741 bp, Zea mays
  unsure (1)..(741): unsure at all n locations
gatacaggcctctcgcgcgttcacaaagcgatactagctagtccctaccaaagcatacttcctgaaacactcttgcaatccactgagttctgtttgttgagacgcatagagctagccgtcgacaatgtcgctcgtgaggcgcagcaacgtgttcgaccccttctcgatggacctctgggaccccttcgacaccatgttccgctccatcgtcccgtcggcgacctccaccaactccgagactgccgccttcgccagcgcccgcatcgactggaaggagacgcccgaggcgcacgtgttcaaggccgacctccccggcgtcaagaaggaggaggtcaaggtcgaggtcgaggacggcaacgtgctggtcatcagcggccagcgcagcagggagaaggaggacaaggacgacaagtggcaccgcgtcgagcgcagcagcggccagttcgtcaggcgcttccgcctgccggagaacgccaaggtggatcaggtcaaggctggcctcgagaacggcgtgctcacggtcaccgtgcccaaggcggaggagaagaagcctgaggtgaaggctattgagatctctggttgagcatccaatccaatatggacgattggacgtggaaggtttcctgtgtcttctacgatataataattggtcgctgtcctgtgtggatgtttcctgtgtcgtctacgatatattaatgtacttctgtctgtntcgtttcgtatgtacaatcttccgggtat

SEQ ID NO: 268690 - DNA, 942 bp, Zea mays
gagagaagaccagacgattcagcgaccgcacttgacgaagctataaaagcgtcaccccacaaggccacaactcgtcccaacccaatcaaatccagagcgaagatcgcgatcagagcaggagcaggcaacgcgcaccgaaatcttccaatccacaagactcgctacttcgcagttggcagactcgcccgcagcgagccgctagcaaccaagcagaaatgtcgctggtgaggcgcggcagcgtgttcgacccattctccgtggacctcttcgaccccttcgacagcgtgttccgctccatcgtgccgtcgtcgtcgtcggcggcggcggcctccgagaccgccgccttcgccagcgcccgcatcgactggaaggagacgcccgaggcgcacgtgttcaaggccgacctccccggcgtgaagaaggaggaggtgaaggtggaggtggaggacggcaacgtgctgctcatcagcgggcagcgcagcagggagaaggaggacaagggcgacaagtggcaccgcgtggagcgcagcagcggccagttcgtgcggcgcttccgcctccccgagaacgccaagaccgatgaggtgagggccgcgctggagaacggcgtgctcacggtcaccgtgcccaaggcggacgagaagaagcctgaggtgaaggctattgagatctctggttgagcatccaatccaatatggacgtggatggaaggtgtactgctgctggtccgtggctgtcgctgtcctgtgtggatgtttcctgtgtcttctacgatatataatgtacttccgtctgtttcgtttcctgtgtacaatctcaatcttgcgggtatcgttcatgtatccctttgaataataacaaataaaatcgggtttgtcacggtaaaaaaattaaaagattcaaaaatcaaaaaaggaagaaaaaataaaaaaaagatatcgt

SEQ ID NO: 268691 - DNA, 780 bp, Zea mays
tgcacaaagcgcctagcataagcatacttcccgaagcactcttgcaatccactgagttctgtttgttgagacgcatagagctagctgctagcgtcgacaatgtcgctcgtgaggcgcagcaacgtgttcgaccccttctcgatggacctctgggaccccttcgacaccatgtgccgctccatcgtcccgtcggcgacctccaccaactccgagactgccgccttcgccagcgcccgcatcgactggaacgagacgcccgaggcgcacgtcttcaaggccgacctccccggcgtcaagaacgacgaggtcaaaggtcgaggtcgaagacggcaacgtgctggtcatcagcggccagcgcagctgggagaaggagcgacacggacgacaagtggcaccgcgtcgagcgcagcagtggccatttcgtcaggcgcttccgtctgccagagaatgccaaggtggatcatgtcaaggctggtctcgagaacggcctgctcacggtcaccgtgcccaaggcggaggacatgaagcccggggtgaacgctattgagatctctggttgagcatccaatccaatatggacgtggaaggaaggtggactgctgccggtccgtggctagtgtagctgtcttgcgtgaatgtttcctgtgtcttctacgatatacagcataacgtacttcccgttgtttcgcttcgcatgtacaatcttccggttatatgaataataacatataaaatcgggttctcacggtcaaaccgttcagccaacaggcctgaaccctt

SEQ ID NO: 268692 - DNA, 836 bp, Zea mays
gaatgggttgtggatggaggattggtcctataaataacctgccacgcacaggttgctgcaacctacgccaaggagaaattgcaaacctgtcactagcgaagcatacttcgtcgagcacactcttgcaattaatccaccgagttcggtttagtagcatagcatcgacaataaatgtcgctcgtgagtcggcgcagcagcaacgtgttcgaccccttctccctcgacctctgggaccccttcgacatgttccgctccatcgtcccgtcggcggcctcctccggcggcggttccgagaccgccgccttcgccaacgcccgcgtggactggaaggagacgcccgaggcgcacgtgttcaaggccgacctccccggcatcaagaaggaggaggtcaaggtcgaggtggacgacggcaacgtgctcgtcatcagcggcaagcgcagcagggaggaggaggacaagaacgagaggtggcaccgcgtcgagcgcagcagcggcccgttcacgaggcgcttccgcctcccggagaacgccaggccggaccaggtggaggccggcctcgcgaaccgcgtgctcacggtcaccgtgcccaaggccgaggtcaagaagccccaggtgaaggctatcgagatctctggttgaccgtccgttggacgtcgattgaagctccgttgtactgctactggtccgtggatgtcctgcatgttgcactgcagcggaggatgttcgctgcgtcttatacgcatcatttgctctgtcttgtgttgtgttcgtctttcccgtatatggtttgtgtattgtcccttatcgataataataaataaaatcaggctttacgt

SEQ ID NO: 268693 - DNA, 420 bp, Zea mays
tcctggcgcgtggccggaggcgtggttcacaaagcgcctagcaaaagcatacttcccgaagcactcttgcaatccactgagttctgtttgttgagacgcatagagctagctgctagcgtcgacaatgtcgctcgtgaggcgcagcaacgtgttcgaccccttctcgatggacctctgggatcccttcgacaccatgttccgctccatcgtcccgtcggcgacctccaccaactccgagactgccgccttcgccagcgcccgcatcgactggaaggagacgcccgaggcgcacgtcttcaaggccgacctccccggcgtcaagaaggacgacgtcaaggtcgaggtccaagacggcaacgtgctggtcatcagcggccagcgcagcagggagaaggaggacaaggacgacaagtggcaccg

SEQ ID NO: 268694 - DNA, 440 bp, Zea mays
  unsure (1)..(440): unsure at all n locations
ttcgtcctcaaggagaaattgcaaagctctctatacctgacctgtcactagcgaagcatacttcgtcgagcacactcttgcaattaatccaccgagttcggtttagtggtttactactctcagacgtacgcataaatatagcatagcatcatcgacaatacaaatgtcgctcgtgagtcgccgcagcagcaacgtgttcgacttggaccccttctccctcgacctctggtgggaccccttcgacatgttccgctccatcgtcccgtcggcggcctcctccggcggcggttccgagaccgccgccttcgccaacgcccgcgtcgactggaaggagacgcccgaggcgcacgtgttcaaggccgacctccccggcgtcaagaaggangaggtcaaggtcgaggtgganggcggcaacgtgctcgtcatcagcggcaagcgca

SEQ ID NO: 268695 - DNA, 391 bp, Zea mays
gcgtggagcgcagcagcggccagttcgtgcggcgcttccgcctccccgagaacgccaagaccgaggaggtgagggccgcgctggagaacggcgtgctcacggtcaccgtgcccaaggccgaggtcaagaagcctgaggttaagagcatccagatctccggctgaagaagacatggacgcgaggtgaatggtcgcgtcgcgttcgcgtcgcggcgtcgggtcttgggtttcagcgacgcgactcgtgtgtgtggtactgtggttgctctgctttggtatgtctggtgtgtacgtgtgctgttcagtgtttcgtggtcatcgtctgtacattgtgctgttcggtgagctccccgactcagtgtgttgtgttctgcgagtgaataaataaaaac

SEQ ID NO: 268696 - DNA, 789 bp, Zea mays
ggccttcccgacccaggcgacccgtacgccgtaatcccatctctctcgccttcactgccgcctctccgtctccagcttaccaccgccgccgctggatgtctacgcagtagatccatagaccctgatctcctcgaggtgattcccctcgtcgccagaggtatcctcgggcagcaatatccactggcgacgcagccgccacagccgctacgttccctcctccaccgccatcaccacggctaggtggaagcgctcggcgaggtagcggctcgggggaaagacatggtgctgatcgagctggagcccgaggaggcgacgcgcccctcgttgccggtggcggaggagcaggcggtcgccggggacgcggcgcgcccctcgtcttcagcggcgcccgaggaggaggaggcagccgctggagggaaggcgtcgagggcgccggaagaagaggaggatgcctttgaggacgcgctcaccgacgagcagctgcgagagaaagctagaatccaagcaaatgatgctaaagcagaaggaaacaagctttttggtgctggacaatatgaggaagcattatcacagtatgaaatatcattgcaaactgctgctgagctggaatctgctgagggtatacgtgctgcatgccattctaatcgtgctgtatgcttcttgaaattgggaaaacatgatgagaccattaaagaatgctcaaaagcacttgagctcaatccaacatacctgaaagccctgcttcggagggcagaagcgcatgaaaagcttgaacattatgatgaagct

SEQ ID NO: 268697 - DNA, 447 bp, Zea mays
cgataggacttctcgagcgagttcgcgaatccaattctcccagcgagggaagtcatggtagtgatcgagctggagcccgaggaggcgacgcgcccctcgtcgccggcatcggaggagaaggcggctgccgcggccggtggggaggcggcgcgcccatcgtcttcagcggcgcccgaggaggcgcccaccgccgccgccgccgctgttggcggggaggcgtcgagggcggccggagaagaggaggaagccttcgaggacgcgctcaccgacgagcagctgcgagagaaatctagaagccaagcaaatgatgcataagcagaaggaaacaagctttttgggtccggacaatatgaggaagcattatctaagtatgaaatggcattgcaaattgctgctgagcttgaaatctctgaggatatacgtgcagcatgccattcaaatcgtgct

SEQ ID NO: 268698 - DNA, 532 bp, Zea mays
tgtttatagttttgggatattgttgctcaagattttaacgtccaaaaggccaacagatcctttgttcaagaatgaccaggacatcatcagctttgtgaaaaatacctttccggatcatgtatttcaagttattgcctcccccctcctggaagaatgcaggagttcaattcaaggaaataatcccatccatgaaaatgagatcaaccagtgcttggttgatctactacaagtggggctttcatgccttcgttcattaccatctgaacgatcgaacatgaagcaagtggctagcagaatgcatgcaatccaaacatcacatattgggtggaagcacaagtaataagagcaagggtgttccctgaattgtacaataacatatatacttggacatccactcgcgcttattgttgattatcatctagaatatacaagaataaaaatcttgcaatagaaattcgttaaacatcgtgatagtctcaaaatatggaggaaatgtgaggacttgaaggtagtgatgtcataaggttcacgg

SEQ ID NO: 268699 - DNA, 1696 bp, Zea mays
accgtgaccgccgctttccgagctctcatggcggcgtccgcgtcctccctccttgccgcccccgcatcctcatcctgcggggccatctctccgcgtccccggctccctcgtggagctccggccgccgcctccgtcccctcgccgtcgcgtcactcctgctgccccctccgcgcttcccctgcgaggcgccatcggagccgcttcgtagccaacgccgctcccaccatgcagcctccggcggagtccagggtctccacggtagtcgatgtcgacctcggcgaccgtagctatccgatctacatcggcgcaggcctcctcgacgagccggacctgctgcagaggcagtcaaattatacattttttctttgactgttagactggagtggtcagcctgtgatccttatttatgttttctcaggcatgttcatggtaagagggttctggtggtgaccaacacgaccgtcgcgccgctttacctggacaaggtgacatgggcactcacccacaacaacctgaatgtatcagtggaaagcgtgatcctgcccgacggtgaaaagtacaaaaatatggacacgctgatgaaggtgtttgacaaggcagtcgagtcccgttttgaccgccggtgcacatttgtagcactgggtggtggtgtcattggggacatgtgtggttttgcagctgctgcattcctccggggcgtcaatttcatacagataccaactactctgatggcccaggtggattcatctgttggtgggaaaaccgggattaaccacccactaggaaagaacttgattggggcattctaccagccacaatgtgttctaattgacacaaatacactgaacacattgcctgacagggagctagcttcaggcattgccgaggtagtaaagtatgggctcataagggatgcaccattctttgagtggcaagagaagaacatgccggaattgttagcaagagaaccaaatgctttggcctatgctatcaagagatcctgtgaaaacaaagctgaagtggtggcacaagatgagaaggaaagtggccttcgagcaacactaaacctgggtcacacatttggccatgctattgagactgggacaggatatggagcatggctccatggggaggctgtcgcagctggaacagttatggcaactgacatgtctcaccgcctggggtggatagatgactccatcagaaaacgtgtggttgacatactaaagcaagccaaacttcccattgcacctcctgagaccatgaccgtagagaagtttaaaaacatcatggctgttgacaagaaggttgctgatggtctgttgagactcatccttctgaaaggaccgctagggtgctgtgtatttacgggggattatgacgggaatgcactcgatgaaaccctacatgcattctgcgacaactgagacatcccagttttggacatcacttctgtatgctagtactaggctatgtatcaatcagagaaaatattgtggtgtacattatcttcactgcctcattggtatatttttgtcagaaataatggtatattgttttaagtgctggtttgagtttgtagagaaccatggctaatcaactgcggtgcggtcagttgttctctagtaataatagtaaagaagcttctcttcaaaaaaaaaaaaaaaaaaaaaaagggcggacgctccgatctaga

SEQ ID NO: 268700 - DNA, 768 bp, Zea mays
ctcacctgcgatcggcagctggcgtacgccgagggcctccagcaagacgcccaccatgtgaaggtcgtgtaccgtgagaaggcccccgtgggtttctacctgctgtccaacacggaccactaccacgaggtcatggaggagatcggcgacttcctcgcggctaacctctagcagcacatgcacacaaacttcacatgttatagcaagatgggtggtaagcttgactttatagttgtaccgatctgctgctgcttgggggggtggtgggctttgctgctgataaaactctctatctaggaaagaaaccacagtgactttttttttgtttcgtcgtcgggttgctgatcacaaagctgcttgatgatctgcgtcgtggttgatggagggaagcctataatttcgccgtcaatcatctaacattctgtgtacagtggtggactgatggaccaacaaggaggtggacggccttttttttgttgctgtgtctgatgtagtagtatttctcatctttttatggatcggatgggatggtgcctgcctttcattctatgatgaatcgtactgtctgtctatctatctatctacccaatgccgtcgtggaacatgtttccaatctagtactactactactaggctagatgcagaggcataagagaatgtgctactacacctctactgctggtgtgtggcttttgtctcttttcttgtccatctctgtatacaatgctgaactgctgctaaatatattgttgtaaccttgaatgcctc

SEQ ID NO: 268701 - DNA, 773 bp, Zea mays
  unsure (1)..(773): unsure at all n locations
cccacgcgtccgcggacaccatgtgaagctcgtgtaccgcgagaaggccaccgtgggcttctacctgctgcccaacacgaaccactaccacgaggtcatggaggagatagccgacttcctcagggctaacctctagtacatacacagctagccgctgatcgttggtggtggtggtgatggtcgtcgtcgtcgtctccacggaaaacttcactcgtttttatagcaagccaagaagatggtaagcctgcctttacagtcgttggaccgatctgcttgctctcttccttgtgttgctgtccatggcaaggcaagtggtgcgctcaaaaaggacaggcaggcagctgcctccccccatgttgtgatgacaaaactctagtagctaggaaaggaatcacggtgaccttttgtttcattcgtcgtggtcgggtcaagtctcacgttccgctgatcacaaagctcgatggtctgcggcggcctgcggcgccccccccccnnntnnnnctcttggttgatggagagaagcctatttatttatttcgccttcaatcgcgcgcccccctctgggccgggctccggagggggaattcatcgtctaacattctacagtgtgttgtacagtacagtggtgggtggactggcactggcctttttttgttgctgtgttcgatgtactattactggtagtttcgcacactctatgaatcgtgttattgttattatctgtctgtcgtctacccatgttttgtgaaacatgtttccaatccagtgctctt

SEQ ID NO: 268702 - DNA, 370 bp, Zea mays
cggacgcgtggggtttgatgatccagcgattcttttcgaagagccgactcggaagatcaagggggcaatcgagaaggccatgagcatccactcactctaggctgtcagctaattttcccctcaatccccagaggggtagccctaaattgggaaaaggtgctgtcagcagtggcactgcagaactgcaagatcttgtggcaattggcattttgcaggtaggtagtgcatagtttgaacttggaaggcctggtcattttaatttagccaattctcaccagaaaatggaattaccattctcagtagaagcagtgtatagtataatactagctgtatatattgaccaaaagttatgtgctacattattaatttt

SEQ ID NO: 268703 - DNA, 738 bp, Zea mays
tctcctgcactgtgctccttcgtctcctcctcccctgcctgccaccaactgccaaggtgccaagcaagtgcagataccttccctgcctcacaaacaacgccatcagggtcttcaaccagggcaggttctcttctttcattcagctatgggcaacctgtgctgctgtgttcaagttgaccagtcgactgtggccatcagggagcagtttggcaagtttgacagcgtgcttgagccaggatgccactgcatgccttggttcgccggcaagcgtgtagctgggcatctcacactcaggctgcagcaactggatgtgcgctgtgagacaaaaacaaaggacaatgtttttgtgaatgtggtggcatctattcagtaccgcgctctggctgacaaagcaagtgacgctttctacaaactgagcaacacaaggtcccagatccaagcctacgtctttgacgtgatcagagcaagcgttcccaagctccatttggacgatgctttcgagcagaaggacgagatcgcaagggcggtggaggaagagcttgagaaggccatgtcggcttatggctttgagatcgtgcagactctcatcgtggacatcgagccagacgagcatgtgaagcgcgcaatgaacgagatcaacgcagctgcgaggctcagggcggctgcaaacgagaaggcggaggcggagaagatcgtgcagatcaagcgcgcggagggggaggcagaagccaagttcct

SEQ ID NO: 268704 - DNA, 602 bp, Zea mays
cagctagctacatggactcctgctttcacgttctcatacaggcactcctgcactgtgctccttcgtctcctcctcccctgcctgccaccaactgccaaggttcatgttcaggtggcactgccagcagaagtgatccgttgacttcagctatgggcaacctgtgctgctgtgttcaagtcgaccagtcgactgtggccatcagggagcagtttggcaagtttgacagcgtgcttgagccaggatgccactgcatgccttggttcgccggcaagcgtgtagctgggcaactcacactcaggctgcagcaactggatgtgcgctgtgagacaataacacaggacaatgttttcgtgaatgtggtggcatctattcagtaccgcgctctggctgacaaagcaagtgatcgtttctacaaactgagcaacacaaggtctcagatccaagcctacgtctttgacggtacgtagcagtttgtttcttgctagtttgagtgttcatggttgtgactatgtcgtccgtacagtgatcagagcaagcgttcccaagctccatttggacgatgctttcgagcagaaggacgagatcgcaagggcggtggagga

SEQ ID NO: 268705 - DNA, 918 bp, Zea mays
acccacgcgtccgcccacgcgtccgcccacgcgtccgggagagagaaggaaccaaaaaaaaagctcggaatttgtagtctccaagccgtgcgacgaccggacgggaaggggaagagagggagggccgccgctgaagtcgccgtcggtgaggagatcggttcctgcgtgcagaggcggcaacaagcgctgcagagggaggagggatttgggatggctggtgacgaccatgtggtggttgacgtgaacggcttagcaaaatccaaggatgacgggggttccaagaagctgtctgaggatgcaaatggttcggctccggctgctgcatctttgtcagcagctgttgacttggtccaggaggaggaggaggagcccgctaatccaggccgcggagtgccgcatatgccaggaggaagatagcgtgaagaacctcgagaaaccgtgtgcttgcagcggcagtctcaagtatgctcacagagcttgcgtgcaacgctggtgcaacgagaaaggagacactacttgtgaaatttgtcatgaggaatacaagccaggttacactgcgccacctcgtgttcagccagatgagacaaccatagacattgatggtgatttggttatggatttgcgagacccaaggattcttgctgtagcagctgcccaacatcgtcttcttgaggcagagtatgatggttacgctagtacagatgctagtggtgctgcattctgccgttcagctgcgcttattttaatggcactgttgcttctaaggcatgcattgtctatgtcagacaacgaaggaaacgatgatgacgcttctaccatattctcgctttttctgcttcgagctgctgggtttctgctgccgtgctacatcatggcatggatattcagtattttgcatcgccgtcgacaaagacagga

SEQ ID NO: 268706 - DNA, 547 bp, Zea mays
  unsure (1)..(547): unsure at all n locations
taaacaaagaaaaacccgtgggccgtggtcactccgtccgcacggcgactggactatactgctcccatgaacctcgccgtcgcagccgcactgccgtccgtgacgccacgtaccggcgtcgtgctcccacggagcagtcgccgacactgcccccgcggggtcgtcccactcgcggcctcgagctccgtttcctcctttacctccccctcagcagcggcggcgcccatctacacgcccacgccgcaggaccggtctctccggacgccgcatagcgggtaccactttgatggcacggctcgacctttctttgaaggatggtacttcaaggtgtcgattccagagtgcaggcagagtttctgctttatgtactctgttgagaaccctctcttccgtgatggtatgagtgatttggacaagttgttatatcgcccacgctttactggtgtgggagcacatatccttggtgcggacgataagtacattggccagttctttgagaaatcaaacaattttggngaagtaggcatgaactaatgctgggaaacac

SEQ ID NO: 268707 - DNA, 670 bp, Zea mays
cccactcgtacgcgaatcatcaacgcccgcggttgtgcagggctactagatcccggccaagacggctctcttcgtcaacgtgtgggccatcgggcgggaccctgctgtgtgggacgcaccggacgagttccgcccggagcggttcgtgggcggcagtccctcggtggacttcagaggtaccgactaccagctcatcccgttcggcgccggccggaggatctgccccggtatcaacttcgcgctgccggtcttggagctcgcgcttgtcagccttctgcaccacttcgaatgggagctccccgccggcgtgggaaaggcggacctcgacgtgggcgaggcgccggggatgacgacgccgcggcggattccgctcgtccttgtccccaagtgcaggacgctcgttcagccagcactgcagtagcgcgaggaatttcatgtgtctccatgcagtggcggaaccagaaatatttaagagcttgggtaaaaaataatacttatactgtaaatatgtagctttgtctaatttttacctgtgtttaactatattttacgacttgttgtatgtgtataagttcactaccactaatggaggagcctatgctcttgcccccaaaaaaaaaaaaaaaaaaaagggccgccgctcgcgatctagaactagcccacgcgtccg

SEQ ID NO: 268708 - DNA, 527 bp, Zea mays
cccacgcgtccgctcggccactgctcagctctcgctgcagcgatggccctgcaggccccgtgactcatgcgcgcgccggcggcgcagcggtccgcgccgccacggccctccttctccgctccgtggtcgccgcggctgccggcgccggcgcggccccgggtggccacggccgcgcggatcaccatgcgggtcgcgtccaagcaggcctacatctgccgtgactgcgggtacatctacaacgacaggacgccgttcgacaagctggctgacaactacttctgccctgtttgtggagccccgaagagaaggttcacaccctacgagccggcagtctccaagaacgcgaacgccaccgatgcctgaaaggccaggaaggacgagctgaagaaggaggagagcatggggaaagccttgcctattgccatcgtcgtcgggatcattgccttggctggcctgtacttctacctcaacaatgtctacagctaaacgatgaatagacccgtttggtgcggcgaacaggattcatg

SEQ ID NO: 268709 - DNA, 963 bp, Zea mays
cggacgcgtgggcggacgcgtggggtaaaatttgttggtgatggatatatccattgtgaagcttccggtattggtagatgtgagatcaacaatggagggtgctggcaggaaagtaaagatgggaagacaatctctgcctgctcaaatgaagtatctgaaggttgtaagtgtccagtgggtttcaaaggtgatggagaaaaaagttgtgaagacattgatgaatgcaaagagaaactttactgtcagtgcaagggttgcagctgcaagaatacatggggaagctacgagtgcagctgtggtgatgacaatatgctatacatgagggagcatgacacttgcatcagcaaagagggaactgccactactgttggctggagcttcctctgggttattttctttggacttgtttttgccggggttggagcatacgctgtgtacaaatacaggctgcggagttacatggattcagagatccgtgccatcatggctcagtacatgcctctggataaccaagaaggagcaaaccagcatcaggtcgtgcacgccaatgatatctgaagctgcactccttttctgaagcagaaatagagggggcgtgcaacatttcacttgtgctgctgcatcattgggtcatgggttttacaggtataggtcaactaggctcaaagatacacaggttatgcgagatcaagatctactgtaccatgaattaagatttaagagagagacgttgtgcgcctcttgttacgacacttgatgaacagcatagggaatgataccatcatagttttagtagtccttcgttgccttcagtttgtcttcaaagagttcttgttgcctcttcacatacatgtaaacactgtaaataccgttacctgaataaagcttcagcctgctaggctacaagcagggttcactgtacgtgtccgtacatgtgattcatcccagatttctttcgctgct

SEQ ID NO: 268710 - DNA, 553 bp, Zea mays
  unsure (1)..(553): unsure at all n locations
cgtgtacaagggcaactgacgcggtcaccctcgcccccaacacggggagatggtctgctctccaccggatggacccccacggcaagcccaagcccgccggttcgacgccgccgacgccgtcgaagccgccgaagccgccgacgccgccgaagccgccgacgccgccgacgccgacgccgccgacgcccgaggcgaggaaggggttcatgcgccgcatcttccctttcctcctagccgccaacctctttgtcgtagcttatgtcctcgtgcgggccaaccaaaaggactcagcaaagaaggacccaacgactgatcctgctactgcaactgctgggaagcctgctgagccagtctctatccccagaaaggagctcccaccaatccctgaagatgaccagcgcaagctctacaaatggatgctggaagagaaagcggaagatcaagccacgcaatgctgccgagaagaagaaactcgatgaggagaaggcccttctaaaagagttcatccgagcaggatccctnccaagcttatgagctcacccatttgggtctc

SEQ ID NO: 268711 - DNA, 431 bp, Zea mays
tgaatccattgcagcaagcatttgctagcattgctgggtccatttctgggcagccacccctcaaggtaccaattcccggcaacaccagagctcgatcctggctcttgactacctacctggacaaagacttaaggatctcgagaggcgatggaggcttgtttattcttgccaaagaggggagccctttgctagatcaattgtaaatctgtaattggttgctaccggaaaggatatccagaactccacaggtaacctaacagaggacgcctcacattgtatttatcaatcaatattgttgttggcggcactgttacatgtatggggccatgaaatcttataaatgaatatttagtcgataagaatcgagagctgaactgagactgatacaaacaaaacacttcaatgttcaaaaaaaaaaaaaaagggcggcg

SEQ ID NO: 268712 - DNA, 499 bp, Zea mays
ttacttcacgcgcccgtcctcgcctccggcaggttcctaacccccacccacctcgcccaaattgcaaccttccccgagtgctccaggtcccgtggccggcccccagatcctgtccaatcccaatccaagtatcgaacggatcccatcggtggcgctcgagcgagcgagtgcggccggaaccgagcgaagatgggcatctcgagcatgccggcgcccgaggacagcctgctggggttcgtgctgtacaacacggcggcgtcggtggcgatcctggcggggctggtgcgcgccgcgctgctgttcctgggcctggcggcggcggaggacgaggagccgcggcagcaggcggaggccgtgacggtcacggccgtggggcccagcctcacggaccggttccggagcaggttccggccgtcgcgctacgggcggcgccggggcggggactgccgcgtgtgcctggtgcggttcgagacggagtcggtggtgcagcgggttccct

SEQ ID NO: 268713 - DNA, 1242 bp, Zea mays
ttcgtgattcttttgggatatatgccaatacttaaggaataaattggtttccattgttcctgtcaatacttgatgttttatcttatataagcaatatgctttaagagataaatttgccattccttttgatctggggcaggctgagggtatgaatataccatgctgcggatcacgtgacacaagctcaccaaagggaaccgtgtggaagactgtacctcacaggttgcttttcggtagatcgtctaccccttgttggggaactggtggtgtggcttttctcaaccctgagataaactacaatgagaagttgtatgtctgcatgtacaaaataacgttggagcagttcaatgacatcttgtttcaggagaatcgtttagtgctggaggatggcaaagacggaaacactgtgtatcctgactctcctttgattggttcatctgaaatcaagtttatatctacaaacagagctgttcatcttgaacctattaaggatagctggtactccaatgtactttatcttgggaatgaggatgaagttccaattctaactatgacgtgccccgcatcagatattgagaggtataaatctggtgagctgcgtttagcacctccatcagagacgtatgcggccactctgataaagggactagtggaaggcaagcaaatggatgcggacggagctgccagctacatcaacgctgctgctgcaagagccttgtgaaggctgcttcagcgtgtgcttttgtacagccagtaaggagtagtaaggatacactatctgttagcgtggcgacaccaggaaacctttattgtccgcaaatggagaacttggatccaatctgaattgggcagcatgattcgagctcgccctagcttgaaccggctgagctcagaggcgtccatgttcgacttgtagtacgggcggcggcaggaggagcactaccggctgatgtacgagcttcgggcggcgctgcagcagcacctgccggagggggagctgcagatgtacgtggagagctgcctggcgcaccacgactagatggtgggcattaaggagggcgccatcaagggcgacgtcttccacctcatttccggcgtctggcggagccccgccgagcgctgcttcctctggctcggcggttttcgccccttccatgtcatcaagatgctgctgtgccacgttgagccccttgccgaacagctgatcgtgggcgggtaccggcttgcacagtcggcgcttga

SEQ ID NO: 268714 - DNA, 536 bp, Zea mays
cgcttcttctgattccgaatctgatagtgaagatgttgatgagctccttggcactgttgcatctgtcaatgttattgaagctactggtgttgctataagtgaacacctctcaaagatgaaacttgatgatgacagccttgcagtgaagactaactcaagttgctcagcagcagaacagcatccagttgattcagtaaaagtacataacaatgcatctgttgtgctgaccaaaaaaatatctgatttatctcttgagtggcgatcagatttatcgaaaactgatgtctggtatgccagttttggatcaaacatgtggagaccaagatttctatgctatattcaaggagggaaggctgagggtatgaatataccatgctgcggatcacgtgacacaagctcaccaaagggaaccgtgtggaagactgtacctcacaggttgcttttcggtagatcgtctaccccttgttggggaactggtggtgtggcttttctcaaccctgagataaactacaatgagaagtcgtatgtcttgcatg

SEQ ID NO: 268715 - DNA, 378 bp, Zea mays
catcaacgctgctgctgcaagagccttgtgaaggctgcttcagcgtgtgcttttgtacagccagtaaggagtagtaaggatacactatctgttagcgtggcgacaccaggaaaccttcattgtccgcaaatggagaacttggatccaatttgaattgggcagcatgattcgagctcgccctagcttgattactggtgaacggtgatctcccctggctggttgattctgggagaaacactagctgtgtcggggtggagcaacactagttggcggttgcaacaggtgctctcactgcactggtatcgtgcttgtctgacataccgtagtatttgcatggcatgctggtgatgttatttgtgcaattactgcattatgttc

SEQ ID NO: 268716 - DNA, 787 bp, Zea mays
gccttattgaatatagggcacatcctttctgggtacaaaaatactgtccttcacatgaaatggatggtactccgaggtgctgtagttgtgaaagaatggagccaagggaatcaaaatatgtattactggatgatggtcgtaagctctgcctggagtgccttgattccgcagtgatggatacaaacgactgccagcctttgtatcttgaaattcaggaattttacgaaggactgaatatgaaagtggaacagcaggttcctctgcttctggtcgagcgacaagctttgaatgaagccatggaaggagagaaggctggtcaccaccatcttcctgaaacaagaggactatgcttatcagaagaacagactgttagcacgatactgagaccaagaatggctggaaacaaaatgatgggaatgataacagagccatataggctgacacggcgatgtgaagtgactgcaattcttattctgtatggtctcccaagattgttgacaggttcaattttagctcatgagatgatgcatgcatggttgcggcttaaaggataccggacactgagcccagacgtagaagagggcatttgccaagttcttgctcacatgtggatcgagtcagagatcatggccggatcaggcagtagtgccgcatcgtcatcctcaggatcttcgtcatccacatcatcgaaaaagggcgggcggtcccagtttgagcacaggcttggggactgtttcaagcatcagatcgagacggatacttccatggcctacggagatggtttcag

SEQ ID NO: 268717 - DNA, 774 bp, Zea mays
  unsure (1)..(774): unsure at all n locations
ggaatcgactttaacagctttggacaagacgttgaatctgctaaaagagctgtgaggggactgccaggtttcgttgtagggaacagtgaaagtacttcactgcaagcctgttcatctgttggacatgttctcaatgaggtgtttgaaacatttgttgaatctactcttgtacaaccaacatttgtccttgactatccagttgagatatcaccattggcaaaaccacatcggagtcatgttggccttactgagcgattcgaacttttcatttgtggtcgtgagattggcaatgcgttttctgagctcacagacccaattgatcagagaagccgttttgaaaatcaaataaaacagcacaatgctaagcgtgctgcaatggctaaggaggtcaaatctaccgagggtgaaggcgacgacgattactcgtatgaagtttctttagacgaggacttcttgacttcattggaatacggaatgccaccggcatcaggaatgggcctcggtatcgaccggttagtaatgcttttgacgaactcttctagcataagggacgttattgcctttcctgtcttgaagattcagcaatagatccccttcattctgtgaagaggcgtggctgctgaagaaaacaccagcagccttccttttgtgcttggatcagtacagcaggttttatatctgctgacctttttatagctcatagatgtggccatttattatttgatgatgtanttgagatgtctatagttcagagccaagccgtattaaaactta

SEQ ID NO: 268718 - DNA, 617 bp, Zea mays
cccacgcgtccggcttgtccaggtccaaccgtccaaggataaaaaatgagcacgaacctgggaggagcctcttgcttcggcttcggcttgactcagatgcagcccgccgccgttaggctccggttgccgcctgctcgcgccgcggacacttcgtcctcccagtcgccggcgcgcctgacggcggtgctggagcaggtggaccagttgctaagccaggggaacgacatggccgcgctctccctcgtgcgcagtacgcaggggggtgacggcgggctccgggcctttggcgccgccaggcaggtatattttggtggtggggtgagaaacttggttcttgatacaattggtcactatctcagccagaagtatcacaacagagttatccagcatgaagctggtcacttcttgatagcttacttgcttggagtgcttccaaaaggatacacaatcacaagcttagatacacttatgaatcaaggatcgcttaatgtgccagctggagcagcttttgtggactatgagttccttgaagagatcaatacaggcaagctatctgccacgatggttaacaagttctcgtgtatagcactagccggaggtgcagcagagtatcttct

SEQ ID NO: 268719 - DNA, 654 bp, Zea mays
  unsure (1)..(654): unsure at all n locations
aggaggagcctcttgcttcggcttcggcttgactcagctgcagcccgccgccgttaggctccggttgccgcctgctcgcgccgcggacacttcgtcctcccagtcgccggcgcgcctgacggcggtgctggagcaagtggaccagttgctaagccaggggaacgacatggccgcgctctccctcgtgcgcagtacgcangggggtgacggcgggctccgggcctttggcgccgccaggcaggtacctcaacgactttataaattggatgagcttaaactgaatgggattgatacttctgctttcctatcacccgtagatctgacacgaggatcaattgagagaaatctccaaatcgctgcagttctgggagggctttctgtatcagctgcattggaactttctcaactccaaatcctgtttctcatactaggtctactatctttgtggtccgtggactttgtatattttggtggtggggtgagaaacttggttcttgatacaattggtcactatcttagccagaagtatcacaacagagttatccagcatgaagctggtcacttcttgatagcttacttgcttggagtgcttccaaaaggatacacaatcacaagcttagatacacttatgaatcaaagatcgcttaatgtgca

SEQ ID NO: 268720 - DNA, 405 bp, Zea mays
tccacgcgttcgattaaaaatagtgtagaaaatgaagatatggctctagtagatggggtactgtatttaagacccgggagactgagccctataactgtttgatgagtttttataaaataggacccctgttggagtatgttggagtatgtttctggtgttagggtcctatatttcaaaataggatcctatttaggactcttgttggagatgctctataggtgattatatcttgggccttgacttaaccggtcattgggactaacttcaactgtacatagtatagaggtgttcatcactggtgggaatctacatgttgcggctcgtggcgcgtgtaaattatcatacaagtggacagcaagtttggtgcaatgcataaaaagctttcctaaaaaaaaaaaaatgcca

SEQ ID NO: 268721 - DNA, 970 bp, Zea mays
cccacgcgtccgcgcaagaaaatctcgcgatttcccctcgcagtctctcgcacgcgccggcatggcgacgctcgcgcggtggcatctacaacctcctactgcccgccccctcgctcgccggcggatcccgcgccgggctgcgaccgtggtttccccgcgcgcgttcagccgcgcggacttcgatggcttcgtgcggcgcgcgtggcagggcgccaacgcgggggccgagcgcttcgccttcgaggcacggcaggccgcgcagcggctggacagcaggttctcgatctcccggaggctcgcagacgcttcccgtgccgcccgcgcccgcgcagttgagatcgacgccgagttcggcatccggcggcggtggcgctccttctctgtcgacttctcccgcaattggcccaggtatcggagggacatcaatgacttcatgggaactcccatcgggagagcattagctacaatatttttcctgtggttagcactgtcagggtggttgttcagaattttcatttttggcacgtttgtgctgccatttgctgcccctcttctccttgggacctttgctaacagggttgccattgagggaacatgcccagcatgcaaaaggcgtttcgtgggctaccgcaaccaagtgattcggtgcatgagctgccaaaacattgtatggcagccaaataacagcccatctggtggtgctagaagttcacgaagctcggaacctgatgtgattgatgtagaatatgaagagaagtaagaacattttgccccaccctacaccgaaaagcaaaaatcacgtgggcggaagaaaaggcaaggcttgagacacaggctgcaccccatgagcaatttgtagatttggttgtttgtgtttttctggtgtacatacattacgtgctcctttcgaaataaaatggaaattctggtgttgtgcccaaaaaaaaaaaaaaaaaaaaaaaaaaaagaa

SEQ ID NO: 268722 - DNA, 832 bp, Zea mays
ctatcttctcccccaaatcgcattctcatcgcaccgcacgagctacggatctgcggcccgacgactacgacgacggggaggtaggggacgaatcgttgcaagcaacgaggtcagaactaaggaggccgatccatcctccagcctccgatcccatccgacgacatggtctgcgtcgcgtgcctgctgccgctcttcctgatcccggtggtcaacgccctcccttacctcatcgacctcatcatcagcaaggtgtatcggctatttggatgggagtaccggagacctgaaagagtcccacctgcatgtccatacaagcctgcagctcagaagaacgatgagggtgcgagtgaatcaaaacccctggccgaaccgcacggtgctggtgctgcggcggcagaagataagaaagtggaatgatgcagcaggcgcttaaaatggaggccacggctctgtgtggttagctaagaaacaataattgttgtggatggttatgtacttgggtgatgggttgaacttgttatgacactccggatccttaccagttgcattactaatcactgctgctggtctggtctgtctgaatagaagggagttgaacttgcagtcgcaaatgtaatagcgagagtgaatcttgttgtccaaaggctttcgtatagaatataatgcttgaataatgagctcaacccatcacccaagtacataaccatccacaacaattattgtttcttagctaaccacacagagccgtggcctccattttaagcgcctgttgcatcattccactttcttatcttctgcccccccagcaccagcaccagcaccgtgcggttcg

SEQ ID NO: 268723 - DNA, 526 bp, Zea mays
gtagcaactgcatcagtgctcccgtcgacatctactcctccaacacacaccagtctgcggagccttgcacggttaaaagagctgaactctggctagaaccgtagaagactggggtttgctctgcgctctcctgctcgcgtgcggccacgcgttcgagctgagggactgcagtgccatagccataggaagggaagaactcgagatgtacatagatagcgtgggtgtgtagcatcggaaaaaatcatttggtctggaactacgtagcgtaattggtcaatcagatcattttcttgtttctttttgtctgattatgcttacccagtggtaaatccgtccattgtatcggatttaatttaaaaattctgtaatacagaggtgtcgtgaaatagttgatgacgcaactggaggttagtggtgactggtgaccaaagaacatatgctctgcttatgatctagaagttaggttgtgacatgagaatatatactatttatttgcaacggatgagatgctcttatttcatttagc

SEQ ID NO: 268724 - DNA, 1420 bp, Zea mays
ttaaagtcgacccgcacctctaagccaaagcaagttgctaggtcctttgaaccagcaactgaagcttcctcgtctcatcatcgagaccagtaagcaacatggcggctaatctcaagtgggctcctgttctagccctcgtcgtcgtcgttgctgccatggttggcaccacgagcgccggcaacatcgcagtgtactggggccagaacggcaacgaaggcagcctggcggacgcctgcaactccgggctctacgcctacgtcaacatcgcgttcctcacaaccttcggcaacggacagaccccagttctcaacctcgccggacactgcgaccccggctccggcagctgcaccggccagagcagcgacatccagacctgccagtcgctgggcatcaaggtgctcctctccatcggcggcgccagcggcagctacggcctctcctccaccgacgacgccaacagcgtggccgactacctgtgggacaacttcctgggcggcagcggctcgtcccgcccgctcggcgccgccgtgctcgacggcatcgacttcgacatcgagaacggccagtcggcgcactacgacgacctggcgaacgcgctcaagggcaaggggagcgtgctgctgacggcggcgccgcagtgcccctacccggacgcgtcgctggggccggcgctgcagacgggccagttcgacaacgtgtggatacagttctacaacaaccccgggtgcgcgtacgccaacggggacgacaccaacctggtgaacgcatggaacacgtggaccagcagcatcaccgcggggagcttctacctcggcgtcccagcgtctccccaggccgcgggcagcgggtacatcgaccccggcaccctgacgggcacggtgatccccgccatccgaggcattggcaactacggcggcatcatggtgtgggaccgctttaacgacgtgcagaacaactacagcagccaggtgaagggcagcgtctgatgggcataccgcatacgaagcttcaagctacagcacctagccatgcatatatatatagtggctattcgtcaagttatcggactagatatacaaataatataataagagcggatcatcgggagacaaagacgcatgtcagctattgtctcgttttctaagcaacgagcgagagctgcatgcgctggttagatttaatatggatattgcccatacgttatgtaattaaatcaaataaatgttaagttcatattgaatgtgtcgaatcccatggtacaaccctatttaatatgagtctcttagggtttctatagaattaattgaaaaaatacaagagaagaactcttcgcgaagagtctgtctctattcactctccatacatattgtctattaactatattttttatccaaagggacagagttatatatgttagatt

SEQ ID NO: 268725 - DNA, 705 bp, Zea mays
gcgcaagcgcaaagcagcttcctttcgcctgctgacaaggactagtcgagcggcgagcgaggaggcggaggatgggccgcggccggggcgtgagctacgggggcgggcagagctcgctgagctacctcttcggcggcggcggcgacgaggccgccgcggcgcccgccaagccggccgcggcggcgcctgcgcctgcgcctgcgccggtgccggcggcagcagacggcgagaagctcaaggggatcccggccggcgtccgcggcaaccagagccagaccaacaactacttccgggcgcaggggcagaactgcggcaacttcctcacggaccgcccgtcgaccaaggtgcacgccgcgccgggcggcggctcgtcgctcggctacctcttcggcggcggacctcccgggagcaagtgatgtgatgggcaccttctccgccgagacttttcggagcaccgcctgcttgggaagcttgatttttactaagtccatcgtgacctgctggatgtgaagttaatttccatgaagaaatgtatgttcatgtgtacctctgtattctagaaatgtttatgtgtatctctgcaatttcgttggggtcggtcgtctcatcagtacctgtatgtgtgtgtgtcataaactgactttgtcctgcatctgcatgttgttcatcagaagttgagaacatgtgttaagttgttcccctgct

SEQ ID NO: 268726 - DNA, 1590 bp, Zea mays
aagttgactcttcagtcagttaaaaatgctgtcatgaaccagtttgtgggtggcaacatggaggtcagtattgttggtgatttcactgaagaagaagtagaatcttgtgttcttgattatcttgggaccgtgagggctccgagttctctaaacacagaggagcgtattgagaagatttccttccgaccatttccatcagatgttcatttccagcaagtatacataaaggacacagatgagagagcctgtgcgtatattgcaggccctgctcctaaccgttgggggttcgctactgaaggaaatgacctatttaatgtcattcggatatctgatgctgatgcagaagtatctgaaccagtgagcttggatctaacagggaagagacacgtcgatgttcgcagccacccccttttctttggcatcactttgagtctgcttgctgaaattatcaattctaggctatttacaacagttcgagattccatgggattaacatatgatgtttcttttgaattgaacctttttgacaaattggatcttggttggtatgtgatcgcagtcacttcaactccaagcaaggtccataaagctgttgatgcctgcaaaggtgttctgagaggattgcatagtagccgaattgtggaaagggagcttgaccgggcaaagaggacgctgttgatgaaacatgaggctgagacgaagacgaacgcctactggcttggtttgcttgcccatctacaatcttcatctgtaccaagaaaggatgtatcatgcatcaaggaattgacgacattatatgaaagtgccacaattgaggatctgtatcttgcatatgagcatctgaaagttgacgattcttctttgtttgcttgcattggaattgctggcgctgaatctggcgaagatacaaatgatgatgagcttgatgtggatctgcatggcatggctcccatgggaggtcggggtctttcaacaatgaccagaccaaccacatgatcaccattgggatggccagcccttccaaggtgacatattaaatgctgtgttactgcatcatggacaagttgtgctgaaacctactcggaattggttgtggatctttatatggattttaaccttgctcctgaagacaggagccacatggccctaggagactattctcgtttcccagcaaaacggtttaaagataattgaaacattggatctggatctggggagactattgtttgtttcctatgagccacaaccaaaaagcttggccgttgcatttcccccccagaagaagcgttggagttaatgactcgcaaggtcgtggaaaggagataatatttttcgaggtcattatgtagcttggcatgtacaggaaaagcaggctggttcttgcatacagctgttgtaactagggcgttcagggcattgaagataggatgacagtagaatcacagataagttgctggtctgcgaattcggaaataatgatgatgaaggcgtaggctagtaacattttggtggtattcttttttttttttaatcaaatatttgtagcccttgttaccggataataaatcgagatccatagctttgatgttg

SEQ ID NO: 268727 - DNA, 741 bp, Zea mays
  unsure (1)..(741): unsure at all n locations
acattatatgaaaatgcaacgattgaggatctgtatattgcatatgagcacctgaaagttgacgattcttctttgtttgctggcattgggattgctggcgctgaatctggtgaagatacaaacgatgacgagcctgatgtggatcttcatggcatgggtcccatgggaggccggggtctttcaacaatgaccagaccaaccacatgatcaccattgggatggccaacccttccaagggattaaccttgctccccaagacagggagtcacatggccctaggagactgcatgttgactgtcgtttcccagcaaaactgtttaaagataattcaagcatttgatctggatctggaagactatgatatcctgagccacaaccaaaagcttggtggctgcattttttccccgaggagcgttgagttaatgactcagcaaggtcgtggaaaggagttaatattgttcgaggtcattatgtagcttcgcatgtacaggaaagcaggctgattcttgcatacagcagttgtaattaggtcgttgagggcattgaagatataggatgacagtagaatcacagataagttgctggtctgcaaattcagaaataatgatgatgaaggcgtaggctagtaacattttggtgttattcttttttttatcaaatatttgtagcctttgtttccgccccctcaatactctcaaaagcccccatgttgatataaaaaaaaaaaaaaataaggntnna

SEQ ID NO: 268728 - DNA, 1251 bp, Zea mays
agagggctgtagcctccgagccagcagcgatggcggccgagacgagaagtgtcgatggaggccggggcctagcggaggccgttgggaatgttgatgccggaggcgaggatgagagggatgcagattctagcggcggtgacgcttcggggaaggttttcgtagggggtgtagcctgggagacaactgaagaaacattcacaaagcattttcagaagtatggagctataactgattctgtgatcatgaaggacaagcatactaggatgcctcgtggatttggatttgttacattttccgatccgtctgtgcttgacagggttctagaggatgaacatgtcatagatggaaggacggttgaagtcaaaaggactgttccaaaagaggaaatgtcatcgaaagacggtcctaagacaaaaaagatctttgtgggtggtatcccaccatctcttaccgaagataaattaaaggagcacttctcatcgtacgggaaggtggttgagcatcagattatgcttgatcatagcactggacgttcacggggctttggatttgtcacatttgaaagcgaggatgctgttgaaagggttatgtcagaggggagaatgcatgatcttggagggaagcaggttgaaattaagaaagctgaaccaaagaaacctggcgctggtgattcaagctcaaacggaagacacagccgtggtggtggtcatcgtgattcataccgtggtagtggtgtttctgtgaacagcggtggcggctatggatatgggggtggttaccgatcagctgctgcagcatattatggcagcacagcatatggtgcctatggcagagggtatggatatggtgctacttctggctatggctcaggttatggctctgcatatggtggctccatgtatggaggtccatatggtgcctacgggtcatatggtggtgcctatggaggtggtgcgtatggtgctccaggagggtatggtgggggaggatatggcagctacggtggggctggaggcatgggtggtggtggcagcgctggtggtcggggctccagcagataccacccttatggaaaatgataatccattcactgcctttgccttcctctaggatctgataataaagctatacattcccaccgagaaaatggaacattccattcaccttgttgaatcagcggcatctgaacatttttttcctggaacaaagattctagtctgtagtcgctgaaccctgaactgcctcatccca

SEQ ID NO: 268729 - DNA, 547 bp, Zea mays
gcgtatggtgctccatgagggtatggtcggggaggatatggcagctacggtggtgctggaggcatgggtgggggtggcagcgctggtggtcggggctccagcagataccacccttatgggaaatgatcatccattctgtgtttctctaggatctgataataaagccatacctttcctcgtttctgctactgagaaaatggaacattccattcgtcttgttgaatcagcggcatctggacatttttttccttggaacttgcattgcacatcaacgattctatagtctatagtcgctgaaccctgaaccgcccccaccccgagctttctgtagaagctgcagctgaaattctcgtagtctggcatgagccttagaatgcccttgaaactattatctttgtggtagtaacattatggtgtaatggaacagatgtacgttgttgtaacattcactcactgatcagagacttgctatctctacatatgcgcagagaagctttgcaaatgattccctgatactattaaaaaaaaaaaaaaaaaaaaaaaaaaa

SEQ ID NO: 268730 - DNA, 732 bp, Zea mays
ggacgtgtcgcggcgggtgatgctggggcgcacgcgcgcgcagcagcagcaggcggtgcgcgaggtgctgctgtccatgctgccccccggcgcgccggcgcagttccggcggctgttcccgccgacgcggtgggcctgcgagttcaacgcggcgctgaccgtgcccttcttccgctggctcgtcggcccctcggaggtggtggaggtggaggtcggcggcctccggcagcgcagcggggtgctgcatcgagaagtgccgctacctggagagcagcggctgcgtggggatgtgcgtcaacatgtgcaaggtccccacgcaggacttcttcaccaacgagttcgggctccccctcaccatgaacccaaatttcgaagacatgagctgcgagatgatatacggccaggtgccgcctccgttggaagaggacccggcgtcgaagcaagcttgctacccgagcctctgttccatgtcgacgccatctgccccggcctgtccgaagcttcagtaggtccatacatgcatgtgcagagtttgccggccggacttgggatggaaaaagtatcattagtatttttttatacagaaatgtagcttgtaaactattagtaaagttacatacaaggtttgttctgagccaggacagagcactctgtaataaagaatacgtttctcagacctttggtaaaagggcggccctccgatctagcccacgcgtccgcggactcgtgggt

SEQ ID NO: 268731 - DNA, 443 bp, Zea mays
gaagaagatgctccatgcctgtctgcaggccacaaatgagcttatgaacgacttgccagaccacacagggtcaccttgccctgctccatatgcccctgaattgaaatgagattgcatgttttcttttcccagatggtcataccattaagaatgtcaaaatttgatcaatttgcatatctatatgaagaccatatatgctgcaaggtggatatactatttgaaagaatctgctgcttgtttcctttagagattacagatcttaattgcatgctagaaggaaatcgcatttcttgctgttcgttcaagttaataaggatatgattggtctccagcgggatatggctatggtctcgaaagggatgtggtcatgttgtagttagttgcgatgcacagaaagtatcacttttgttaatctagttggtgttgtattaacaacctccttt

SEQ ID NO: 268732 - DNA, 611 bp, Zea mays
  unsure (1)..(611): unsure at all n locations
tttctttcgcgtccgcccacgcgtccgcccacgcgtcccagttgatcacggtcgcggtatggtcttcagatcgcactggagacaactgccaaatccttacaaaagaggttccaaatttgaaactggcaggtcctagccgtgctgttctgctggtggatcctgtgactattgaggctgacctgaaagttaaaggccgtactgaatctgaggataaacacttgagctttctagcagtgccattcttggtcatgatcccgctcgagtcatgcctgcgtacaagagatttcaccagcaagcttagcacgctgaggtttgctctcgcaattgttgttctctcagtggaggctacaattagtgtgcgagttcgtggtgggtcatggcctgatggtctccgtgcccagtttgctgcccacacggtgagtataggtcgtgaggaagttgtcttgcttgattctggggacgataaactgcctgtttctgatgatggcactatcaaacttggtcgtcgagttgcatctggtgaagtgagtggngagctgaacgtttctgtcaaggcatggcaagggtggtgaagtctttacgcacagagagaggggtttcaaacctaaaga

SEQ ID NO: 268733 - DNA, 419 bp, Zea mays
cccttagctcggagtcggacacccacccgccacgaccaccagaccactcgcttccccgaagcttcagctccgcgcttctctgttcgagctagccagcctccagcaagagcgagcgagcgagggcaacgggcatggcggcggctgtgtccttctcccgggtgcgagctctcccgacgtggtccagctccgtgtccggcgacgaccaccaccgctcctactccgcggcgctggccatgtcggtgtcggtgcggccccggtgtcgcgcgcggtcgccggcgcggatgatgggcaacgtgaacgccggcaaggggctgttcgcgccgctcgtggtggtggcgcgcaacatcatcggccgcaagcgcttcaaccagctcaaggggaaagcaatcgcgctgcactcgcaggtcattaccgagttc

SEQ ID NO: 268734 - DNA, 706 bp, Zea mays
cccacgcgtccggatcgttgctgttcgagcggggtaagcttagccagcctctagcaagagcaagagcaagggccccgggcatggcggcggctgtctccttctcccgggtgcgagctctccccgacgtggtccagctcggtttccggcgacgaccaccacgcctactccgtgttggcgacgtcgtcggtgtcagccagacctcggtctggcgcgcgaccgctgcggtcgccggcgcagcatgatgggcaacgtgaacgatggcaaggggctgttcgcaccgctcgtcgtggtggcgcgcaacatcattggccgcaaacgcttcaacccgcccacgcggcccgcaatcgcgctgcactcccaggtcatcaccgagttctgcaagaccatcggcgcccactccaagcagcggcagggcctcatccgcctcgccaagaagaacggagagaagctcggattccttgcctgagacgaccatgttctacgcacatatataagtatataatctataagtactacatcatcaagtagtggcggacaatgataattatattgataccttcttccttgctcccatcgagtcctctatcaagtggtagccagtacatgtcatgtgatgatgcttcaattcagcttccgatgctcggctgtccatcatcagctagctgcatgcttttgttttgcttcattcctgcagagattactattg

SEQ ID NO: 268735 - DNA, 521 bp, Zea mays
cccacgcgtccgttttttttttttttgctcaaaaaggtgtttctcatcagcttttggtaaagtcattagtttgagttcatacattaactatcctcatacgggcaacacttacaataatcaaatcccgtatgaagatcacttctttttttcctttaagccaaggtacagatttgcccgtccaatttgcatttcctcacctgggttacgcttacgcagtttccgttgcagcaaagactcgtctccactcgattgttcactcacagatagagtatgaaactcccagtcatgtctcaaagatgcccttcacatagaccatccccttctcgctgaacttgaggtccttcctcatctgctcaacctggacgtcatcgccctgcacaaggatctcggacacgttcccgtcatcggataggatcatcttgaccttgatctcccctttccttgacgctttcgtccagtagtacgatcccctgggacctcatcggacgcgtgggcgaacgagtggtcgaccgggaatccgg

SEQ ID NO: 268736 - DNA, 268 bp, Zea mays
aaactcccatgcagtctcaagatgcccttcacatagaccatccccgtctcgctgaacttgagggcgttcctcatctgctcaacctggacgtcatcgccgtgcacaaggatctcggacacgtttcccgtcatcggataggatcatcttgaccttgatctctgctttccttgacgctttcgtccagtagtacgctcccgccatggggctcagggtcatgagccagaaccagttgttgccaccttctgggacagcgattgatagaacaagc

SEQ ID NO: 268737 - DNA, 471 bp, Zea mays
ggctcaatctcgtcatcaaacaccatacctcattttaagtggcaatgcaaaaacaggtcagacaagtgatagcggcggctatgctaccttggagacagagcaacctgggagcctaacgcccatgcttggggacaaaaaggtcgagcattttttgggcatcaaacgaagtgccaagcctggaagcttacctcctccagtcccaaagaaaccgaagaactgaacctggtgatagcactcagccaacgaagcaggctacaacgcatttactgtgaacagcaatcagcccacaagcttccacggctcaaccccacgccgccgcactggaaatgcaatatcctctgtatttcttctaagctgatcacactaacattctggcatgttcgatggggttttgtaattcagtgatatacgtgtgcatccttgatctgccttgaacatgtaagtgatggaactaaatattgttctaacgac

SEQ ID NO: 268738 - DNA, 560 bp, Zea mays
cggctcgagcctactgtcaccaagggccaccaaacctctgttcctcgctcgcgacggcctcggccatcccgccggcgagcgatggagcggcggtcctccgtccgctttgtgccatccgagattgcaaggatggagaaattggctgcagatagaaaagaccaagtctttgataacaagttctgccagaagcttgcagaagaatttaatcgttctgttggccgtgctggaagtaaagcgttacaagctacacaggttcaaggatggtttcttaataagtttccagcatcagccactaaacctacttgtgtgcccactgcttcccaagaaaagacttcagcctcagaaataaatgtatcagtttctgaaaaaaagatctgcagcgtccgaagagaaacttttccctcttgatacaggtgtttcaaataatgaggatgaggtttctcctgtttttccattagaaactaaagatatgattcctgaacttgaagacctggagtttgaggccaagtctacaaaggattttgcctggtatgacattgccctattcttggcacacagga

SEQ ID NO: 268739 - DNA, 714 bp, Zea mays
ttctgattttttgccagtgagatgagtgcactagtttgctgctggcaccaaaggaagatctaatggaacgtggaagatgaagatcttgcttgacaaatgttaaaacaccaggaacgagcaattgacttttggcaaaagcattggatatgttgaaccactcacccaatgctaattgcttcctgcattggcgttttaaagaccgtatgcttgaagttatgattaaggctggacaagctatcaagaaaggagacgagatgacgatagattatatgagtggcgtcaacagcaaatttatggaaagatatgggttctcatcaccaacgaatccttgggagctcataaatttctcgagtcctgcaacaattcacatggattccttcttatcggtcttcaatatcgctggcttgcatgatgagctgtaccacaattctgcattgacctcagtagtagaaaccgactttgtggacggagcagtcgtagcagcagccagagcattgccgacatggtcagatggtgatgttcctgcaatccctagtgtggagagaaaatctgctcaggcactgcaagaggagtgccgccaaatgttggattcattcccaactaccatcgaacaagaccagcagatcctagattccgatgcgcatatcagcaaaacccgagaaattgcgatcaagtaggtgaactacctatttgttatgatgggctagtgattga

SEQ ID NO: 268740 - DNA, 787 bp, Zea mays
gtttcggaatttcccgggttcgactgcacgtcgtctcgctgtacgccgcctgtcgttgtgagaattcttaattcatgagttgtagggagggacttatgtcaccacaaacagaaactaaagcaagtgttggatttaaagctggtgttaaggattataaattgacttactacaccccggagtacgaaaccaaggatactgatatcttggcagcattccgagtaactcctcagctcggggttccgcctgaagaagcaggagctgcagtagctgcggaatcttctactggtacatggacaactgtttggactgatggacttaccagtcttgatcgttacaaaggacgatgctatcacatcgagcccgttcctggggacccagatcaatatatctgttatgtagcttatccattagacctatttgaagagggttctgttactaacatgtttacttccattgtgggtaacgtatttggtttcaaagccttacgcgctctacgtttggaggatctacgaattccccctgcttattcaaaaactttccaaggtccgcctcacggtatccaagttgaaagggataagttgaacaagtacggtcgtcctttattgggatgtactattaaaccaaaattgggattatccgcaaaaaattacggtagagcgtgttatgagtgtctacgcggtggacttgattttaccatagatggtgagaacgtgaactcacagccatttatgccccgggagagaccgttttggtctttgtgccgaagcaatttcaaaagcacaagccg

SEQ ID NO: 268741 - DNA, 678 bp, Zea mays
aaggggaagaactttaaaaattgtaaaataaagattagggtttgggttgcgctatatctatcaaagagtatacaataatgatggatttggtgaatcaaatccacggtttaataacgaaccgtgttaacttaccataacaacaactcaattcctatcgaattccttcctatcgaattcctatagtaaaattcctataggatagaacgtacacagggtgtacacattatatatgaatgaaacatattcattaacttaagcatactcctttttttatttaatgagttgatattaattaaatatctttttttttagatttttgcaaaggtttcatttacgcctaatccatatcgagtagaccctgtcgttgtgagaattcttaattcatgagttgtagggagggacttatgtcaccacaaacagaaactaaagcaagtgttggatttaaagctggtgttaaggattataaattgacttactacaccccggagtacgaaaccaaggatactgatatcttggcagcattccgagtaactcctcagctcggggttccgcctgaagaagcaggagctgcagtagctgcggaatcttctactggtacatggacaactgtttggactgatggacttaccagtcttgatcgttacaaaggacgatgctatcacatcgagcccgttcctg

SEQ ID NO: 268742 - DNA, 800 bp, Zea mays
cccacgcgtgcggcggcgggcactgcaggcgctcgaggccggcgagggggcgcgctgcggggccggcggccacgggcacggcgaggaggcgcgcgtgcttctgcagcagcccgccgccgccgccgccccggcgcccgtggaggtcctggagctgcgcgtgtcggaggtgggcgaccgcgtgctggtggtgaacgtgacgtgcagcaagggccgcgacgccatggcccgcgtgtgccgcgccgtcgaggagctccggctccgcgtcatcaccgccagcgtcacctacgtcgtcggctgcctcatgcacaccatcttcgtcgaggtacgtcgtcggcaggtggattcggaccagacgaatcgtatccagatcaagcacatgatcgaggccgctctcgcccagctagatgatgcctccgcgagcccgccgagcgtgatgagctactattagaatcggacaaccgtcacgctgacatgcacgagccggcctagctactgtggccgaccggtactgttccgtgcgcgtatataggaactaggaagaagtgggtgctttgtttgctatatatgaggcactaggtcagggggttttgtgatggggctttatgcaactttgatgtaatggaccgaaaacgacagattgagtgttggcggctagctcccatatgtttagagtctagggaaggaataaataatcgagacaagtcttatccctgtatttttgtagagaggtatttgaaacaagaagttcatcaaatacaaggggaaaatgtcatggcgacaaatatgttagaaatctatgg

SEQ ID NO: 268743 - DNA, 732 bp, Zea mays
agcccaagcgtcggcggacccgtggggccggcggccacgggcacggcaaggaggcccccgtgcttctgcagcagcccgccgccgccgccgccccggcgcccgtggaggtcctgaagctgcgcgtgtcggaggtgggcgaccgcgtgctggtggtgaacgtgacgtgcagcaagggccgcgacgccatggcccgcgtgtgccgcgccgtcgaggagctccggctccgcgtcatcaccgccagcgtcacctccgtcgccggctgcctcatgcacaccatcttcgtcgaggtggattcggaccagacgaatcgtatccagatcaagcacatgatcgaggccgctctcgcccagctagatgatgcctccgcgagcccgccgagcgtgatgagctactattagaatcggacaaccgtcacgctgacatgcacgagccggcctagctactgtggccgaccggtactgttccgtgcgcgtatataggaactaggaagaagtgggtgctttgttgtctatatatgaggcactaggtcagggggttttgtgatggggctttatgcaactttgatgtaatggaccgaaaacgacagattgagtgttggcggcttagctcccatatgtttagagtctagggaaggaataaataatcgagacaagtcttatccctgtaaaaaaaaaaaaaaaaaaaaaaaaggcaaaaaaaaaaaaaaaaaaaaacggcagctcgcgatctaga

SEQ ID NO: 268744 - DNA, 533 bp, Zea mays
aattcccggaacgaccgcgatgcgacccacgcacgcgtggacggattctctttgtacatcctccatctttctattatcgaatcaattaacagccaaactctctcgtaagggagagagaaaaaaaacaggaatacgtttctacaatcctccgtctccgatctccacaccaaccccaatccagcaagacccaaaagaagccaggaacccagccaatcaaatcgccaccggtcgatccgggtgggtagcaagcgagatccaaatcacagcgcgatgttgaggcgctcggcgtccgtgccgccgagcccgagccacgaggaggccggcttcgccttctccgcctcctcggatggggacgggcgggcgtagggggcgcgctccacgaggcggtccttgcgcttggccaggaaccgctgcagcgacgccttccgggcgatgggcaggtcgtcgcgcggcgccggcgccggcggcgggcccggggccgccgggcgctcggcgccagctgcgaggcgcatgacctcggccccacgcgtccg

SEQ ID NO: 268745 - DNA, 594 bp, Zea mays
cccacgcgtccgcgcagagtttccacattgtagtaccatggaccgcggcatcaagaggagcgtcgcggcagcgggcggcggcccgccaccgcccaaggtgtaccgcgtggagcccagggacttccgggagctcgtgcagaggctcacgggcgccggcacgcccgccgccgccgccgcggcgctggtgccggcgcaccggagggcgacgctgacgccggccatggccgcggagagcaggcgcgcacaggccgctgcggccgtgcccgtggcggccggggcagagcagttcgactacgcggcgtcatggttctccgcgccgctgctgagccccgggtacggcgcgccgggcttcggaggcggcggcggccaccagcaccaggggaacactggctctctgttttagggccctaggtagaaacagagtccctgtatagctccgtcgtcacttgttcgtgcttctctggctctttttgtcttgcgtttcgggcatgactatacatacacaaccttcttgcgccgcgtataaaattcgaccaagaagttatacgggtagtgttcatttctgtgatttctgatagcacgataaatacatct

SEQ ID NO: 268746 - DNA, 507 bp, Zea mays
ggggccaactggagcattgggtggtagcagcgtgcaggggatgcaaggtggttatatgggtggctacggtggttctggtgggtatgggggtgcttcttcaggaggccctggaagacattacatgggtcattaggatgattataactattttactgtggccagaatgccagatgattctacatgttcctgcttggcacttataaacttgctgttttaagctgtttctggctactcaattatggctgtggtcaaagttttcataggaactttggttccctccacctatcatttcaaaacgaaattaccgtttagattttcaaaagggcatcttatggctgcaagactattgtagaagacttcatgtggatctaaagcattgtggtatttaatgatattactgtttttgtacggttttcaaaaggccaaattaaggcttgcaaaactattgtaaaagacttcctgtgggtttaaagcactgagctatttaatcacaacggttttgtttcc

SEQ ID NO: 268747 - DNA, 459 bp, Zea mays
taccaatcagttcaggttctaggaagggccgccattgcccctccgggcaacgaatccacggtgcagacgagtccatggaggctctgcacagtgacacaggtcgaggagctaaagatgctgctcttgacgctgcctacctgggcgtcgttcgtgattttctacgcagtcacgtctcagatgcagtcgacgatgattgagcaaggcatgctcatggacaaccacgttggctcgtttgccatcccgccggcatccatgccgatcattggtgtgctcagcttcctcatctgggtcgccgcctatgaaaccgtcctagcgccattggcgcggcgcttcaccgggaacgagaagggcttctccagtggcagcgcctcgcgatcggccaagccctgtccattctgacaatggcgcttgctgcgcttgtggaaaacaggagggtggcgatcgcggaagccagcgggc

SEQ ID NO: 268748 - DNA, 378 bp, Zea mays
gccgcgggccccgccgtcgtgtacctcgtccccgaagagcaggcgtggcaggtggcgctgcaggccgtcgccgcgctcgtctgcgtggtcggaggcgccgccgcggtggccgcgtccacgtttgtgtccaggctgcagggctcctccagctgacgagcgcatttgcagccgtatctaatttcccgtgcatggctaagcagagaattgctctatgcttataacgtaataaatagtgcgtgcgttgcaacgggaacatataatatcacgataacttatatataaaatgtgtgttatactgttattagaaaagatttcataatttatttatgatcctaaccatacataaattttgttattttaaaaaaaaaaaggaaacat

SEQ ID NO: 268749 - DNA, 1127 bp, Zea mays
caccaaaccaccctataaagcgcggggtctcagtctcaccggcacctcttcaatcccagtcccacacaaagtttctcctcgatcctcatctcctccctctctcgagtcaagagcagagcagctaccaaacaagctctcctttcgcttccgatccatggagctcgacgccgacaacctgagcgccaccgagctccgcctcggcctgcctgggaccagcagcagcagcagcgacgactggcagaagaagccgtcgccctccgtcggggccaagcgcgctctggacgacggcaccaagagcgaggcctcggggaccagcccggccgccagagacctcgacttcgaccacgaccacgacaccgccgcgcctcccaaggcgcaagtggtcgggtggccgccggtgagggcgtacaggaagaacaccttccaggcggcggcggcggccaagaaggtcgagcagaagcagaagcagcagcagcagggaggcctgtacgtgaaggtgagcatggacggcgcgccgtacctcaggaaggtggacctccggatgtacaaggggtacagggagctcagggaggctctggacgcgctcttcaccaactccttctccgcggcggcagagggcggcggcgaccaccaccagcacgccatcgcctacgaagacaaggacggcgacctcatgctcgccggagacgtgccctgggatatgttcatctcttcgtgcaagaagctcaggataatgaagggctctgcctctgaggccaggtgatcgctgatccatacataaacagaggctacagacacgccacctgggaacgcggatccaagagcacacacggatcgtacttgacgaggaaggagggaggagcagtgtggcttgagctctccagtgttgtacaaagacatgtttctttctgaacccaaaagggagaaagatgtatgaagcgtgtatataagatcttagctagcagtttgttttcatttgtatgagcgatcgaaggctgtaaaaaatgaaaaagaaaaaagaaaagggaatgagaaattgactaaagctggtcattaaaaaaacataagaaacaaatgaacaaaaaagaaaaaaacttgattgtgtaaaaatcaagcaaaatgaagac

SEQ ID NO: 268750 - DNA, 461 bp, Zea mays
attactagaagcctacaggtagcggctttggtgacggcaggtatgagcaggaagatgaatacaagatgcctctgagtggtggtggcagtagctatggcggaggcaggtttgaagatgttgaatatcggaagaagcccagtggtggtggctacggcggaggaaggtatgaggacgaagatgattataggaagacacctagtgctggtggatatggcggtggaggaagatatgaagatgagtacagcaagaagccagctggtggtcatggcggagggaggtatgaggcagatgatgagtacaggaagccgagtggtggtggatatggttatggagcttccagtggtggaggtcatggaggaaggtacgaagaagaggactacaagaagaagcctagtggacactcagggggacgctatgatgtagacgacgggaacaagaaggctagtggctatagtggaggg

SEQ ID NO: 268751 - DNA, 579 bp, Zea mays
ctcacacaaagtttctcctcgatcctcatcttctcctactcatctcctcctcctccctctcgagtcaagagcagagcaactaccaaacaagctctcctttcgcttccgatccatggagctcgacgccgacaacctgagcgccaccgagctccgcctcggcctgcccgggaccagcagaagcatcagcgacgacgactggcagaagaagccgtcgccctccgtcgggggcaagcgcgctctggacgacggcacaagagcgaggctcggggactaacatggcgccagagacctcgacttcgaccacgaccacgacaccggcgggcctcccaagtaagaactagaccccccatgtacacgctcccagctccctcgtaggcaccgcctgcatcaagattcaattcaagagacaggggtgcatgggctaacctgcctttttcgcttcgtcaggggcaagtggtcgggttggccgccggtgagggcgtacaggaagaacacctttcatgcggcggcggcggtcaagaaggtcgagcagaagcagaagcagcagcagcagggaggtctgtacgtgaaggtgaacat

SEQ ID NO: 268752 - DNA, 412 bp, Zea mays
gatgattataggaagaaacctagtgctggtggatatggaggtggaggaagatatgaagacgagtacagcaagaagccagctggtggtcatggcggagggaggtatgagaaagatgtatgaagcgtgtatataagatcttagctagcagtttgttttcatttgtatgagcgatcgaaggctgggaaagatgaaaaagaacacagacaagggaatgagaaattgactaaagctggtcatttttcctctccacaggctcaactctgtatgagaaaaaaaagacatttttccggtcactgtgattttgcatgatcccttcatgtatactacgcttgtaaaccaaatgagcatttccccaaaaaaaaacctgagaaagactgacacaaccacagtcaccactgctagccataaagac

SEQ ID NO: 268753 - DNA, 623 bp, Zea mays
gttttgtggagaaggaaaaacttgaatcattctatttaccaatgtattcaccatcggttggtgaagtggaggccatactaaagcaagttgggttgttcaacatgaatcatgtaaaagtattccagacaaattgggatccctacgatgacttggaaagtgatgttgtgcataacagtattaggagcggtgaaaatgttgctaagtgcctacgagcagttatgcagccgctagtcgcaagccaatttggagaacccattctcgataagttattcaaagagtacgctcgccgtgttgccaaacaccttgagaatgagaaaaccaagcatgctattattgtcctatccatcgagaaagcaattcacctgtgaagtgtattgtttctcactatctcgcttggtattatcacatgctactatttgtgtagaaaactttgtatgtatgttttttgtgtgtttgtgtcactagtgtattgaatgacatagggtgtttttgttgttttatttatcacttctcctgtattcctatatctcatatgtctaagtttttaatgtgatttcatgcaaccgttgtacaagcaattaatacaaataaattgcaccttttatgatcaaaaaaaaaataaa

SEQ ID NO: 268754 - DNA, 1252 bp, Zea mays
gcactacggcatccgcatcgagttcatgttcccggacgcgagcgaggtgcaggaggttgggcgcaccaagggcctggtctgcttctacgaggacggccaccaggagtgctgccgggtgcgcaaggtgcggcccctgcgcagggcgctcaaggggctcagggcgtggatcaccggccagaggaaggaccagtcccccggcaccagggccagcatcccccttgtccaggttgatccttccttcgaaggcctggatggcggggctggtagcttggtcaagtggaaccccgtggccaacgtcgacggcaaggacatctggactttcctgcggaccatggacgtacctgtcaacaccctgcatgctcagggctacgtgtccatcgggtgcgagccgtgcaccaggcccgtcctgccggggcagcacgagcgtgaaggccggtggtggtgggaggacgccaaggccaaggagtgcggcctccacaagggcaacatcgacaaggacgcccaggcggcggcggctgcggcggcccccaggtccgccaacggcaacggctcggcgggcgccccggacatcttcgagagccccgccgtcgtgtccctcacccgcaccggggtcgagaacctgctgcgcctggagaaccgcgccgagccgtggctcgtggtgctgtacgcgccctggtgcccgttctgccaggccatggaggcctcctacgtggagctggccgagaagctggcggggtccggggtgaaggtggccaagttccgcgcggacggcgagcagaagccgttcgcgcaggccgagctgcagctgcagagctttcccaccgtgctcctgttcccgggccgcaccgccaggcccatcaagtacccgtcggagaagagggacgtcgactcgctcctcgccttcgtcaacagcctccggtgacgccgcgcctccagtgagcgagaaccatcgttctctgtcagtatgtactgtattacatgttggtatccatctaggtgcgctgtacgtagagagggaggcggagggaactgggatgctagaaaaaacagatgcaggtgttgcttgtaactgcagaatgatggtaggtatgcatgaagtctgaggtcctgtgttatttggcagctgagggaggcagaggttatttgtgcgtgcttgtagttgtagctagtggcgatggagtattctaaggaaaatcaaattagaatcgaagttttgagaaaaaaaaaagatgcgaaggtattcaaccaggat

SEQ ID NO: 268755 - DNA, 544 bp, Zea mays
tcgcgtacgcgtgggcggacgcgtggggcttcggcgaccctgtcgagctccagctccgcgacgcctggctcaaccgcctggtggtgcaggcgcgcggcatggagcgcgcgtcgtgctacgtgctttccacctgccgcgtgcgctcgtcggccgggttctgcacgcacttctgcctcgcgcgggcgcagtgcttcggcgaccctgtcgagctccagctccgcaacgcctggctcaaccgcctggccggccgccggtagccgcccgtcggctgctgctgctagtgctactgatactactaataggattcgaatcgatgctccaaggaccaaatgcaatgatgcctcctcttcgctggcaagaacgaggaagagaagcttgcagattggatttgaagcaggggagacgaacatatcttttcgttcacttggggttctcccggaattggatatcaattgtacagattattgaatgtaaatttgcctattcaatcaagaagcaattcatcgagtcaaattaaattcaaaaataaaaatgttatgaaatt

SEQ ID NO: 268756 - DNA, 545 bp, Zea mays
aggacacgtgggccggaccgggtcatcctggtcgagcaggtggcagccgtggccgcagacggcggcgcctcggcgtctgaagctgcgcggcaggtgtaggggctggtggtgcaagcgcgcggcatggagcacgcctcgtgttacgtgctcgacacctgccgcatgcgctcgtcggccgggttctgcacgcacttctgcctcgcgcgggccaagtgcttcggcgaccccgtcgagctccagctccgcaacgcctggctcaaccgcctcgccggccgccgatagccgccgcccgtggcctccgctaccactgaactgacagtattagatgccccaaggaccaaacgcaatgatgatgggtcctcttcgctggcaagaaccacgaagtgaagcacgccaaaacagcatccatcagatcttttcgttcagttctgtttctccctgaattggaggtcatgtgtacagattattggctgtaattcttactggcttattcaatcaagaagcgattcatcgaggcttatactgcacccaggaatggacccacc

SEQ ID NO: 268757 - DNA, 347 bp, Zea mays
cggcatacatccatttgtacttgcctccctcttcgcatggggctgtatataatccggccccaacctcctccaaggtcagcacgaaccgtttgttccgcctctgcttcttcactgtcatggaaaagacttaattcatgttcatctgaagcatatggtaccagactgtccccaccatcgacatgaacctcttcgtcttcctcgcttggaaattggtcgtcatagtcgatgacaagatcttctggctttctcttggcattgcgttctttaagtgtctcaaagttcaagtcatcaagcggccaagcttcctctgggcgtttgcctctttttaaacaacatagcaaaacttt

SEQ ID NO: 268758 - DNA, 929 bp, Zea mays
cgcaaacacacggcacgagcagctgagcgcccatggcaggtccccggcgtctcctcgggctcctcctcctcccgctgctcgtgctcctcggcgcgcacccgccgcagcgcgggtccgcggaggaggggacgaaggtctccctggagctctactacgagtcgttgtgcccgtactgctcgcggttcatcgtcaaccgcctcgcggggatcttcgaggacgggctcatcgacgccgtccacctccggctcgtcccctacggcaacgcgcgcgtcgcatccaacagcgagatctcttgccagcatggtccgtacgagtgtctgctcaacaccgtggaagcttgcgccatcgacgcctggccggatctggatgtgcatttcagcttcatctactgcgtggaggacctggtggtgaagcggcagtacaaggactgggagtcctgcttcgagaagctgggccttgacgccaagcccgtaacagaatgctacaaaagcgagcatgggcacaagcgcgagctcaagtacgcgaaccagaccgacgctctcgagccgccgcaccggtacgtgccctgggtggtcgtcgacgggcagcccctgctagaggattacgagaatttcgaggcttacatctgcaaggcttacaagggcactccaccgaaggcctgtgagggcctggaacgtctgcagatggccctcgagacagcggcggaggcgcgcaacggcgtcagctacaactccggtgtcagcaagcttgcgactgctgaagatgagggtggggagcataaggtgggagaatactagtacgtaattgactagcgacgtgccccttttttgggtcatgtgaagttgaaggaccgttccatctcgttgtccggttttttattgtacagtaatagctaatatgataatgataataattacatttccaatctc

SEQ ID NO: 268759 - DNA, 326 bp, Zea mays
accgatcccaccgaatggacagccgcctcgccatcgccgcgctcctcctgctcgcctccgcctcctccgctgccgcggacggcgggaaggtggccgtggcgctgtactacgagtcgctgtgcccctactcggcgcgcttcgtggtgaaccacctcgccaaggtcttcgcggacggcctccgcgaggtcgtggacctcacgctcgtcccctacggcaacgcccggatccaccccggcggagagatctcgtgccagcatggtccgtacgagtgtctgctcaacaccgtggaagcttgcgccatcgacgcctggccggatctggatgtg

SEQ ID NO: 268760 - DNA, 905 bp, Zea mays
gcactagtagacagatttctcagaagccgcggccgtcacgcgtcagacccacgcagcgcaccttctcttctccgccgcgtcgccgccgaacatcagcatcggatcgatggagggctgggacaaggggaccaagagcacggtgggcgagatcccgctgctgtcgacgcgcgcgggtccgcgggacggcgaggcgtggcggcagaggctcaaggaggagtaccgcgcgctcatcgcctacacgtcggtgaacaaggccaaggacaacgactggttccgcatcgccgccgccaacccggagggaacccgctgggaggggacctgctggtacgtccacaacctccgccgctatgagttccctctccagttcgacatgcccgtcgcctacccccaggtcgcccccgagatcgagctccccaccctcgacggcaagactcacaagatgtaccgcggtgggaagatctgcctcaccgtgcacttcaagccgctgtgggccaagaactgcccgaggttcggcctggcgcacgcgctgtgcctcggcctcgcgccgtggctcgcggcggaagtcccgattctggtcgactcgggcatggtgaagcacaaggatgacgaggcggctccggctgaggcatctgcctctgctgctcctccttcgtagttgccacttgcaacaactgagtgtccggtgagctaagggcgatatcggaaatcaactcggcggtgaaccgtgaaccgccaaataagagagatacctgcaaatctaaacatcatgtgaaacatgttccatacctgctgattgctgtctgcgtactaatttctatccaacttctaaattgtgttcgcagatttttatgggacccccgacttataccatgagaacataattgcttaattcaagaacaccctga

SEQ ID NO: 268761 - DNA, 343 bp, Zea mays
atttcgccgagggttgttgacttgcgctgtgacggatcgttgctggcttgcgcagatgtaccgcggtgggaagatctgcctcaccgtgcactgcaagccgctgtgggccaagaactgcccgaggttcggcctggcgcacgcgctgtgcctcggcctcgcgccgtggctcgcggcggacgtcccgattctggtcgactcgggcatggtgaagcacaaggatgacgaggcggctccggctgaggcatctgcctctgctgctcctccttcgtagttgccacttgcaacaactgagtgtccggtgagctaagggcgatatcggacatctactcggcggtgaaccgtg

SEQ ID NO: 268762 - DNA, 460 bp, Zea mays
ggcggaacacttcttctatcggcgtgcgtaccttccacgggggggttctattacagatggtgggactctaatccagatcgacgcgcggcgcgtccgccccccaccctctcgccgcctatataactcgcgcccgaatcggcggctccctccctgcccctccccgcgcaccttccaccacgctctggaagctgtttcccctttctcgagagtctagaaagctggtgcacgcatggccggagagagctgcgtacccaatcccctcttcgacccttccatcttcaccaccttcccttatcgattcccacactgtgagcaacatcctgttggtccccaaccattatgaggatctccttgatccatccctcgacaagagcctcattttctaactacttgacctcaagggcgacgtggactaccccggccgccctctctggtttctgcaagacatcgccaaccagca

SEQ ID NO: 268763 - DNA, 802 bp, Zea mays
  unsure (1)..(802): unsure at all n locations
atgggcgatgaatatggtcacacaaagggagggaacaacaatacgtactgccatgaccattatgtcaattatttccgttgggataagaaggaagaacaatcctctgatttgtacagattctgccgtctcatgaccaaattccgcaaggaatgtgaatctcttggccttgaggacttcccgacttcagaacggttgaaatggcacgatcatcagcccgggaagcctgactggtcagaggcaagccgattcgttgccttcaccatgaaggacgaaaccaaaggcgagatctacgtggccttcaacaccagtcaccttccggtggttgttgggcttccagagcgctctgggttccgatgggagccggtggtggacaccggcaaggaggcaccatatgacttcctcaccgatggcctgccagatcgtgctgtcaccgtctaccagttctctcatttcctcaactccaatctctatcctatgctcagctactcctccatcatccttgtattgcgccctgatgtctgaaagaagcagatacaatagagtatactatagcggttgttctctaggctgtagcatgcagtggaaactggaaaatgttggggttgctctgttgtcggtagtttacatgcgcatgtcggtatgtgtagctaaagctggtggatctcagttctcagatcggactcgagacggggaaaaccattgcccagttggctggttctctgaagttttgtttggtgtaaagaaatggtggtccatcatctactcaaatttttttctcttntttaatgaaataagttgactc

SEQ ID NO: 268764 - DNA, 633 bp, Zea mays
cccactcgtccgcccacgcgtccgcccacgcgtccggcggagcactctctatatagcacgccttttccttatcgtcctcgaggctaaactcaaaacaagaacccgataatcaacttcagtctcgtcccgtaggaggaatttgaaaacccaaacgtacacctctgatacttcagctggagctgcaatggcaacgcccgatttgtccccggtctcgccggtgcggcgggacgacaagcagtgcgcgccatcctcctcgtcgtgcacaattctgagagtgcaggacgcgtccgcggccgaggcgtacgagcagtacctgcggctgccggaactgtcgagcctgtgggaggccgggtgcttcccggagtgggcgagcgagggcctggtgaagccggcgctgcaggcgctcgaggtcaccttccgcctggcgtccctcgcgctctccgacccgcgcgggtacgccagccgccgcgagctcgcgcgccggctggagtcgctcgcggcgcgggaggtggggcttggtgtccgcgctctgcgagggcgaccggagcgcgccgctcgccgagctgggcgcctccggtggcgtgctcccgcgcgagcgcagcgcgtccgaggtgtggcagctgcccgggagcg

SEQ ID NO: 268765 - DNA, 604 bp, Zea mays
ggagggcgtcgtcaagcagtacgtctgcgtgtggaagggcaagcgcgtcacggccaacttccccttcaaggtcgagttcgagctcgccgtcgagggccagcccaagcccgtccggttcttcgcccacctccgtgaggacgagtttgagttcgtcgacggagagtgacagcgtcgagtgcgttcgggtaagcggcgacggcgagcgccgttcttatagaataatcaaggccgcggcggtcgctggtttatactgttccggtgcaggagctcgcgaggcaaggcatgtcaagtgtttgcttactcactgtctgtgctgctcaggcttcttcctcgttcggttcagcatcggtttttcagctgtggggaattaattgttcggatgctgtgcaccatcgatagtttataatagtggtaatttggccgctgttcgttggatatgctatgccccccgttattttgctggctgttccaagagccccctttgtatgattggtacacattgcattgaaacccgggattgtttccttggattataaaatctggctgttgtataatattaaaaaaaaaagggccgctccacccacgcggttgcgtacgcgtgggt

SEQ ID NO: 268766 - DNA, 475 bp, Zea mays
  unsure (1)..(475): unsure at all n locations
acgcctgcaggaccggtccggatttcccgggtcggcgcacgcgtccgcataaaaataatgcacattttgtgggtgtgaacaactggaactttgtacagggttgcgggattggtgttgtattatgtgggattggacatggctctatgttcaagagatcaaggtgccgaacaatgatggcctgtgatcgatgatttccctgtgtagccactagcccgtttatcaacataagctgttcagtgatctgtaaggcacagtgtagcttctgtgtaacacctgcattgttggatctgcattggtggatgaggcttttaaaacagttagatatgaataaaatctttggctagtttcttctgtgngaaaaaaaagaaattatataattaattatattttataatataaaataatttatattatatattatctattattctttttttgctttttattttttttgttgttatttctttttatattt

SEQ ID NO: 268767 - DNA, 475 bp, Zea mays
ccgtccgattcccggtcgacgcacgcgtccggagcgatcacgccaccttaacaaagttaagcttcccatcatccagaggagcttgagggtgcgcgactgtggcagtttgtgagcgcaacgcgcaggggcggctgccaccttacatccatggataccgggtcatgcaacaaagcggcagcgccaccaccaccacgcaatatcgagaagaaccagcaggtcgagaaggaaccgatcgaggagaagccgaacgcggcggcgcaggtcgagaagaaaccgatcgagaagaagctcaacaccattattcgctgcggcacaagagattaatatctcctcaatcctcattcgtctctcggcgtaatattgatgcatccattgttccatcgatatataatagatcatataagatacggtcgactttatacgcgtcctatagctataatcggtggtttgtatgcgtgaaacatatcttatttta

SEQ ID NO: 268768 - DNA, 439 bp, Zea mays
  unsure (1)..(439): unsure at all n locations
ggaannnccgggccgacccacgcgtacgctaaccttctcctggcaactggcattggtcccgtatactgccttgctgtcagttgcatggacgggctgacggacgagcagaggctcgcgttccaggaggccttctcgctcttcgacaagaacggcgacggatgcatcaccatggaagagctggccgcagtcacccgctccctcggtctcgacccgagcgatcaggagctcaatgatatgatgagcgaggtcgatacggacggcaatgggatcatcgatttccaggagttcttaagcctcattgcccggaagatgaaggatggcgacggcgacgaagagctcaaggaagcctttgaggtcctggacaaagaccagaacggcttcatctccccggttgagctgaggacggtgatgaccagtctcggggagaagatgaccgacg

SEQ ID NO: 268769 - DNA, 332 bp, Zea mays
cccacgcgtccgggttgacaatgactttcaggactattacttctacaacgatgacactggagtagtctattgtttgggaacccgcaactgtgaagactttgagctgagagattctttggttgacaagtacatcattagaattcttcaaacttacgtaccgttcctatccccactgcctgtaaaacagaaagcatgcgagtcgctggctggctgttgacctcacctcccctctcctctcctctcctcttgtaccaatgttaaattcttacgaccgtttaatgtatcttaatcagacaatccagaatcgaccctaatcgtctgctttgctcaaa

SEQ ID NO: 268770 - DNA, 690 bp, Zea mays
ttcttttccgccttggaatgtaaacaaagtgtgctatctcggggagaatccttcctcattgcccttagaaataaaagagcttaaaaactggattgatccttgttgctcattgacacaccactgattttatgatgggattggtttatgacatgtggcctcacgacgcacaggcgatattcacattgttggttcagtggttcttatccgtttaaatccactctatctactaaaaccatgactaatctgatcccagatggtcagacattagtctggacaattcatccggtcttgtcaatgcacccagtatgctaaattccatggtttttaatcagcgtcagttcaccgcatccttctctagatattgctttgatgcattcagtacagatttggatgtttccgatactcgtataaattactaaccgaccatcttctgtgaggcaggactaatacttctacaatggtgacactggagtagaacaattgtttgggaacccgcaactgtgaagacgacttggacttagattctttggttgacaagtatatcattagaattcttccagcttacctacgattcctattcctcccgcctgtaaactagtaaaagcatgctgcaagttgttactggctcccctcccctcttgtaccaatgttaaattcttacgtcgtttaatgcatcagaatcatactgtt

SEQ ID NO: 268771 - DNA, 322 bp, Zea mays
ggtaaaaaaagaaaaactttattgctcgtatttatttatttattagctcgtgaagagaataagatgacgatataccttacatgaatcaaacatactacaattcaagttaagaatgtgccggcgatgaactgattccgttaaccaaggaaaccacaccgcagttcgcgttgttattaccacatgaagtacagatcgaagaggcgtcatcaccgtaattgacacacagttataaaatgaacaagatgaccagcgagcggtgattttacaacgaccgcacaggcttataatacacgtgcgcggaccatgcattcatcaaaccgac

SEQ ID NO: 268772 - DNA, 855 bp, Zea mays
  unsure (1)..(855): unsure at all n locations
cccacgcgtccgcccacgcgtccgtgcaggaagtgaagaaaaactagcagcctgcaaagctttgggtgccgatgtatgcattaactacagaactgaagacttcgttgaacgtatcaaacaggaaaccaacggaaagggaactacttcgatgctctcttttttggcagctagtatgtatcgagcattatcatcaaatagcgcaacatcccggactgttatctgaaactcactaccaggtgttgatgtgattctggataacattggaggatcatggctccagcgcaacctgaacagcttaggtgctgatggtagacttttcatcattggcttccaagggggcatagcagctgaagtgaacctgcaagctgtgcttgcacgccgtttgaccatacaagctgctggactgcgcaacagaagccttgctaataaggcagagattgttagtgaggtggaaaagaacgtgtggcctgctgttgctgctggcaaagtgaagccggtgatttacaagacgtttccgttatctgaagctgctgaggctcataggttgatggaagctagcacccacatcggcaagatactgctgctcccatgactgcacctgtggcgtttgcgctcttactctcggaggagtcagttcaagaacatatgcaacttctgtgacagcctgcatggatgttgtactggtgtagcatgtctttttttatatatcttgtattaatagattggatcttttacccccagaaattatcttgtcaattggacccttaaagtgctgatgacatttttctgtgagctatgatataataaatctggcagatagacccacaaaaaaaaaaaaaaaaaaaaaaaaaanga

SEQ ID NO: 268773 - DNA, 1056 bp, Zea mays
gacccgcgcgtcaacggacgcatgggctcctcctccttctcctggcactggcagcgaagatccaaagatagcacaatcgcatctcacacgccgagctatttctactttgagagaatccccttctcccacaaggagcgagtaatttgaggcagagaccgacacagatggcagcggttatggtgtctcgccaaggccgggagctgcagcggtacagcgcgagcacgggcgggcgcgtggtggtgggctgcgtcccgtaccgcgtgcgcgggggcgacggcgaggtggaggtcctggtgatcagctcgcagaagaagggccccgcggggggcgtgctgatccccaagggcgggtgggagctggacgagtccatggacggccgctggtgctaccgcagccgcagctacgacgccacgtacgagggcttcgtgctcccgctgcgcgtcaccgcggagctggaccggtggcccgagatggccgcgcgccgcagggagtgggtctccgcagccgaggccatcgcgcgctgcccccacccctggatgcgcgaggcgctgcagcggttctccgacaccgtcgcggtcgcggcggagacgatgcacctcgcctccgccctctagctctaggcccggccggccgtcgatcgattccctcttcccgccgcggtctcgtcggaccgcgggcggcctcgcgcgttttttcggccgccgcgcacggacgcggcgcgtgcggggctgccgccgcctgctctgctcgctggattggacggaacacgccatcattcagtcagacaaatctggacgtcgtcgagctgtggcaccaggacgcggcctgtacattgttcttgggggggtctcgttttgaaatacaaacttgtaaatgtcacggagtttaacgagatccactgtggtactctactagtatacaatacacgaagaagaaatgaaccatggtagaaaatgactcacattgaccattctggcatcacgacttcatcgctgtttgttgtgcactgaatagtttctctcttttttttatccaagatacagtgctgaattgcat

SEQ ID NO: 268774 - DNA, 675 bp, Zea mays
gggctcctcctcctccttctcctggcactggcagcgaagatccaaagatagcacaatcgcatctcacacgccgagctatttctactttgagagaatccccttctcccacaaggagcgagtaatttgaggcagagaccgacacagatggcagcggttatggtgtctcgccaaggccgggagctgcagcggtacagcgcgagcacgggcgggcgcgtggtggtgggctgcgtcccgtaccgcgtgcgcgggggcgacggcgaggtggaggtcctggtgatcagctcgcagaagaagggccccgcggggggcgtgctgatccccaagggcgggtgggagctggacgagtccatggacgaggcggcccggcgcgaggccgcggaggaggccggcgtgctcggcgagacgggccccgcgctgggccgctggtgctaccgcagccgcagctacgacgccacgtacgagggcttcgtgctcccgctgcgcgtcaccgcggagctggaccggtggcccgagatggccgcgcgccgcacggagtgggtctccgcagccgaggccatcgcgcgctggccccaaccctggaatccccaaggccttcaaccggtccccgaaaacgttcccggtcccggcggaaacaatgcacttcgcctcggccctctacctctaggcccggccggc

SEQ ID NO: 268775 - DNA, 633 bp, Zea mays
gcagcgaagatccaaagatagcacaatcgcatctcacacgccgagctatttctactttgagagaatccccttctcccacaaggagcgagtaatttgaggcagagaccgacacagatggcagcggttatggtgtctcgccaaggccgggagctgcagcggtacagcgcgagcacgggcgggcgcgtgcggggctgctgccgcctgctctgctcgctggattggacggaacacgccatcattcagtcagacaaatctggacgtcgtcgagctgtggcaccaggacgcggcctgtacattgttcttggggggatctcgttttgaaatacaaaacaaacttgttaatgtcacggagtttaacgagatccactgtggtactctactagtatacaatacacgaagaagaaatgaaccatggtagaaaatgactcacattgactattctggcatcaaataaaaaaaaaaatttaatattatttaatttataaaataaaaaataaattataatatttataaaatattaaaaaaaaatatatggggcggccgttttataggatccaagcttactttcgctggcatgcgacggaatagcttttttatagtggcacctaaatttaattaactggccgtcgtttt

SEQ ID NO: 268776 - DNA, 649 bp, Zea mays
cggaattaccgggtcgacccacgcgtgcgcttcgtcgaactcgtttcctcccacccgcaaccgcaggaagagaaaggggaagcccgccgccgccccggcccccagcaaccagcagatcgggacctctgttctgcgcaatccatccatggcggaggaatcaggccgtcccttgccaaagtttggtgaatgggatgtcaacgatccggcttccgcagacggatttactgtcatattcaacaaagccagagatgagaagaagggtgggaatggtcaagacacagactcaccttccaaggaccccaggactgagagggtggaatcttatgctgcaaagccaagcacgaagaaatggttttgttgtgtgacagccagccctacgcaatcctgaggaagacaactgcatgcgcttggaaatactgtccctttaattttctatacatactatccataagacactgtagaggtacccatggctctctgggctccaggatgggtgtctcataaaactctggcgtgcatgtatgtatggtgtgagagttgtcggcatacatttgcaaagtggacttctgcttgtaattcttagtcgtctctctctctctctctttgggttggtctgctaacggttctatgatccagcaatccactgaac

SEQ ID NO: 268777 - DNA, 471 bp, Zea mays
cggacgcgtgggcggacgcgtgggcggacgcgtggggtttggcgattgggatgtcaacgatccggcttccgcagacggattacactgtcatattcaacaaagccagagacgagaagaagggtgggaacggacaagacactgactcaccttccaaggacaccaggactgagagggtggaatcttatgctgcaaagccaagcacgaagaaatggttttgttgtgtgacagccagccctacgcaatcctgaggaagacaactgcatgcgctttggaaatactgtccctttaattttctatacatactatccataagacaatgtaggggtacccaggcctttccgggctccaggatgggctatctcgtaaaactcttgcgtgcgtggttgtatggtgtgagagaattctcattgcgaacttctggttgtaattcttatataaaaatataaaatatgttgtttctctttataggat

SEQ ID NO: 268778 - DNA, 716 bp, Zea mays
gttctccgtcaccagctttccttttccttttcaattctccacagcgattcgtctcctctgctcttatctccgctgtgcctgtgcctgacttttcctcctcttcgtcccctcccacccgcaaccgcacagagaaaggggaggaggctctctacccagcgcacccgagcacccctcccccccggatcgggacccctgctctgcgcaatccacccatggcggaggaatcaggccgccccttgccaaagtttggcgattgggatgttaatgatccagcttctgcagacggattcactgtcatattcaacaaagccagagacgagaagaagggtgggaacggacaagacactgagtcaccttccaaggacaccaggactgagagggtggaatcttatgctgcaaagccaagcccgaaaaaatggttttgttgtgtgacagccagccctacgcaatcctgaggaagacaactgcatgcgctttggaaaaactgtccctttaattttctatccatcctatccataagacaatgtaggggtacccaggcctctccgggctccagaatgggctatctcgtaaaactcttgcgtgcgtgtatgtatggtgtgaaagaattcccaaagtggacttctggttgtaattcttagtcgtctctctctccccctctttgggttggtcccggttctatgatccaccaatcccctgatctgtttggtcctcct

SEQ ID NO: 268779 - DNA, 811 bp, Zea mays
cgagagcacccggaccagacgcccaagtcgatcgccatggcgatgaagccggcggcggcggctccccctaccccggccgcggcgcacagcgtgttcgtctacggcagcctgatggcggacgaggtggtccgcaccatcctcaagcgcgtcccgcccgccgccccggccctcctcccaaactaccaccggttcaacatcaagggccgcatttacccggcgatcctgcccgttgagagcaagagagttgctgggagggttatcatgggtgttactgatgaagagctccagcttcttgacgcgtttgaagacgtggagtacacgaggacaagagttgagatatcattggctgactcttccgagaacatgctggctgacacttacgtgtggagtgatgcagaggatctcaatctttatggagaatgggactttgaggagtggaagaaactgcacatgaaggatttccttgcgatgacgaacggtttcatgcacgagctcgagcagcctgaatcgaagacccgggtggagacctaccaggaattcatgcaacaacaggaacagcctgcgccggggacccaggtggagggttgagagctgcaatccgctggctgctgatctacatctagtcaattcccatggaggaattgcattggcattggactgtaccgtatctaataggtcacctatatcatttgtgaagatcaggattattcggtctataataactaaacatacaaataaaatgtccaccgaggtttttgttgtaaaaaaaaaaaataagggcggttcgtttttgaggattcaagcttacgta

SEQ ID NO: 268780 - DNA, 637 bp, Zea mays
ctgggcgcaactagggatccataagacgccggtcgggcttctgaccgtggacaggttctacgagccggcgctgtccttcatcgacatggccgtcaacgaagggttcatcaaggaggacgcccgccgcatcgtcatctcggctcccacggccaaggagctggtcctcaagcttgaggagtacgttccggagtacgaggtaggcctggtgtgggaggaccagatgccgccgtccgccgtcgccgtcgccgccgccgcgcacgggttcgccccggagctggtggagcccgggatcacctcctcgtcctgatctggacggggacgtcggccgggcctgcctacctacgctaaccccagattctgaccgacggccggcccggcggcaccaagtagaaaggctatctatactagtaccacctaattaataccgtaatctactactactactactaacaaagaagattgttgggatggaggatgacagctagctagcgtctgctcagttagcagcatatcgtcgttagccgcgcagtgtgcagctgcgtcagctctgccattgctgctcctagcttttgggcttttgtgttgtgctctcctagaagtagggaggaaggaaggaaggcatgctatgtatattccc

SEQ ID NO: 268781 - DNA, 482 bp, Zea mays
agcaaaccatcctagctggactccaccatcaactgagtacatgcattctcgtttgtgctgtcaaatatgcaaagttgatatcattggtacagacaatttacttgtttgtgatgcttgcgagaggggagtacacttgaaatgccttcatcagtatggcaataagggcgtccccaaagctgagtggcattgttctgcatgcctgactcagagtaagggaaaacccttgccaccaaaatatggcaaggttacaaggactgtagttgcatcaaagactgctccacctggtggtggggcacagctttcttttgcagggatcagcagaaaacatggctgcaaaggaaaatcaccaaaagttggctgcaaatgggaatcttatgaagccattctccactcatgggggcagcacaggacccgacaggaatgtattggcactgagtgccattacggctgggtcacaatcacaattagtttttaccttgaga

SEQ ID NO: 268782 - DNA, 452 bp, Zea mays
aagatcctgagcatcagtttggtgaagggtgctcgggccattttcctagagtacctcttcggaagaacatgttcgttgaagcgtcccgatcctctgggactcaaatgtgatacaattactagtcccaggaggctagtaaacacatttatacatcagatgattccagatctgcttaaatgagacaaacctataaaggtggcgatcaactttaagagttggtccacaactcgggacatatcatcagagtggggctgaagcagcccgatatacgcagcgaagcaaatcagcggtccaacagccacaggcaaggttgggaacagtcgtaactcttacccgatctcctttttctgaaaaacaacaaataagcaaggatgagtacaaacgtactcagcagcccaccttcacccgcggaatgggggaatcagatataatgcatggaatatgtggagctc

SEQ ID NO: 268783 - DNA, 705 bp, Zea mays
agcgaggcggcacggccgtggagggcctccggggctgcccctactgctcccacccgccggcggccgccgccttcagcctcctgtccccggccgaggccatgaagcgggaggaccccggctggttcggcggcgccgaggagctgcgccagggcgtctggaccgtcgaggaggacctctacaccacgctcaagaagaaggtgagccgggtgtacgccgcgccgccggaggagaggaagaagcgcgtctacagcaccgcgccgtccaagttcaccaccatcgatcagtatagcgggctcgggttcaggttggtgaggatggggttcgacgacatgtacctctgcagcccgggaggcatgtacgacaagttcggcaaggactactttctgtgcacggggatggcgtccatgttggtgcccgtcgtcgtcaaccccggcgaggagtggaaggcggcgcaggtcatcgagcatgacaacttgtaacttcttcttcttcttttggtcaacggaattacagaatcgaatggcgcgcggctccattctcgaatacatgtcgatggtccgatctccagtgagatatatacatcaatacagatagttctttccatgggaagtgttaaacattgaatgtaaaatgagaaagtgaatgagaaaactatcatttttattgatctttgaaatctctactatatagagcacgagtttattc

SEQ ID NO: 268784 - DNA, 905 bp, Zea mays
cctcgaaaagcacctttttcgccgggtttgccttaatatgccatggtcaacacgcatgaagagggcattgggtgctgcaagggggctcgagtaccttcacggagctgagagatccatcatttatcgagatttcaagacatcaaacatcttgctagatgcggattacaatgctaagctttcagactttggtctcgcaagaacaggtcctagtggagaccaaacccatgtgtcaactcgggtcatgggaacttatggatacgcagctccagaatatgtcatgactggccatctgacggcacgaagtgatgtttatggcttcggagtggtgcttctagagatgattatcggaagaagggctgtggacaagagccggccgagccgtgagcataacctagttgactgggcacggcccctcctcgtccataacaggaagctgttccggataatcgatccaagaatggaagggcagtactccaccaaggctgccactgaggtggcaagccttgcataccgctgcctgagccagaaccccaagggacgaccaaccatgagccaagtcgtcgagacctttgaggccgtgcagaacatgcctgaatgccaagacatactcctccagaacagcatcacaggtgccgtgacgctctatgaggtccccaaggagcctgcagacagagttgagctggagaaggccaagcaggaaccggcagtaaagagcgccgcgatgccgcccatgaacggaaagccagtcccccagagcaggcggacgcggcctgggaatggccggagcaagagcgagccatcgttggagtgcaagatgtacatcccgtcaccggactctgatggacaccagctcggcctggaggcagtcgcatccccagatggaagcataagggacctcctgatga

SEQ ID NO: 268785 - DNA, 915 bp, Zea mays
ttcaggtcagagctcaagaagatgggttttgaggttcttggtgacaatgactctcctgtcatgcccataatgctctacaatccggctaagatccctgcattctctagggagtgccttagacaaaaggtcgccgttgttaccgtggcgttccctgcgacacctcttcttcttgctagggcacgcatctgcatttcggcttcacacactagggaggatttgatgaaagcccttgatgttatcagcagagttggtgatcttgtgggcatcaaatacttccctgcagaaccaccaaagattgctgaagctggtcatggtaagcgggagtaggagcgaaccctgaatcgccccatgagtgattgaagttgttagaatcccttccggagttatcaacagatcattatggaagcaagcatatatggagccgtattaggcagctgacagttatttggtgattgtacaactgttcttgcaattgtgtatagctggttgaaatttagttgttctgttgctaatctgttccaaatacgtagtagattcggaggcaatataaactttcagcagagcattactgagtttcccctcgcagaccactgacgacaatgaaggcctcttgctttcatgtatttttctttctttctttttgtaatcagtctgttatatgggatcagtaggtgtccctttggatgaagttataagctactttgctaagttatgaattgtttatgtgtgtgtgtattcagtggatgttaaatgcggccaatgacaatggttatttcttagcattcttgtgggatttgcatacttgtagatgtagacagttgtatgactcataatcctgtcaaagatatatcatatgctcaacattcatccaaaaaaaaaaaaaaaaaaaataaaaaaaaaaaaaaaaaaaaatat

SEQ ID NO: 268786 - DNA, 722 bp, Zea mays
ttttgtacgcgtggggtacagtccattattgccgtctcccttttgcgtgagcaaagaaagagagcgagaagagcagtcgccatgtctggcatcatccacaagatcgaggagaagctccacatggggggcgaccacaagaaggaggatgagcaccacaagaaggccgaggagcaccacaagaaggaggagggggagcaccacaagaaggacggcggggagcataaggaaggcatcgtggagaagatcaaggacaagatcaccggcgagcacggcgacaagtccggcgaccacaaggaaaagaaggacaagaaaaagaagaaggagaagaagaagcacggcgagggccacgaccacgacggcggccacagtagcagcagcagcgacagcgactgagatctggtgtcgcagcacaggtgcaacacaagtatgcttgctggatggaggattcataccagctgatgctgatgtagtgtttcactggtgtcatgcatgcatgtatcgtgctattataatcaaaaagaaaaaagaaataacagtcagggatggtttgtttgccatgtgatcttgtacactcctacttaaattatggctgctgcacggtgctgctagcttgtactaataaagtgttgatctgcatgcttgcgtcttaaaaaaaaaaaaaaaagaaaagaaaaagaaaaaaagaagggggcatcagagtgtggtattgagagagagggaag

SEQ ID NO: 268787 - DNA, 764 bp, Zea mays
gcacagtccattattgccgtctcccttttgcgtgagcaaagaaagagagcgagaagagcagtcgccatgtctggcatcatccacaagatcgaggagaagctccacatggggggcgaccacaagaaggaggatgagcaccacaagaaggccgaggagcaccacaagaaggaggagggggagcaccacaagaaggacggcggggagcataaggaaggcatcgtggagaagatcaaggacaagatcaccggcgagcacggcgacaagtccggcgacctcaaggaaaagaaggccaagaaaaagaagaaggagaagaagaagctcggcgagggccacgaccacgacggcggccacagtagcagcagcagcgacagcgactgagatctggtgtcgcagatgtcgatgctggcttataatgcagcacaggtgcaacacaagtatgcttgctggatggaggattcataccagctgatgctgatgtagtgtttcactggtgtcatgcatgcatgtatcgtgctagtataatcaaaaagaaaaaagaaataccagtcagggatggtttgtttgccatgtgatcttgtacactcctacttaaattatggctgctgcacggtgctgctagcttgtactaataaagtgttgatctgcatgcttgcgtcttaatttgcgacacgcattcatgaacaagctggatcgaggagatccgcgtctttttggctgtgccatgtgactcaaaaaaaaaaaaaaaagaaaaaaaaaaaagaaaa

SEQ ID NO: 268788 - DNA, 1169 bp, Zea mays
ggctgcattcaagctcgagtttgagaacaatgagccggagagagcaagaatgctcttggccaaggccagggaaagaggagggacagagagggtttggatgaaatctgccattgttgagagggaattggggaatgttggtgaggaaaggagattgttggaggaaggtttgaagctattccctgcattcttcaaattgtggttaatgcatggacagatggaagaccggcttggtaatggagcgaaggccaaggaggtttttgagaatggcctgaagcagtgccccagttgcatccctctttggctctctctagctaccctagaggagaagattagtggcttgagtaaatcacgtgctgtcctcacaatggctagaaagaagaaccctgctacacctgaactctggctagcggcaattcgagctgagttgaggaatgggaacaaaaaggaagctgatgctctactggccaaggcattacaagagtgtcccacaagtggtattttgtgggctgccgctattgagatggcgccacgcccacagcgcaaaggaaagagtacagatgctattaagcgaagtgatcatgatccacatgtcattgcaactgtggccaaacttttctggcttgacaggaaggttgataaggctaggagttggttaaacagggctgttactcttgctcctgatattggtgatttttgggcattgtactacaaatttgaacttcagcatggaaatgtggacacacaaaaggatgttctgaaaagatgtgttgcagcagaaccaaagcatggcgaaaaatggcaagcaataaccaaggctgttgaaaactcacacctgcctgttgaggctcttctgaagaaagctgttgtcgtgcttgatgtagaagaaaacgccaatccgggaggagcctagactctcttttttataagttgtttggtgaacatattttgtggcttacaatttactccgcaagtctgcatctttaaatctgttgttgattcttgctttttgctccaaaaaaaaaaaaaaaataaaaataaataaaaaaaaaaataaaaaaaaaataaaaaaaaaaaaataaatatattattattataaaaatataaattataataaaatattttattggggcggcctttttataggttccaagcttacttccccgtgcatt

SEQ ID NO: 268789 - DNA, 411 bp, Zea mays
cggacgcgtgggcggacgcgtgggcggacgcgtggggtgatttttgggcattgtactacgaatttgaacttcagcatggaaatgtggacacacagaaggatgttctgaaaagatgtgttgcagcagaaccaaagcatggtgaaaaatggcaagcaatatccaagtctgttgaaaactcacacctgcctgttgaggctcttctaaagaaagctgttgtggtgcttgatgtagaagaaaatgccaatctggcaggagcctagactcactctttttacaaggtgtttggtgaatgtgttttgtactaccatccttaatttctgttcacttcaatatgagggactttaccttttaatatttcatctttattggtgagttaatatgtgatcatcagtacttgaacttgcatagcat

SEQ ID NO: 268790 - DNA, 361 bp, Zea mays
tgtgttgcagcagaaccaaagcatggcgaaaaatggcaagcaataaccaaggctgttgaaaactccacccctgcctgttgaggctcttctgaagaaagctgttgtcgtgcttgatgtagaagaaaacgccaatccgggaggagcctagactctcttttttataagttgtttggtgaacatattttgtggcttacaatttactcagcaagtctgcatctttaaatctgttgttgattcttgctttttgctccactttactaaaaagggatggtacatactctttccgctgagcaactttgtaggtgatatggcataaccaaatcttttttagaacgaaatattacctagttctgatatctgc

SEQ ID NO: 268791 - DNA, 801 bp, Zea mays
cggacgcgtgggcgggcggggagtgcgtgctcgtgaagacggccacgcaggcgctgccgcggggcggcgacgtggtgttcggcgtggcgcaccatcacgcgggcggcgccggcgcgtctctgcacggcgccgacggccgtctgctgtgcgagtcggcggccacgtacgggggctggctggaggccggggacgaggcgggctacatcgtcggcatgtccacgtgctacccgcgcccgggcgccgtcacggtgcgcgacggcgagccgctcaccgtcgtgtccaggtacagcagcgaccggcgccacacgggcgtcatgggcctcttctacatcctcgtggccgaccacgcccggcagctgccgccgcaggagggcctgtgcttcagcttcccggtcccatggtgcctaccgtcatggctgtcgagcaacctgtgagatcttttggtgttgaaagctggtgctatgttctaattagctgcttggttagggttcggttcggggctggtgatggtagggcaaagcaaggaaggccgcgtgggtccttgcgttactcatacagtagtagtaatgtaaaaatatagaagcagcggtcagtctactctgctgttgctgtattatacaataaccaggtcgctccctcccgtttgacttctcccaacgtcccgccgttgttgctcaggagtcaggagtctggacatgttcggttacatcggaactattctgaaactattctaaatgttccttttttatataaaaaaaaaaaaaaaaaaaaaaaaaaaaaaaaaaaaaaaaaaaaaagaaa

SEQ ID NO: 268792 - DNA, 600 bp, Zea mays
cgacaagctcaggtcacacttccatgtccatttgcttgatgattacaaggagctttggtcaaacactagtgaatggtacaacgagacaacaacacttagtcggggtaaaccagttccattcgacgcctacatgagggtgattgtggacactgaggtattttacagatcgaagacacaggttgagacgttcaacaacttgacaagggattgcaaagatggaatcaatacgtgcaacttgtgacacatgagttcacgcttcggatcatttgttggtgttcaatatacccttctagtggctggcacatcagaactcagtggaactcatccagggtttgtcttttggcattaccatcgttatgtatttcttgtcatggaatgtttagctggtttcatgtttatctgagttgtgtgctctccattttttttttcttttgtagtttatgtactactcttccagagtccagacgtccgaaaaatttgtatttagtgggcaatctgcaacatctatgctctctgtacccgcactaaattaagtgagaactatagcttcacctttacagtgtatctgttttcacgagtcacacgcttcttgcccgaata

SEQ ID NO: 268793 - DNA, 624 bp, Zea mays
ccttaagtcaagggcatccgaaagccagccgggtcccccccctgtcagtgctcccatcgcaccagcccaggttcaacgactgcagctggccacagtaacagccgatggcctgtagcgctctgtcagaggctgccctcacacacccgcacaggttcaggcatctcaggttcccgcactggctggagaggaacacgagcgccacgtcgctgaacctggagcacccgctgatgttgagcctggtaagctgagggcacccgtgcgccagggcgtacaaggaccggtcgctcagcctgaagcttctgctgagatccagctcgcgcaggtcgtggcagtggtttgccacggcctccacgccgctgtcttctagctgaggcctgatctggcgtagagatagaacttgcagcttcgtgaatttgtgagccagtgatatcaccaagtcattcatgcggtcctggcaccatgatagtgaaagatttgcaaccccccaccccaaggtgtcacgccatcctgtgcatacaccggaggccacaatgactatcctgtcatctccaactagtgaacccacgcgtccgcggaaacgtgggcggacgcgtgggcggacgcgtgggcggacgcgtagtcaaa

SEQ ID NO: 268794 - DNA, 934 bp, Zea mays
cccacgcgtccgatcacaccagcccaggttcaacgactgcagctggccacagtaacaggcgatggcctacacaggacaggacacaccaccaaaacagcagggattcaacgcgagctcaagcgaccaaggctgcagcaaacgaaagtacctgtagcgctctgtcagaggccgccctcacacacccgcacaggttcaggcatctcaggttcccgcactggctggagaggaacacgagcgccacgtcgctgaaactggagcacccgctgatgttgagcctggtaagctgagggcacccgtgcgccagggcgtacaaggaccggtcgctcagcctgaagcttctgctgagatccagctcgcgcaggtcgtggcagtggtttgccacggcctccacgccgctgtcctctagctgaggcctgatctggcgtagagatagaacttgcagcttcgtgaatttgtgagccagtgatatcaccaagtcattcatgcggtcctggcaccatgatagtgaaagatttgcaaccccccaccccaaggtgtcacgccatcctgtgcatacaccggaggccacaatgactatcctgtcatctccaactagtgaaatgatacgcaggagcagctccatggggaggtctttccaattcgtgaagctcgtttcattgccagcatcctgaggctgtcgactctggtcacctccagaaaccataagagtatcgaacgaattgttcaattccccagtgggctgctgtgcactatccattttaaaattatccgagtgcagagccagtctttttctgagaatcgaaaaggcaacttaacctagtccgagaagcgaagcaaatcgcggcgaagggccccaaagatggtttttagtcgcagatgtacggatgcgtgggcccagccagtcagtccgggccggtgccggcaggcgtaccag

SEQ ID NO: 268795 - DNA, 511 bp, Zea mays
cagcttcgtgaactgtgagccagtgatacaccaagtcattcatgcggtcctggcaccatgatagtgaaagatttgcaacccccaaccccaaggtgtcacgccatcctgtgcatacaccggaggccacaatgactatcctgtcatctccaactagtgaaatgatacgcaggagcagctccatggggaggtctttccaattcgtgaagctcgtttcattgccagcatcctgaggctgtcgactctggtcacctccagaaaccataagagtatcgaacgaattgttcaattccccagtgggctgctgtgcactatccattttaaaattatccgagtgcagagccagtctttttctgagaatcgaaaaggcaacttaacctagtccgagaagcgaagcaaatcgcggcgaagggccccaaagatggtttttagtcgcaggtgggaactgcgactgccttgggacggaggaggacgggggtcataaatagcaagcgcaacgccggacgcgtgagga

SEQ ID NO: 268796 - DNA, 473 bp, Zea mays
gagggccgacccaggcgtacgcgtgaagggcctacctaagaggccggcccttcccttgtttggacggaagctgactgattcacaaaaggagagagcaacgcacgtctgccttgattgtgggtacatatacttcctacccaagccttttgacgaacagcccgacgactacggttgcccacagtgcaacgcgccgaagaagcggtttgcgaggtacgacgctgccaccgggaaggccatcggcggcgctctgccgcctatcgccgtgatcgtaagtttggtgatcggcatcgctggggtaggagctctgctcgtgtacggcctgcagtagcctgctcgttcttgttcagaaccttttttttttttttgctgtgctcaagaagctcagctgactgctgctgtactctgtctcacaagacattccgagtgatatacatacataaaagggaagaaggaaatacacagtatttgaggct

SEQ ID NO: 268797 - DNA, 1238 bp, Zea mays
gagatttcccatctgataaactggtggttgatatggaaagcattctatggacttggggcattgatatttggcaatggttacatagttgggattaatcagatctatgatgttgctattgacaaggtaaacaagccatatttacccattgctgctggtgatctctcaattcagtcagcatggttgttggtgatattatttgcagctgcaggtttttcaattggtatatcaaactttggacctttcattacctctctatactgccttggcctatttcttggcactatatattctgttcctccattcagactgaagagatatccggttgctgcttttcttatcattgcaacggttcggggtttccttctcaactttggcgtgtactatgctactagggctgcactaggtcttacattccaatggagctcccctgttgctttcattacatgcttcgtgacactatttgctttggtcattgctataaccaaagatctccctgatgttgaaggagatcgcaagtatcaaatatcaactttggcaacaaagcttggtgtcagaaatattgcattccttggatctggtttattattagcaaactatattgctgctattgctgtagcttttaccatgcctcaggctttcaggtgcactgtaatggttcctgtgcatgctgtccttgctggtggtttaattttccagacatgggttctggagcaagcgaagtacagaaaggatgctatttcgcagtactatcggttcatctggaatctcttctatgctgaatatatcttcttcccgttaatatagagagatcttgtagttcatcttgatcttgggctacagcctaattcatggtgaaaagagggagaagttggcaaagtgaggtctgtcgtgcatattttcaacggaaacaatggagtagcaatattgctatgctagggttctgaagttgtaggagcttttctaagcttttacgatgttgaaggcgttgttggagctgtggaagctgttttccttttttttccttttgtatcaacagtgtcgcgttctgtacggtcttacttggaagtgctttgacctttgagcacatgggttgaagcttgagatctggtcccgaacaggtggcggtggaacggccaatacaagcttgtttcatgccactcgaggtcgaggctaaaccactacggcgtgctcttccatgaaacgcagaaaactagggaaatgactatatatatggtgcc

SEQ ID NO: 268798 - DNA, 767 bp, Zea mays
tcttttcgttctttcgtttcgctacgtccattgcctttcttcatcaagcaacaaacaaaaaaacaacaggagaacaggcaaaggcctccctccctcaactcaggaaaccatccaacttgtcgatcggccttgcttgccttggtactcctgcttccgccatggttcacatcaaagagttccggatcgtcatgcccatgtccatggaagagtacgagatagggctgagctacaccatcatgaagatggagcagcagaacaccaacagcaaggagggcgtggaggtgctgcagcaggccccgttccacgaggatgccaagcttggcaagggccacttcacttccaaagtttatcatctgcaaagcaagattccgtcatggatgaagggctttgcacctgccagcgccctcgcggtgcacgaggactcgtggtgtgcgtttccaaagagcagaacagtgatcaagtgcccgctcttcagcaagtgctcactcaccattgacactgtcaccaggcccgacaacggttgctctgaaaatgcgcacggtttgagcggcgagcagttagccgcgagagaagtcgagatcatcgacatcgcttccgtgtcgcgggactactggagcaaggcgatcggcgctccgagtgtcgacctgactgccttcaagtcacagcggacagaacgtggccctcttctcaagggatggatggactcgtgcccatccggtgatgaccacgtacaagctggtgaccatggacgctcccatatggggcct

SEQ ID NO: 268799 - DNA, 590 bp, Zea mays
aaacaaaacaacaacaggagaacaggcaaaggcctccctccccctcctccctccctcaactcaggaaaccatccaacttgtcgatcggccttgcttgccttggtactcctgcttccgccatggttcagatcaaagagtccggatcgtcatgcccatgtccatggaagagtcatcctcgtcgtcgtgtgtgtggcgccatacgagctccccctgagctacaccatcatgttgatggagcagcagaacaccaacagcaaggagggggtggaggtgctgcagcaggccccgttccacgaggatgccaagcttggcaagggccacttcacttccaaagtttatcatctgcaaaggtttggtttttatcactcgatgcgatgcacagatacacagtaatttttttttacctactttgtacagttttatatatataaatgaatctaaagctgtttcagaagcataattactcgatcaggcttctatcgaatacatgaatgcttgttttttttataccaaaattgtataaggaaccttgacttaaacagtcagattatgtgcagcaagattccgtcatggatgaagggctttgcacc

SEQ ID NO: 268800 - DNA, 464 bp, Zea mays
ttttacgcgtccgcccacgcgtccgcccacgcgtccgggagcctttgcagaaaaaaatagaggtaccgtcctatgtgatgcttggaattgcaaagccagtggaagaaccacaggcacctcctactccacagcgccctctttctcccatgggagaagcttgttccagaatggaccttactgccatctatcagatcctattcacaacgcattaccgagatgatgaagggagcaatgagctgtcttttcaagaatggacacagcagatgagggatatgctggatgcaaggaaacgtggcgactctgccttcaaagacaaagattttaaggcagcaatcgattgctatactcagtttgtcgatgtggggataatggtgtcaccgactgtattcgccagacgaagcttgtgctaccttatgtgtgaccaacctgatgcggcccttcgtgatgcaatgcaagcgcatatc

SEQ ID NO: 268801 - DNA, 780 bp, Zea mays
tagcattgttgagaattggtcgatcaaagatttcaatttttcatacaatgtttactcgggtgatttgtctggtggtgtgcttgtgcaaccagcaacattatgtggctatgaggatagagatatgttctgcattgttcttctacctggaagtggcaacagaaaggtattcggaaaagcagttgtgtttattgttgacacaagtggaagcatgcaaggaaagcctcttgagaatgtcaagcatgcagtttctactgctctttcagagcttgtgcaaggggattatttcaacattataacatttaatgatgagcttcactcattctcttcctgtttagagcaagtaaatgacaaagcaatagcaagcgcaactgagtggatgaatgcaaactttgttgctgagggtggtacagatattatgcatcctttgagtgaggcaatggcattactatcaagtgttcatgacacacttccacaaatatatcttatcacggatggttctgttgatgatgagcataacatctgccgaactacaaaaactgatctctccaacagagggtctaggtctcctcgaatttctacttttggactaggatcgtattgcaaccactatttcctgcgcatgttagcttcaattggcaagggacattatgatgctgcacttgggacagcatcaatcgagaatcagattcttaaatggttcaggagagcggcgagtacaatttgtggcaaatttctcccttgatgctttgacacatcttgatgaattcgaagtggattctg

SEQ ID NO: 268802 - DNA, 582 bp, Zea mays
  unsure (1)..(582): unsure at all n locations
cgagcgtagggccccgtctgcgtcggcgtcacccgcgcccttccccaagtttctgagcgtaaggttggaaaacttgaactggaagctatccaagaaggtcgttatcttgcagatttcagatatgcatgcattggctattcaatgtacttaaatggcaaggaaactcctacgggggtacgagataagccacgtgcccatctgcctgtttgtgctggagtcgagctgttgatagataccaaaaccacgtcaatataaaccagggcatgcaggagatgatttcttaacgaaatttcagaggaatgcaggtcttgtggccagtggtgtggctaagaacctgaatagagttgggacctacatcaaagacactgtcagtgatatgatgcagcctcaccgcaagcgtcccaaataaaacataggcctgtctctcctaaatcctgtatggaagttaacattagaaattagatgatcggngaacatcggatcaatcactttcttccatacacacccagcgcagcagtagcttagctttctgttggtgtcagaaactctagagaattgagagaagatctatggttaggaaaa

SEQ ID NO: 268803 - DNA, 335 bp, Zea mays
cgacggcgaggtctggaaggagaaccgcgagttcctggagcgccgcgccgccctcggctcggcgacggcgggcgggtgctgcgggagcaaggtcagggtccaggaggcttgacgctgatggatggcggcgcccggatccctctctcgctccatcgcggtcgcgactcgtgacccattggagcagggggttcatgaaattctatgtactacttactcgatctccgttgattttgttctccatcttttttctttctttctgagagagactgctgcttgtacttgcacccaccatgaagatgaaaggcaaatagatgcgctgataaaagtcatcactc

SEQ ID NO: 268804 - DNA, 1981 bp, Zea mays
ccggccagcagtcgccagccccagcaaggcagagcagcgagcggctatgggaagagagacgccggcgatggcggtaccgctgctggcggcgctggtcgcttccgcggccatgttcatgttggcggggaccgggagcgcgtccccggcggaggggatccagccgctgtccaagatcgccgtccacagggccaccgtcgaaatgcagccgtcggcgtacgtgcgggcgacaccgtcgctcctcggcgagcagggagaagacaccgagtgggtgacggtgaagttcggctggaaagagccgtccgaggacgactggatcggcgtcttctctccgtctgaattcaactcgtcggctacatgtccgaacccatggccagcagaagaaccctatctctgcacagcacccatcaagtatcagttcgccaactactctgcgaactacatctactggggcaagggcagcatccggttgcagctcatcaaccagcgctccgacttctccttcgccctcttcaccggcggcctcagcaacccgaggttgatcgcggtgtcggagcccatatcgttcaagaaccccaaggcgcccgtgttcccgcgcctggcgcagggcacgtcccacgacgagatgacggtgacgtggaccagcggctacgccatcgatgaggcgtacccgttcgtggagtggggcgccctggtcgccggcggcgtccggcacaccgcgcgcgcgcccgccgggacgctcaccttcaaccgcggcagcatgtgcggcgagccggcgcgcaccgtcgggtggagggaccccgggttcatccacaccgccttcctcagggacctctggcccaacaaggagtaccactaccggatcgggcacgagctccccgacgggtcggtggtgtggggcaagccctactcgttccgcgcgccgccgtcgccggggcagccgtctctgcagcgcgtgatcgtgttcggcgacatggggaaggcggagcgggacgggtcgaacgagtacgcggcgtaccagcccgggtcgctcaacaccacggacgcgctgatcgcggacctggacaactacgacatcgtgttccacatcggggacatgccctacgccaacggctacatctcgcagtgggaccagttcacggcgcaggtggcgcccatcaccgcccgcaagccctacatggtgggcagcggcaaccacgagcgggactggcccgacacggcggcgttctgggacgtgatggactcgggcggcgagtgcggcgtccccgccgagacctactactactaccccgccgagaaccgggccaacttctggtacaaggtggactacggcatgttccgcttctgcgtgggagactcggagcacgactggcgcgtcggcacgccgcagtacgacttcatcgagcactgcctctccacggtggaccgcaagcaccagccgtggctcatcttcgccacgcaccgcgtgctgggctactcctccaacgcctggtacgccggcgaggggtccttcgaggagcccgagggccgcgagaacctgcagcgcctgtggcagaagtaccgcgtcgacatcgccttcttcggccacgtccacaactacgagcggacctgccccatgtaccagagccagtgcatgaccagcgagaagacccactactccgggaccatgaacggcaccatcttcgtcgtcgccggcggcggcggctgccacctgtccagctacaccacggccatccccaagtggagcatctaccgcgactacgacttcggcttcgtcaagctcacggcgttcaaccactcgtcgctgctgttcgagtacaagaagagcagcgacagcaaggtctacgactccttcaccatcgacagggactaccgcgacgtgctcagatgcgtgcacgacagctgcttccccaccacgctagccacctagttaattaaactaattaatgagacgccgccagttttaattggctttcatccgaat

SEQ ID NO: 268805 - DNA, 617 bp, Zea mays
tcatttcatcagagcagtcttgaaagatgcggaattccagatagtgatctgttgcagtatgaggaaaaaagttcctggaagggatttttgcttgttgctcatgagccaggcgctacagttggtggttcccacataagaggaagtatggttagagcatccgaagctggttatgaagaagttgatcttgttttaccaggcaccggacggttccgtgtgcagttaggggtgaatatgccagctcgagctcggaaagtgcacgaggacacgaacacagaacttgaaaacccagataccattgaggagtacgatgttgttctttaccttggtatcatagacatattacaggaatacaatatgtcaaaaagggtcgagcacgcagtcaaatctctcaagtttgatcccctttcaatatcagctgttgatcctgatttgtattcgaaacgatttgtaaaattcctggagagtgttttccctgaacaggactgagtaggcacaataaagtacatatatagtagtgctgctggcctcatttttcccccttgtataaaatgttaacatgttctcagttattcagcacggcttctgtgcattaaaaaaaataaataaaatatttttat

SEQ ID NO: 268806 - DNA, 750 bp, Zea mays
tagtcgacgagctgatcgccgaactggaccagatgtgtgacttcgatggtgagctgaagagtccttgcaggaactggttggtcgtctacactgacaacgaaggcgacatgatgctggtcggcgacgacccctggaatgagttctgtgacatggtccacaagatcttcatctacacaagggaggaagtggagaggatgaacccaggcgccctaaactcgaggctcgaagactgcctgtctgactcgctgggaagagggctggcttccaaagagccccggagcggcccctcgacttcggctgtcgattccgagaactgctaacttgtccagtcagtgagcccttttgaaagtggtgaagcagacaaaaggccacgtgtcagagtgaccggaagaacgagaaaggggtgtgtttcagtggtgtgtagtaggtaggtaattttgtgtgtatgcctccgggtaaaagccccgcggtacccagtttgtagatggtgcttctcctggtgctagtttcccgtcgtaagctggatttttttggggggtgtgtgccctgctctgtgtgctgacccgcctgggggtaagttgtagcagagcaggagaaagcaggcaagaaaccgctggtgcgcctgcttggccaatccttttccttgcggagcgctgtaaatagccttggatctgaagcgtagtaatgtattgtcatggtactcgccaaaaaaaaaaaaaaaaaaaaaaaaaaaaaaaaaagggcggccgc

SEQ ID NO: 268807 - DNA, 588 bp, Zea mays
ctaaaacaacagattgcttgcatactttcaagccaccacctcctttgaggggaggagatgcatctgttaattctgtccatttatttccaaaaaatactgatcacattgttgtctgcaataagacttcatcaatattcatcatgactttacaaggacaggttgtgaagagtttctcatcaggtaagcgagaagggggagattttgttgcagcttcagtttcaccaaaaggagaatggatatattgtgttggtgaagacatgaacatgtattgctttagctaccaatctggtaaactggagcatctgatgaaggtgcatgagaaggatgtcataggcattacgcaccatcctcacaggaacttagtagccaccattgctgaggattgtatgatgaagatatggaagccttgactttttttctttttaaaaaaaccttgaaccgatgattaaataggatgtattttgttttgtaatttagataactggtaggcgctacagctatggactcgttggtgcttatgttgccccatggtcttactaccattgtttcctgtacctagatttaaggacctttcaatggtgttaacac

SEQ ID NO: 268808 - DNA, 903 bp, Zea mays
gtggagaggtctcacaattctacagtgacctcttcctattcaaccttgatggtaaagaagtgatgagaaagactatcaaagtgaacgatcccctgagatacggaggggtcaccatctatcagacagactggggattttcagcattgcaagtgaagaaaaatggtgaaggccctttcaatttggcgatggcccccttgaaactgaatggggataagaagctctttggaacattcttgccacttgaagattcagactcgtcgaatccaaatgtcaaaggaatatcaatgcttgctcgagatttgcagtctattgtgttgtatgatcaagatggtaagtttgtaggggtccgtcggccaagctcaaaactgcctattgagatcaatggcaatgaaatactcattgaagatgctattggtagtactggactggatcttaagactgatccaggagttcctattgtttatgctggttttggtgcgcttatgttaacgacctgcattagctatctttcacactctcagatatgggcattgcaagatggaagtacagtggtcgttggaggaaagacaaatcgagccaaacttgaattttctgaagagatgaaccggctacttgataaagtaccagagctgatcagcgccgatgagaatctattagataccaaatcgacagccacatgaaacatttttttgtgtgtttttgtttgggattgctgaagatgcagtagctctgttcaggtgaacacacgttcgaattcacaaaacatggccttcaagaatagaaaaactgtttcaatctttcagtagaacttcttagatcacacttcaattgagctctttggacatctttgaatgaggaaactaaactgatagcttgttatattaccaatttaccaattaccat

SEQ ID NO: 268809 - DNA, 605 bp, Zea mays
gccttgcaactttgagctctctggcctgcccccgttccagcaagatctgtactccgtatccatcatctccttgcttagtgggcactcaaagtgttgctcaaacaaatgatgattcatcgatagtggctgaggcgacagctctccaagtttcgtctgttcgctcgtggtggaaattccgctgagcgagcgagtgaatcctcctcttcctagccccggcgtgaggagcgccggcgatgtcgaccggcggcaggaagatgaggacggcgtgcgtgaccggaggaaacgggtatatcgcctcggcgctcatcaaggtgctgctggagaagggctacgccgtcaagacgacggtcaggaaccctgatgacatggagaagaactcccacctcaaggacctgcaggcgctcgggtccttggaggtcttccgcgccgacctggacgaagacggcagcttcgacgacgccgtcgccggctgcgactacgccttcctggtcgccgctccggtgaacctccacacgaagaaccccgaggaagaaatgatcgagccggccgtcaggagaactctgaacgtgatggtgtcgtgcgtgaaggcggacacggtgaggcgc

SEQ ID NO: 268810 - DNA, 2122 bp, Zea mays
gccagcgccaggtagaaaagaaacagagttcgacccccccccccccgccccgcccggccgcccccaccgcagcgcccgcgaagccgccaaacaccaccacctatccgccagaagcctcttcctccctcgctctcccccatcggcgcgctgccaatggccgcgtggtgaagcgcacccgacggaagaagcacgcaccaacacccaagccccctgtgccctcgccgtcgccgcccgcgcaagattgagatcccggattcagacaggtgctaccattcgatttgatttggcgcggagcactttcctatggccgcctccatcgcggcctcgtccttctttccagggtcaccggcgccggccgctcctaagaacggccttggggagcgcccagagagcctggacgtccgcggcgttgcggcgaagccgggagcctcgtctagtgccgtgagggcgagcaagacgcgcgcccacgctgccgtccccaaggtgaacggtggcaagtctgcggtggcggatgtggagcacgagaccgtaactgtaccttcgtcggtgccgaggactttctacaaccagcttcccgactggagcatgctccttgctgccatcacgaccatcttcttggccgccgagaagcagtggacgatgcttgactggaagcccaggcggcctgacatgctcactgacacttttgggtttggccggatcatacatgatgggctcatgttcaggcagaacttctccattaggtcctatgagattggggctgataggacggcatctatagagacactgatgaaccatttgcaggaaacggcacttaatcatgtgaagaccgctgggctgctaggtgatggatttggctccacaccagagatgagtaaacggaacttgttctgggtggttagccagatgcaggctatcgtcgagcgttatccatgctggggtgatactgttgaagtaaatacatgggttagtgctaatggtaaaaatggaatgcgtagggattggcatatacgtgattctatgacaggccacacaatactgaaggcgacaagtaaatgggttatgatgaacaaactcactaggaagcttgcaagaattccagatgaagtgcggactgaaatagagccatactttgttgagcgttctgctattgttgatgaagacaaccgcaagcttccaaaactgccagagggtcaaagcacttctgcagctaaatatgtgaggacaggcctgactcctcgttgggctgatcttgatataaatcagcatgtcaataatgttaaatacattgcgtggattcttgagagtgcaccgatttctatttttgagaatcatgagctggcgagcattgtgctggattacaaaagggagtgtggccgggatagtgtgctgcaatcacacacctctgtgcacacggattgcaacagtgagtctggagaaacaaccttgcactgtgagcatgtgctgagccttgaatcaggtccgaccatagtgaaggcccggaccatgtggaggcctaagggaaccaaggcccaagaaacagcggttccatcttcattctgatttgtgtcagacgttcgggatggtgactttggcagcaaactatctggcagaagatcagaatggttactagcatcctctattggaagcaaatcacacggaccgtgacctaaactaatttaactatgaagtgtgaccaatagaggagatataagtggggtcacaatggaggagaccaaagcggggagatcgaagacaaaggaggcctcctgtgcatggtttgtttctgttttcgcctttcgagttctttcttacgacaatcttgggtcgcacaaatgggtgttgtaagtattgatctgtagctacaaatgtatgatgggggagtgattgcttcccatacatgttccttctggggctatgtccatatgttgtaagccccatgaaaacagatttgtcgcagccatatccattcagaatctcatactatattgtatttgctgatattaaaattgatactactactattctccaggcggttcaagcgggttgaaccttcgtgtgtgggccaaatattgaacctgtacagcttgccatttactttgacttgcataccatcccttct

SEQ ID NO: 268811 - DNA, 498 bp, Zea mays
acagttgatccatcttcaatttgaattgtgtgagacgttcgggatggtgaatttggcggcaaactactactatttggcaaaaagatcagaatggttactagcgtcctctattggaagcaagtcacacagggcgagacctaaactaatttaattatgaagtgtgaccaatagaggagatataaatagtgtgaacaatggactggaggagacagaagcggggggagatcgaagacaagggaggcctcatgtgcatgacaatcttcggtcgcacaaatgggtgttgtaagtattgatctgtaagctacaaatgtatgaaggggagtgagtgcttcccatacatgttccttctggggctatgtccatatgctataagcccctcgaaaacattgtcgcagccatatattcatgcagaggattttaatctcgtacgtatattgtatttgctgatattaagattgatattattactccttttctccaggctgccaacccgttttg

SEQ ID NO: 268812 - DNA, 1098 bp, Zea mays
ctctctgcaggtgcagccatggcgaagccgtctccatccaggtgtggaaccccagcggcaagtaccgcgtggtgagcgccaagtccatgccgggcacacgatggatccgcctgctcaccgacaacgactgccgccttgagatatgcaccgagcacaagaccatcctctccgtggacgacatcctggcgctcatcggcgatcgctgcgacggcgtcattggacagctcaccgaggactggggggacgtgctcttctctgcgctcaagcgcgccggaggcacggtcttcagcaacatggccgtcggctacaacaacgtcgatgtcgaggctgccaacaggaatggcatcgcaatcggcaacacgccgggcgttctgacggagacgacggctgagctcgccgcctccctctcgctggcggcagccaggaggatcgtcgaggctgaccagttcatgagggctggcctctatgacggatggctcccacacctgttcgttggcaacctgctcaagggccaaactgttggagtcattggagctggtcgcattggctccgcctatgcacgcatgatgattgagggtttcaagatgaacctcatctactacgacctgtatcaggccacacgtcttgagaatttcgtcacagcatatgggcagttcctcaaagcaaacggtgaggagcctgtcacctggaagagggccgccaccatggaggatgtcctcagggaggctgacgtgataagtctgcatccggtgctggacaagaccacctaccatctgataaaccccgagaggctggccatcatgaagaaggaggctgttcttgtgaacgcaagccgagggcccgtgatcgatgaggccgcgctggtggagcacctcaaggctaaccccatgttccgcgttggcctcgatgtctttgaggatgagccttacatgaaacctggactcgctgacatgaagaacgccgtcgtggtaccgcacatcgcatcagcctccaagtggacacgcgagggaatggcaaccctgtctgctctcaacgttcttggtaagatcaaggggtaccctgtgtgggggaaccccaatcaggtggagcccttcttgc

SEQ ID NO: 268813 - DNA, 451 bp, Zea mays
aaagatgctgcctttttggggatagactgaattgccttccagtggcattcaatgagctttgggatttgaaattttgaagactttccagaatgtgtcagcctttgggatttggcatttcttcatctatttttttgctgcgaagaattttggggaataagagcacctcaaagtatcagcaggggagatacggcgttaacatttcatcatttccccatcttgctcctgatttcccccccttggtgaatgtactgtcgacttaacgtctttcatagttatttctttgttacaataaatagactttttgaaccatgtataaaatataaagcaagtgattttatctttccacacttgcggttaatccgagcttgtatagcatcgagaattcgagatcgagctaaacaaagcttcctattgaatttcgcttttaacactaaaagcgaaggaaaaaaca

SEQ ID NO: 268814 - DNA, 645 bp, Zea mays
tcttttatcttatcttcaagggccatctcgtcgacgcagcctgtgatgcagtctacaggagatgtgtctggctctagcccatctgcagtggatcacaagttagcaatgcaagaggatgagtttcacaaattagcagatgagacgattcatgatttgcttgaaaaacttgaggagtatggtgactccattcagatggatggtttcgacatagagtacgggaatcaggttttgacattaaggcttggggatttggggacatatgttataaacaagcaaactccaaacaaacaaatttggctatcttctcctgtgagtgggccttctaggtttgattgggatgcaacagctaatggttggatatacaagaggactggagtgaaccttgtgcggcttctggagaaggagattggtgagctctgtggtactccagtagaactttagtaacagtactggaaatgccacacagctaggttgtatggagagcagtgctctgaatgtcgaagtgtagtacacaaaactttttttttgttctacacatttgcacatggtttggactaaataacttcccctctctggtagcggggaacagtattattcggaaaaaaaaaaacaaaaggttaaaaaaaaaaagaacacgaaaaagaa

SEQ ID NO: 268815 - DNA, 760 bp, Zea mays
cttcagggcctatgctgaggttgccactgttgttgggcatgaggttgggcatgctattgcgaggcactccgctgagcagatcactaagaacctctgggtggcaatcctgcagattgtcatcctgcagtttatttacatgccggacttgataaatacggtgtcaacactactcctcaggctacccttctcacgaagaatggagatagaggctgaccacatcgggctcctgctgctcgcttctgctggttacgatccgcgtgtcgccccttcggtctatgagaagctaggaaagatcggaggagattcagcactgaataactacctctcgactcacccgtccagcaagaagagggcgcagcttctgtcgcaggccagtgtcatgaacgaggcgctgaaactgtatagggaggttagtgccggccaaggcaccgaaggtttcctctagattctgggacctgctcctctgcttgtttcaaacgcctcacaaagaggttggtggtcttgttagctgcagtagtgacggcctgtggcatcggcgttctgagtggttcagaagcctggaagattaaactaagctatttgctcctcgttatttccagtcgttctgatgtcgaacggggccctcgtcgcttcccctagcagacgcaggatagctgtttttgcatttgtcattaggaaaaaaaaagtaattaagcaccgtattattgtcaaaaattgctggttgtcccccaaagcatttgataaaaaaaaaaaaaaggaa

SEQ ID NO: 268816 - DNA, 676 bp, Zea mays
agcccggatgagaaaatgtggagggaactgcagggtttcttcttagtcccatgaatggtatcagggtactgggaagaaatgttgtttggtcaaaacagctggactctgagagctcagacgggcgtaacctaaccatcaagcgcaagcggcagtacggtcacgtctccagacgggcgttacctaaccatcaactgcaagctggtagcctggtagtaatactggttcacggctgcctgcatgcaagttcttttttcccctgttgaacaagtttatttatctcattacccgctgaagaactcaacggacagcaagctaagccgtttggttaatcatcgaaacaatggatacctctaatcttcttcaaagtaagccatgtacaaaagggacttaggtccttccctgggagatgtctgtaccgatggactagcttgactttagtgatgtagctgttacctggtcttaatttgttcttgtccttccgttcttggttccatgttgatttctgttccccactcgctcctcgcagcccatttgaagttcgtcagacttacgcacagcagagagctgacacaaacttggacgagaatcggccactgcttgccatgggaccttgagcgcatcatgcccaattcggtgattctaaccgaggtcgagctagttaacaccacctggatgc

SEQ ID NO: 268817 - DNA, 276 bp, Zea mays
cccacgcgtccgcccacgcgtccgcggtcgcgtgcgtgatgccaatgggaacatcaagaagaagaaatgcctttgtggctcggttgagtgtgatggctggctgtattgattttttaaaaacttgctgtattacgtttagaatctgcagtttttttaagcataactgaacttgaacttgtttcattttgccttcatctagatcatgttgtgacaaaatgtaaaataagacatcagtgtttttagttgccaatgggggtcaagttttttcctttctcc

SEQ ID NO: 268818 - DNA, 1516 bp, Zea mays
ttatcatcgcgtccgcccacgcgtccggcgtgtctcttcctccatcgcagcgtgtctcgtgctccccccaggctcctcttcctcgctttccctccaccccgggcgcaaaccctaaccctaccgtcgctcgccccgcggcgtctgccaatggcgcgccccgtgtgagtgtgcgcgagagaggggtagaccttgaggccgctacccggggaggagagcgagagatgtataaacaggggggagcggggggaggggctgggctggaccggaagcggatcaacgacgcgctggataagcatctcgagaaggcggtcgcgtcgccgtccacgtcgagggggtcggcgggcggcgggcgcgaccaccaccgcctcgtcgtgccgtcctccgtgtcgtccatccccaagggccgctgctccgaaggggagtctgattctgatagtgaagcatcggatgttagcggctctgatggagaagacacctcatggatttcatggtattgcaacttaagagggaatgagttcttctgtgaagtcgacgatgattatattcaagacgacttcaacctttgtggtctcagcagccaagttccttattatgattatgctctcgatctcattttagatatcgagtcatctcatggtgatatgttcactgaggaacaaaatgagctcgtagaatcagctgcagagatgctttatgggctgatccatgcacgatacattctgaccagtaaagggctggctgcaatgctggagaagtataggaactatgacttcgggcggtgcccgcgtgtttactgctgtggtcaaccatgcctgccggttggacaatcagatattcatcgatctagtaccgtgaaaatatactgccccaagtgtgaagacatctactacccacggtccaagtaccaaggcaacatcgacggcgcatactttgggacaacgttccctcatctgttcctgatgacatacgagcacctcaagccacagaagctctcgcagcgctatgttcctcgtgtctttggcttcaagctccacaagccatgaacctcatgtatttgtcttttaaactcctcaagacgtggcactgggggcatgcgggagttttgcaatccttgaagacttgcatataagagcgccattggcaggtcagtggattggtaaaattctatcatgctgcagcgtgcttgtaccttagctggctggcacctatccaacatttgaatgtagctctaaggatatcaatgttgtaacctaactgctattgttctttgattagtaaaccaggagccccccctacaatgtagaatatggcaattatttatggctttgcagaaaataacaacccttcatctgcttggttctcgtaagatggccctttaattttgtagtttgcgaacttctattttgaaatgtgatttgcgaagggtgcgtcatcttcattgcctttggatttttgtagtttgcgaacttctgtttagatgctagccaaggcttttttggttggtaccgttgtggtt

SEQ ID NO: 268819 - DNA, 498 bp, Zea mays
acgttccctcacctgttcctgatgacatacgagcacctcaagctacagaagcccttgcagcgctatgttcctcgtgtctttggcttcaagctccataagccatgagcctcatgtatttggcttcaagctccataacccagagttttgcgagatcaaggtccttgaagactacatataagagcgccattggctacatataaaagcgctattgacagatcagtggattgataaaactccaccatgcagcggagcgcttttaccttacctggctggcacctaccaacatttgaatgtagctctaaggataccgatgttgttgtaacctaactgtaattgtttttttgattagtaaaccaggaccccgtacgatgtagagtatgggcattatttatggcttatgcaaaaaaaatcgttatgctgtcccaaaaaaaaaaaaaaaaaaaaaaaaaaaggcggacaaaaactaaagagacaaaaaaaaccaaaaattaattacgg

SEQ ID NO: 268820 - DNA, 386 bp, Zea mays
ctcatgtatttggcttttaagctctacaggatgtggctcactgggggaaaacccagagtttgtgcgagatcaaggtccttgaagactacatataacagcgccattggctacatataaaagcgctattgacagatcagtggattgataaaactccatgcagcggagcgcttttaccttacctggctggcacctaccaacatttgaatgtagctctaaggataacgatcttgttcgaacctaactgtaattgctgttgtgatctagtaaaccacgaccccgctcgatgtagagtatgggcattatttatggcttatgcacataaaatcgctatgcttgtggccaacagtcaacgagtcatcagtgcggatggatgaaaatgaacctga

SEQ ID NO: 268821 - DNA, 411 bp, Zea mays
  unsure (1)..(411): unsure at all n locations
cggcccggaaancccgggccggccggacccttccacagaaaatctttcgaagcgttatgtcccttttttcttgggctacaagctccacaagccaggaacctcatgtattggtcttttaaactcctcaagacgtggcactgggggcatgcgggagttttgcaatccttgaagacttgcatataagagcgccattggcaggtcagtggattggtaaaactcccccatgctgcggcgcgcttgtaccttacctggctggcacctatccaacatttgaatgtagctctaaggatatcgatgttgttgtaacctaactgctattgttcttttgattagtaaaccaggagcccccccccccatgtagattatggcccccctttatggcttatgccggagagggaattatttaataag

SEQ ID NO: 268822 - DNA, 420 bp, Zea mays
atcctttttcattcccacccgcccatcccttcaaaattcgctgcgtgtccctctctctccctgcgctcgtgctccgcccaggcccctttcctccaccgcgggcgcaaaccctaaccctacagccgctcgccccgcggcgcctgccaatggcgccccccgtgtgagtgtgtgtgagaggcagagacctagaggccgctacccggggaggagagggagggagagggagaggctgatagatgtataagcaggggggagcgggggtaggggctggtctggaccggaaacggatcagcgacgcgctagacaagcaccttgagaaggcggtcgcatcgccgtccacatcgagggggtcagcgggcggcggcggtgtgcgcgaccaccaccgcctcatcgtgccgtcctccgtgtcgtccatcccca

SEQ ID NO: 268823 - DNA, 652 bp, Zea mays
cccacgcgtccgacctcatgtaccccttgtgttgtatataaatggaaatggaggggtacttgagcgcatgaagaacacaggagttgatgttattgggcttgactggacagtggacatgactgatggaaggaggcgccttggtaatggcattagtgtacaagggaatgtggatccagcatttttgttctcaccattaccagtactgactgatgaaatccatagggttgtgaaagcagctggtccaaaaggtcatatacttaatctgggccatggtgtacttcagaaaacacccgaagaagctgtagcacatttctttgatgtcacaaggcgcttgagatatgacacccttttccaaggttctgttgctgaagaattgcatcacgttgcttgacaacggcaatgacattcccatttttcatcaagtggtgtatttgatctgtcatatcatcttagagtcgtagtagattcctagtgttgcctgcattctacctttcaagagagactcattttcttaagcctgtatatgtattgcagagataccggcggcaactctagtgcaattttattcattgtttgttcgttccaaattaaaaattttaattattttgaatatactttcaaacttattttttgttatatatttttattatga

SEQ ID NO: 268824 - DNA, 540 bp, Zea mays
cacgcccctgccggccatcggggtgccgttcgatatctcggactccaaggggcccgtgatccaatcgccagtacggtccaaagagcaggtgagggagctcgtccccatcgaccttgatatgctccagttcgtcggggagtcactaaagattctgcgaaatgagattgatggaaaagctgctttgctaggatttgtgggggccccatggacaattgcaacttacattgttgaaggggggatgaccaacacatacacaaatataaagaacatgtgccatacagctcccgatgtcttgaggtgtcttctatctcatcttgcagtagcgatatctgactatatcatttaccaagttaactccggggcccagtgtatacagatatttgattcatggggcggacaacttccacctcatgtgtgggagcagtggtcaaaaccatatatcaaaaagattgtgaataggattaagaaagagtgccctcatgtaccccttgtgttgtatataaatggaaatggaggtttacttgagcgcatgaaagacac

SEQ ID NO: 268825 - DNA, 707 bp, Zea mays
gaccaatcgtcacaaatataaagagcatgtttttacagctccagatgtcttgaagggtcttctctctcaccttgcacaagccatatctgactatatcatttaccaagttaactcgggggcccagtgtatacagatatttgattcatggggtggacagcttccacctcatgtgtgggagcagtggtcaaaaccatatatcaaacagggttgtgaaagcagctggtccaaaaggtcatatacttaatctgggccatggtgtacttcagaaaacacccgaagaagctgtagcacatttctttgatgtcacaaggcgcttgagatatgacacccttctccaaggttctgctgctgaagaattgcatcacgttgcttgacacgggcaatgacattcccatttttcatcaagtggtgtatttgatctgtcatatcatcttagagtcgtagtagattcctagtgttgcctgcattctacctttcaagagagactcattttcttaagcctgtatatgtattgcagagataccggcggcaaatctagtgcaattttattcattgtttgttggttccattattcatctggctgaagaagggatgcatgatgaccctggtttggtttcaatgattaatgccaatataaattattatagttaatgtatgttttacagaaacaatgttacaataatgcaagatgattggattcatatggt

SEQ ID NO: 268826 - DNA, 508 bp, Zea mays
gcccagtgtatacagatatttgattcatggggtggacagcttccacctcatgtgtgggagcagtggtcaaaaccatatatcaaacaggagttgatgttattgggcttgactggacagtggacatgactgatggaaggaggcgccttggtaatggcattagtgtacaagggaatgtggatccagcatttttgttctcaccattaccagtactgactgatgaaattcatagggttgtgaaagcagctggtccaaaaggtcatatacttaatctgggccacggtgtacttcagaaaacacccgaagaagctgtagcacatttctttgatgtcacaaggagcttgagatatgacacccatttccaaggttctgttgctgaaggattgcagcctgttgcttgattcgtagtgttgtctgcattctacctttttaagacatactcattattgaagcctggatatgtcctgtggagatatcggcagcaaattaaatgtaattttattcattgttt

SEQ ID NO: 268827 - DNA, 658 bp, Zea mays
ggcaaaactgggtcggacgaatcgatccccatgattcccatttcctagccatcgccatcgcagagcagcagctgctgcaagctgaatttgatgactgtgtatctgcaaactctagcggtgccacatgctgccgatccattgctttaattgtgatgttccttttgctcgtacgccatgtaattgtcattgtgagggatgttagcatgctacaagatgcaacggtgctgttcagcgcaactcttcagtttgcgggattctttcttccttgttatgtaatagctcgttcttgctacgctttgcagcatcggagacggagacaggtgtagggagactcacctgaaccttaaaagaacacaaaggcgcaccaattgaagcgccaccgcggcggtacccccgaagataggaggactacatggaagcttgcgaagtgagcctccccgttgttgcttggattcaccgcaaagcatttggtttctgtcctgaagacgtcggcggtttaattaggttgattgagtagcgagagcaggcgctgtgaagctcaagtgtacatacgttgagggggacaaggcctttttttttttacagctgagaggaagcaaaatgtagcctcacacatttctgctgcaaataaaagaacaatcgcccgtcagcgcctctt

SEQ ID NO: 268828 - DNA, 1045 bp, Zea mays
catgtatacacgtctgctgcaagggtatgatagtatggatcctgatcaaaagtcggcctcttcttacgctgcaaagcatctgaggttaatgatgtgtggatcatcagctcttccttccccacttatgaagaggtgggaggaagtgacaggccatcgtcttttggaacgctatggtatgactgagtttgtcatggcactgtctaatccattgcatggtatccgaaagaaggtacagttggtaaacctcttccacgcattgaggccaagatcattatggaggacggggctgaaactacaactggagttggcgagctctgcattagaagtccatctcttttcaaggagtattggaaaagaccagaggtcaccgcagaatctttcattgatggaggattcttcaagacaggtgatacagtaactgtagatgaggaaggatacttcataattttgggacgcacaaatgccgacattatgaaatttggcggttacaagctgtcagcattagaaattgaggcagtactgttagagcatgatgctgtactggaatgtgctgtccttggcttgcctgatgaagcctatggggaggttatatgtgcaataattgtgcctaaggaggatgcaaagaaaaaggctggacaggactcaaagccagcgctaaccttggaagcattaacaagttggtcgaaagataagcttgctccatacaagattccaacaagactatacttgtgggattctcttcctcggaatgccatgggaaaggttaacaagaaggagctgaagaaattgttaggagcttagccatgtgtatagatgtatttatctcttcatttccttcttaaagtttagcaagtcgggctcattatattgattagcgaataagtgctttcgttaccatggaccaataatcttcgaaacggcccgagttacactgcgcacacaaaaaatattaataatataaaatataatatatttttttatataataaaatattatttttaataaattaaaaaaagggccgggctctcgaaacccttagtgcgtg

SEQ ID NO: 268829 - DNA, 449 bp, Zea mays
cccgagctggccgctggatgccgatgtcggatgggggatccgggcctcagagtacttcgacaagcactcgatcagaaatgtcacagtggacggggtggagatcgattgggaaggggacgtcgacgaggggtgggtcaaggaaatcaattgcttggagtgggagagcttcgcattccaccccagccccttagtcgtcctagtcttcgagcgctacaacagggctgctgacaattggaagtttcttcaagaattggaaaaggctgctaaggtgtactggaatgctaaagatcgcttacctcctcggacagtcaaagttgatataaatattgagagggatttggcatatgcactttaagcaagagaatgtccacaattattgttccttaggggaaacaagatcttattagagaaaaagagatatggactgcatatgagctggttcaaatgat

SEQ ID NO: 268830 - DNA, 442 bp, Zea mays
gagcggcagagggtcactgccaaacttgggtctctcaagataagctccaaggcagtggaggctgaccgtaagactagcacagctggtatggagaagcagctaaatggagtcagtggctctgggagcgcagttcctgagggtggcgaggagcagaaggtcaaaatcagttccaaggtagtggaggctgaccggaagacgagcaaagctggtgtggtgacaatcggctcgatgccggtccgggttgacagttatgccgtctagtggccagcgggggggagcttttgtttttatcttttttgcccttctggggtaatctttggtgccccggcttttcatcttcctttctggtagaagaatgcttgtcctggttggtggttctttcctagcttctatatggtatcaaaaaaagaaaaaaaaagagccgccgaatagttacattctt

SEQ ID NO: 268831 - DNA, 812 bp, Zea mays
ttcgtctcctatcctgcggtcgccaagatactaaggacccgaatgggactgccgttgccgtcggtgagggagaccatcgcgcactagtcgtatactctctagtggaggattacctcagctactggatgcaccgtctgctgcacacccagtggtgctacgagaagatccaccgcgtccaccacgagttcacggctcctacaggcttcgccatgtcgtacagccactgggccgagaacgtcgtcctttcgatcccggccttggccggcccagtgctcgtgccatgccatgtcaccacgcagtggctatggttctccatccgcctaattgagggcattaacacgcacagcggttaccatttcccgttcagcccttgcaggctgattccattctacggaggggctgcataccatgactaccatcactatgcaggaggccgtagccaaagcaactttgcacccctgttcacctactgtgattatttatataggacagacaaaggctacagataccacaagctaaagcaagagaagctgaagagtctagcagaaaatagtgcggataaaggaggcaactactcattcgacgaagggaaaaagaacagatatttttgtgcctgagcgtacgaagaataatcaaggctattacttcgtcctgttcgaagggaagatttgcaaataaataattcgaatttactgcagaagctcttgattggtcgacgaacaaatatattgttgcaatccgtttcgtgtattctatatatctaatatgaaacttttttgtcggaatatatggatcatcccgatacattactt

SEQ ID NO: 268832 - DNA, 902 bp, Zea mays
ctcgagccgcttaaaccttctgcaaatatggaagtggggcgcaaaagatctccgatctggaaatcagcagctgtttatagttgcttccttggaacatcagcaaacctgcgatatcaggtcatagctggtctgattgagcatcggctaggagagaatctgatggcctactatgaccagccacttattgctaacctgttgtcctttgtttcaaggacagttaactcatactggggaacacagcaatggatcgatcttgcacgagttacaggcgtgcaaagaactaacaaagatctgccttctcctgaggtttcgagcgcatctgaaatgccactgctagaatgtggcacggcagaggtacagaatgcggacgacagcagtaaccaatcaaatgacttgacataagttatcgcgcagtggccatacaaaacacagagcagcttccttccatgacacaccgtatactagacaaaccgtacatgcatataaatgggactgtcttcttagagccaggctgtgaagcttagccatcgcgtcatgtggagagaccaatctgaaatcctgaagagtaaagcttttgaagactttcgacttgttatgatcacagccatttttacacaccatcatggggtgaataccgtttgtacattcatagaggagacggccgaagaattctttggagcacgtacagcattttacacgtgaaatttgttcagaaaacattactggagattgtcacatggcaaaaaggatcaggatcgttgcttgtgaattgtgatgcaccttgtatgcaatgcacttgaatccagagtgcacgtgtgattttattgtctgaacgaaccgtgcgacggcctgatgtttcctgtggtattgcttgggtgtgatcaaactagttcctatgtttc

SEQ ID NO: 268833 - DNA, 448 bp, Zea mays
gttcatggtggaggagtggaggatcggggtggagcggcccgggttcgaaaagttcgtcaaggcgagaggagctggaagcgaaggtcagaactggtgatggaggctgaggaagggaggatcctccgggagaggctcgcggtggcgagggagaaggcgttgggggctactaaggaaggcggggcttctgaagtggcattcaccgagttctttggagatttggacaagaccagctctccgtccgtaaacggagaatgcgattgaatttgatcactggtgtgctgctgtggcagatggactacgaacgtatataaactttaggatccaatatcacttagtattttgacagtacgagactaaaatattgcatctgtggtatgggaataaaattggattcaagcaaaaaaaaaaaaaaaacaaaaaaaaaaaaaaaaaagggcggccgataaca

SEQ ID NO: 268834 - DNA, 429 bp, Zea mays
  unsure (1)..(429): unsure at all n locations
agcaggagcggcggantcttccatttcaacagccacagcttcgacctgtaaactacgtacgtctcgtttggtcggttcacgatcatcagtacatgttgcacagcacacacgcacagacgatagttggatgtacatgttgatccgtcataatgtgatatcgtgtatatatatgtaaaaaaaaaaaaaaaaaaaaaaaaaaaaaaaaaaacaaaaaaaaactaaataaaaaaaaaaaaaaaaaaaaaaaaaaaaaaaaaaaaataaaaatataaaaaaaaaataaaaaaaaaaaaaaatggggggggccgttttaaaggaacaaagcttaataccccgggaatgcaagataaaagcttttttatgggggccccaaaattaaatacacgggccgcggtttaaaaacgtggaaccgggaaaaaccatggggat

SEQ ID NO: 268835 - DNA, 468 bp, Zea mays
gcgcacatgcgcagcctgatcatgagggagtgggtggagctcaacagggagtgcttctgcaggaggaccttcccctcggacatcgcgcaggtctgcttgaacaccgtgaggatggtcagcgtcatgtactcgtacaacaaggagcagaggcttcccgtcctcgaggactacgcgacgatgatgttggtggtttgatttgaagcatgcatgcatgcaatgctctctccgatccgcggatatgaaagtaaagtccttgtcatgcagataatgatttgttttgagaccagagtagtctagagtagagattaggctctgtaaaattagatagctaggattagaataactgggcaaacgaatatatggtatatgtccatatgtaaagatgcaatatatagcaacatatatggtaccgtcgttattatctttttttcaaaaaatgtaataatattcaaatatgcagtgcaatgt

SEQ ID NO: 268836 - DNA, 447 bp, Zea mays
cggacgcgtgggtcacagagacgaccagctgaagcgaacacagagctgctcgccgtgtaacgcagcaggcagcagcacccagaggcggcaggtcacacacacagcacacgcagatcttcgatcaccaccatgggttctctcggcagcgccgcgcagcagcagcagcaaccgcacgccgtgtgcctgccgtacccagcgcagggccacatcaccccgatgctcaacgtggcgaagctgctgcacgcccggggcttccacgtcaccttcgtcaacaccgagtacaaccaggcgcgcctcgtccggacccgcggggcggcggccgtggccggcctcccgggcttccgcttcgccaccatccccgacggcctgccgccgtcggaggacgacgacgtcacgcaggacatcccctcgctgtgcaagtccaccacggagacctgcctcggtccc

SEQ ID NO: 268837 - DNA, 632 bp, Zea mays
ggcagctctcggcctttggcgcagtcggatcgagcatcgatggctatggaagcggagacgacggtgctacgacggccgctgtcggcgtacttggcagcgggcggcggcggcggcatcggggaggaggtgtcgtcgggcaggcagcaggccccgccggtgttccttgcccggccgccggtgcacccagtgatctgggccgacgagaagcggatgaagcggctgctcctggtgtgggccaaggccgtcgcgtccatggtggccagcaacaacacctcctgctcctctccggcgtcgtcgtggtcgtccaccagacacagtggatagctagtatacgtacgtccggttgggtttcttgatggttcagcttgtatgtttttgtcttcccttggtgacgtgagccttccgttggtgtgtttttgtctggcttattttttttgtgctcaattggtgcatctatctaagctagtttcgcttgcttgatttggggaaggttgctctatttatttttatgttctatttatctagaatctagggctagctccttagttgttatatatacaatttccctatatgtctcattttatattgtccctgtacatacatatatgaatataaggtcatgagttatatct

SEQ ID NO: 268838 - DNA, 395 bp, Zea mays
ggaggcggcactctcggccggccttgggcagttgggctggtcgcggcgcgtgcacagctagcaggtgggcggatcgatcattgatggctatggaagcggagacgacggtgctacgacggccgctgtcggcgttcttggcagcgggcggcggcggcatcggggaggaggtgtcgtcgggcaggcagcaggtccctccggtgttccttgccacggagaaggacgacgaccggccggcggtggacccagtgatctgggccgacgagaagcggatgaagcgggagctgctggtgtgggccaagccgtcgctccatcgtggccagaacaacacgtcctgctcctctccgccgtcgtcgtggtcgtcacgagacacaggcgatagctagtatacgtacgtc

SEQ ID NO: 268839 - DNA, 655 bp, Zea mays
  unsure (1)..(655): unsure at all n locations
cggacgcgtggcctgccgatcgctctccgctccgccattgttgctccttattagtagttcgtcccgcgtcccttgacagttctatctatccccaccacaaataagagaccacctctctgccttcttctcggaggtcggagaagagctctctgcttcattcggccggtccaactccaccgaccgatccaatccaacccactgaccatggggttcccgccggtgtgctgctgcgcccccatccccaagccggtcgtcgccttctgcaacctgctcggcgccatcaaggacgccgtcctgctgacgctcgccgccgtgggcttcccgcacgacgccgcgcgcggctcggcggacgcccaccagcccgaggaggtgaagacccggctccccgccgtggagtacgcccagctcctggccgagcagcagccgtcgcccgccacccacgcggcctgcatcgtttgcctggacacgctggaggcggcggacgaggtgcggcggctgggcaactgcgcgcacgccttccaccgggcctgcatcgaccgttggatcgacctaggccggacgacgtgcccgctgtgccgttccgacctcctgccaagcccccggngccgggccgggctgctcgggctgggccggctcgccagccgtctcacgcgcg

SEQ ID NO: 268840 - DNA, 726 bp, Zea mays
cggacgcgtgggccatatcctctccagctttccgctccgcccttgtcgctcgtccagccaccgtgcccgtgcccgtgccgccgagaattctatccagaagcaagcaacaagagcccacccccgcttcgcgcgctctttcgtgccaggcaaacacagagcacagctatctgctcgtgtcccggtccgtccaactcgctcgctcgctcaatccactgatgatggggatcccgctggtgtgctactgcctcgccgtgcccaagccggtcatcgccttctgcaggctgctcagcgccgtcagggacgccgccctgctgatgctggccgtggtggggctgtgccgcttcccgcccgacggcgcggtggacgccggccaccagcccggcgaggtgaaggcccggctccccgccgtggagtacggccagctcctggccgagcacgacgagcagcagcagtccggcgaccacgactgcgacggggacgccgcgtcgtcggattgcatcgtgtgcctcgagacgctggaggcggcggacgaggtgcggcggctgggcaactgcgcgcacgccttccaccgcgcctgcatcgaccgctggatcgacctcggccgcgcgacctgcccgctctgccgctccgacctcctgccgcgcgcgccgggctgggccagccggctcggcctgggccggctcacgcgcgttcggtgaggaggaccgtcttccagggcagttttgt

SEQ ID NO: 268841 - DNA, 406 bp, Zea mays
gttattatgatctttatatatagttaggcaagttagctacattgacagtggaaggtggggtgcattttttgttctgtctgacccattttgtgaacatcctttttgacaacaaatactggcagaggaagacacgtcggcatttgtcatattttgttgcggcaaaccgacaatgtttatggaaaccaacaatttttgttaaagttattcaatcaaagaagtatatgtacccaaaaaaaaaaaaaaaaaaaaaaaaaaaaaaaaaaaaaaaaaaaaaaaaaaaaaaaaaaaaaaaaaaaaaaaaaaaaaaaaaaaaaaagaaaaaaaaaaaaaaaataaaaaaaaaaagggggggccgttttagaggatccaagtttacgtccgcgtgcttgcaacgtaatagtttttt

SEQ ID NO: 268842 - DNA, 554 bp, Zea mays
ggccgccctttttttttttttttcgtacagtcgtctcgtcatgctatttgtgcatgccgatgtctttctttttttgcttttgtttccgtctcttcctcaatagtgtcacgcagtccgcagagctcgtggacaccacaaaagccacacgtttcgctcagagataaacaacagacaggcaaaagattacatacattactgcgcgtacgctgtgcacatatcgatcgtatttctccaaatactgaagctgctgccgctcgtggggacctcacagcacgctcctggggacgaagctgctgccgccagcgatggtggtggtggtctcgtcggccagcccaagcccaccgttgttggtgaagcagtactccggggcctgccacgccgcgtcctccagcaccgctcccacctcaaagctcataacgtaggcggtcctacctgtgtagaagacccacttgacgggtcgcttggtgttgacgtcctcgtagtaggtgatgaagtcggccttggcccagacgtggcagtcgaatccgccggcgtcgcggcggccgaggtagacg

SEQ ID NO: 268843 - DNA, 562 bp, Zea mays
ttccaacatgctactactgctgctagtagagtagtcatctctttttagttgatttttttgatagcctttacatgccatcaaatcaataacgatattaacttgattcgatgcatgccatgccatgcgccatatccgtacgtccagggcgcggccatgttcatccagacgttcccgagcctggcctcgcacggcacggcggtggcgtcgcagacgacgcggtggcccttcttcgtgttcctggcgggggccatgttctgcctgctgagcagcagcgcgtgccacctgctgtcgtgccactcgcaccggctgaacctgctgctgatccgcctcgactacacgggcatcgcggtcatgatcgtggtctccttcttcccgcccatctactacatcttccagtgcgagccgcgctggcgggcggcgtacctgtcggcgatcacggcggccggggcgggcacggtgtacgcgctcatgtcgccccgcctgagcgcgccgcgctaccgcgcccgccgcgcgctgctgttcgtcggcatgggcctgtccggggtggtccccagcggcgcac

SEQ ID NO: 268844 - DNA, 339 bp, Zea mays
cccacgcgtccgcccacgcgtccgcggacgcttgggtctggaagctgtctgtcttttgagatgctgtagactagtagtgcctgctctgagttagtaattgaaagtgttgtccctgaagtgatgctgtttagttggtagtgtgttcgcttcttcggcacttatacttacccccaagcatcaacgctgcctgttttaaatctcaataggtgctgttttaaatctcagatctcaatatatgactactgatcgctgaatagatttcatgctctcttgattgactgcataaaaaaaagactgcaccttgcctacagggaggaaggactgcgcaaggagaacgcc

SEQ ID NO: 268845 - DNA, 736 bp, Zea mays
ctatgtgaaggacacctcttctatacgaccaaactgttattaagcaagagttaatcaggacagttgatcttgggcctttcaaacatgttgtagatgatggtcttgaactcaggaaagctgcctttgaatgtgtggatactttattggacagttgtcttgatcaagtgaatccatcgtccttcattgtacctttcctcttgtctggtttaggtgaccattacgacgtgaaaatgccttgccatttgattctatcaaagctagcagacaagtgcccttccgccgtccttgctgtcctggactccatagttgaaccaatcgagaaaactataagccacaaacccaagggggatgcagtgaagcaggaggttgatcggaacgaggacatgatccgcagcgctctcagggcaatatcttctctaagccgcataagcggcagcgactacagcatacggttcaagaatctgatgaacaagataacggccacccccgcgctcgccgagaagtacaactcggtgcgcggcgaatgagacctgggttcttgtacatggtagaggaataggttaaacacccagagttgtcgcgcgctcgtcaatcctgttgccgcttccccgcatggttgctgaggcaaaagtctgtactctgatgatgacggtggttgatttttgactgctggacatagttgtcttgtacaaaatctggtggtaaattcagtagaattgccgccgatacatttacc

SEQ ID NO: 268846 - DNA, 812 bp, Zea mays
cggacgcgtgggcggacgcgtgggcctcccgctcgtcctcctcctctcctcctggacagcagagcacagcacaacacaccgagaaagaacaagcagccgccaccggagctcagaaccaccatcagcagcagcagcacacccggtcaaccttccacacacgcgcgcacacacacatggcgtcgcagcagaggcaacagcaggcgggagcggcggcggcggcgtcctccgccgtgggcttcgaggactacctgccggtgatggcggacggctgggcgaggacgggctgatgcgggagctggcgagcgggttccggctgctgatggacccggcgcgcgggctcatcaccttcgacagcctccgccgcaacgcgccgctgctgggcctgggcggcatgtcggacgccgacctccgcgggatgctcgccgagggcgacttcgacggcgacggcgcgctcagcgagacggagttctgcgtcctcatggtgcgcctcagccccgagctcatggacgagcccaggcggtggctcgacgacgccgtcgaccaggcggcccgcttcctcttcaccagctgatgatgacgacgacgatgattgataactaataattaaggctactagatgatcgttgagatgtttcttcttcttcttcttcctcctcctcttgccgctgttcatatagctggatggatcaggacttgtgctgatcggtcgatggattccatccatgtgtactcgtctgctgttctttccttcccaattcccatgttccaatggagtctggattcattaacatgctttctcctttctgaccatc

SEQ ID NO: 268847 - DNA, 171 bp, Zea mays
gagagattaatgtaacgaaatgtccctcgctcactcattctgccttaattggtcccatgaatcgatccagactactatacactacatggtacatactcggaagaagaagaacaagaaaaaaactcccccattttgttgcatgcgtctgatccgatgcagccgtaccccgac

SEQ ID NO: 268848 - DNA, 982 bp, Zea mays
tttttttttttttttattattttttttttttttttttttgcggtcccggggaaagtttatttacatctaatattacaacaacttttccttcacacatgaccatggagtgtatgaaggtgtcaggtcatggccaaggatcaacagccaatatacatggaagctcagaaggcacaacagaaacaagggtaaaatctgatgctgttaacatcatatatgcaaaatcagcggatcaaagaaaaaaaaaaaaagtttagttttgtattagagaaaattcacaaagattgtttctaaacagtgtctgagattagacgaacttcatatagatcaccgccaccttttcctgcatcgatttctgccttaatcccaggaccaaaaaaggaggtgaatttagcctgtctcttctcaaaatcagatagctccaatgctttggcttgaaatacgagtactaaactgtatttcccatcatcagttaccggttgaagtgggccggagcgtgtagaggggtccgacgctgtcacatcgggcgagtggggtcctggtggctagatcttcctctcgaatcttttgtaatataggtgcattacgtctaggaatgcccccacccaaaccatattgaaagattctctgcagtgcttcatccaagtgttgttcatcaccatatctaaaacgtgtaacatcactcctgacctgcttcagaataggggtagcacacttttctcttagagcaaaggcatcagcgtaggttatgcagggtactggtttcagttctgcatactttaaggccatgccgatgattgtgagaggaaacccgtaggttagcagcaaagctgaccattccgaaccaggaagcaggttgaaatacgatccgaatccgtacgacaggagcgagagcccaagccccagcccgatcacaccgaaagagaccttggcgagggagaactcgtcgtccgggacgacagccttgccggccgcggaggcgggc

SEQ ID NO: 268849 - DNA, 694 bp, Zea mays
gttaggttcattatcagcgtttttggggggggagaaaaacagctaaatacgctgggactatatggacagcgttcccaatcaaagttcatttacatctaatattacaacaacttttccttcacacatgtccatggagtgtatgaaggtgtcaggtcatggctaaggatcaacagccaatatacatggaagctcagaaggcacaacagaaacaagggtaaaatctgatgctattaacatcatatatgcaaaatcagcggatcaaagaaaaaaaataaaagtttagttttgtattagagaaaattcacaaagattgtttctaaacagtgtctgagattagacgaacttcatatagatcaccgccaccttttcctgcatcgatttctgctttaatcccaggaccaaaaaaggaggtgaatttagcctgtctcttctcaaaatcagatagctccaatgctttggcttcaaatacgagtactaaactgtatttcccatcgtcagttacttcctctcgaatcttttgtaatataggtgcattacgtctaggaatgcccccacccaaaccatattgaaagattctctgcagtgcttcatccaagtgttgttcatcaccatatctaaaacgtgtaacatcactcctgacctgcttcagaataggggtagcacacttttctcttagagcaaaggcatcagcgta

SEQ ID NO: 268850 - DNA, 291 bp, Zea mays
ggagagtttccctcccagaagatattatttagtccaagtcgttattgagagataggtgcatccccgttgctgcattgcataaagagggagctcaattaggcattgagccctagagcaactccatatttttctttgttttgcgtgaggggaataacaatactatatgcatctgataagttagcggttgcttgtacatatactttcaagctataaattatacagagtcccaagcaggataaaaaaaagaattcaggaggcagtaactgagctagagaaaaaaggggggggccc

SEQ ID NO: 268851 - DNA, 368 bp, Zea mays
ctccagtgtggccgttcgttcccctctgttccgcgccgacggtgctgagcatggtggtgaacgccacggcggaggagagggcgccgctgggcgcggtgaggaagaggccggtgactgtgatgacgggcggcgcgccgccggcgccgcaggtgctgttccggatggaggagctcgggttcctggtgatccactcgtacgggctgacggagacgtacgggccagcgacggtgtgcacgtggcggcccgagtgggacgcgctgccggcggcggagcgcgcggccatcaaggcccggcaggggctccaccacctggggctggaggtggacgtgaaggacccggccacgctggccatcgtgcccgcggacggg

SEQ ID NO: 268852 - DNA, 210 bp, Zea mays
tcgcgatctagaactagttgctaacagagtacgcaacaggctctgattttgttcagcaattgaagatcctgcttgcgcactctcggaattgtgggcttggattaataatgccgggcttggtgttttcgttatgcataagtcttttaaatgtaatgtacttaattgatatggcatatagaaaattttatcaaaaaaaaacccacgcgtctg

SEQ ID NO: 268853 - DNA, 338 bp, Zea mays
actttgtgtagaaactgtgcagcttccactgttactgcatcaaacacagggctagaatcatggtatttcccaggaagcaactggggggctgagaccaccaggtatgcacagtactttgacagtatggttgcgatgtcaagatgtaacttgagtgcccccccaactctaggataaaggcattttaatgtttgcacctcgcagtaacacgttgcaatgtgccaaggcaaaacgatgtgtgtctgattctccttgtccaggtaacagttggtgcctgggtctgagagcatattgtgcctgcaagcccataagaggtcatgcacctcattgtacactaagac

SEQ ID NO: 268854 - DNA, 558 bp, Zea mays
gggtttcctgatccttcctttcccacttccccttttttgcccgcccgctacccaaccgccgccgcggttctcgctgccagcgacggacgggccacaccgcgcaggggctcagccccgccacccaccttaaccccgccgtcgggaggcgtcgtccccggcccggcccggcccggccctcgccctctactgcaactggactggcgcgtagacctgtccccgccacgagatcgttccgccctatgtcggtgaagatgctctttgcatagctcaagctgcaatctgatggaccctgatgacaagaagtttggaaatggaccaagggagctcactggtgctgttgatttgatcagccactacaaactgctgccacaccatgatttcttttgcaagaaacctttgccgctggcaatatcagatacacattatcttcacaatgttgtgggagacactgaaattcgaaaaggagaaggaatggagttagatcaacttgttcagaatgcatatatgagggataaacctgcttatattcagcccttcgatatggaaacactggggcaa

SEQ ID NO: 268855 - DNA, 941 bp, Zea mays
cccacgcgtccgccaggaaatgcccaatggctactcgaaggtgacctgggtggagcacgtcgaggtggacgacaggtcggtgcacggcatctacaagcggcgggtgggctcggggctcgccttcggtgcacgccgatgggtcgggacgctggaccgccagtgcgagcgccttgccagtgtcatggccagcaacatcccgaccagtgacatcggcgtgatcactagcacggaggggaggaagagcatgctgaagctggctgagaggatggtgacgagcttctgcggtggcgtgacggcctcagccgcgcaccagtggacgacgctgtccggcagtggtgctgacgacgtccgtgtcatgaccaggaagagcgtcgacgaccctggcaggccgccgggcatagtcctcaatgctgccacctctttctggcttcctatcacacccaagcgtgtcttcgacttcctccgtgacgaaagctctcgcagcgagtgggacatcctctccaatggcggcgttgttcaagagatggctcacatcgccaacggccgcgaccatggcaactgcgtctcgcttcttcgtgtcaatagcaccaactcgacccacagcagcatgctgatcctccaggagagctgcaccgacgcctcgggctcgtacgtcatctacgcgccggtggacgtggtggccatgaacgtggtcctcaacggcggcgaccccgactacgtggcgctcctgccctctggcttcgccatcctgcccgacggcccgtcaggcagcagcagcatgcaaggcggtggcggtggcggcgtcggctcaggcgggtcgctcctgacggtggcgttccagatcttggtcgactccgtccccaccgccaagctctcgctggggtcggtggcgaccgtgaacagcctcatcgcccgcaccgtggagcgcatcaaggcggcgg

SEQ ID NO: 268856 - DNA, 992 bp, Zea mays
tttctaatatctcgagaatgatcctgttcccgcttcccaccacagaaaagccgggccaagccaacataaaacaagcccgcccgtcattttcgtcacccctgacgctcgacgcctctcctcctctcctcccccacccgtccatcgcccctccctccggtctgcgctcccacagcctcacccctgcgcccccgccgattcgcgtcgccctttgttggaaggaacgatggagcagaccttcatcatgatcaagcccgacggcgtccagcggggcctgatcggggacatcatcagtcgcttcgagaagaaagggttctacctcaaggggatgaagttcatgaacgtggagaggtccttcgcgcagcagcactacgctgacctttccgacaagcctttcttccccgggttggtggagtacatcatttccggccccgtggtggcgatggtgtgggaggggaaggacgtcgtgttgactggccgcaggatcattggggccaccaggccttgggaggcagcccccggtaccattcgtggggactacgccgtggaagtcggcaggaatgtcatccatggaagcgactccgtggagaacgggaagaaggagatcgctctctggttccctgaaggtgtggcacagtggaagagcaaccttcatccctggatctacgaggcttgagcagttgagcttggatgccttgcctgcttccatggaaaccagagttttgtttgagtattatctgttggctctggctgaagagtcataatttagcgctctgtgtgttacaccagagttaagtctgcctgaacttatgtggcatttgtttgagtttctaccttcgtgccctgttttctaatgtaccgtggttgtgaaccggtcaatgtgatctgaaataaaacattgcgtgccaagtttgtgttacaagtttgatgcactgggaatgccaggcaactaatgtggtaataaacattttaaaaaaaataaaagaaaaaagaaa

SEQ ID NO: 268857 - DNA, 580 bp, Zea mays
ccacgcgtacgcagacgcgtgggcggacgcttggggggaatagatacaattggtgtagccacattaagttctgcaacgtctgcagcagcctccagattgccattcggtggtggaccatccgggtgtggctcactagatgaccaagatgccaggggggggggaaatctgtatcgcctgctcctacttttatctaaggtttctcagaaggaaaatccatctccaattcctgaatataacagtgccatagagaaggaacgtggtaccaccgatgaacttgcccttgcgctgtatggaatgacctctctgccagaatttcgtcctgttctttctgtcattcctgagcttccaccgggagtcccaacagcagttgcttcttctgccagcggatttaaccaatcgtattttatctcgggctctcgcgagaaccattagaagactcatgtaaagccatacgtgcagaaattttcggtccctgcttaatttttattttactattctttttggttcactgctagaagatggggatttttttagcatctcatctaaaacccaagatgaatccctttttttgtaaccaacc

SEQ ID NO: 268858 - DNA, 418 bp, Zea mays
gagaattcctcacgtcacctgcaactccaactgttgctcggcttcaccacgttcaactcccaggaaaacccccagccatcacctgccccagcgttcgctctccatgtttcctagccccggcggccaccctgtacttgctcgtttccaagctgtgctccagcgagcttctctgtagttcttccccaaccgctcgctctcagcctgtccggtcctgcgtacttcaacaccgttctccagccgtccgagctccacctcgtcgtcgtcctgctgtttcagcgtcgtatccctcgacctcatcgcagcagcaccggtgctctcgtcgtcgctgagctcttggcgcgtcgtgacgtcatcgtcgctttctcgccagtcatgctcgacccacagctccttcgcgtcatcgtcttcgacaacccac

SEQ ID NO: 268859 - DNA, 268 bp, Zea mays
tggaccctgcttttcctctgctcttctctcagttgccgtacgccagagctcccccttccgtggccaaccatatcgggcgaggttttatgccctctattccatgttttctagccccggcagccaccctgtacttgctcgtttccaagctgtgttccagcgagcttctctgtagttcttcgctctcagcctgtccggtcctgcgtacttcagcaccgttctccagccgtccaagctccacctcgtcgtcgtcctgctgtttcagcgtcgt

SEQ ID NO: 268860 - DNA, 290 bp, Zea mays
ccgacgcgtggcgtgacgcgtgggctccaactgttgctcggcttcaccacgttcaactcccaggaaaacccccagccgtcacctgccccagcgttcgctactccatgcttcttagccccggcggccaccctgtccttgctcgtttccaagctgtgctccagcgaccttctctgtagttcttccccaaccgctcgctctcagcctgtgagtgtcctgctccctcacgccaaagcagctcggccctctgcacccgccgtcgattctgcttatgtcctatcgtcttcaacctc

SEQ ID NO: 268861 - DNA, 1171 bp, Zea mays
aactcactcaatccatggggggggcattgagtctttccccgccttttccgccgatgccagaagcaataagaatgatctgttaccttctttggagttggttacaaaaatgatagaggatgttgagcttcttgaagaaaaggctaaagtagccaaacgtgaatcatctgttgctgggacaggcattctaaccaaagttgaggagctcagagaaatgttaactcatgcgaaggaagcaaatgatatgcatgctggcgaggtttttggcgagaaagctattttaaccacagaggcacgtgagcttcaatctcgacttcagaggctttcagatgagaggaataaatatctggtgataattgaagagatacgacaaactcttgatcaaagattggttgctgcacagcaagaaattgcagcagccgagaaagaaaagcttgaaaaggaggttgctgctcagacactactcaatgaacaggaaaatatgatgaattctattgttgaagaatcgagaaaactgcagaaagaagctgaggagaacctgaagttgaaggaattcctggttgagcggagccaaattgttgatatgctgcaaggcgagatgactgggatctgtgaggatgtttcgttgctcaagcgagtggtggatgagcgcctatcattgagcaagttgcagccctcagctatgtcaagcctctcttcttcactgcattcttctcatcacaagagctggacttcctctgataggaccaccgaagccaatgggtctctagataagcacacccttgctgaacctgcaagcccagcgcgcaaagatctggatggcgacgagtgcaccgtggaagtgtcagatggcaacgacagtggtgaaggcattttgaagcgcgtggattccaaggaggatggcgatggatgggagctttgctgaagatgttcaggaatagcggcgttgccagaggatgctgaagcataaactaacaataattgtgtataaacgcatactagcacggtgctaatctaatcgttttcacatgaatcgggaagtctcgctggctcaccacagttgtacgtgagatgagtccaactggcaactgcagcttgatgtggtatatataaaagtgaaggtttcagctcccaaaaagaaaaaaaagatcaaaaaaaaaaaaaaaaggaaagg

SEQ ID NO: 268862 - DNA, 433 bp, Zea mays
cattcttctcatcacaagagctggacttcctctgataggaccactgaagccaatgggtctctagataagcacacccttgctgaacctgcaagcccagcgcgcaaagatctgaatggcgacgagtgcactgtgcaggtgtcagatggcaacgacactggtaaaggcgttttgaagcgtgtggattccaaggacggcgatggatgggagctttgctgaaggtgttcaggaatagcgcggttgcgagtggatgctgaagcatagaaattactataaactagtaataatggtgaataaacgtttactagtgcgttgctaatctagtcgtaatgtgggaactgtgtcgtggaactgactcactagctcaccgcagtagtccgtgggatgggtccaactgcagcttgacgtggtatatataaatgtgcagaattcagct

SEQ ID NO: 268863 - DNA, 303 bp, Zea mays
gtctgaaccattttacttctacggcttcaactcactcaaaccattctgttagtattgagtctcttgaggattctgttgctgatgccagaagcaataaggaacgtgctgcccatgccgtcgtcctgatgctgttgctcggatttgaccgcagacgcctccaagtccaaggtgacactgtacagtacggctgtagtgtcgagggtgctgttctcggctcctttgataatgatctgttaccttctatagaattggttacaaaaatgatagaggatgttgagcttctagaagaaaaggctaaagtgg

SEQ ID NO: 268864 - DNA, 440 bp, Zea mays
gaatggtcagctttcatgaagatcctgaacaatataaaagtgttgagatggtggagcatattgacacctctatccatagattgacggcattgtccaagaagttggcttcaattgatcagaacatgtcatgtgatactgcatatttgatgacgggaagggatcgtggaagattcgactacgacgacttcgactctgttccacacaagtatttttgagttgatctgagccttatgtgattctgaagtacgatcgtcaacgtagcagccattccctaaagttataattagtttgatcggccaatggcttttgaaaattgaaatgctgtaaattctggtttaaagaatgggtctgtgaaggcagagacttagtctggaattgctcgtggctttaatctgcatctgcttgctgttctagcatataaaaaaaaaaaaaaaataaat

SEQ ID NO: 268865 - DNA, 358 bp, Zea mays
gatccttgaactcgtcaaggatctgaagaagcttctcaaggagaacagccttccagaggatatatatccaactcttcctccagatgatgcagccaaacccttgagccagataagcatcaatgaaattgtggcgggcttgagcgatttatcaatacagcaagcccatgagtgactattatttctcaaatagctgtggcacaccttggtcgtccaggcgatattttgttttgtgcaaatcacttgggtggtttaaacagcaggtttaggctaactgttgtgctgtctgttttttctgtatactcgccgttttgatttctgcttaacttgaaatcagctaaaaatgaagatgctttggtag

SEQ ID NO: 268866 - DNA, 726 bp, Zea mays
cctagacttcttccgttgcatcttctcttctgttctccacgacgcagttcggctgccagacaaaaaccctaaccacgccgccgccgccgccgccgctcttcctcgagatgggaggcaagtgcccgcaccgcaaggtaaagaagcgccgcctatcccacaagacggctcgccgcggcaagttcctcctgaaggccgacgatgccgtctatgacgagctcgtcaagctggccgaccagggcaaggacgctgaaaccaaggagctccccgtcgatgaggacctcccaggcctgggacagttctactgcctccactgcgatcgctactttgcaagtgaaagcgtgaaggatgatcactatcgttcaaagcgccacaagaaaagggttaaggtaatgtctggaccggccccgcacacgcagcttgatgcagaactcgctgcagggatgggaaagcctgacaacggcctgaagctcatgtccatgtgaaggaacctcttgctggtactggtacttgttccgtgtctttgttgctgccgtacacttgaagctgctttgcgcagtaagtaatagcaagagttatagcagacgggtttttattagtgtacgcaagactttcgaagtcggtgtgagttgttttagagaggtggcagaggggggggggggtcaatgcatgtatcatgaaaccattttccggcccgtaccagtgatgatgatgatgtctgggatcccc

SEQ ID NO: 268867 - DNA, 1216 bp, Zea mays
cctgtgctcgccacacgcggcgcaaccgcccacccacccagccaggagaaggaggtctccgtctcctgctttgcgcttcgcttcgaatcgcgaggtgtcgagtagccagtggtgtccctatggattcagcttttagaagagctctcaatgagcctatgtgcttggaagaaaccgtcgtccaacaaggaattgaaaggtgcccattcctgaggaacatcaatgagcctacaagtttttccttctcgtccgtcaacttccctattcccgcaagaggagccaagggaccgattttcgaagatgggcctaattttgacatggcatttcgagttttccatggtagagatggggttgttccactttcagaagggtcattggcccagattgagaagccactgccaaagcccaatcctgagttcaacccattggcagccatagcagcaaccatcagtctatctgcatttggagggtttttcagctttggtgacttctcaaataagcgcaataagaaaaactccaacaagaagaaccccaacaacctcccccagaataaaggccagcctaacaataacaaccatgaagcactgagcaacgagtggctggagatgggccaatgtccacttgcgaaatcttatagggcattaagtggaattgtgccacttgtcgcaaagatgatgacacccccagctggtatgaaacttaagtgcccacctgccgtggttgctgcccgcgcactactaatcccgcacagcctttgctaaggggcttcgccctcagcccctgccaacaaaaatactggtgattgcattgcttggtatggcagcaaatgttcctctgggcatctggagggagcacacacagaagttttcattgcagtggtttgccgcagtacatgctgcagtgccgttcatagggatgctcaggaaatctgtgctgatgcctaagacagccatggcccttactatagccgcctcgatattgggtcagacaatcgggtcaagagctgaacgtatcagactgaagagggccgcggcagcaaaattagcaagagagagccatggtgacgctgctgactacatcaaagcaccaatgagtctgaaaacagggaaccacactgttcagttttgggatccgctttccctcagagctgaaagcacagtggctgcacgtaccacagcagttcttgtccctgccatttctgctttcaactgatgacagg

SEQ ID NO: 268868 - DNA, 399 bp, Zea mays
accacgagtccggtccgttctagaatctagacacggcaatgaagcccaggcctctcggttgcggttgcggttgcgtcccggcggcggtagggtgcgtcggctgggcatggaggccgactccgaggccgcgcgggggagggagggcagcaggggtgtcgcccaagtgctcgcactcggcggcggcggcgggagcggtacagtcggaggaccgccgccgcgaggtgctgtaccgcccggtggagctgcccgggacggggtacgggtcggagctggaggcgcggatcgagaaggtcatctacgcctgccgcttcatgaccttcttcggaatttgtggcttgctcctcggctctgtctcatgcttccttaagggatgcattttcttgatggatgccttagttc

SEQ ID NO: 268869 - DNA, 441 bp, Zea mays
cccacgcgtccggggctggcttctccttcccctcttaccaagtcctcctcgggttagggttccttagggttttgtggaggggcgatggcgccggctgatgtggagtaccgttgcttcgtcggcgggcttgcctgggccaccagcaacgagtcgctggagaatgccttcgcctcctacggcgagatcctcgactccaaggtttgcttcgtcctcgctaggtttcattccgcggtctgtttgtgccgttggggctagatccgggtcgtggttcaacagatctgcttcgttttggtacagatctgcgttcgctcgaatcgagcatgacgttttcatgtgattatgcaggtcatcaccgaccgggagacggggaggtctcgcggcttcggctttggtaccttctcctccgagaacttcatgctcgacgctatttagaacattaac

SEQ ID NO: 268870 - DNA, 616 bp, Zea mays
cggacgcgtgggcccggtgttggtttcagcttgtattcccactctgtcgcacagcgtcgcccgtcgccgctgagatcctaggaagaaatggagctctctcgcaagctcttcacggccgtcctcctcgtcatgctgctgctgctgtccgcagaggtcgggccggtggcggtggcggaggcgcggacgtgccagtcgcagagccacaggttccggggcccctgcctccgccggtccaactgcgccaacgtctgcaggaccgaggggttccccggcggcaggtgccgcggcttccgccgccgctgcttctgcaccacgcactgccactgattcgctcgcccagcggccggctggcgtcgccgtcgatcgcggtcgcgaccagtccatggctccatgcatgaataacaagggtgtgcggtttgtgatgccaaattgtatcctcgtcgtgtgttgaagcgttcgatcgtcggtctagtagtgtgcctgtgagcagcggcgtgctgttgtacgtacgtctgcctctgttccatgtttcgggattttccatagcaaatgcatgcgtcgagatctaatatcagcgtctatgctaaaatcagagaattggccgtaggtctttcag

SEQ ID NO: 268871 - DNA, 626 bp, Zea mays
  unsure (1)..(626): unsure at all n locations
gattcagcttgtattcccactctgtcgcacagcgtcgcccgtcgccgctgagatcctaggaagagatggagctctctcgcaagctcttcacggccgtcctcctcgtcatgctgctgctgctgtccgcacgtacgttggtgcggccggctggccgtcttacatgtcttctgtgctgtggactcggtactgatgatgagatgtctgagatgctgctgcgtgctgcagaggtcgggccggtggcggtggcggaggcgcggacgtgccagtcgcagagccacaggttccggggcccctgcctccgccggtccaactgcgccaacgtctgcaggaccgaggggttccccggcggcaggtgccgcggcttccgccgccgctgcttctgcaccacgcactgccactgattcgctcgctcgcccagcggccggctggcgtcgccgtcgatcgcgtcgcgaccagtccatggctccatgcatgaataacaagggtgtgcgcggtttgtgttgtgatgccaaattgtatcctcgtcgtgtgttgagcagcggcgtgctgttgtacgtacgtatgcctctgttacatgtttcgggattntccatagcaaatgcatgcgtcgatcgagatctactncg

SEQ ID NO: 268872 - DNA, 1080 bp, Zea mays
cggacctggtccggacgcgtgggcggaagaggtgacatcagcccaggctgcaatgcggttggcatgatcgatcgtaaaatcctaggcatccagcatctctacggccgacctgtttatgcacgatccaagcaatgcagcatcgactcgccacaaaatgggccccttcctcctgatgctccatcttggtgcgaggccccttttgaccctgaagggcttcttagttccgtgatggccatcgtcacatgcttgattgggctccaatacggacacgtcatagtgcattttcagaaacacagggagaggatgatgaactggctaatcccttccttcagcatgctggtcctagccttcgccatggacttctttggactacacatgaacaagccactgtacaccctgagctacaccttaggcaccgccggcgccgcggggctcctcttctccggaatctacacgctggtcgacatctacgggtatcggcggccgaccgtcgccatggaatggatggggatgcacgcgctgatgatatacgtcctgatcgcttgcaacgtcctgcccatattcatccacggcttctactggaaggagcccaagaacaacctgctgaagttcatcgggattggagcgtgaggcgatggactgacgacggtacacgagtacggatattgtttaggagtctatttggacagagatagagaagcgcgtgcgttcagcaggccaagttttgctacacggccagtgctgcagctgcagcgcatcattgttgctgcacagagcgcctttctctgtgagctcttgtatatatgataaaaaagagtgttgcatataatgacgacacgatttgaaagaaaaaatatatacataatacagtagtatagagatcttacgtgaatgacggtggaaattgtcaccgaactagcaaaattgttccgcgcggggccgcatggggacgaggcgcgcaacaccgttgcacaacctgaatttaatctgaccagatgacattttaacaggtttagtattacaaaacagttactagctatttaaatcctttgctctttataatatatatctatatctgtc

SEQ ID NO: 268873 - DNA, 532 bp, Zea mays
ccacccttccgatcgaccaggctaaccccttcgctaaccatgttgttcctagcctacgccatggactcccttggactgcccatgaacaggccattatgcatttaagctacaccttagccaccgctggcgctccagggctcctcttctgcggaatctacacgctggccgacatctacgggtatcggcggccgaccggcgccatggaatggatggggatgcacgcgctgatgatatacgtcctgatcgcttgcgacatcttgcccatattcatccaccgcttctattggaaggagccccaaaacaaccttctgtagttcatcggaattggaccatgaggtgatgaactgatgacggacggtacatcgtatgcggatattaggagtctactccgacagagatagagaaacacgtgcattcaggccaagttttgctatacggccaatgcatcattgctgcgcacagagtgcgtctcttgtatatgataaaaagcctgctgtatataatgacgataccgtttggaaggaaaaatata

SEQ ID NO: 268874 - DNA, 374 bp, Zea mays
ggtacacgagtacggatattgtttaggagtctatttggacagagatagagaagcgcgtgcgttcagcaggccaagttttgctacacggccagtgctgcagctgcagcgcatcattgttgctgcacagagcgcctttctctgtgagctcttgtatatatgataaaaaagagtgttgcatataatgacgacccgatttgaaagaaaaaatatatacataatacagtagtatagagatcttacgtgaatgacggtggaaattgtccccgaactagcaaaattagatgacattttaacaggtttagtattacagaacagttactagctatttaaatcctttgctctttataataaaaaaaaaaaaaaaaaaaaataaa

SEQ ID NO: 268875 - DNA, 599 bp, Zea mays
gagagctttccgattgcgatcccatcaacggccgccggccgccgctggttttctttcttctcgcccaagccgcgccgccggcgcggtccttgtaaaggcctcgccgcacgggagcggcctgcgctccctctctctggattaggcaaagcatcctcctgtttggatcggcatggagaagacgacgacgacggcgcagccggtctgcgcgcaggagtcgctggcgctgctcaactgcgtcgcctcggccccctacgaccgggataggtgcctcgccctcgtcgacgccctccgtgaatgcatcgtgcgcaagagggtgaagaagttttcgctggcagaaccaagctccaccacaaccaccgaagctctgaagagcgatacgaagccctgagcattctgcaaagaaaactctcttatgtttcggaaactgtatcatctgattgggcgcggttgatgataagtctatgcctgttaatgtagcgttagatttgtacttttgaacccatgccagatgtacttgtgccagaaatcaccaatctgttgaactgaaaacgttacccgatgtccacacaaatgatacagtccatgatgccatttcgata

SEQ ID NO: 268876 - DNA, 898 bp, Zea mays
tcgctgcgacatgcgtcgggcagattctgaccaaccaaatccagaggaggctgaaggtttcgtcgacgcagctgctgtaccagtcgtcgccgtaccagtccgcggtgctgctcgtcaccgggcctttcgtggacaagctcctcaccaagcgtgacgtcttcgcgttcagctacaccacccaagtcgtggtgttcatcctgctgtcgtgctcgatcgcggtgtgcgtaaacttcagcacgttcctggtgatcggcacgacgtcgcccgtgacgtaccaggtgctgggccacctcaagacgtgtttggtgctctccttcggctacatcatcctcaaagaccccttcagcgcgcgcaacgtggtgggcatcctcatcgccatcttcggcatgggcctctactcctactactccgtcgtcgagagcaggaagaagaccgaggacgctagctcgctgccggtcgccgcgcagatgagcgagaaggactcggcgccactcctcggcgccaagagctcgccgcggacagagaacaaggccgaggaaaccttcgactacatgccgaggacggccaagagcgcgttcaccggccggtgagcgcgtagcttgtaaggagtacgtatctttctagagttgtgggtagacgacgagcaacaaggcgggaatgtgttagtgaaagatgtaacggcagcaagtgacattccaattatcatttttgcgatttctcctctagggcggtccgcgtggtcatggtttaccagagcataaacatcagaatgtgtggtcttgcccgagcttgaaatagtagattggattggtggtaatacaactatacaagacgtgcgaaatgtgtaaggtttgtgcccgttaaggtcttgttcgtttgtgccggattggtgggtcgg

SEQ ID NO: 268877 - DNA, 659 bp, Zea mays
cgcagctgctgtaccagtcgtcgccgtaccagtccgcggtgctgctcgtcaccgggcctttcgtggacaagctcctcaccaagcgtgacgtcttcgcgttcagctacaccacccaagtcgtggtgttcatcctgctgtcgtgctcgatcgcggtgtgcgtaaacttcagcacgttcctggtgatcggcacgacgtcgcccgtgacgtaccaggtgctgggccacctcaagacgtgtttggtgctctccttcggctacatcatcctcaaagaccccttcagcgcgcgcaacgtggtgggcatagagatggcaatgggtacccgcgacccgatacccggtgggtatttactccattagggtatgtatgtgggctaaatattctacccgtgggtctgttattgggcaaaaatcttcacccaacgggtaaacgggtattagaacgttccgccgtcacccatacccgttaacccgtgggtataaaatacccaatataaacttagtccaagcatgaactttgactttagtcatccatcttttttactctttaacaaccttttaggccataatgtcatagaaggcttaacgacaatttaatgaacatgtaatgggacatgtaatgtgctatgtagaactatcctagtgttcctactttatccaatt

SEQ ID NO: 268878 - DNA, 1116 bp, Zea mays
ctggtttatttttgtgtatggtgaggaagagaattctaggaaaaatcgatgaagaaaacatgtttcagttcggtgcgctctaggtgtttgacgaaatgggagcaccagggaacaatcgtcgttcttgcataaaccaagtcgatttgactgtggtacgctacatgatcacgtgatacggaattcaagaactgagttgatctcaagatgatgaaatgatgagctactccgacaaatgatgtctgtgaatcaacctaatgagaggtggaccgatcaagtgccaagatgaatatggtcgtcaaatgatcgtcatctaaccaacactaacctagtgttatcccagaagccccgggaaaccaaaaggaaggtgaagagcagcaaacaggcggcggcggtcaaaaagtgacgtacagtacgtgtggagtgtaatggagcttccatgcatgagtgaatccatgccatgttatgaatctagtccttcctttcttgtatcttccatgtgacgcggcgtgtgcgtcccctcatgtgtgatgatgccagatgaatactacaactaagacgttgttgtattcatcaggcatccaagaagctcaaagcaagcagatctaagctccaggcagcgtcgcgacagagtgagctagtgagtagcacgacaacaacaatggcttccctgaaggccgcgaagcccagcggagttgcggcgcagggcaaggagccggcgcccaagctcagcgagacggcgacgaagccgtcagccgcgaagagcggcggcgttaagaaggctgagcagaagccccgggaaaccaaaaggaaggtgaagagcagcaaacaggcggcggcggccaaaaagtgacgtacagtacgtgtggagtgtaatggagcttccatgcatgagtgaatccatgccatgttatgaatctagtccttcctttcttgtatcttccatgtgacgcggcgtgtgcgtcccctcatgtgtgatgatgccagatgaatactacaaataagacgttgttgtgaaaaaaaaaaaattataatatattatataatttattatttttattttttatttttttaatttttataattttttttttgtatttattgatatttatttttttt

SEQ ID NO: 268879 - DNA, 406 bp, Zea mays
tcgaagacgcgtgggctcaagatgatgaaatgatgagctactccgacaaatgatgtctgtgaatcaacctaatgagaggtggaccgatcaagtgccaagatgaatatggtcgtcaaatgatcgtcatctaaccaacactaacctagtgttatcccagacaagccccggtgcatttgccacctcattctgttttaaaaagttttatcaccttgaatgatgcattaggtgataggagttgtgatcaaacagttgatgcatttccttccttgattagacaaccctaatacccgatttatgaaaatttagtgatgcttagcccttcttattaatttaggatttgtttttttaaaagatgatatgttacacgggataagggagtttgtgaaataaaatgacttgtgatgat

SEQ ID NO: 268880 - DNA, 1337 bp, Zea mays
cagcaatgacggcgactacgagcacacgtccgcagccgcagccgcagccgcagccggcggcggtggcggaggcgaggggcggcggccgccgcctctgggtcaaggagcgcgaccacgagtggtgggaccggatgagcagccccgcgtgccccgaggacgagttccgccgcgccttccgcatgtcccgggccaccttcgaggccgtgtgcgaggagctgggcgccgccgtcgccaaggaggacaccatgctgcgcgccgccatccccgtccgccagcgcgtggccgtctgcatctggcgcctcgccaccggggagccgctccgcctcgtgtccaagcgcttcggcctcggcatctccacctgccacaagctcgtcctcgaggtctgcgccgccatcaaggccgtgctcatgcccaaggccgtgcagtggcccgaggcgcccgacgccgccgcggccgagtccgccaggttcgaggccgcgtcggggatcccgggcgtcgtgggcgccatgtacaccacgcacatccccatcatcgcgcccaaggccaacgtcgccgcctactacaaccgccgccacacggagcgcaaccagaagacgtcctactccatcacggtgcagggcgtcgtgggccccggcggtcgccttcaccgacgtctgcatcggctggcccggctccatgcccgacgaccaggtcctggagaactccatgctccaccagcgcgccgcggcggggatgatgcacgactcgtggctggtggctggcgccagctacccgctcatggactgggtgctggtgccggacacgcaccccaacctgacgtggacgcagcacgcgttcaacgagaaggtggccgagctccggcgcgtcgcggtggaggcgttcgcgcgcctcaaggcgcgctgggcgtgcctgcagaagcgcaccgaggtcaagctgcaggacctccccgtcgtgctgggcgcctgctgcgtgctccacaacatctgcgagattcggggcgaggaggtggacccagccatccgctgcgacctggtggacgacgagaccacgccggagaaccccgtgcgctccgagacggccagtcgcgccagggacaacatcgcgcacaacctgctccaccgtggcttgggcggcaacacattcttctgatctcatccgtcaccttctctctttttttatgctttgctagtacactagtacagaattgggctggaacaagaaagaaataggctttcttttcttttaattacactagaagatgattttggtaggattcttatagaatctatctatctatctatcaccgagcgtttttcacctttccacgctcgattttc

SEQ ID NO: 268881 - DNA, 407 bp, Zea mays
ggccaacgtcgccgcctactacaaccgccgccacacggagcgcaaccagaagccgtcctactccatcacggtgcagggcgtcgtggacgcgggcggtgccttcacggacgtctgcatcggctggccgggctccatgtccgacgccgacgtgctcgaccgctccgcgctctacctgcagcgaggcgccgcgggcctgctgcaggggcagcgcctggtgggcggcgccgggtacccgctcatggactggctgctggtgccctacacgcaccacaacatgacgtgggcgcacacgtgttcaacgagcgggtggacggcgtgcgcgcgtggccagggacgcttccagccctcaagtccgctgggctgctccagaacgcaccgagtgaactgaggactcccgtcgtgtcgcg

SEQ ID NO: 268882 - DNA, 1321 bp, Zea mays
cgcgcgcgggagcagcagctggttcgtcgtgcccgcgccctccggctctctgcactccgtgatcaccaccacacctctatcctgctagctaggtagctgaattcggagccaggctcgagcgagggggtgcggaggcgagatggaccacgcggcggacgcgcaccggacggacctgatgaccatcacgcggcacgtgctgaacgagcagagccggaaccccgagtcccgcggcgacttcaccatccttctctcccacatcgtcctcggctgcaagttcgtcgcctccgccgtcaacaaggccgggctcgcccagctgatcgggctcgccggcgagaccaacgtgcagggagaggagcagaagaagctggacgtcctgtccaacgaggtgttcgtcaaggccctcgtcagcagcggtcgcacctgcgtccttgtgtccgaggaggacgaggaagcaacgttcgtggaccctaagctgcgtggaaggtactgcgtctgctttgatcccctcgacggctcctccaacatcgactgtggcgtctccatcggaacgatctttgggatttacatcatcaaggacaaggacaacgtcactctggaggacgtgctgcaacctggcaagaacatgctcgccgccggatactgcatgtacggcagttcctgcacgctcgttctgagcactggaactggtgtcaatggcttcacgctcgacccttcacttggggagttcatactaacccatccagacatcaagatacctaagaaggggaagatctattcagtcaacgaagggaacgccaagaactgggacgcgcctgttgccaagttcgtggagaagtgcaagtaccccaaagatggctcgccaccaagatctttgagatacattggaagtatggttgctgacgtgcaccgtaccttgctatacggcggtgtgtttttgtaccctgctgacgagaagaacccaaacggaaagctccgtatcctgtacgaagttttccccatgtcgttcctaatggagcaggcaggaggccagtccttcacaggcaaagaacgggctcttgatctgatcccaaccaagatccacgacaggtccccgatattcctcggaagctacgacgacgtggaggagatcaaagcgttgtacgccgagcaggcgaagtcgagctcggcttcatcctaagtgagggtgtaaatcgacttttcctggcttaatttgttgcttacctgattcagacattcgtttccgtttcccttggtgtctcgtaagtgtgacatttcagtgcaattatgtatagcaactaagggatccgtaaaagttacatgc

SEQ ID NO: 268883 - DNA, 483 bp, Zea mays
ctcctcggttcctcacagtcacagagcctcacgtcacgtgtacctcccccaacccaacccagcccaaccctgcccaaaacctagcgggcgaggggccggggaaccgaccgccggacgcggagatggaccacgcggcggaggcgcagcggacggacctgatgacgatcacgcggcacgtgctcaacgagcagagccgccacccggagtcccgcggcgacttcaccatcctcctctcccacatcgtcctcggctgcaagttcgtcgcctccgccgtcaacaaggccgggctcgcccagctgatcgggctcgccggcgagaccaacgtgcagggagaggagcagaagaagctggacgtcctgtccaacgaggtgttcgtcaaggccctcgtcagcagcggtcgcaccgtacgaatatccctccttgtccactgcgattatatattgtccgtttgagttccgagagtgttctgctttctgactcggg

SEQ ID NO: 268884 - DNA, 293 bp, Zea mays
tggtaatagtatttcctttccttttgttcataagtcttctaagaatgtcagtcatagctggtaatggtaatcatggttgtaacctgatttgtagtgagagaccagtaaccatataatgagctatgttcttatgagataaaagctggagacttttttttgacatggttcttccttttagaatgataagaaaataatcttgatgtctatatgcacttattgagaccatgtaaagagaatataatgcaacatttgatatgtttgagatatcccgctacctgtgtgctaagctagaa

SEQ ID NO: 268885 - DNA, 527 bp, Zea mays
acaagatggaagcaccctggtagcaggaacagcactaattggcctaagctcagggttcatctttgctgcagcagtgtcagtgacctccgagctctttggaccaaatagcgttggggtgaatcacaacatccttatcaccaatatcccgcttggctcactcctctatgggcagattgctgccatggtatacgatgcaaatggccaaaagatgacagtagtggataaccgcactggcattgttgacaccatgactgtgtgcatgggggtgaagtgctactcaaccactttcttcgtgtgggcttgcatcacatttctggggttagcatcaagcatagttctattcatacgaacaaagtcagcttatgacactgctgctagtcggtcaagttgtaagcaccttcaccaagtttccagttagtagttaacagagaaatttactgttgaaatcacggttagcttgtacaaaattttggttagttctagctgaaatgggtcacatacaatacgtgaaatgaagagcttgtaca

SEQ ID NO: 268886 - DNA, 733 bp, Zea mays
ttccactgcctccccaccacttcgtcctcgccggctcgcaactccttgatggcggccacggcgagtctcactaccactgctccctcccctccagctctcctcaaagcatcagctcctttgcttatctcctttcgccccgtctcccgccactgcaagaacctgtgcatcaagaccaaggccacagaaaatgatcagtctgctaaaaagcatcagaaggtgaagagcattctttgccaggactgcgaaggaaatggggcaatcgtatgcaccaaatgtgaaggaaatggggtaaattctgttgactattttgaaggccgatttaaagctggatctttatgctggttgtgcagaggcaagcgtgaaatcctatgtgggaactgtaatggtgctggcttcttgggtggatttctaagcactttcgatgaaactgcgcaatagtcatcggtttagcactttcgatgaaactgcgcaatagtcatcggtttaatttatgtttaagttacattgagggacccataatatatgtatcgtgttccatggacacataatcatattatataaaataatatttttaatgaatactccttccgtccacttgatttggacgttctgggtttttaaaaaaaaaaaaaaaagaaataaaacaagaaagtaaaatcaaaagaaaaagaaaaaaataagagtcaaagagagatatcaagagccaaaaaaaaaaagggggggccgccctaaa

SEQ ID NO: 268887 - DNA, 666 bp, Zea mays
  unsure (1)..(666): unsure at all n locations
cccacgcgtccgctgactcgtgggctgcattctaccatcctcacagctgctgctggcctgagtctcaccctattcaccttctggggcgtcaagaggggctaccacttcaccttcacgttccccttcctgttcgcctgcctcgtcgtgctgctggtgctacatcatcatccacgtctgcttccccctgggaagggtagccatgaccatctacggcgttctggccaccgtggtgttctcgggcttcatcgtctatgacaccaacaagctgctgaagcgccacgcctacaaccagtacgtggtggcagccatctccctctacctggacgtcatcaacctcttcatggcccagatggccatctccttccagtgatggattgcgggtctcacctgtacggctgtaccccatgcatgacggcgcctcgcccgtctggtacatggtggatcacacatccacatagcttcgcaagtcgagctgtctttcattatccttatcctaatactggtagtaccaatagcattacagtcctacagatctgtaattggctggccacccttcagctgagacagtatatatatcgtatatggcacctcaccataaatgacgttggagaccatgagatnggtggttcgtgcttcggcaccgtatagttgtgaccgtgacatgct

SEQ ID NO: 268888 - DNA, 527 bp, Zea mays
tatatcaaggaaaaagaagttgctgaagaagcaggctgaaggaaagaaaaggatgaaggcaataggaagggttgatgtccctcaagaagcattcatggccgtgttgagactggaaaaggaggtgctatgaaagtgctcatgaacctttgtgtctccgtaaattaaagacctcttcctgtgcgccactcacaagtatagtcagacgagagctttgagacaacaggcattcactatggttcaacctgtccgctctggaccataggaaccagtcaagcacagatcactcccagaacaaaagcaggtaaatctggcattcgttcgctattttttgcttttttatgtgtcaggctatgatggtaaaacaatcatgtcgcacagagttttgccaggcacatataggaaattcatatgtcaaagtgcatcatgtagtccaattccttgtaacgcatgctacagagacttgtttctacagttgaatataccttgtaaggctgggaccaacagatcgtgcatatgcagaacagagg

SEQ ID NO: 268889 - DNA, 1101 bp, Zea mays
cgtcacgcgtccgtccactactacgccagccactctgccttccctcccccaccaccacaagaaccgcttcaccattgccgcgtccagctgagcctcctcttagccgcgtccagccaggagaaggcgggcgcgcacacctgctgcttggtgaccacgttcgatggagctgcacaagtactggggcgtggggggccggcggtgcggcagctgcgagggggccccggcggcggtgcactgccgcacgtgcgttggtggatccttcctctgcacgacgtgcgacgcccggcccgcgcacgcgcgcctgggccacgagcgcgtgtggatgtgcgaggtctgcgagctggcccccgccgccgtcacgtgcaaggccgacgccgccgtgctctgcgccgcctgcgactccgacatccacgacgccaacccgctggcccggcgccacgcgcgggtccccgtcgcccccatcggctccgaggccgccgccgcggccgtggaggccatgctgttcggtaccggcgaggcggccgtttccgaggccgacgagcagcacgcggcggccgagcagcagcagcacgcgcacgcgctgaacctcaacgtggaggccaaggacatgaagctggactacctcttctctgaactggatccctacctcagcgtcgagatcccgcgcttccagcacgctgacagcgtcgtccccaacggcgccggcgctgccgtcgagctggacttcacgtgcggcatcggcgttaagcactcctcctacagctcctacacggccacctccctcgctcatagcggctcctcgtcggaggttggcgtggtgccagaggccttcggcggcagcggcggcgggagctttgagctcgacttcacaaggcccaagcctcaggcctacatgccatacaccgggactccccagagccacagcgtgccatccgtggacgtggaggtggtgccggagcggggagacttggctgcggtgaggccggtgccgctgatgggggagagcagggaggcgcgcctgatgcggtaccgtgagaaaaggaagaacaggcgcttcgagaagaccatccggtacgcgtcccggaaggcctacgccgagac

SEQ ID NO: 268890 - DNA, 426 bp, Zea mays
gggagagggatatgcatagggatgacagagatcgctatggcgattatcacaggcacagggatcgcgattcggagcgtaatgaagactgggacaggggtggagcatctgggatacgcggcaggtcaagggaggctgaccactctaagcgcaggcggatgacacctcagtagtcgtagctgggtgagctactaatgtagaggcaaacgatgatccagagccgagtcttgcttgcacactggcatggttaacagctagcatcttcttgctgcctctggctgtggtggttctaatatcttgtgtctccggcaatgtgttgtagcaagaacgagagatgaatgtctggttgggacctgttgagctgtgcgaagatggacttccctggatgatagttgctgcctcttattgtacgccaagttaaatgtctga

SEQ ID NO: 268891 - DNA, 579 bp, Zea mays
cggacgcgtgggcggacacagcaaccaacaagtcgtccaacgtccaggcttttctgttttgtttctctctcacgcaagtcgcaaagcaaagcgtcccccaccatggcttccacgacgacgacggcatccaacaacctggcgggcgtgtggctcggcgagctctcgtcggcgctgcatgggacgtggcaggcggtggccgtggccgccacccacgggctcggcgaggacgacgacccgcggctgccgtgccagcagcagcagaggccgtggcgaggcgacgacaggagcagcagcaacaacaaggcgttgcgaggagccgcggcggccgggacggacaggcgggagggggacgtcgcgaggtgcggcggcgccatgtccgacaccacgctctacctcctcctcgaccggttcgcgcccagctgagcgggccccttgctcacccgccgctgccgccgtcgccgtcgtgatcgatcggcgcgtgctgtactgtacaggcggaataactgcacgtctgcacgccatggcttctggaaataaatgctgtatataaactgcaatggcatctcgtgttgctctctg

SEQ ID NO: 268892 - DNA, 765 bp, Zea mays
gcgctgcaggtacggattcgcagtttcggcccaggcgtacgcatcagaacatgctggagcagtgatatttgcgtttaaaaacaatctggacatcaccctcggagtatctttggggtccgctacgcagatgtccatgtttgtggtgccattgagtgtccttgtagcatggatcatgggagtcccgatggatcttgatttcaacttgcttgagacgggggggttgtttcttgcaatattagtaacggccttcacgctccaggatggatcatcacattatctgaagggactgctgcttgtgttttgctacattgtcatctccttatgctttttcgttttgagacagcatggaaatggaagcaacgatgatcagctgggtgtagcaagcaagccatggaggatttagggcgcctgagctggcagtagtttctcaacaagtagcgtggactttggtttgcacgattttgcatggaacactggaggggagacccgtgaagtttgactaaagtatgtagactgcgggaagatgctgttcagctgatgtgtgaatgtaagtacatacaaagactatagatgaaaactgatgttgcgtgagagactatttgtgtgtgtttttcttgttctttccaccaagcaatggctagaattcggttgagctgttgaaattgtctcctgtataaatcagtgacatgtcatactattttccaactggacttaacagagcctttatccttctaattggttacccgcatggtcataatctggatc

SEQ ID NO: 268893 - DNA, 1230 bp, Zea mays
  unsure (1)..(1230): unsure at all n locations
ctccctcatgtttgctgtgtcgacgttcacgtcaacaangactactaacgtaataggctgtaattctaggccatgacagggacccgtccatggacacagccatggacatccacatgaccatggtcatggtgattcagacgatggccattctcaccatgaagaaccagaacagggccatgttcatcatcatgagcatagccatggaagttctattactgtcacaacacatcaccaccaccactcaggcactggacaacaccatgacgctgaggagccactgatcaagcacgaggccgactgtgagggcacccaatctgctgctaagaagcctcgacgcaatataaacgtacacagcgcttaccttcatgtgcttggggactccatccagagcatcggggtgatgatcggcggggctatcatctggtacaagcccgagtggaaggtcatcgacctgatctgcaccctcatcttctcggtggtcgtgctgttcaccacgatcaggatgctgcgcaacatcctcgaggtcctgatggagagcacgccccgtgagatcgacgccaccaggctggagagggggctctgcgagatggaaggcgtggttgccgtccacgagctgcatatctgggccatcacagtggggaaggtgctactggcttgccatgtgacggtcgccagggaagccgacgcagacgagatccttgacaaggtgattgggtacatcaagacggagtacaacatcagccatgtgaccattcaggtcgagcgtgaatagagggggagctgtcttttgggctgtcagggcataaatggcgtcacgccttcactggttatcttactctgtcggttaaaacttttttttggcacctgggaaggcatcaggcagccatcggagtcttgatgtgcttgcaagttcatctgtggttcaagctttgatggtcagtagtgttatctgttactactagtctattaggcgggggtaggcgtcaaccagtgtgtacgggtttgattttcggtcatgctgttaacagcattgcggttcgtcgaactggatatgtagtttagtacgctgtgtcatcacctcttgtgtaagggaacgcttcttttctgtggtatggaagatgtgaacttcctgcttggcctggagatgctctaaactttgggtttatatgtaaacttacaagctgggggggcggccgatctaaaggatccaagcttacatccgcgtgcttg

SEQ ID NO: 268894 - DNA, 458 bp, Zea mays
gctgcacatctgggccatcacggtgggcaaggtgctgctggcgtgccatgtgaccatcgccagggatgcggacgctgatgagatccttgacaaggtgatcgggtacatcaagacggagtacaacatcagccatgtgaccatccaggtcgagcgcgagtagggagctctgtctttggctgctgtcttgggcataaatggctggcgccattcgagctctggtgtgctcggtggtgttgtctattgctagtctattaggcaggccgggggaattgtttgcgtggtggtcgtcagtcagtcagtcggtgcataaacaaggatgaaattttcggtaatgctattgacagcatcgtggttcatcgaactgcatattctagtacgctgtgccgtcacatcttgtgtaaggtcacgtttctgtgctgcggtatggaagatgtgaagttcgtggttggcatgttgct

SEQ ID NO: 268895 - DNA, 655 bp, Zea mays
ctcggcgcgctcgtctccatccagctcatctggctgctcgccggcatactggtgtacgaggccgtcgtgaggctcgtcggcgagagctgcgacgtgcgggggtcgctcatgttcgccgtgtcggcgttcgtgctggtcgtcaacgttctcattgccgtgttgctgggccatgaccacgggcacggccacggccatggacatggacattcgcatgaccatggccacggccatggggattcggacgatggccattcccaccacgacgacgaggagcaagaacagggccgtgtccatcaccacgagcacggccatggaggcgctatcactgtcacaacccaccaccaccaccatcatcacgatcacgatgttgaggaggcgctgatcaagcatgagggtacccagtctgctggcagagctggtaagaagcctcggcggaacatcaacgtgcacagcgcatacctccacgtgctcggggactccgtccagagcgtcggggtcatggtgggcggggcgatcatctggtacaagccggagtggaaggtcatcgacctcatctgcacgctcgtcttctcggtggtggtgctgttcaccacgatccggatgctgcgcacatgcctcgaagtgttgatggagagcacgccccgcgagatcgacg

SEQ ID NO: 268896 - DNA, 447 bp, Zea mays
aatcaagaatgatgggtgattcaatgtacaaaagtactcttgattgttttgccaagacactaaagaatgatggacctggtgctttctacaagggattcattgcaaacttttgtcggattgggtcatggaatgtgataatgttcttaactctggagcaggtcagaagattctttctatgaagagatgcctgcactgcaagtagggattctgtgggacaagggtatgctgatatatatgggcggcatatatacgtaattgcatggttatttgaagctacaggttctcatggcgtcaaccaacagaaagcagccatactgccacgatgttgtaatcttgtatcgcagattgatcatacagaccgctgtgttggtatattatagagagctggattggaggagattgagagagattaggagagattttgactgatttaaacccactcaattc

SEQ ID NO: 268897 - DNA, 339 bp, Zea mays
tggaatgcacatcggtattgctacaaaaggctggcaaagtcgcacacaggagaaactgatgctcttgttatttctcttgggaatatgtacaagacgcccggggtaagtggcgccgaccgaggagaaacaacttgctacacctcaactccgatcctctccgcgatctccttgaaggagtaaacgtcactgccccaaagccaggcatcgcagcctgcatccctcgctccccataagtcgttcctacggtcatcaccaatgtgcaccgcttcttcaggtttcactcctagcagctcgcaggccttcaagaatattgtggggttcggcttttctgctgcaacc

SEQ ID NO: 268898 - DNA, 509 bp, Zea mays
ggttcagctctgcttctataatttttttttggtccactgtacaatgggctcctttattacctcccttagaatcgttttcagtttggtccactgtctcatcatccatcgaatcacggcccaggcacacaatctaaaaggcaaaagaattatagaggcagagctggacatagtcttcagttgaatttaaggttcctcttcccttgtttggaaaaggttatgatcattgtacgctcccggctcaatgttgaacactcttgatgtaccctgtgaagttgcagaggatgggcatcagaatctcaaagatcaagaattgccataaaggtgctgatgagttctttgatgatatatgtaatttcaattacatgaactataagaaagtgcaaattgaataagtagagatgatataatattacatatttatatcatcaaaataatattaatattacgatgatattttatcacacaaaaaaaaaattaaaaaatttttattttaatatttatcttaattt

SEQ ID NO: 268899 - DNA, 444 bp, Zea mays
cttccagcagccgttcgctcaaatccattgccgctcctgcccccaacggcgcatgccctcacctcctcagccatggagctcacgagcatctccctctgcgcaccccctccgcgcgtccctgctccctcgtcaccaggtgcacgcgcgcagcttcctgcgcgccgggatggccctccagccccagctcgcccctgccctcagccatggcgcctggccgccgccgcccctgctttccatggcggcacttcctgcttcctggtggtcggcgccctccccaacctctctgctggtggttgtctccatcccctccatggcgagctcgcccctgcattcctgctcgcccaagttccccttccctgttccagccacctcccatggacgccagccctcacctcatagtcgccccagctcgctcagcaccctctctgctggtggccagccatc

SEQ ID NO: 268900 - DNA, 922 bp, Zea mays
cgctttctttctcccccactactccactagtcggattgctccgattccacgcgggcacgcacgtggtgcccacgcacgccgcgcgctggggggccgccgtgtcgccctcctctccccgctacttgatgttactgatatatacgcacgcgacgcggccaccactttccccaccccgcgaccgagctgccctgctacacggtcccctgccaagatccatctttccggttccgccgcctgatcgaagtgaacaagcaaggaagagccatggcgagcgagcacgcggcggggggcgaggctaagcatgaccagaagcagagcctgatggacaaggcgaaggggttcgttgtggagaagatcgcgcacatccccaagcccgaggcgacgctggacggcgtgacgttcaagggcctgagccgggagtgcatcacgctgcacagcagcgtgaacgtgtccaacccctacgaccaccgcctccccatctgcgaggtgacctacacgctccggtgcgccggcaaggaggtggcgtccggcaccatgccggaccccggctggatcgccgccagcggctccaccgcgctggagatccccgccaaggtgccctacgacttcctcgtctccctcgtcagggacgtcggccgggactgggacatcgactacgagctccaggtcgggctcaccgtcgacctccccatcgtcggcaacttcaccatcccgctctccacctccggcgagttcaagctccccaccctcaaggacttgttctgatctagtagtagctcgcttgccttgtgttctgtgcgggcgcgcaccagcgatctgtacgacgaccttttgcaaataaacgacgcagctcctctgttctatatatctaaggggatggatggtttaatttgactgcaaataaagagctggatttcattcc

SEQ ID NO: 268901 - DNA, 332 bp, Zea mays
ggactgggacatcgactacgagctccaggtcgggctcaccgtcgacctccccatcgtcggcgacttcaccatcccgctctccacctctggcgagttcaagctccccaccctcaaggacttgttctgatctagtagtagctcgcttgccttgtgttctgtgcgggcgcgcaccagcgatctgtacgacgagcttttgcaaataaacgacgcagctcctctgttctatatatctcagtgaatgcctaagctaaggggatggatggtttaataaataaagagctggatttcattcaaaaaaaaaaaagactagttctagatcgcgagctaagaac

SEQ ID NO: 268902 - DNA, 496 bp, Zea mays
  unsure (1)..(496): unsure at all n locations
tgctatttcaagagttcctagggatgaaagtttgagcaatctcaaaaactgggctgagaatggaaatcttcatcttctgaatcttaagtatgatatcaccccttccgattatgtttcaatgctcataacagattatggaatgctcccacctactagtgtaccagtcattgtaagagagtaccgcagggagcacgtttggatatagaagccaccgttttcctttctggttttgtttgaggtatgataatctgaacagcttttgctgcctaagtgttagtggaatggtaagggggtggtgtgagcataccagcaaatgtttatatctcagttttgcaaccatcaaattggttgttttctcctgtagttcatttctgtgttgatgcgttttgcatttacctataccgttgctaatgggggagtatatagtctataaacctgccctccataattgccccctgatatgctcttttatgttaaaantagtgaaaaagggcgg

SEQ ID NO: 268903 - DNA, 591 bp, Zea mays
cttactgatggtgcatgctacatgttacagcgaatatgaaacatgagcgctgatcggtacatgttacatcaactgtctgtatggctgtctcccattgtgttctgcaaaagtgaggccccgtgaatcagagcctactttcacatgggactcattgtgggtgcaagtgttggcggattccaaactggggcaagatcagggcgtctttctttcccctgtttttccaggttggatgacaacgatttctctcttgcagtctgtactcttgtgtaccatggctctccgtaagttgtgaaagcatgagcacctatttccacctttgatggccaagaatctcattgtagctttgctgtaccatgtataagctgttattaactagtggaaagcagcaggaaaaaaattctgaagggagtgtgaatcttggtgtgtcatctgtgtacctgtgtttctgataaatgctctcgtttaagcatgttgatctttaaaatatttttgattttcatatattttatttaattctttttttatctttatctagtttctttatgttagtatattgttttttttttttttttttttatattttactctttt

SEQ ID NO: 268904 - DNA, 1039 bp, Zea mays
gtctcaaatggagggcaacttataagccagaggatattcgctggcctgatgtttctgttgaagcggaaacgggaaaaatgtacaaggcattttttcgagatagagaggggagaactgtaatcattatgaggcctacaaaggagaattcaacgtcccatgacggtcagattcggtttcttgtgtatgttttggagaatgcgatcctggaccaacgtgaaggtcaagagaaaatggtatggctgatagacttcacaggatggacaatggcccatgccacacccataaagactgcaagagaatgtacaagcatcctgcaaaatcattaccctgagaggctggccattgcatttctgttgaatcccccaaaagtattcgaagccttttacagggctgtcaaatatttccttgacccaagatcgatcgagaaactgaacttcgtgtacctgaaggatgaggagagcatgaaggtcctgtacaagtgcattgatcccgtggtccttcctgtggagttcgggggaaagaacagtgttgtgtacaaccatgaggactactccaagttgatgctgcaagaagatatcgaaacatcaagcttctgggaggatgatgcgaaaactgttaaccatgctatcaatgggaccttggttcctgatgttgcatctcagctgtcacggattgctgctaaagccagttaatgagctactacgatgggagctattcagaatgctttaatggagtaactagaaagtcgagcgccaataaaatgttcatagtaaacagaaatagagcaaataacagatgagatatcacttgtccatagtcgaaatagttgcacttatcgaacactttattcagtacacgatgagttacaggagactatcgtaatgatgtaagaggtagaagtgctacctgcttaatgtacctcaaaagccctgagggctttacttgttttagccgtggctacggagaagctaattctgggttatggcttttaaaatgctggttctatatttggatttgattatggctgaagtagctcccc

SEQ ID NO: 268905 - DNA, 509 bp, Zea mays
tttccctttcgtccgggagcacccacgcatggatcaaaatcctcccccaaaacgcgacgcacgcgtccgcggacgcgtgggaaagtttataaacgcactcctccccttcccctgttccctctaccaccaccaccggcaccgcgggacagtctgctctcgtcccgccgcagcccgtccccgacccggaaccctagcgactgccattgcccacgcgccgctcgcccgatgaatggcgggggctctgggctggcgcccaacgccgcgcacaccgcggacgaggtcttccgcgactacaaaggccgccgcgccggcatgatcaaggccctcaccactgatgtggagaggttcttcaaactctgtgaccccgaaaaggagaacttgtgcctttatggctatcccgatgagacgtgggaggtgaccttgccagctgaggaagttccccctgagatccctgaaccagcattaggaatcaactttgctagggatggcatgaatgagaaagactggct

SEQ ID NO: 268906 - DNA, 517 bp, Zea mays
aaacaagtcatatctagctagtagctccctgaaaagttcactagagaagcatttgagggaggagccatgtctgaggagaagcaccaccaccacctgttccaccaccgcaaggcagaggaggaggaaggcgcctccggcgaggtcgactacgagaagaaggagaagcaccacaagcacatggagcagctcggccagctcggcgccatcgccgccggcgcgtacgctctgcacgagaagcacaaggccaagaaggacccggagaacgagcacggccaccgggtcaaggaggaggtggccgccgtcgccgccgtgggctccgccgggttcgccttccacgagcatcacgagaagaaggacgccaagaagcacgcccacaactgatccgtcgcaggctgcctcagccgaagcagcagcacatcgtcgcggttgctgtttcatctgttcccccaacctcgtcgtcgtctacggtttgccgggcaggccttgatttgaggctttgagctaccgatatttgcac

SEQ ID NO: 268907 - DNA, 536 bp, Zea mays
  unsure (1)..(536): unsure at all n locations
caagagacaggttatgcaaccacaaacggcagcctccatgatactgacagggttgattacatgaagacccacataagcagcacattggctgctctaaggaatggggccaatgtgaaaggctacttcgcgtggtgcttcttggacgtcttcgagtacctgtcagggttcatgtcgcaatacggcctgtaccgtgttgatttcgaggacgaggcgctaccaaggcaagcaaggctatctgctcgctggtattctaaattcctagagaacaaggggatccatgtagagggcgagcttgatgatgcgggatcacacgttgagcaataagttttctacagcgacacattgatctgtacatcctctagcgagactattgaatactactgtgcgttgcaataagaacacttatattnaaaaaaaaaaaaaaaaaaaaaaaatatttataaataataatataaaaataaaaaaaatataaaaaattttatataataataaatttaaaataatttatttaaaaaattaaaataaaaagggggggc

SEQ ID NO: 268908 - DNA, 513 bp, Zea mays
ggctcgtgtccgcccatccccatccaagaaatactacgcccatcggatccaccgccgaggcaggcagaggagcacacaccccaggagctgaggaccggtttcgccatggccgccaagaagctggtgctcaagctggacctgcacgacgacaaggacaagcagaaggtgctcaaggcggtctccaccctccacggtatcgactccatctccgtggacatgaagggctcgaatctgacggtggtcggcctggcggaccccgtcgacgtcgtggccaggctgcgcaaggtcgccgccgccgaaatcgtctccgtcgggccagccaaggaggacaagaaggagggtgacaagaaggagggggacaagaagaagaaggacgacgagaagaagcagcaggtcctgtggtacccgcacccgtggcacgccgccgccgcagcgcagcagtaccacccccacccgtacccgccccagtacgccgtccacagcgccgaggaggaccccaactctgcgccatct

SEQ ID NO: 268909 - DNA, 673 bp, Zea mays
tcgcccacgcgtccgcccacgcgtcccccctctcctagtctcctctccacactcccgctctcctgctactctgctccgtgatctggtctggtgagatcggggatcggaccgtcgactcggcgagacatggcggactggggccccgtggtggtgggcgtggtgctgttcgtgctgctctcgccgggcctgctctgcgagctgccgggcacccaccgccacgtcgacttcggcggcttccacaccaacggcaaggccatcttcgtccacaccctcgtcttcttcgccgccttcaccatcctcacgctcgcgctccacatccacatctacaccggctagctagctagtgcggagcatatgttgcgtcggtctggactcgcggaggtctcagatcagaaaggaacgccggccggcggcgcgtcctgtgttgctgctcttgttcctctgcagttcgatcgattcgaccaagtgcttgtaactgcctagcttcctcgttgctatgctagttactctctatctatcatgtaaaggccgccatggtcgtccatctgtagctgggcttgcagcaacaggaactagtgcgtgccctttaattaatcgaatctgttggttggttgcttaaaaaaaaaatttaataataaataaaaaatataaaaaattaataaagggcggccgc

SEQ ID NO: 268910 - DNA, 486 bp, Zea mays
ctggatgacctagtcaacctcatctatgaatctctaacgaaccctacatacaaaggtgtaatcaatggaactgcacctaatcctgtgcgtttgtctgagctttgccgaccccggcggcgcatcgttgggcggccctcttggttgcccgtgccgggatttgcgctcaaagcggtgctaggagaaggcgcttctgtggtgttggaaggacaaaaggttgttccggcgaaggccaaggatctgggcttctcctatagatacccctatgttgaagacgctctaaaggccattgcccgagacctgtagagctaggttgaggacgatacaggcaacttaatttaattatttcttatcttaactaggaacgtgcccgtgcgatgccacggaatacaaattgcgaccctttaatagacttatggccctgacgacgtgcggcgtgagtacaatagtgacggcaaaatatgtgattgtttaacatagatatagaat

SEQ ID NO: 268911 - DNA, 501 bp, Zea mays
gaacgcgcaccgttcactgctcttggtgggttggtgaccagggccagaagaagaaggcgcctcgggtcatgctggtgttcttctgcatcccggtcggtcctggcaggagcagggtgatctgggcgttcccgaggaacgtcgggtctggctccaccatatcacgccacggtggctgtaccacgtcggccagaaccttatattggattcagacattttcctcctccacgttgaggagcgtaaatttgctgcggcggggctggataactggcagagagcttgttacgtgccgacgtcgtcggacgccatggtggtcgccttcaggaactggttcagaaaattctgcaagaaccaggtcggctgggcaaccttacaagtcgaccagctgccaccaacgcgtaccaaggaccagctcatggagaggtactggtcgcacgtggtgcagtgcaagagctgcaacgcggcgcttaaggccatgaaagcgctcgaggctgccctgcatgt

SEQ ID NO: 268912 - DNA, 379 bp, Zea mays
cggacgcgtggtctgtctcgtgggcggacgcgtgggcggacgcgtgggtgatctaggcatatttcaagcgacccatttgaccagaaactaacacgctcttctggtttgtaaatgagtgtgcatcagcgtcaggtctctgtacttgttgatccttacaccgtctatagtatgtagaataatgtttgtatctttgtcaatttacggaacagacatgaaacccaggtcactgttgacttgcaagatttctgaatccttctagttgaaagttgaaacgagggttatatatgctcggcagtctgctccagatgcagcagctttagctctagttccacttaactctagctcaaactatggcagagctcttttgggagtggctgtg

SEQ ID NO: 268913 - DNA, 527 bp, Zea mays
cccacgcgtccgcccacgcgtccgcccacgcgtccgcccacgcgtccgcctacagatatattgtatgactcgtggtccccagcaatgactgtcagttctatctgtatcagcatattatctatgctgtccagctcaccagcaaaggttacatatttcctctacatatccttgttcaatcggtgggtcttgctttctgactgcaatacatacatgtaccgattgcagcaacgcccagccgataacgatcgctatgtcaggaactgtcgcaatgggaggtcaccaaaggagaccacgtggtggttccatgacgacactgtgtgatgggtgtttccggctgttgtcctgcccgcattttagttgccagactacatgggagatgatctaggcatatttcaagcgacccatttgaccagaaactaacacgctcttctggtttgtaaatgagtgtgcatcagcgtcacgtctctgtacttgttgatccttacaccgtctatagtatgtagaataatgtttgtatctttgtcaat

SEQ ID NO: 268914 - DNA, 510 bp, Zea mays
tgtcctacttgaagctttgcaagcgactatctgagacagatctgattggaccatgtattgtgtatctatatgtccgcaaattcaaattgtggatggcacacatgctttagagttctgatgaaccctttcgtcatatatccactcatggcaggtacaaaatggagatctctaaaaaatgtgtgtggctcaaacgcttgtccctgatgaacaagacatagaagcttcaatttcggtgaaccggttggtacataataatggttccttgtatatttttgaccgaagtagaggtatcaactggttgtttgttgtaaacagcgctgttgtagtactctgaacagagtccatatcgtacatgtaaattctctgtgtcactgttctcatatgcagttgctgttgaaatctgtgcgttactgcagcctgtaggggataggcaaaatggaaacttttgttgatataaatataatgtacagttctgtcgtgactgaacttctaaagttgtaccgagatgaa

SEQ ID NO: 268915 - DNA, 758 bp, Zea mays
cgatggtatggttaacagcaacgcaccctttgcaaggaagtttggaagagaggatcctgtgctggacaagattgaccaggaactgttggcccgccgacctgatggatttgtgcctggtggatggacaaacctactgaacacaactgagaaagggaaacccttcacggttgagcgcgtgcaagatctccgcccaggtcctggtgtggacagattaaagaaactcgtcacaggattgctcacccaagaaggttttgatgacaagcattgcctgtgaaactcccagtaagatgattctggggcagtaggttacacgctcaaatttgagggcatcgggccatttgctaggaatgcccctactagctgaggcagcagcacattagcgtcatgtacgcgaggatgcaacgatatggaaggtgctcttacagacaactgcttgagttgagttaccgtacagcaggagaccacggatgtagcagtcggagatgactatacagaactagcagctcattagtttatgttagatgattataatcagcccccccaaccatgaataatgttggaatttttgacatctctgcgcccgagggttgtgcaaggtagcccattctttgtttcgaagccatggcgcctggtgcaccagctggtagcgtgagacttcgttgtattgactagtggatgtttctgggtaaactgatacatttgattgcacacatgtattgatttgtttcttttctctttgatgagtatagcgaaaatgc

SEQ ID NO: 268916 - DNA, 1608 bp, Zea mays
tcgcaaaatctctccttagtttccccaacctgcttctgtttaccgaagggctaaatccaatccccttgccaagctctctctttgctgcgggaggtcgaggccggagaggtcttctgggatgggatcaagaaaggggtggttccccgtggccctcctgctgttggccgactctgccctctggccgccggtcgccgccgccgccgccggaggcggcgaggccgaacacgccgttcagcagcatagcgagcgcatctcagggagtgctggtgatgtgttagaagataatcctgtgggtaggttgaaggtcttcatttatgacttaccaaggaagtacaacaagaagatggtcaccaaggattcacggtgcctcagtcacatgtttgctgctgaaattttcatgcatcgtttcttgctctcgagtgctgtccggacactaaatcccaaggaagctgattggttctatacaccagtttacactacttgcgatttaactaacgctggactgcccttgccgtttaagtcaccacgggtgatgaggagcgcgatccaatatatttcaaacaaatggcccttctggaataggactgatggagcagatcatttcttcgttgttccgcatgattttgcagcatgcttccactatcaggaagaaaaagctatcgagcgtggaattcttccattgctgcgacgtgcgacattggtccaaacctttggacaggagaatcatgtttgcctgaaggagggttccatcattattccaccctatgctcctccgcagaaaatgcaagctcacttgatttccccagacactccacgctcaatcttcgtttacttccggggacttttttatgacacggggaatgaccccgagggcggatactatgcaagaggtgcgcgagcttcgctatgggagaacttcaagagcaaccctctgtttgacatttccacagaccaccctgccacttactatgaagacatgcagcgcgctgtcttctgcctgtgcccattgggctgggcaccgtggagccctaggttggttgaggctgtggtctttggctgcattccagtcatcatagctgatgacatcgtgcttccatttgcggacgcgatcccatgggaggaaatcggcgtctttgtcgaggagaaggatgtcccaaagctagacacgatcctcacgtcgatgcctatagatgacatcttaaggaagcaaaggttactcgcaaatccatcgatgaagcaggcaatgctgttcccacagccagcgcaaccaagggacgcgttccaccaaatcttgaacggccttgctcggaagctcccgcatccggagggtacgttcttacaacctggcgatcagcgcctcaactggaccgccggacctgtgggagatctgaagccgtggtagagaagaagagatatcttcttctttgataatccaagctttgccacgagcaccccttaggactagtgcacgcttcatgagatgttatgtaatcaatatgctgtgcgtgctttaggtgcaaaatacaccttggccgtgcttagtccttatgaacgccatgtaacttgttgaattcacatgagaaatgccataagtaaatctaccctgct

SEQ ID NO: 268917 - DNA, 978 bp, Zea mays
cccacgcgtccgcactactcacccatccactgcaaaccgccaaacggccggcacacaactacacaagccgctggcaaagatggcctcctccttggtcctcatcgcagcggccctgcttgcgctggcctcgtcgtggcagcaggccatcgcctacgatcctagccccctccaggacttctgtgtcgcagacaagaactcgcctgttcgcgtcaacgggttcccttgcaaggacccgatggcggtcaccccggacgacttcttcaacgcggcgatgatcatcgacaagcggagggacacgaacaacaaggtggggtccaacgtcaccaacgtgaacgtggagagcttcccggggctgaacacgctgggcatctcgctggcgcgcatcgactacgcgccgctcggggtgaacccgccgcacatccacccacgcgctaccgagctgctcaccgtgctcgagggcaccctctacctcggcttcgtcacgtccaaccccaaccgcctcttctccaaggtggtcaagaagggcgacgtcttcgtcttccccaaggccatgatccacttccagatgaactctcgaccagcgacaggcccgccgcggcgctctcgtcgctcagcagccagaaccctggcgtcatcaccatcgccagcgccgtcttcggctccaagccgcccatctcggacgacgtcttggccaaggcgttccaggtggagaagaaactcatcgactggctccagtctcagttctgggataccaactactagctgcctagctagctagtaatatacttgcttgcttatttgttgcatgcatgcaccaccaacacaagccttatattaattacgtacgtacatctatgtataatattgaataaatggccggtatgcatgtggaggagtgaaacttattactgtgcgtgattaataatatttaatgtaaacttttcattattatctaatataaaaaaagaatacgagttc

SEQ ID NO: 268918 - DNA, 1333 bp, Zea mays
agcctcctgcccccgccgtcgtcgggggtgccggaggtcatctggctgccgacgagcgggggagcggggcccttgtcctgcgcgccgccggaccccgccgtgtacgaccgccccgtcatcggcatcgtctcgcacccaggggacggtgcgggcggcaggatcagcaacaccaccgcgacctcctacatcggcgcctcctacgtcaagttcgtcgaggccgccggcgcgcgcgtcatcccactcgtctacaacgagcccgaagaccgcctcctcgagaaattgagtttgttgaatggagtgctgttcactggtgggtcagagaaggaaggtgtatattttgacacgataaaaagagtatttcagtatgttttggacaagaatgatgcaggtgaaccatttcctttgtttgcccaatgtcttggctttgagcttgtaagcatgattgtcagcaaggacaataatatcttggaggcatttgacgcccaggatcaagcatcaactcttcagtttcccagctatgctttggagggttcagtttttcaaaggtttgacactgacctcatcaagaaagtcagcaccaactgtcttgtcatgcaaaatcacagatatggtatatcaccaaggcgatatcgagagaacgatgcactatcaagtttcttcaaaatcttgactacatcacctgatgaaaacggcaaggtctatgtctcaactgtacaagccaataattatccaatcacttgcacgcaatggcatcctgagaaagccatttttgagtggaggaaaccaatgatcccacacagcgaagatgcagtacaggttactcaacattttgccaatcattttatcagccaagcacgcaagtctccaaacaggcctcctgccgacaaagtgctggataacttaatttacaactacagtccgacatttaccgggaaaaaatcgaaatcgtttgaggaggtctacatcttctcctgagactggattgaacgcctgagtgtcttcaggaatctgtagttctgcactacattgctattgtagtgtaaccgtgcattagtattacccgtggtaccagaagttgtatttgtatagattcgttggactgcctgtattgcagtaacctttccaccgtatgggtggctctatagaatgcctataagcagcgcaataataatgataatgtaagactgaaaaaaaatacttgtatggagattttctgaatttaaaagtttctccaaatcaggtgttggttttatcactttttttatttctttggggcgtccgctttagtggaaccaaggttactttccctttgcatgcaacgtcttatcttttc

SEQ ID NO: 268919 - DNA, 649 bp, Zea mays
  unsure (1)..(649): unsure at all n locations
ttggattatataatctgagtagtcctgtttgtctacccagattatctggcgtgtttctgatgggcggcgggcttctccgatccgataggcgcaaaaacgattcggtagattataatggcaatggtgggtaatttctaggaaacttgaaagggtagtgaggaagtgagaaaaaaataatctgaaataagcacctcctcacttgcttatggattatcataatccaaggggttagattatataatctgggcaaataagctagactgtttgtttgcctcttaggattatttaatccagattatataatctggggggtaaaccaaaacacagngggccctaaaattttttggtaggaaatcgtttgaggaggtctacatcttctcctgagactggattgaacgcctgagtgtcttcaggaatctgtagttctgcactacattgctattgtagtgtaaccgtgcattagtattacccgtggtaccagaagttgtatttgtatagattcgttggactgcctgtattgcagtaacctttccaccgtatgggtggctctatagaatgcctataagcagcgcaataataatgataatgtaagnctgaaaaaaaatacttgtatggagcttttataaacttacaagtttctccaaatcag

SEQ ID NO: 268920 - DNA, 855 bp, Zea mays
tactgacctcatcaagaaagtcagcaccaactgtcttgtcatgcaaaatcacagatatggtatatcaccaaggcgatatcgagagaacgatgcactatcaagtttcttcaaaatcgtgacgacatcacctgatgaaaacggcaaggtctatgtctcaactgtacaagccaataattatccaatcacttgcacgcaatggcatcctgaggtaatttagttgtagctgtttcaggagttccacatttagtgttcttattggttcttccttttctcttgtgcactgtatttattcctaggttatattcacaacatatcaaattgtggccactcaccaaatacaagtggctttatgccacaagaaaactgtcctcatttgatgcagaaagccatttttgagtggaggaaaccaatgatcccacacagcgaagatgcagtacaggttactcaacattttgccaatcattttatcagccttgttgttgtaggctttaacttctattattatacaattcaagttggcagtacttcatgttggtttaagcatatgcaagaaaggaccttgctttgatgaaacttgcaagagtggtgaaagaaaaatggagttcatgcttacctagctcaccctttccgtgtcgtggaacagccaagctcgcaagtctacaaacaggccttctgccgacaaagtgctggataacttaatttacaactacagcccaacatttaccggaaaaaatcgaaatcgtttgaggaggtctagatcttctcctgagactgtggattgaacgcctgagtgtcttcaggaatctgcagttctgcactgcattgctattgtagtgtaactatgcattagtatta

SEQ ID NO: 268921 - DNA, 648 bp, Zea mays
cttccccactcgcctccgctcaccttgcctcgatcgttccaggagtaataaaacactaaaatggcgatggcggcggcgaggagagcgctcctggcccacctccgcgtgccggtggtccaccctgcagcggcggcagcgaccatccccgcggcagggcggctcctgtcgtcgacgacggagagaaagggctcgttcctcgacaagggcgaggtcgctgaccgtgtcgtctccgtcgtcaagaacttccagaaggtcgaaccctcaaaggtgacacctagtgctcattttcagaaggaccttggacttgatagcttggacactgtggagatcgtgatggcgtttgaggaagaattttcctttgagattcctgacaacgaagcagagaagattgactccatcaagacagcggttgatttcattgcttcgcatcctcaagcaaaataagaggatttcttttttttcgtatttcaaagtgtgttttgcatccagaacttatgcgacacgggactagttttctctagcttgccgcagtagataggaagtcatttctttacctttctgaatccgcgtgtaccaaacgattgttgtgttcttgtgacctcattggtacgctaatccataaatccatttgggcttcctttctgcttc

SEQ ID NO: 268922 - DNA, 827 bp, Zea mays
cccacgcgtccgcggacgcgtgggtatcagctagctagccttccctacagcaactgcttacatacaacacttccatcttcccgagctcgtcttcgatcaattcccaagtcaaataataatataacagcaatggtggttcccgtcatcgacttctccaagctggacggcgctgagagggccgaaaccctggcgcagatcgccaatggctgcgaggagtggggattcttccagctcgtgaaccacggcatcccgctggagctgctcgagcgcgtcaagaaggtgtgctccgactgctaccgcctccgggaggccgggttcaaggcgtcggagccggtgcgcacgctggaggcgctcgtcgacgcggagcggcgcggcgaggtggtggcgccggtggacgacctggactgggaggacatcttctacatccacgacggatgccagtggccgtccgacccgccggcgttcaaggagaccatgcgcgagtaccgcgccgagctgaggaagctcgccgagcgagtcatggaggccatggacgagaacctcggcctcgccaggggcaccatcaaggacgccttcaccggcggcaccggcacgagcccttcttcggcaccaaggtcagccactacccgccgtgcccacgcccggacctcatcacgggcctgcgcgcgcacaccgacgccggcggcgtcatcctcctgttccaggacgacaaggtcggtggcctggaggtgctcaaggacggcgcatgggccgacgtacagccgctcgagggcgccatcgtcgtcaacaccggcgaccagatcgaggtgctcagcaacgggcggtac

SEQ ID NO: 268923 - DNA, 537 bp, Zea mays
cccacgcgtccgtgaatccatatgcagaaggtgggcgacccgtcgctgaaggcactgctcctggacgaggagcggctgacggaggcggggatagaggcgatggtgtcgcggttcctggcgcaggtgaaggacgggacgtggggcgagcaggggtggcccaaggtgtggacggactactccgtctccaagctggccctgaacgcctactcccggctgctggcgcggcggctggaggcgcgcggcgtgagcgtgagcgtgaactgcttctgccccgggttcacgcgcacggacatgaccaggggctgggggaagcgcaccgccggcgaggcggccgacgtcggggcgcggctcgcgctgctgccgcccaccgagctccccacggggaccttcttcaagtggcgcacgccgcagctatactctaagctgtgactggctcgcggcgctggcgtccgtccgccggggcgtacagcattttggtccggctggtgtagccgttcctacttcttctgcttactagttctagcaagtataaacaac

SEQ ID NO: 268924 - DNA, 441 bp, Zea mays
ctgccccgggttcacgcgcacggacatgaccaggggctgggggaagcgcaccgccggcgaggcggccgacgtcggggcgcggctcgcgctgctgccgcccaccgagctccccacggggaccttcttcaagtggcgcacgccgcagctatactctaagctgtgactggctctgggctctggctggctggctagctgagctgtcgtccgtcggccggggcgtacagcatttcggtccggcggtgtaggcgtgtaccccccccccctattccccctgctgaataggcctagcaagtatcaccaacgtgtccagagaagtcggtaaccggagtgtcgatctgccaaggtgctttggttgaaccctggctcagcccgtttgtgactctcagctatgtggacaatgtgcgcttaaatctgtcttaaaatttagcccaacttctgagc

SEQ ID NO: 268925 - DNA, 474 bp, Zea mays
  unsure (1)..(474): unsure at all n locations
cccacgcgtncggctcgctcgacgcaggccacgcgcacgcccagctctgctctttgcgtcgtcttccaactgctcggtctcgccctagcgctgagcgccttgcaccgncagccacgccttcctggccatcatggcgtcactatttcctgttgcgccgcgacatcgtcgtgctcgggtgcttagcgtcgaggtcgccgcgccgttgtcgctctggcttcccttgtcctcgcgcggggtttggtggtcgtgtccacatccgactccgaggcatcaacgtccgcatccccgctatcgtcatcgtttcagcagccttgtcgcaccttgcgttcacgccggaagacgaaagggaagcaccagtgccacgctcgtcaagtatcggtgatatgcgcaagccggacagcgtcgtcgatttaatggtttcaatccggatttagctttggtacgttaattaatcacgtgatgtgaaggacaaga

SEQ ID NO: 268926 - DNA, 407 bp, Zea mays
  unsure (1)..(407): unsure at all n locations
cggacgcgtgggcaaaacaaagctctggttcctttaagcgacgacgtcgatgaactgaatttcagactgaaaggtgcgaatcagcgcggacgccggttgctgggcaagtgatatggaaccagaattcgggcagtttggagaccgtcgcctcgactgcaggattttaagaaccttgttgtttacatgttttagagcaaactagaaacatgggcgctgccgcgcccttcagggtgaatcagcccgtgttctttggagtgaatcaggccacacttgttgtattagtgagagaatgatgatctattttgtgtcattatggatttcatagattattttccctgaactgcatttgtttcaataacataggagggaactttccttgaaaaaaataanttagaaaattttttttt

SEQ ID NO: 268927 - DNA, 501 bp, Zea mays
cattttcatttgctctgctagcagatgacgaagattgatgcatgtgtagttcagcacgtaaacagattggttcatttcttacaaagttttggagcacaggtgtcaaatttcgtgggcaagatgggcttttcctgatacacagcattttgtcagaccgctagactttttcctagcgcatgagtgcagttgtcgttgagattgccagccttgtggaaggagattttgtaagtttacagcaatattgtagagggcaagttcatcgtacagttcctccaacggagatgcagattatagttgctaacaaaaaaaaggatagaaatgtagacttgtccgcgtacttttgacttcaaatttatcagcatgactgccccttaccacttatgaatgaaaaatatgtatttggccattcattcaaccgtcgctggaagaaagacatgcacgctattgtactgtattgttttacaaatcaaataaatagctctaatcgtgctaattcttttc

SEQ ID NO: 268928 - DNA, 437 bp, Zea mays
acgtccacgcgtccgtccacgcgtccgggctactgtagattccattcttttgagggagctccccggtgtagaagatgctgaagctaggcttgcactcaaaagattagttgacatcagcatgggcgtgctggcccccttatcggagcagttgacaaagccactcccacatgcaattgtacttgtcaacctcgacgaattgtcaagtggtgcacacaaacttttgccagaaggcactagactagctgtcactcttcgtggtgatgaatcatacgagcagctagatattcttaaggatgttgatgatataacaatgttgttacataatgttccatatgttgaggagaagacaggcagggtgcatgctgctaggaggttatttgagtacttacaggccaatggcttgaacttccctgtaattcatcacataaaattgcctg

SEQ ID NO: 268929 - DNA, 734 bp, Zea mays
  unsure (1)..(734): unsure at all n locations
ccgccgccggtggttcacaagcagccggtaggtactcaacccaaaccgcaacgagggcacggaacccaaattccagcacgactcctccagccagcagcccaagcgaacctagggcccttgagctccctcccgcatggcgttcccgtggtgcctctcggctccggccgccgtcccgcctgtggcgcccgcgcccggcacctttggcgtatccgcgtccgtcaccgccctcgcgcgtgtgccggttctcgccggtaggcggcgcaggtggagcacgctcgtggtctgcgcggcccccgacgaggagaagattaccaagcggtcgcccctcgatttccccatcgaatgggagagaccaaagcctgggaggagacctgatatcttccctaagttcagcccaatgaagacaccattaccgcatccgttaccagctgatgatcctctggatgatgatgaagaggaagaggaagaacaagcnccccctcaggaggagccacaagaggacgatccagacacggaagaacctgaggaagatgacccagataagccaaccgagtaattttcgattggcttaacagtgatagattaggcaatgggaaaaaatgtgctacgtctttggtgcgcgcaagagatctcagttctatttgaactgccggcttatataggctctagatgcataagtttgttatatgacctctgagcttttctaaagctatgaaagttttgttttacccacc

SEQ ID NO: 268930 - DNA, 1139 bp, Zea mays
cattctttttcttgcttcctttctttggactaacacctgagtctccgcgctacctttgtgcacaaaatagaatgtctgatgccacatctgttctagagagaatggccaacgcataccaatcagctcttcccccgggagttctcacgtacaatagacaaacaaaacgtgaccacgacgttctcgctcccgagagtgaatgtcttcttcctgtcagagagaaggaatgcacagttgacaatgccaagagctccgaatctggcagtcttgctgcactgcgcatgctattatcgcgcgaactgctcagatcaactctgcttctttggtttgttttctatgcaaattcctttgcttattacgggttagtattgctgacatcgcagttgagtgatgcaaataaaagttgtgcatctggtgtgtcttttggtctgcgccaaaaggaaatcaatctttacaaagacactttcatcactagtttagcagaaatcccacgtttatttttgtctgctcgtcttgttgattggtttggtcgaaaagcttcgatgtggtctatgatgttcgcatgctgtgctttccttggaccacttgtacttcaacagactgagttgttgacaactattcttctatttggtgcccgtgcatgtgccatggggagctttacagtcttgtgcctttatgctccagaggtgtatccaacatttgtccggtcaaccggtgcaggaattgcgaccgccattggtaggattggtggggttgtttgccctctcgttgctgtcgccatgctgcggagctgccatcagatggaagcactcattgtgtttgaggtgatattatgccttgctgcagttgcctgcatgttcttccctgtagagaccaagggccgtggaatggactgatgcaatatcaggcttcagcatctagatgagcttgtaggtcatcactcggtgctttatgccatcattatgtacagagaatatacatgtaacatggtgtggatagttcctcaaaatatgtgcaggactttccaaatttgtaagacagattttggactgaaagacagctggttctgtactgtcaaaacactgaaagacagagtcgtattactcctcaacatttcttgcaagccagaaccctttcgggcc

SEQ ID NO: 268931 - DNA, 1116 bp, Zea mays
tataatagcaaaaagctcctcccagcagtgcacgcgtgaagctcggcggcggccggcacggtgcatcctccgctcttgcctcacctcccggtccatcctcgctgctcacgcgtgcctcacctcgacagcagccttccctcgcgacagggataaggacttaaggaggcgtcgctcggtgcaaagaatccatggcatggggaggtctgttcttgtgcatgggccgccccacgcaggagcaacagaagtcctgccttgcagccgctggtggcttcaactacgacacagctctccaaggcgccacacgcccaaagtcagtgtctaccttgacctctgacgaagctggtggcgaaataggtgacaaggttcttaccgagcatggattctttgtgaaccgatcgcgtgttctggtcggctcaggttctgacgcctttgtccatgccaaatccgccctcctctcatggaggcacttggctttagggtgggcgaacgtggaaccggacaccccggtgaaggttggtacaaggttctgcatctgctacaaggagttgatcccctgggtgacgctgccgcttcagatagcgtatgtgaccgacgtcgattcagacacgtccaaagggtgctcccggtccaagatgtttgccttcggcagcggcactctacagggccatctgctggccggagaggagcggttctcggtacaggtggacgaggaggagcgggtgtggtacgaggtgctttctttctcgaagccggcgcacgtcctggcgacgctgtgctacccgtatgtgcagctgaggcagaagcatttcgcgcagcagtcgggacaggcgctcgtcaggcatgtgtccacctgctcttccaggcagtagcagtagtagagctttgtggagatgcactgcacagagaatgctgtatgtattccccctttgaattctattccgacatggcctggtttggcggcgctggggcctgggtgggatgatatatgttcgggcattccgagtggagattgcccatcccatattttaatttcttcatgatgggtggtggatctgttgcagctgaatgaattaagacaggaagatatataaaattcatgcgcacacagaatggccc

SEQ ID NO: 268932 - DNA, 851 bp, Zea mays
tactcctgcatgctgacgaactcagcctctcacgttacttagctgaaggtcgtactggtacagacaccgaggatggagcaagcaacaggtgtaagtggtcctgaacacataattgatattccaagggaaattggtcctcctgcttcggtttctcgtagtgctggtagagagaaccatgaagaatcgaatcctgtggacaggccttcaacaagagctctagtacctgccttgcaggcaccatcagcaataggtgctgtacctattacagggcatacttcaggcactaggagaaatgacaactatgttcgtcggcacagaagcccattgaattctggactgtggatttcaattgaagttattgttaactttagccagattgttgctgccattgttgttctttgtgtgtcaagaaaggaacacccacaagctccattacttgagtgggtcataggttacactgttggttgttttgcaacgttaccccatctctattggcgctatatacaccgtaatattgctaatggtgagcatgagtcatcacatacacctcaagggtccgctcataacaactcaaatgaagcgactcatgctgcaagtgcatcagaacgccgcagaaatgctgcccgaaatgctgtgcttgctaatcctaggatcaatgcgctgtttgaccacttcaagatggccctggattgtttctttgccgtctggtttgttgttggaaacgtgtggatatttggtggccgttcttctgctgctgatgcaccgaacttgtacaggtaaaatgtgaactgctcttcaattgaagagatgtcactatgtcagcttctttaacctgctgctgactttctact

SEQ ID NO: 268933 - DNA, 305 bp, Zea mays
  unsure (1)..(305): unsure at all n locations
gtnaatgctgtgcttgctaatcctaggatcaatgcgctgtttgaccacttcaagatggccctggattgtttctttgccgtctggtttgttgttggaaacgtgtggatatttggtggccgttcttctgctgctgatgcaccgaacttgtacaggttgtgcattgtgttcctcacttttagttgcattgggtatgccatgccattcatcctatgtgcaatgatatgctgttgccttccctgcattatatctattatgggttttagagaagatacaaacaatacaaggggtgcttcctcagaatctat

SEQ ID NO: 268934 - DNA, 270 bp, Zea mays
tttatgagtttatctaggttcgtagagaatgaggtggaggggactgggtttggtagagacacaggaaggcaagagggttcaggggaaaaaaaatcaggtgtagcttttgtaactgcaaaatgattgcagcaggtatacctgaagcctgagcttctgaggccctgtgcttggtagccgaaggagaggttacttgatgtgtgtgcttatagtcagtggcgagcggctactacaaggtgtcaaggttcacccatatggtcatctaaagcactg

SEQ ID NO: 268935 - DNA, 451 bp, Zea mays
  unsure (1)..(451): unsure at all n locations
caaacagcagtagccatgcgtgtttccgttctcgccgattgcctcaacaacatccacagcgctnataagcgtggaaagcggcaagtgcttatccntccttcctccaaggttatcgtccgattccttaccgtcatgcaaaagcacggctacgttgaggagttcgaggagatcgacgaccaccgatccggcaagatcgtcgtccaactcaacggtcgcatcaaccaagaccggagtcatctctccccgattcaacattcaattgtctcaaattgaaaactgggtcaacttgttgctccccgcccgttcgttcggttacatcatcttgaccacctcggctggtatcatggaccacgaggaggctcgtcgcaagcacgttgccggaaagatcctcggattcgtctactaaactagtcaaatacccgtctgggttcctttcttggggttatctgag

SEQ ID NO: 268936 - DNA, 643 bp, Zea mays
gcgttgcaggcgctgagcaacgggcagtaccggagcgtgtggcaccgcgcggtggtgaactcggaccgggagcgcatgtccgtggcgtcgttcctgtgcccgtgcaaccacgtcgtgctcggccccgcgcggaagctcgtcaccgaggacaccccggccgtgtacaggaactacacgtacgacgagtactacgccaagttctggagcaggaacctggaccaggagcactgcctcgagctcttcagaacctagcgaatcggatacggatggatggatacattacatacgcgccctctgtttttctccatgacgttagaagaacacgttctgcaatgtttgtccattcaaggtggtatcaatcaaggctgtggtcgttgcaattcttccgatccatatacatgattaaatgctttgaaagaaaaagaaaaaaagaaacacacgtattatggcactactagtgtttttaggaacaaggaaagaggggttgccccttgctggctttatatattaaatattaattaaggtaaggctgttgaccttggtgaattaaaaatatcacaaaccttccctttttttttatttccatgattatattttatataatgttttttaatattttttattagaataccctttttaatgt

SEQ ID NO: 268937 - DNA, 747 bp, Zea mays
cggacgcgtgggtctgccttggctacttcatattccgtaatcagctttttaatgtatatgcgccaaagtatgatactggagggaaattttggcccgttgtgcacaacacaacgatattctctctgggtgttctgcatataattgctattggagtatctgggataaagaagcttccccttgcgtccagtttgctacttcccctaccaccgctgacccttctgttcaacgaattctgccggaacagatttctgcctatctttgaagcatactctaccgagtctttgctaaagaaagatagagaagaacagagcaaaccagatatggcggagttcttcagtaatcttgtaacagcttactgtgacccagctctgaaacctttccaacgggcttctaactccgacgaacgcaccgcgccgctcttggcctctctgtctagctccagataagctgtggatggcagctgactccgctgtgtgaatttcgatttgattttggtgtttagatacggctagtagcataggtataattttatgctacattgtaagagtagaacttttgacagacatatagtttcttattgttgttgtctgttgtgcaattttttgcccttctggtgtgggggggagttcgttgtacatatgtgaatgtacatgatattttgtgcacttctcagagatgaattgctcgttttatgatgtgttggcaacgcaaaaaaaaaaaaaaaaagggcggccgctcgcaataaag

SEQ ID NO: 268938 - DNA, 401 bp, Zea mays
aaacagactttatgcttttctcaagtatccaaggaagaacaggcaagttggtagtaggtagtcctgtacaattttatccaaaatatggtcagagattacgacttagtcctgctgcccagcatgtgcctctctatttttctgagaccagcagttggtagtaggtaatcatgtacatttttatccatgctctgaccatattttgaaatcagatgacatgcatttgctgcttttgagtactgtgtacctcatatgtgcaaaaataatctctgaccatattttgaaatcagatgtcatgtattttgctgttttccccctccccctttttgaggtggtgtgcctcatatgtggaaaccttttagctgtaattaaaaatgttggatacagtaaatatttcacacaga

SEQ ID NO: 268939 - DNA, 802 bp, Zea mays
ggtacttctcgatggagggcctggatgtcgtggacccgaggacgattgtgcccgtcccggccgacggcaagtcgtacggcgagatcgtgctgcggggcaacgccgtgatgaaggggtacctcaagaaccccagggcgaacgcggaggcgttcgcgcggcgcggtggtaccactcgggcgacctcggcgtgaagcaccccgacgggtacgtcgaggtgagggaccggatgaaggacgtgatcatctccggaggggagaacatcagcagcctcgaggtcgagaaggtgctgtgcgcgcacccggcggtgctcgaggtctcggtggtcgccagggccgacgagcggtggggcgagtcgccgtgcgcgttcgtgacgctcaaggacggagcagcagccgacgggtcggacgaggcggcgctggccaacgacatcatgcgcttctgccgggagaggatgccggggtactgggtgcccaagtcggtcatcttcgggccgctgcccaagacggccacggggaagatcaagaagcacgagctgagggccagggccaaagagctcggccctgtgaagaagagcaggatgtgagagatctgggggcgacggcgatagcgtgtgatgccatggcaacaactcagaatcttgctccaagtcgtgcatataaaattcctgagttctgaagatgcctaataacttgagtgctttgcttgtattgttctgaaaccagaagttcagaccagatccgatatataagtaagaactgtatcagattgtccggtttgcaggaaacagatgcggccctaccgc

SEQ ID NO: 268940 - DNA, 1127 bp, Zea mays
  unsure (1)..(1127): unsure at all n locations
cacgcgnccgttcttttttttgngcccancgaggacacgaagggggaactttagtagctagtggcagacggaacggccaagtacattgggttatccgaagcatctgcatcaacaatccgaagagctcacgcagtccatcctatcactgcagtacagcttgaatggtcattatggtctagagatgtggaagaagatataattcccacttgcagagaacttggaattggaattgtagcttacagtccactaggcagagggtttttttgtagtggagcaaaactagttgactcactgtcagagcaggacttccgcaagcatatgcctagacttcaaccagagaatattgtcaagaatgctaagatattcgagcatgtgaatgcaatggcagctaaaaaaggatgcacaccatcacagctagcattggcatgggttcaccatcagggaaacgatgtttgccccatacctggaacaacaaaaatcgagaacttcaaccagaacgtgggggcgctttctgtgaagttgacaccagatgagatggccgaactcgagtcctgtgctgctgcaggtgaaatcttgggtgaccgttatcctcaaatggccaacacctggaaggactctgagaccccgccattgtcttcttggaaatctgagtagccaatctggtgtctcttcaattctgccaccgtcacattggtgtatctccaaattgtcggactgcagaagatactcaggtgcactttgcaaaagcgtccatatgatgtgcttgccttttgcaagctatgatgtttggtacttggtgtgtattgcatgcctcaatttgtatcaagagtatttacccatgagtatagcttgaaggttaaaaccactggttcgacgaataaccatatgcatttgtatcgagagtatttaccatgagtagcaaactgaattttgtaataatagtcaaaagtgtgattgtaaaatgtacttagggaatgtggtacgctatattagcgtgcaaacataagtatagccagttaagcccctccattttagtctcatttagtctctaaattgcttaacggtgggactaaaatagggactaaattgttttagtctctagtcacttaaggcatgactatgagaga

SEQ ID NO: 268941 - DNA, 944 bp, Zea mays
acgcgtccacccaagcgtccgcgctggccgccgccgtcatgtcgctcacctaccccaccatcgcgtggggcgcgtcggtggacaagggcaggatggcgggcgtggactaccacctgcgcgcgaccacgacccccggcaaggtgttcggcttcttcggcgcgctgggcgacgtggcgttcgcctacgccggccacaacgtggtgctggagatccaggccaccatcccgtccacccccgacaagccgtccaagaagcccatgtggaagggcgtcgtcgtcgcctacgtcgtcgtcgcgctctgctacttccccgtcgcgctcatcggctactgggcgttcggcaacagcgtccaggacaacatcctcatcacgctcagcaagcccaggtggctcatcgcgctcgccaacatgatggtcgtcatccacgtcattggcagctaccagatctacgccatgccggtgtttgacatgatagagaccgtgctggtgaagaagctgcgcttccctcccggcctcacgctgcgtctgatcgctcggaccctctatgttgcgttcacgatgttcatagccatcaccttccccttcttcggtgggctgctcggtttcttcggcgggttcgccttcgcgccgaccacctatttccttccctgcgtcatgtggctcgcaatctacaagcccaagaggttcagcctctcctggttgaccaactggatgtgcatcattcttggggtgctcctgatgattctgtcgcccatcggagggctccggcaaataataatggacgcgaaaacctaccagttctactcgtgagctaccaccagccatgacttgtaagcacgattggagaaatctgtcaaagcctcaaccacgagtttttgcttttggtttttgtcatgccaaacacatacatatacgtactgtttttttaatattcaaaggtgttct

SEQ ID NO: 268942 - DNA, 752 bp, Zea mays
cccacgcgtccgcccacgcgtccgataagcttcaagatgtgcttccacctgaaattggtgaactgaagaaactgacacacttgtatttgagcttcaacaacttcaaaggcgagattccggtggggcttgcaaacctgccagaactccgttacctttatcttcacgagaaccgcttcaccgggcgaatcccccctgaacttggaacgctaaagaacctacgtcacctcgacgtgggcaacaaccacctgacaggcactctcagggattttatcggcaacgggaacggcttcccgtccctgagaaatctataccttaacaacaatgagctgactggtgtgctgccagaccagattgcaaacctgacaaaccttgagattctgcacttgtccaataacaagatgatcgggtcgatatcgcctaagctagttcacattccaaggctgatctacttgtacttggacaataacaacttcattgggaggataccggaagggttgtacaggcatccatttctgaaggagctgtccatccaaggaaaccacttcagaccaggaaccagatcgaagggaacgcacaaggtgctggaactgcctgacgcccacattctagtctagcaagctcgtttagggggcctgaggtcttggcgtcctgcagtagtagactgctgccgctgcggtaccaggatcacttctgtctgtcgctgtactattccgtggcaaaactacagttgagaaaaaaaaattctcttggaa

SEQ ID NO: 268943 - DNA, 505 bp, Zea mays
gttcaggacaggccattggaaacaacaagggcttggaccctcgtgataatgctgctaatcggggcagccggctgagtcatcatcaccgtggcaggtactcccaaatcagtgaatcttggctacttagttcaagtcactctaggagtaggtctgatagatttggcagcggtgggtcatcaagatcaacttcaaaggggcaatctaggggctaatgtaaattgtcaagtgcaggagagaaaggatgcatcttgtagctaacctgcatccttgatctctgcagcaggaatagttttctttttaaaattctttgtcatatctttgcagtttgtataggctaattacagtttagtccactcagactgtagcaaggagcatatatgtttagcatagaggtatttgactgcccatgcccaaggagtagattcagctcttgggcatggtctgtatcatcctgacattctgttggatggagctgcaattgtgcaaccggcatctcttgacaccg

SEQ ID NO: 268944 - DNA, 408 bp, Zea mays
gttctgctagatttgccaacggtgggtcatcaagatcaacttcaaagggtcaaactaggggctaatgtaaattctcgggtgcaggatgaaaggatgcatcttgtagctacctgcatccttgatctctgcagcaggaataggttttaaaattctctgttatatctttgcagtttgtataggctaattaaaattaagtcaacagagagcgtaaatgaccatctctgctccactcaactcaactgtagcaaggagcatatgtttagcatagaggtttgactgaatggccctgcccaagaagcagattcagctcttgggcatggtctgtatcatcctgacattctgttggatggaactgcaattgtgcaaccggcatctcttgacaccgaaaaaaaaaaaaaaaaaaaataa

SEQ ID NO: 268945 - DNA, 533 bp, Zea mays
taccacgcgtccacccacgcgttccacccacgcgtccgcggacgcgtgggctccatctccgtctccgtctccacaccgtgccgtagctgctgctgtccgtgtccctcgcctcgaagaagacaactccaacactgttgccgcgtgactgctgaattcgctccgcacacgcgcgaacccagcaaggcaagaacacgaacgagagagagagagagacagggaggggtcatccatccatcagaccatcacccatggacaaccttaaggagcagcggggccacgatgccgcgggcgccaacagcggcgtctggatgacggtgccggcgttcggggactgggacaccaagaacggcgcgctgccggactactccatggacttctccaagatccgcgagatgcgcaagcagaacaagaaggagctctcccgcgccagcctcggcggcgacgacgacctcttcggccacgcccacgcccacgcccagaagccgcaggccaacagcgcccagcccaagctcgggcgtccctgccccgccgcg

SEQ ID NO: 268946 - DNA, 775 bp, Zea mays
ctttaaataaaccggcgtctcctgccctggcggggacgccgctgctgacagggcacctgatcgattgatttcctcgggcagtcagcggcgctcaagagtcacgagcttactggttgtaagcaacgatcgacgaacgaaggggtgtagggagtggaagcaagaggctcagcgttctgttcatggagagccgcaaggaggagcaggcggcggtggggtggatgacggtgccggcgttcggggagtgggacgtgaagaacggcgccgtgccggactactccatggacttctccaagatccgcgagatgcgcaacagaacaggcgcgagctctcccgggccagcctcggcggcggcgacgacgacgacgacgacctactccagaagaagcagcagcagcagcaggaggagggaagcaaggcccagccgcgcaacaagccctccgccgccgtcgcggacgacgcccaccgtcgagcgctgcacgacgactcccctacggggaggaagaagttcctgagctatttccagtgctgtaccagagcgtgaagaaaactcccaagacttcttcttcctctgctgcgctgcgcaggtagctgcatgtttgggtttccttctgtactccagcagtgtgctaaagcatgtctgcgtagttaaagtgtgtgatcctgtcacccatgccaagcatgagagaggggaggaacgcccatggctcacagcttctagtgcagtgtggtctgagaaaaaaagattggatctgatgaagaagggtgtggcttgtgt

SEQ ID NO: 268947 - DNA, 430 bp, Zea mays
atttgcttcaccacaccttcatcagagagccgagacgacacgctcgagacccagcaaggcaagaagaacacgagagagacaggaggcaccaggcagggatcaatcatccgtccatggagaacctaaaggagcagcggggccacgacgcggcgggcgccaacgcctggatgacggtgccggcgttcggggactgggacacgaagaacggcgcgctgccggactactccatggacttctccaagatccgcgagatgcgcaagcagaacaagaaggagctctcccgcgccagcctcggcggcgacgacgacctcctcgcccacgcccagaagccgcagcccagtatcgccccgcccaagctcggccgcccccgccccggccccgccgacgaccactccccaacgggagggaagaagttcctgagctacttccg

SEQ ID NO: 268948 - DNA, 1739 bp, Zea mays
  unsure (1)..(1739): unsure at all n locations
cccacgcgttctccctcgcgtccgcttgctgcctcatccattccagagctgcgaagacagacagacagagagaaagagggatcgacggagcaaggcggggccgtgtccggtcacacacgagcgagccctctcggccgcgcgtttgtgaatggtgaacggcgagcggcgggcggacgcggagtgcacgcgggcgtcgctgctggggaggtatgagatcgggcggaccctcggcgagggcaacttcggcaaggtgaagtacgcgcgccacatcgccagcggcggccacttcgccatcaagatcctcgaccgcagcaagatcctctccctccgcatcgacgaccagatcaggagggagatcgggacgctcaagctgctcaagcacccgaatgtcgtccgcttgcacgaggttgctgccagtaaaacgaagatctacatggtgcttgagtttgtcaacggcggcgagctcttcgacaagatcgctatcaaggggaaactgtccgaacacgagggcaggaggctcttccagcagctaatcgacggcgtcactattgccatgacagaggtgtctaccaccgagacctcaagccagagaatgtccttgttgatcggaagggcaccatcaagatctctgacttcggcctcagcgctctacctcaacatctcgggagtgacggacttctgcacacaacatgtggcagccccaactacatagctcctgaggttctgcaaaacagaggctatgacggctccttgtcagatctctggtcgtgtggggtgatcctctacgtgatgcttgttggctgccttcccttcgacgacaggaacctcgtcgttctttatcagaagattttcaagggagactgtcagatccccaagtggctttcgcctgccgcgcaggaccttctcaagaggatcctccaaccgaatccgatgaagaggatcaacgtcgcggggatcagggagcacgagtggttcaagaaggactacgtgcctgctgttccgcacgatgatgacgaagacgtccttcctagtccagctccctcgataaagccaatcgatgagccggcgcaagagaagtgttctcctatcaacgcttttcagttgatcgggatggcctcttcccttgacctttctggtttcttcgaggaagaggatgcagcgcaaagaaagattcggttcacttcgacgcacccacccaaggatctatttgacaagatcgagagcgttgtcatggagatgggattcaaagtccataggggggcaggcaagctcaaggtcttgaagaatagcaagtgttccaggaacccgtcatcattgttggtgtgcaccgaggtgtttgagctcggtccatcattatatgtcgtagagcttaggaaatcccacggagactctacgttgtatagacagctgtgcgaaaggctctccgatgagctaggtgcctgcaagacagaccagatcgcgaggactgaatcatcgagtgacgacctctcgagcgtcgatggcgaagcgttccctctatctgggttctgatcatattgctttccctgtgttgttttgggaacaggggatgaggaacatgctcgttcctgatgcaattctagattaggatcatgaatatagtgtacaaagccagcggcggcggcggtgcaaattagccaccgggttgaatataaataatatatatatattatatgaagcattcccaaaaaaaaaaaaaaaaaaaaaaaaaaaaaanaaaa

SEQ ID NO: 268949 - DNA, 892 bp, Zea mays
  unsure (1)..(892): unsure at all n locations
tagagggaacgttcgccatcgaggctcgagaggtcgtcactcgatgattcagtctncgcgatctggtctgtcttgcaggcacctagctcatcggagagcctttcgcacagctgtctatacaacgtagagtctccgtgggatttcctaagctctacgacatataatgatggaccgagctcaaacacctcggtgcacaccaacaatgatgacgggttcctggagttcctggaacacttgctattcttcaagaccttgagcttgcctgcccccctatggactttgaatcccatctccatgacaacgctctcgatcttgtcaaatagatccttgggtgggtgcgtcgaagtgaaccgaatctttctttgcgctgcatcctcttcctcgaagaaaccagaaagatcaagggaagaggccatcccgatcaactgaaaagcgttgataggagtacacttctcctgcgccggctcatcgattggctcctttatcgagggagctggactgggaaggacgtcttcgtcatcatcgtgcggaacagcaggcacgtagtccttcttgaaccactcgtgctccctgatccccgcgacgttgatcctcttcatcggattcggttggaggatcctcttgagaaggtcctgcgcggcaggcgaaagccacttggggatctggcagtctcccttgaaaatcttctgataaagaacgacgaggttcctgtcgtcgaagggaaggcagccaacaagcatcacgtagaggatcaccccacaagaccagagatctgacaaggagccgtcatagcctctgttttgcagaacctcaggagctatgtagctggggctgccacatgctgtgcgcagaagtccgtcactcccgagatgttgaggtagagcgctgaggc

SEQ ID NO: 268950 - DNA, 571 bp, Zea mays
acgactgtgacgaggctagaggggatattaggaggtaggacttattgccccccgcccccttccaccctttgcttccacctccctcccttgctgcctcatccattccagagctgcgaggcagacagagagacagacagacagacagacagacagagagagggatcgacggagcaaggcggggccgtgtccggtcacacgagcgagccctctcggccgcgcgtttgtgaatggtgaacggcgagcagcgggcggacgcggagtgcacgcgggcgtcgctgctggggaggtatgagatcgggcggaccctcggcgagggcaacttcggcaaggtgaagtacgcgcgccacatcgccaccggcggccacttcgccatcaagatcctcgaccgcagcaagatcctctccctccgcatcgacgaccagatcaggagggagatcgggacgctcaagctgctcaagcacccgaatgtcgtccgcttgcacgaggttgctgccagtaaaacgaagatctacaaggtgcttgagtttgtgaacggcggcgagctctttacaagatcgtatcaggggaaact

SEQ ID NO: 268951 - DNA, 1028 bp, Zea mays
  unsure (1)..(1028): unsure at all n locations
cccacgcgtccgcggaaaaggggccagcggtaccgtaccagtcgtccagttacctgacgcagcagctcagcagcaacatggcgcagagaaccgccgccgccgcctcctcttctgcgtcaggctacggcgttcagagaccccctggtctaagtctaacaacagcccagacgaaattcacgtcgctccggccgttgccgccttcggtcgtcccttcccatgcctacggcgcgccgnctcacggacccgtcaccgtctttcacccgtcagctcctcccgtgccgtatccagcgagcaattctggcggtcctggcagcagcgacgcggtgttggagatcgagagcgtgaggtggagcgtggtgggatcgaagcctgagggctcggagcgtctgaggagctgcaaaagggcagcagagatggacgccgacgtgtccgtggcgttgctgaagaagcctctcaccgtcgccgccgccgccgcagcacggcaggggctagatatgttgctaccggtcgcagagacggcgccggagttccgtggatccaccaggccggagccggaggcgcagccgcggcctagtggtacgagtacgacgcctatttgtgtcgacgacgagccttgagctgatgatcttcgacttggagacgcaggcaggatcgcgtcccacacggtcatcgaaagatgtcagcgcgatggtaaggtactactactactaccagtggagctgaaacctggagcgaagcgcgtgtatggcagtcagcagccaagtgccagcagcagcgtgtgccagccagggaaatcccctggcctgtgcgcgcgttcggttacaccgctagccccccgaggaggcgcgggaggtcagcatgcatgttctaggtgtggtctttggccctctttgttcacctgtatacattgaaacactcatcagtggtttttggctggaagggggaccggggcagggccagagcctgcctttctgctgtaaaaaaaaaaaaaaaagggcggccctcgcgtctagaacggacgcgtggca

SEQ ID NO: 268952 - DNA, 1072 bp, Zea mays
cagcacgcatcactatagtctatagctcagaagatccggtccattttccagctctaaaactaaggcatagcggtaaacaccaccgaagtctcagcttctccgaggaaggggcgcaattgctgaagcagccacttcaccttggggccatacagaaatggcggcttcttgcgcctccacactcccttcactttccttcgtttcctcctccagttcaccccgccgattcaggcgctctggtgtggtggccatggccagcgttgggcagaaggtgtatgcgcccggtgtggcggtgtcggagggcaatggcgggctgccgaaaatcgacctcaaatccccgcacgggagcgaggctgagatttatctgtttggagcgtgtgttacttctttcaaagtccctaatggcaaggacctgctctttgttcgaccagatgctgtgtttaatggacagaaacccatcagcggtggaattccacattgtttcccccagtttggcccaggtcccatgcagcagcatgggtttgcacggaatgtgaattggtctatcacagattcagaagtcacagaaggagatccagctgtaactttggaactgaaagatgacacttatagccgttctatgtgggatttcagcttccatgcactgtacaaggtttccctgcactctaaaagcttgtcaacaactctagcaataataaatacagatgacaagcctttctcattcaactcagccctccacacttatttcagtgcttccataactggcgtttctgtgaaaggtctaaaaggttgcaagactctcaataaggaccctgacccgaaaaatcctttggagggcaaagaagagagggaagaggtgacttttccaggattcgtcgactgcgtctaccttggtgcaccaagtgaactcatcctggacaatggattgggtgacaaaattgccattgcaaattcaaattggtcagatgcagtcttgtggaatcctcacttgcagatggaggcctgctacaaagattttgtctgtgtggaaaacgccaagattgacatggtacaactggagccaaaacaatcttgg

SEQ ID NO: 268953 - DNA, 910 bp, Zea mays
  unsure (1)..(910): unsure at all n locations
tgcgtgaatagctgagttgtcggtgggtgttcctttgtccgctctatcgaggtttgggatctacagacaggtttctgcaagagcaccataatgtccgcgagcaaccccaactcgctagctctcatcgatggtgacaccatctgttcgggtcacacggatctgaatgtaggggcgcatgatttacataaagggaagtcgccgactcagaccgccgatcctatgaatgatgatcacttgtcggatcgaacgggcttggagccggcgactcctcatggaagagatagcccgcacaaccttttagaggttggaacgctggagatttgtggaacattcagggccatgggcaacagagtggtgagcagctggggcaaaccttctattagccccgacgaaaactgcatcgctgctggttcttctgatggatctgtttacatatggtcgaggctgaagaatggaacgccgaccatcctagagggtcattcttcacccgtcctggcaagtgcatggtgcggactaggagctcttgctacctccgacaggaaccatatctatatctggtcttgagagatgtacaatttcatcaaggcgtggaaactggagagtttcgcatcatcagtatgctaatatgtgttctcttcatttcttgatgacactagttttcatgtgattatgtgaacggattaactggttctgatttctgaacgttgtaaatatcagaagtgattgttcatcgtagtgatgactacttcagttcgccatatgtgtgatggtttgcaaggttttgatggctgaaatttcttggtattgacggctcaggtttgctgttattttaagggtaaacttttgggacaccagtcaaacaacattgacttgggaatagttttgaatgttaaaaaaaaaaaaaaaanaa

SEQ ID NO: 268954 - DNA, 899 bp, Zea mays
aaacacaatgaagaaatattgtcaggttgctagattaaaccctgagaagtccatcccatcatctattctcaagggggcgaagggacttgcaattctaacagttgccaaggcaggtgcagttcttacatacaaagttggcactggtcttgtggttgctcgcagatctgatggatcatggtctgctccctctgcaattttatctgttggcctgggatggggagtgcagattggaggagaactgacagacttcatcattgtgcttcatgaccgtaaagctgtccaggctttcagcagtcgcattcatctttcacttggggcaggattgagtgctgcagcaggacccattggcagagcatttgaggcagacgttcgggccagtgaaaagggttctgggatatgctacacttacagctgcaccaaaggtgccttcgttggggtttcactggaagggaatgtggtgacaaccagaatggagaccaatctacgcttctacggtgatgcatacctgacggcaaccgatatcctgtttgggagggtggagcggccccgagctgcccagcccttgtactcagctctagatgatctgttctccaaaatggtttgctagcccatttagattggcgtgatactctgcattggtggcatgcagtcatgtatgtatataaacataaggtagcagcaaaaatcctaaacaggagatatggaagcggaaagaatgtacagcttttgatggatggtttcactactgatagcagtccatacatgtaaatattggcagaagaagatttaagggctgtttggttcgcacactactgatatcagtacgctgcagtgtgccactggtggactcatccatgcaatggaaaattttaatacatttgttagttcgtttgtggctt

SEQ ID NO: 268955 - DNA, 882 bp, Zea mays
cagaacagaaccatcgatcgagcttggttgctcggcagcagctagcaatggccgccaagggaggtgatgagctgaagctgctgggcgtgtgggacagcccgtacgtcaacagggtccagatcgtgctcaacctcaagggcctcagctacgagtacgtggaggaggacctcctcagcaagagcgagctcctcctcaattccaacccggtgcacaagaaagtgcccgtgctcatccacgccggcaagccggtcgccgagtcgcaggccatcgttcagtacctcgacgaggctttccccggcggcacgtgcccgtcggtcctcccagccgacccctacgcacgcgccaccgcccgcttctgggccgccttcgtcgacgacaaggtcgggtctccatggcacacggtcctgttcgcgcgggagcacgggaagaaggcggacgcggcgtcgcggatcgtcgcggcgctggagacgctggagggcgcgttcaaggactgctccggcgggagggactacttcggcggcggcgccatcggcttcgtggacgtggtcctcggcagctacctgggctggttcaaggtgttcgagaagatggtcggcgtcagggtcctggacgtggcgaggacgccgctcctcgccgcgtggggggagcgtttcgcggcggcggaagcggccaaggacgtcctgccggatgacgttgataaggtgctcgagttccttcagaagttcctggactagactaggtgcgcgccaccatgtgctcggtgctctggtgtccaacccgatgtttgtttgctttggtcattttccgtgcgctgttaatgggcctcggatgtttgccagttgattttatagaatcttaatctctactacctattaagagagt

SEQ ID NO: 268956 - DNA, 879 bp, Zea mays
cccacgcgtccgcctgctcatgatggcgtccgccaactgcagcgacctcattggcggcgccgaccgggtgggtgataccgacgaacaactgctctgggactgtgctgcgccctcggtgccgcccacccagatatgggacttcaatttaggacggtcaaggcatcacgatgagaaatctgctcttgaagttggatacggttctaaccatggaggctttatgattaagaggtacagtgacatgcttaaggaaatttcttcggggacaacgaaagatctggaagatatttatgaatcaagatactgctcaaccgccgaagatatcatgtcctctaatatctgtcagctgtcatcgaaaaatgtgagcaccgggagcaacaaacggaaggtgaggtcatgtgctgcgtcgacgatggatggaccaacgacctccgggaaccacaaccacgtacccgcttcagcttcaggtccaggagcagcgctcaccagggagatctccttcggggatcagacggtgtccgcccccgcggccgagaccgagaggcctgccgccgtgaggatcgacagcgagacgcttgcgcagaacagggacagcgccatgcagcggtacagggagaagaagaagaaccgcaggtacgagaagcacatccggtacgagtcgaggaagctgcgggcggacacgaggaagcgggtgaaagggcggttcgtcaagtccaccgaagcactcaacgccgccaggtacggcggatgaggcagccatatatatatgcatggcctgtgaagcccgcgtgtctgctgcacgcctgcgttagcaacggagagctaggcactgctacctggagatggtacggattgctacgtacgtatgtatggcgcggccgg

SEQ ID NO: 268957 - DNA, 576 bp, Zea mays
cggctcgagcggatccatgagctgatcttgatgacccttacctacctagcttgcctgctgcgacttgtgcggtattaagaataggctgttacatgttgtgtcccatcatatcgttcgtgtccgcaggtacgagaagcacatccggtacgagtcgaggaagctgcgggcggacacgaggaagcgggtgaaagggcggttcgtcaagtcgaccgaagcactcaacgccgccagatacaacggatgaggcagccatatatatatatatatatgcatggcctgcggagcccgcgaagtttgctgcccgcctgcgttattacgtgcggtagctacggatgaacggggagctaggtactgctacctggaggtgctacgtatgtatggcgcggccggaatcgctacgcacgcggcccaagtttaattttgcgttgaagctatagcgatcgtggccattgttgggcagtcaactccagagattgcacggtactgcttgtttgtaacagacgaccctccctttccccttttttctctgttgttgccgtcatccccaccagaacagaaagtatgtagcttacctac

SEQ ID NO: 268958 - DNA, 2153 bp, Zea mays
  unsure (1)..(2153): unsure at all n locations
gtgtgttcccacacatctgcaacgagagggtacttttcaatgtgacggggactacgacgcctcgggatatatccttaaagccgcaatagttattgatgacatattctatgaacaggtatcgaataggaacaaaatgcttagagactggctgaaaggacattctgaattctcaccattcgataaattgaagtgggcatattattctattaataagagtacctggtcctgccttgatgaaaataaggcttttctatcgaccgcagattctgctgtgcaattactcacagaagccaccaaaccagtttcaggatggaaggggattgagtatcgagcagcatttcctctacataagcctcccggtgctaacttctatcctcctgacatggacaaagcggagtttgaactttggaagagtaaactgacagataaagaacaaaatgatgccactgggtttttcaccgtcataaaacgacatgactctctgtcttcatcgtcattaacacaatcagatggatcggatcagaccaagactaaagatgatctttttattgttccatactccaaggagtatagaccattcctagagaaagcagctgagcttcttgagaaagcatcagcgtgctctgattctccaagcctcaagaatttgctgagaaccaaggcgaatgctttcctttcaaatgattactatgaatccgatatagcttggatggaattggactccaacttagatctcacaattggcccatatgaaacatatgaagatagcctttttagttataaggcaacttttgaagcatttgtcggaatacgtgatgacacagcaacttctcaagttaaactctttggtgatcagctccaggatttggagaaaaaccttccaatggacaatattttcaaatcagatagtatatctgctgctcctattcgtgtgatcaatcttctctacaatgctggggatgtgaagggtccacaaaccattgctttcaatttgcccaatgatgaaaggattgtgaatgaacgaggaacttccatggttatgctcaaaaacatttcagaagccaagttcaagcatatcttaaagcctatagctgatgcctgcatcagagaggaacaaaaggaatatgttgatttcgagccatattatacacatatagtctgtcatgaatgctgccatggaattggacctcattctatcacccttccaagtggtaaaaaaacaacagttagaagggaacttcaagaattccattcagcattggaggaggcaaaagctgatatagttggtctctgggcactgaatttccttattaagaagggattgcttcctaagagcctgtcacaatctatgtatgtctctttcctggctggctgcttccggtcaatccgctttgggctggaagaagctcacggaaaaggacaagctctgcagtttaactggttgtatgagaaaggggcttttgtgttgcagtctgacggaaaattctcagttgattttacaatggttgaggatgctgtagaaagcctgagcagggagatactgacaatacacgcaaagggcgataagccttctgcccaatctcttctccagtcccgtgcaacattgacacaaccattgagaatggcattggagaggatagagcacatgcgggtccctgtggacatagccccggtattcagcacggcaaacaagctatttgcagacatttaactatttgggctcagaatcgttgtgctttagtaccgcccacaatacctggacgaaaccaggaattgctcaagaataaggcggcgctaggaattgctcaagaataaggaagcgccccatgtcaagcaaagctgatagaaccatggcgatatgtgagtggcctttttatcggaaggaaaattgtttgcatgcttatgtattgacctcaatttttacgtattggagtgatttgatgtgaaatttaaccaaattccacgtccagtacatggccatccaaacatggcctaaagtggtgtttgatcagtgagaattggaataaacccagctttgcctgaacagttgcgaagtactgagttacatcaatgcatattttgtaaccccaaaaaaagatgtattatcccaatggatgattaaacgaaaaaaaaaaaaaaaaaaaaaanaaaaa

SEQ ID NO: 268959 - DNA, 277 bp, Zea mays
attccttatgatgtgaacgggcaatatggtcaactgtttagcattattgaagaaaggtagaaagagaatacagagtcagagagtttaactttgcattagcaaatgaaccgttatgttcccatccatttggaaccagatttgactagtctctctgaaggagacagggaggccttgggatatatccttaaagccgcaatagttattgatgacatattctatgaacaggtatggtatagtaacaaaatgcttagagactggctgataggacattctgaat

SEQ ID NO: 268960 - DNA, 784 bp, Zea mays
tagtgaccggggtctctacgctgatatctctggtgcttgccattgtgatcctctgcctgcgcaactacatcagctacatcttcacggagggtgaggaagaatcaaacgcggtggcagatctctgcccactgcttgccatcacgctcgtcctcaacggcatccaacctgttctctcaggtgtcgccgttgggtgtgggtggcaagaattcgtagcctacgtgaacgttggctgctactacatagttggtgttcccctcggcgccatcctcgggtttgtcttcaagttcggtgtaaagggcatttggagtggcatgattggaggaactttcatgcagacggctatcttactgtgggccaccttgagaactgattggaacaaagaggtagaggaagcacagaaaaggttaaataaatgggcggattcgaagacgacagagccccttcttgttggtttcggcgatggcaactaatttactgcaagggtggatggatggatccacatcatcctctggcttcaccatcgtcaccatcaggaatctacgaaggatcagaagagacgacggagccccttcttgccggcgttggcgatggcaattaatttactggatggatgaatggatccacattattctctggatggcttcaccattgtcaccatcaggattgctaataaatcatgcggagggttattttagccagtaccaaacgtatttcgaggactctatatttcaatttaataaatatgtaccatttataatgaataaaatgagattcttcgtcattt

SEQ ID NO: 268961 - DNA, 1214 bp, Zea mays
  unsure (1)..(1214): unsure at all n locations
gtttagactcagcacacagcattcattcagctagcgagcgagagagaggggaacaaaaaggaggggcgaggaggacagggagccgagcgcaagagctgaggcttcgccgcgaaaccccagacctcgcgccgccccttcccctccgcggcgtcgtcctcgcacgctctccgatccaagatgtataagctggggagaggaaaccgcgacaaggtgcagcagttcatgaccattaccggcgccagtgagaaggttgcccttcaggcactgaaagctagtgattggcacttggaaggagcttttgacttcttctatagccaacctcaggtttctgtggtcaatactcggcatcttgaagatattttcaacagatataaagaacctgatgctgatatgataatggtggaaggaatatctcaattttgcaatgatctgcaggttgatcctcaggatattgtcatgcttgtcatatcatggcacatgaaagccgccacaatgtgtgaatttactcgtcaggaattcattggtggactgcagtcaattggggtagattcaatcgagaagtttcgtggaaaattaccatcattacgagctgagctaaaagatgacaataaattccgtgatatatacaactttgcattcacttgggcaagggaaaagggtcaaaagtctctctcactggagacttctattggaatgtggcagttgctatttgctgaaaggaactggcctcttctggatcattggtgtcagtttttacaggtcagacacaataaagccatatctagagacacatggtcccagctgctggaatttgtgaagacgaccgatccacagttatccaactacgacgacgaaggtgcctggccctacctcatagacgaatttgtggaatatctgactgagaacggactcgtccagcgtaaaagatgaacaacggggagatgcatctccaaacaatggttgggctgtacaaacatgatttatctcggtcagctcgacgcccagggcctgatattggcactcctgctcaattcattcaccaaactgttggcatatcattgaatttgcttataaacgtggggaaacataacttgcctgggaagtggtggctgtcagcctgcgatcgtgaactgtaacttatcgaaaatgcaacggagtttgggactctactatatgatttgtttcagtttttcttaaaaaaaaaaaaaaanaaa

SEQ ID NO: 268962 - DNA, 1301 bp, Zea mays
ccacggcctcacctttaacgcccgcaaggacctcatccatggtttcccgcagaagaccatctttgacagcctcgaggagaatggcctgtcttttggcatctactaccagaacatcccggccacgctcttctaccagagcctccgccgcctaaagcacctcattaagttccaccagtacagcctcaagttcaagttgcacgccaagttggggaagctgccaaattatgtggtgattgaacaaaggtactttgattgcgagatgttcccagcaaacgatgaccatccgtcgcatgatgtggcgagggggcagaggttcgtgaaagaggtgtatgagacactaagggccagtccgcagtggaacgagacggccctgattatcacatatgatgagcatggtggattctatgaccatgtacctacgccggtcgttggagtgccccagcctgatggaatagttgggcctgatccatactacttcaagttcgaacggcttggggtgcgtgttcccacctttctcatctcaccttggatagagaagggcactgtgatccatgaaccaaatggtccacaggatacctcgcaatatgagcattcgtccatccctgcaacagtaaagaagctattcaatttacattctaactttctgacaaagagagatgcatgggctgggacctttgagagctacttcaaaatccggaaaacaccaagaactgactgtccagagaagctcccagaggtgacgaagtcattgcgaccatttggtcccaaggaagattcgtctctctcggaatttcaagtggagttgattcaacttgcttcacagctcaacggtgatcacgtactgaacacgtacccagatattggcaggaccatgactgtcggggaagcaaaccgctacgcagaggatgctgtcgccagattcctggaagctggtcggattgctttgagagctggtgcgaatgaatctgctttggtgacgatgaggcccgctctcacaagcagggcctcaatgtcctctggtttatcatcagagctctagtagatggttccagtctgcccacaaattacacatcgccattcactctgattcagctcttgggtggtgtagtgcaaatatgatagtttggttctgtaaatagacagtcggtacatgtcaaagcctcaatgtgtagtggggatttctaaaagcaatttgtggggttgtgtgaattaagtctgtactgtacatgcttgtcaagcagctggactgcactctggagtaaatgtatgatactgtacagtaactgaattctcatgtctgt

SEQ ID NO: 268963 - DNA, 548 bp, Zea mays
agactgttaacaaaaacgaaggtcaactgatagtgtagcatgttctgctcctggagttatcaatgtggagaatgatggattttactagggtcctaaccagatttttttttctctcccaaacagagaagctcccagaggtgacaaagtcactgcgaccatttggtcccaaggaagattcgtctctctcagagttccaagtggagttgattcaacttgcctcgcagcttaacggcgaccatgtactgaacacgtacccagatattggcaggaccatgactgtcggggaagcgaaccgctacgcagaggatgctgtcgccaggttcctggaagctggtcggattgctttgagagctggtgcaaatgaatctgctttggtgacgatgaggcctgctctcaccagcagggcctcaatgtcctctggtttatcatcagagctctagtagattgctccggtctacccataaactacacattggcattcgctctgattcagctgtggctgaatcagagctcttgtgtaacgtggtaagagagcctaccacttggcg

SEQ ID NO: 268964 - DNA, 417 bp, Zea mays
gacccacgcgtccggacagggcacgcctctcaagcccgtcgtgcccgtcgacgtgtacgtgttcgcgctgttcaacaaggacttggagggcgggcccacatcagagcggaactacggcctgctctaccccgacggctcgccggtgtacgcgctcgacgccggcggtccgggcccgggcggctcgctcaacccgtactacacgtccatgttctcctcctcctcctcgtccggatcggcggtgggcgtaacctttttgacggagaaagtggtactatcactgctgctgcaagcaattgtaatactccgacgatcacattcgtactgttagactgttagtcagtgccatatactcttgtaatcttggatacgaaaaatatgcatttcaattcaaccataggggtggcctatattcgggaa

SEQ ID NO: 268965 - DNA, 807 bp, Zea mays
gtcatgcctaccacttggcttcgtgatctcagctgcctcagcttcatttcagctggtggaggcatggcatctatcgtcattggctcctgcttgttctgggtgggacttgttgatcacgttggcacagtcgagagtgaagggacggcactgaaccttcctggaatccccattgccatcgggttgtatgggtattgctactcaggccatggagtgttcccaaacatctactcttctctgaagaaaagcaaccagggccctgctgttcttttcacctgggtcgctctgtctactgttctgttcgctgctgctgcaatcatgggatacattatgttcggtgaatctacagagtcccaattcacactgaacttacccccaaatcttgtggcttccaagattgcggtctggactacggtgacgaatccaataaccaaatatgcgctgaccatgactcctctagccctgagtttggaggaactgctacctccaaataagcagacatacccgaacataatgatgcttagatccgctctggtggtatcttcccttattattgctctgtccgttccattttttggacttttcatgtcactggtcgagtcttttctcaccatgtttgtggcctatattctaccatgtgcctgctttttgtctatcctcaggagtaaagtgacctggtatcaggtagtactgtgtgtgttcatcattgtcgttggactttgctgtgttggtgttggcacgtactcttctctttctaagataatacaaaagtaccaatgaattgtgccctagaattatgtatgatgtgtc

SEQ ID NO: 268966 - DNA, 431 bp, Zea mays
caagaaaaggaggcatggttcttagttttccttgtacacgttatcaggtcttgatcgggtgtgacggcgtgcactcggtggtggcacggtggctgggcctgtcggaaccggcgagctcgggccggtctgccgtccgcggggtctgcgtcttccctggcgggcacggcgtaaagcgggagctccggcagttcctatcggagggtctcagagccggcatggtgcccatcagcgacaccgacatctactggttcctcgtcaacaacacggtcgccgcaggcaagtgaagtcactgccgcatgccacttcggtgccagtccttcagagctcagctcagacgcgcgcgtgctggtggtgcctgcgtttgcagagaaagaagccgccggggacccggtgaagaccctgcgcgaggtgaccgacaacctggccaggca

SEQ ID NO: 268967 - DNA, 539 bp, Zea mays
gcagataaggcgcgttgcgttatctaatccgtccaagaggctgcggtgctcgctcaggctcactgctcagtgctcactgctcactagctaaaaacatctcctttcttatccatggagacggcagcgctcacctcccactccctgcagcgcccagcagcagcagcagctgctcccgcgcatggccagcggcggagggtcggagcggcgggcctgcggcaccggcagccgcgcgccggcggcaggatccgggccctgccttcggcggaggtcatcagcgagatcctgagccccaagctggtgcccggctcgcccgccgacaccggcgacgtctcctcgctcgtcccggtcagtgccctgatgcatgctctcctacttcgcgtccaactgcgtggtgcccgagctgctcctgaagggcctcaaggagcccaagcccgaggacgaagcgtccacgtccttcgccgcgtccgcggacaacgccgccgccgctggcccagcagacgacggcggcgcccgtaagatccgcctcaaggtcaagaaga

SEQ ID NO: 268968 - DNA, 430 bp, Zea mays
  unsure (1)..(430): unsure at all n locations
cggnccggaattcccgggtcggcccacgcgtacgggatgaggctgaggtggtacaagcgcgaattcttggagacgtacctgcagttcatgttcaggtacctcttctacccagggatgatgttctgggcgccattcgtcaacttcaggaagttcccgagggatcccaccatgaagtacccttggtccaagccgaaggagggcacgccgctgttcaaagacagatacccgcctatagactcctagatacagccttgatgcttgtactcggctcgtcgcgcgccacgggcatgcaggcagcagcgaagaggccggtttcttcacctaaaaatctgtgtagaacattacgatatatcacacagtctaataatacccgtgctagtacatgggaaaggttactatctagaaaaatttttttaaaaaaaatttttta

SEQ ID NO: 268969 - DNA, 458 bp, Zea mays
  unsure (1)..(458): unsure at all n locations
gccgactcccaactagcccctcacgcgctcgtcggcgccctgtcgagtcgagcccgcatctcgcccgatcgagagcgagcgcagccgcgcgccggggagagctttgcttgctttcggtgttctgtaacgacttaacgacgacggcaggcggtagataaaggcgcgcgatgtgcgacgcggcgccgaggtacaggggcgtgcggaagcggccgtggggccggttcgcggcggagatccgggacccggcgaagcgcgcgcgcgtctggctcggcaccttcgactccgccgaggccgcggcgcgcgcctacgacgtggccgcgcgggccctgcgcggcccgctcgccaggaccaacttccccgcgctcgccaccacctcccgccgtcccgcgcccacgtgcagctccggctccaccgtcgagtcctccagcgggccccgcgccggggacccanggccaggg

SEQ ID NO: 268970 - DNA, 693 bp, Zea mays
cggacgcatgggcggacgcgtggggttttatgtttaatacttaacacagaaaaacttgtcaagctattcactgataaagcaagatcttgcaaaggctgtgccagaggagcacaagaggtttctgcatgatttggtttggatacatgaagaggaaaatgtgccaattgatatggatggaggacaaatcatctgcaatctgattgctgtccatgctggcctagagaggactatagatttgaatgagcaacttagagttttaagaactagagacacaagggtgccaaaggttcaaatgcttagtgggaggcaagatgtttgggacacacccaagggtctggccggcaagcagactattattgtaagtggccaccacgggaagctccacatcgacggcctccgatttataatcgacgaaggtggtggttatgaagacaaacctattgctgcgatagtttttccttcaaagacattgatcagaagtaccgaggaagcgggaaccacatcagagaggtgatctagagttctagacatcgtcaggagcagtgaacacggaggcacagttttttctctcttgaagttactgcttgtagtcatgtactcatgtcaaacgacaataggaataacgtccaaaggcaataagttggtgaaccggacctgcgttttctcaatttagtcactgatgactatatgtct

SEQ ID NO: 268971 - DNA, 878 bp, Zea mays
aggataaatgtggtgacgatgatccaaatcgaactgaacttgctactagaggtaaaggtgtgcagtttcctttttctgtcttcgacagggtcataatcaaggtatcttataagcaagacaactaagcgaaggctttcattcactctgttgtgttttctgcaataactagtgcgtgaattgaatcttttcagggaaacaagaggaccccggaacggtttgtgggacgtcaagcagttgtgacagcgcagtgcttaaatggatggtatgttgtgaagacttcagacaacgcagagagtgtgaagctgcaataccgttccttggcaaaggttgctgatggcaatgggccttctggtcttgtcccaagcaatgtccaaagtacaagctggctataggctacaacagtaccggtagtaggccccaagcccctcttcaacttcacgcatttgctgaggttctgcgatgacgtgagcatgccaaattcagattaggcttgctttgcctttgtcccctctttttgtatcctggggacgcggatcttgtgagtatggccaaagaaatgtttactactttagcagtgttggaaacgcgtgacatcactggttacgagtagttttagccgtcttctgtctagcggtgtggccggtagtggcagcatgcgtctgcagagaacatgtttggtttttattgcacattatttacatattaaattatcattatccatcttagatttaacgtctctattgaccattgtaatctataaataacacctttcatccctatatcttatcatgtcaggggtgtctttagcaaaatataccaaacaattagagacgttagatataagatgagtgatgataatttaatatatgtaatatatg

SEQ ID NO: 268972 - DNA, 397 bp, Zea mays
atgggccttctggtcttgtcccaagcaatgtccaaagtacaagctggctataggctacaacagtaccggtagtaggccccaagcccctcttcaacttcacgcatttgctgaggttctgcgatgacgtgagcatgccaaattcagattaggcttgctttgcctttgtcccctctttttgtatcctggggacgcggatcttgtgagtatggccaaagaaatgtttactactttagcagtgttggaaacgcgtgacatcactggttacgagtagttttagccgtcttctgtctagcggtgtggccggtagtggcagcatgcgtctgcagagaacatatctggtacacataaaagtttagtgcacatgatttatatattaaattatcactatctattttag

SEQ ID NO: 268973 - DNA, 437 bp, Zea mays
  unsure (1)..(437): unsure at all n locations
cggacgcgtgggcggacgcgtgggggaaaaggagttgctcaaaaggaaacccaaaacgtggagatgggcgtgccaggcaacggtgggcaacgcagattcgactggacagatgatcattcaacagttgccggagtggaagatacacgagtgggacaagtaggggttactgctttactggtcttgaagagtgctctcgtggccatactatagattacatgcagtggaaatggggaaaaaaaggaataagaagcagctgatcagtggaagagctggtgcagattgattgatgaagcttttcatactccaaacaaacaaacaaaaacctgggcatgttttttcaaccatttgtagcaaccgaaaggagcatggatcaattagccccgttctgtaagccgntcacttatacacacacaaaaaaaagcgacttgttcatgatc

SEQ ID NO: 268974 - DNA, 758 bp, Zea mays
tttgaaaggaaagaggaaacagggaggcgacgccgtcacaattcgttcgcgatttgcccttctccacctccccgtccatgtcgcgggaaatcacgcgcggcgacgctggattcacttagatccaacagggtaatcggcacggggcagcctctccacccattcccgcagccggttgggcgagtcgtcggctcagataatagactgggcgtgtggatccaagaggtttgatccctttaatttggattgaagtgccagctttcggtcaggaaggtgatgctggatgatgctgacggactttgaaagcataccggttcaaagaagtgttgcctgtcaccatgaggctcaacgttgggctcctagtgcccttgatggcacaatactccgcacccacatgggctactttagttgctgggttcttcatgctgcttgcgctttcgctctccacgtacctgatatttgagcatctctcagcatacaacaatccagaggaacaaaaatttgtactgggtgttattctcatggtcccttgctatgcaattgagtcatgtatttctttgataaatccaagtacaagcgtttactgtggcatcctacgtgatggttatgaagcatttgcaatgtactgctctggaagatatattactgcatgtttaggtggggatgataaaactatagcctttttaaagagggaaggtggctctggttctgggcagtctctactgcatcacacgtccgagaagggaatcatacaccatcat

SEQ ID NO: 268975 - DNA, 1444 bp, Zea mays
cccaattgaatcatcctgtacactctcattttcggaacctcaacgggctcgagagttatttccttcaatccccacgtcaaccttgtcatcttcatcaaatgtcagttttaattcaaagaatgagccgtccatgctaaccagtcagttctactggtcagcaaggcatacaagagctgactcctgcgctgctagcaccaacacagtcgtaattgaaaagaagcaagagccaagttctggtggttgtagattgtttggaattaatatatgctcagctgaggaagaagtattacctgaggttactgctccaggtgttggttatgagcagactgctgcctctgtagagttgaactcggataagctctcacagccatctgatgtcaacaattctgatgccctagcagctagcagtgaacgttcacctcttgaatcccaaagccggcaagtgaggagctgtaccaaggtaattatgcaaggaatggcagtaggaagggctgtagacctgacaaagcttagtggctacagcgatctttgccagaagctggaggagatgtttgacatccagggggagctgggttccacactaaagaaatggcgggtcattttcactgatgatgaggatgacatgatgcttgttggagatgatccttgggatgagttttgcaggatggtgaaaaggatttacatttacacatacgaggaggcaaagaagctgacatccaagtcaaagttaccggttagcagtgacagcagcaagctgagcgctgcgaactcactgtctgaatgactatgaacaaaaactgcagagtgctaacgtccctctaattttgttatttccatcatttgattatgggggtgaatgctcacggttgctccgtgggctgaagttgtggttggcattcaactgccttgagttttggaggcttttggactgccttgccagcatgagcctcctggaagaggcaccctggcatctgcgtgccatttcccatttgttcgtgccgtttggtaggagtatccattggcttatttagcaggtccctggtttgaagaaagaagcggtcagctgcaagatggacggtgccttgcctcttcttcgactacttagctagtaattaggactatgtatgtaatgaatgtatatagtgccattaagacgcccatgccctggtattgaggtcccggcatttgtatgaatcaattgttcggaaattgttacctttagcagcaacgaacctgagggtgtagggtggccaggtgggagaagttgtatgtttctttcagtaacaatctttgtgcaagtgatctgtatatagtctactgttttaataagcaatgttgtgcaacttgcgctcctacaccctacagtacagtggggtggccaggtgggagaagttgtatgtttctttcagtaacaatctttgtgcaagtgatctgtatatagtct

SEQ ID NO: 268976 - DNA, 479 bp, Zea mays
cccacgcgtccgaaccgagaccaagaccaccagcaggactcgcgaggagagcgcgcccggaaagaaaaaaaaaccctagccccgcccgggcctccgcctcgcgatgtcttgcacggtggccatcccgagctcgccagtcttctcgccctcacgccgcccactctcctgcaaggccgcctccgcctcaccggagcccaccgtccccgcctctaccgcggcgcccgcgcccgccgccgccgccggctcgccgctccgccccttcgcgctccgcgcgctgctgcgggaggaggtctccccgtctccgccgccccagccgacctccgccgcagcggtggctttggtaccgagcggggccgcgctgaagcggcggcgaccgacgccgcttgtcgtgccggcgtccggcgccgcggcagctgctgctgcggcggcggcggtggccgctgtggaggcggatccgaggaacgaggtggaggaggaag

SEQ ID NO: 268977 - DNA, 500 bp, Zea mays
ctcagaacattagaaaatcaacctaaatatccactcccgtcgtcctggactcgcagttcatccacgacccaccgaaccacaatggccacgttcctgggaagctcaccggcgctcctcgctcgtcccatcgccaagccgcacatctcctgcgcgcagaccccgcgcccggcaattgcccagaaccagacgccgtccagcgagcagccgggaccacagaaacagcggcactccgtgcaagcgcagccacagcaggcggcggcggcgaggccgaagcacgcgggcgtcgcggactccactgactggatagcctcgtcgttgacgcggcggtccggaatccgtgcggggctggcgtgggccggcttcctggccgtcggcgtcgtgtcggagcagctcaagacacgcttcgaggtcgcgcagcagcaggccaacaccaaggacgtggagcaggagcacgaggtcgtgttgcccaacgggatccggtactacgagatgcgcgtcgg

SEQ ID NO: 268978 - DNA, 520 bp, Zea mays
aagccccgcaccgacctgcccaacgtcgtcgagatgtacatgaagaaggagctggagctggagaagttcatcacgcacagcgtgcccttctcggagatcaacacggcgttcgacctgatgctcaagggggagagcctgcgctgcatcatgaggatggaggattagagcttcattgcaagcttgctcctcctgcagggcaggcatgtcgcacagcaaatgggcatgaaaagttgaaggcgctccagtcctccagcttgtgtagtacacagtagcaataaaacgttagtgtttgtcctgtgcccatcctgtattattctgttccagggtttcacctttatcgtcagtgtgtggtcaggtttcaacccttctcagaacaaccccctcccagaaaaaaaacaaaggaagaagtttgtgtccaggtttcagaatcccctgtctgtaattaccattttgcatgacaataatgagatactgtagatattaataatgttccaaaaaaaaaaaaaaaaaaggaaggccg

SEQ ID NO: 268979 - DNA, 947 bp, Zea mays
gcaggaaatggtgttccgtggaactgacaccgtcgccgtgctgatggagtgggtgctggccaggctcgtgctgcaccctgacgtgcaggcccgcgtccacgacgagctggaccgcgtggtcgggcccgaccgggccgtcaccgagtccgacacggcgtcactggtctacctgcacgccccgcgcgtccgggtgctcaggatgcacccgccgggcccgctgctgtcgtgggcgcgcctggccacgtcagacgtgcacgtcgacgggcacctcatccccgccgggaccaccgcgatggtgaacatgtgggccattacgcacgacccagacgtgtgggccgagccgacggagtatccagccggagaggttcatggggtccaccgagttcccgatcatgggggtcggacctcaaggcccccgccgttccgggcgggccggcgcaactgccccgggaagagcctcgccatggccaccgtggccttctggctcgcgacgctgctgcacgagttcgagctgctcccctcgcccgtcgacctgtcggaggtgctcaagctgtcgtgcgagatggccgtcccgctggcgctggccgtgacggcgaggccccggcaagcggttcagaagtcggttggggtatcagtctcactgtgagcaatagcatggcgggctggcgctactgtacatggaaagtgcttctgcttgcaggttgctactactcggtcgacatgggtatatgcttttcatgttactgtctttgatgtgtatcgatcaggtgccgaatgtgatactttggcttgtactgttagctcttttcctgggggctcttttctttccttttcttagtactccctgtaagactcgtcaaatgtatatgctggtttggatggttttggattgtagtcgcattctattagtagccccgctcagttcaaaacacaacaatggtataatc

SEQ ID NO: 268980 - DNA, 380 bp, Zea mays
  unsure (1)..(380): unsure at all n locations
cttcgaccaacacttcggccaagccttcgggttgcccaaggatgtggggtacccagtgaacctaggtagcggcgtggcaaccgccggcggcgtacctgtcaaactccacgccgctcatcccatctaggatctgagaacaatgtaaggggaggatatcgcaaacaaggccagcgacaacgagtgggcagacgaacgaacaaagcgttgctacatagtactctctcagaatgtaaagttaaatttcacacccagcctgttgctacatagtagtatagttttatgaattacaggtttgattaaacttcaaattaatctacatgtatagccctgcccagatttaactatattgggaccgtattacttaccgatcaaaanaaaaa

SEQ ID NO: 268981 - DNA, 399 bp, Zea mays
cccacacacatttgatcgacccagcgacgtacccgccaattttttttcttcttctttcctttgtgcccgcccccttttcattcaggctttgtcttctagttttgtccagaaattgaaagatgtgttaagatgtgttgatttgatttagttttttaattaccgtacccgtggtaattaaattatgtacctacttatatatacattacgccgaagaggaaggatcactttgtataagaaaagagagaaatgggggatgtaggagggggggctaggggcccggctttggggtggtattcttttagcatatggaacacaataaatttaatttcattcttggaaaaaaagaatgtgtgcaccccctctgttgatcaaaaaaaaaaaaaaaaacccacgcgtccg

SEQ ID NO: 268982 - DNA, 464 bp, Zea mays
cccacgcgtccggagaaaggtgattaaattaagtatacaaaatggtgttccgtcggagtacacagatatgatctttcttcaaacagatgtggataaagtagaaggaacacaaaaggtcaagcaaaaactgaaaggacacaaaggcagagatgagcaacagatttatggcctgaaactgggattcggtaacaaagatgctacacgggaaaatctcatcacaggatttggggacatgaatccggcagagaaatctgtgatgctccaaaagggatccggctgttgcagccgcgtcgcagactgcctctgctgcatgtgctgcatcaaggcgtgcaacaggatgaacgaccagtgcgccgttctgatggcacagatctgcgcggctctagcgtgcctcggctgctacgagtgttgtgcagaggtgtgctgtggagggtcggagtcgtagtaggaagtgttttgtatat

SEQ ID NO: 268983 - DNA, 610 bp, Zea mays
cggacgcgtgtgttagatcgcgagggccgccctttttttttttttttttttttttttttatcttttgacattaactttatcgtcacattaaccttagcagcacaatgatatccgcaactcaacaattcagctacagaaatacaacgttgtcttctaataataataacacacactggttcgtcatcgtcgccggcgccttccaccgctggtacagaatgcccatgtgtaccccagcctccgacatcaaatttacaacctagtaacccaccccgcgcaccacccacaactagagcaaaaacgagtaaacatctaaaatcgaaggagcacgaaaccctagattcctgccaagaccaccgctctacttcttcgccttacgggacggcaccttccgcgacggggtcgcagccttcttggctggggcggccttcttggcaggggccttcttggccgcagcggcgggcttcttggcgggcgccgctttcttcccgggcgtgtccttggctgacgtcttggcggccttggcggggcggccggccttcttggcagctggcttcggcttggccgcggcagccttcggcttagccttggcagctggcttggccttcggctt

SEQ ID NO: 268984 - DNA, 459 bp, Zea mays
aattaaatttaagtaccactaaaaaagagctaataagtagcatgaaagagaaagaaagcttggaacctcaaaaacgaccgcccttttttaaatattaaataaaaaaataaaatattaaaaatatttattggtcacaaaatgcacaccgaacaattctctatttcagatagggaattcagataagaccagattaatcccagccaaaaacagcctgaataatcagagtacatacacgcgaaggaaggtaactcttgacattaactttatcggcacattaaccttagcagcacaatgatatccgcaactcaacaattcagctacagaaatacaacgttgtcttctaataataataacacacactggttcgtcatcggcgccggcgccttccaccgctggtacagaatgcccatgtgtaccccagcctccgacattaaatttacaacctagtaacccaccccg

SEQ ID NO: 268985 - DNA, 563 bp, Zea mays
gctgggcatggcacgatcatttcagaaggagcttgaccaaatagctgagaaagcagatacatctactccggctggcttgtgctatgtgtcgacagagacaacatgggcgttacttcggcatccggattggtgtatctcagcttactcttcggtggatgtgaaacgtagcgtggatgatggtgagaaacgtttcaatcagctttcaattgaggagaggggcaagtttgatgaagagacacttgtcaacgtgaacagcatcaagaggaataaaggaggcagccaaagatcaagtggttttagcaacgagtacattgtgataaccatattggttgctgctgagggagtacataagctgccggttataaatagcagcaatgacttaaagacagctctacaaaagatgggtgccataccatcaagcaaaatactggcagtcgaggtcctgtggactccgcaaaatgagaatgacacattgtccgagcgagagctccttgaagattacccgctcttaaggcctctgtagaaagataaaagttacagattgcccgtgcaaaggaagaaca

SEQ ID NO: 268986 - DNA, 1093 bp, Zea mays
aggtcctactggttggtggtatgactagagtaccaaaggtccaggaggttgtttctcagatattcaacaagccaccaagcaagggtgtcaatcctgatgaggctgttgccatgggagctgcaatccagggtggcattttgaggggtgatgtgaaggagctccttttgctggatgtcacacctctctcccttggtattgagacccttggtggcatcttcacaaggctaattaacaggaacaccacaattccaaccaagaagagccaggtcttctctaccgctgcagataaccagacacaggttggagttaaggtgcttcagggtgagagggagatggctacagataataagctccttggcgagttccagcttgaaggcattccaccagccccaagaggcatgccccagatcgaggttacctttgacattgatgccaatggcattgtaaaggtgtcagctagggacaaagccacaggcaaagaacaagaaatcaccatcaagtcttctggtggtttgtcagaggtcgaaattgagaagatggtgaaggaggcagagctacattctcagaaggaccaggaaaggaagtctcttattgatctcaagaactctgcagataccacgatctacagcattgagaagagtgtcagcgagtacaaggacaaggtccctgctgaagtcaccaaggagatcgagtctgctgtctctgatctgagggcagctatggctgaggacgatctggacaagatcaagcagaagctggaagcagcaaacaaggctgtttcaaagattggagagcacatgcaacaaggtggtggtggcggcagcgctggcggcagcggcagtggaggagaccagactccagaagctgagtaccaggacgcaaaggaagccaagatgtaggtcgaacctccatcaagtctctagtttttgcatgtgcccatttaggaagtaaacttacctacctccgatttcttatttttctgtgagggttaagaggactgtaactgttgttgccaaattttgggtcacggataaattgaggggaacggactcatacgttaattgaaccatttatatactcctgacggcccctc

SEQ ID NO: 268987 - DNA, 1015 bp, Zea mays
cgtccacccacgcgtccgaaaacagggagcggaaaattaactttaatccagccccttttccgcatcgtcggcgctgttgtcggccagatagtgatagacggcatcgacatccgcacggttgggctgcatgatctgaggtccaggctgagcatcattccacaggagccgacgatgttcgaaggaactgtcaggagcaaccttgaccctcttggggagtactccgacgatcagatctgggaggctttggattgctgtcagctaggggacgaagtcaggaagcaggagctgaagctcgactcaccagtggtagagaacggtgagaactggagcgtgggccagcgccagctcgtgtgccttggcagggtgatcctgaaacggagcaaggttcttgttctggacgaagccactgcctcggtggacactgcaaccgacggctgatccagagaacgctgaggcggcagttcaaggagaccaccgtcatcacgatagcgcacaggatcacgtcggttcttgacagccacatggtgctgctccttgacaacggttagtgcctgccgccgagtaatgttgatgcatttgggtcttgtgctgtgagtcgtgcgctgttgcttgcaggcgtggccgtcgagcacgacaggccggacaagttgctggaggacaagtcgtctctgttctcaaagctcgtagcagaatacaccatgcggtcggtgcttacatagcagaccacagaccagcatacaagagacgactgaagatggggtcataaatatatgatgacaccttttaagttttactagaaaccaaaaaggtctcgcgaaaggccttggacccattattacgcaatgtcatctcttcgtgggccaggggaggaatgtctgacaaaaaaaatgggtcgacatgagatcggatcaactcgagctcgtgcgactcactgaattcaaacgttattcacaacatggatacgattctcccgcgtagcgccctcagacgttggaactgaatgatgattagtcag

SEQ ID NO: 268988 - DNA, 429 bp, Zea mays
cccactcgtccgcccacgcgtccgctttatttcccttgcccttttccagagcacctccgccgtcggccatgggtcaagcctggggtaatctccaagataggctccaagggcggcggtggaaggagcaccaggtgaggaagatcaccgacaaggtgttcgaccgcctcacggaggacgcccagaagcgcgacaaggaggccctcagattcgaggaggtctacatcgccgtcctctgcgtctacaatgacatcaacaagtacttgccggggccgcaccacgaccccccgtccaaggagaagctcagggccatgatggaggagtacgacgtgaacctggacgggctcctggaccgcgaggagttcgcggagttcatccggaagctgaccgcagactcgctgtgctcgatcagcgtgaagctgctgatcacgc

SEQ ID NO: 268989 - DNA, 718 bp, Zea mays
atatcgctgcagattccatcataaagggcaaagtcgaagatcttggtcgcatggaactaggcggttacgccattggcgctgttgaagattgcagcaagcgtctcagcgattatatcagtatggatgttcttagtgccatacaaagagcgggagctgcattcagttgggtgcctaaagaaccttataacgaggatgcatgcctacttgattttgacgtgctattgatggagcctcgcaagctggagaaaaccctgattacttccatcatgtggtgggctgatgccattcgtttagccaatcaaagggacctgattagactggccgtaactctgtccttcaatggcaagtacacgaggctcccttcaaactggaagcgcgcagatgatgacaacgctgatatcctcaacttcgatggacccaagaacgtctgttctgaagatgggcgccagcatgagcaaccaggctacggcgcaacctggcagcaataccttcatcagaaatctgaagccatactgagcacctaaataacggcacttcgccggacacaaattttccactgtcaccgagtggaagctgactgttggtattgacctgtaaaccccccatagaatgcattttgtactccagtactctattccagcacagaggaagcatgctctcgcttccgtatgtataattcaggatacaaaagattttttttttggcggctgaccccggc

SEQ ID NO: 268990 - DNA, 1820 bp, Zea mays
acccacgcgtccgcaaaagcattgaagccgtagccgccgccgccggacgagacaggttgaggcggggcggcaatggccgccggggaccttgaggtgctcaccgcgctcgacaccgcgaagacgcaatggtaccacttcaccgccatcgtggtcgccggcatggggttcttcaccgacgcctacgacctcttctgcatctccctcgtgactaagctcctcggccgcatctactacaccgtggaggggtccgcgacgcccggcaccctcccgccgcacgtgtccgcgtccgtcaacggcgtggccttcgtgggcacgctgtcagggcagctcttcttcggctggctgggcgacaagctcgggcgcaagaaggtctatggcatgacgctcatgctcatggtcctctgctccgtcgcgtcggggctctcgttcggccacaccccggcgtccgtcatggcgacgctgtgcttcttccgcttctggctcgggttcggcatcggcggcgactacccgctgtcggcgaccatcatgtccgagtacgccaacaagaagacgcgcggcgcgttcatcgccgcggtgttcgcgatgcagggcttcggcatcatggccggcggcctcgtggccatcgtcgtgtccgcgtcgttcaaggccaggttcccagccccggcctacgccgtcgaccccgccgggtccacgccgccgcaggccgacttcgtgtggcggatcatcctgatgctgggcgcgatgcccgcggcgctcacctactactggcgcaccaagatgcccgagacggcgcggtacacggcgctggttgccaagaacgccaagcaggccgcggctgacatgtccaaggtgctgcaggtggagatctcagccggcgccgccgaggaggacgccgtggctgcgactgcgactgcgcctgcgccggcgtcggcgtcggcgtcctttgggctcttctccggggagttcctccgccggcacgggctgcacctcctgggcacgtcctcgacgtggttcctgctggacatcgccttctactcgcagaacctgttccagaaggacatcttcaccgccgtcggctggatccccaaggcgaagaccatgaacgcgctggaggaggtgtaccgcatctcccgcgcgcagacgctcatcgcgctctgcggcaccgtcccgggctactggttcaccgtcgcgctcatcgacgtcgtcggccggttcgcgatccagctgatgggcttcttcatgatgaccgtgttcatgctcgggctcgccgtgccgtacgagcactggaccacgccgggcaaccacatcggcttcgtcgtcatgtacggcttcaccttcttcttcgccaacttcgggcccaacagcaccaccttcatcgtgcccgccgagatcttcccggccaggctgcggtcgacgtgccacggcatctcggcggcgtcggggaagctgggcgccatcatcggctccttcgggttcctgtacctggcgcagaaccgggacccggccaagacggaccacgggtaccccgcgggcatcggcgtgcgcaactcgctgttcctcctcgccggctgcaacctgctgggcctggcattcacgttcctggtgccggagtccaagggcaagtccctggaggagatgtccggggaggctgacgacgccgaggacgacgccgtcggcacccgcgcggtgcggccgtcggggacccagatggtgtagaatcgaacatggcgacgcgtgcacacgggtcctccatcctggggcccgactgggaagacaaggcgcgccggttcaagcctgccgatgctttgctgtgcagaagt

SEQ ID NO: 268991 - DNA, 786 bp, Zea mays
atcaagctaggcaggcctggtcccgaagaacacccttctctggtcgtcgcatcgcagggcagctagctaggtagctaacatccgccatggcgcgcgggggagacggcctgcaggtgctgagcgcgctggacgcggcgaagacgcagtggtaccacttcacggccatcatcgtcgccggcatgggcttcttcacggacgcctacgacctcttctgcatctccctcgtcaccaagctgctgggccgcatctactacacggacaccagcaaggacagccccgggtcgctgccgcccaacgtcgcggcggcggtcaacggcgtggccttctgcggcacgctggcggggcagctcttcttcggctggctgggcgacaagctggggcgcaagagcgtgtacgggatgacgctcatggtcatggtcatctgctccgtcgcgtcgggcctctcgttcggccacacccccacgggggtcatggccacgctctgcttcttccgcttctggctcggcttcggcatcggcggcgactaccctctgtcggccaccatcatgtccgagtacgccaacaagaggacccgcggcgccttcatcgccgccgtcttcgccatgcagggcttcggcatcctcgccggcggcatcgtcacgctcgtcatctccgccgccttccgcgcggcgtacccgtccccggcgtatccggacgaccacttcacctccaccgtgccgcaggccgacatcgtgtggcgggtcatcgtcatgctcggcgccgcgccggcgctgctcacctactact

SEQ ID NO: 268992 - DNA, 516 bp, Zea mays
tccactcgcacacccatttcttgtgtcagtctccctctccctctctccgatcctctctactagcagagaggcaagttcaatcttctagctagcagcatcggagaaggcagagctcgactgacacaatggcgggaggccagctcaacgtgctgaccacactcgaccaggccaagacacaatggtaccatttcatggcgatcgtcatcgccggcatggggttcttcaccgacgcatacgatttgttctgtatcgcgctcgtgaccaagctcctcggccgcatctactactccgaccccacctccaaggaccccggcagcctcccgcccaacgtgtcggccgccgtgaccggcgtcgccctctgcggcacgctggcgggacagctcttcttcggctggctcggcgacaagctcggccgcaggagcgtctacggcttcaccctcatcctcatggtgctctgctccgtcgcgtccggcctctcgttcgggcatacgctcaggggcgtcatcgccacgctct

SEQ ID NO: 268993 - DNA, 565 bp, Zea mays
ggcatcggcggcgactacccgctgagcgccaccatcatgtccgagtacgccaacaagaagacccgcggcgccttcatcgccgccgtgttcgccatgcaggggttcggcatcctcttcggcaccatcgtggcgctcgccgtctcggcggcgttccggaacgcgttcccggccccgccctacttcgtggacgcccaggcgtcgctcgtcccggaggccgactatgtctggcgcgtcatcctcatgttcggcaccgtcccggccgcgctcacctactactggcgcatgaagatgcccgagacggcgcggtacacggcgctcgtggccaagaacgccaagcaggccgcggccgacatgtccagggtgctccagacggagatcgtcgacgagcaggagaagctggacgcgatggtcgccgccgagcgccaacaccttcggcctcttctccagggagttcgcgcgccgccacggcctccacctcgtcggcaccgccaccacctggttcctgctcgacatcgccttctacagccagaacctgttccagaaggacatcttcaccagcatcaac

SEQ ID NO: 268994 - DNA, 420 bp, Zea mays
accactgcctccaagcttcaacaagctaggcagctgcaacatctcccaaatcccagcctgctgccccgcgcgaacacacttctcttgtcgttgcattgcagggcagctagccggctacagcatccgccatggcgcgcggcggggacggcctgcaggtgctcagcgcgctggacgcggcgaagacgcagtggtaccacttcacggccatcatcgtcgccggcatgggcttcttcacggacgcctacgacctcttctgcatctccctcgtgactaagctcctcggccgcatctactacaccgtggaggggtccgcgacgcccggcaccctcccgccgcacgtgtccgcgtcgaccccgccggttccacgccgccgcagtcgtacttcgtgtggcggatcatcctgatgctgggcgcgatgcc

SEQ ID NO: 268995 - DNA, 704 bp, Zea mays
cccacgcgtccggcacatctgtttagccaagctgtggccaacctctgcgaggaatggagatggagtcgactcctctcttgacaccatacaagatgggcgatttcaacctggcacacagggttgtgctggcgccgctgacgaggtgccgggcgttcgggaacgtgccgcagccggagcacatggctctctactaccgccagcgggcgacgcccggcggcttcctcatcgccgaggcctgcgccgtgtcggagagcgcgcgcgggtacccggacgttccggggctgtggacccaccaacaggtcgaggcctggaagccgatcgtcgacgccgtccacgccagcggtgccgtcttcttcgcccagctctggcacaccggccgggcctccccctcagaattccaaccaaatgggcaggcaccgatctctagcacggacaagcaaatcccagcacaggtgaaccattccggtgacgtcaacacgttcgcggtgcctcggagactagagacagaggagataccacacgtcgtcaatgacttccgggttgccgccagaaacgccatcaaagcaggctttgatggagtggagatccacgcggcaaacgggtacctgttcgatcagttcatgaaggacagcacaatgaccgagacgactcctacgggggcagcttggagaaccggtgccgtttcacagccgaggtgatggcag

SEQ ID NO: 268996 - DNA, 651 bp, Zea mays
cccacgcgtccgggcccagtgccagtggccattgttggctacagcaattccaaccaaatgggcaggcaccgatctttagcacggacaagcaaatcccagcacaggtgaaccattccggtgacgtcaacacgttcgcggtgcctcggagactagagacagaggagataccacacgtcgtcaatgacttccgggttgccgccagaaacgccatcaaagcaggctttgatggagtggagatccacgcggcaaacgggtacctgttcgatcagttcatgaaagacagcaccaatgaccgagacgactcctacgggggcagcttggagaaccggtgccgtttcacagccgaagtgatggcagccgtcgcggacgaagtcggtgccaaccgcctcggtgtgcgcctctctccgttcgcggattatatggactgccacgactccaacccagaggcgctcgcgcttcatgtcatcgacgagacgctgaacccgctcggcgtgctttactgccacatggtagagccaaggatgcgggtgaacccagacgacggtattatgactctcgagcacatgctgctaccgttcaggagggcgtttcgcgggacgttcattgctaatggaggctacgaccgtgaggaaggcaatgacgccattgccc

SEQ ID NO: 268997 - DNA, 483 bp, Zea mays
gacagctcatgcaaaggaatcttgtgggcggtccttttgcccactcattaatctgaatgggggggggactaattatgtgggataccatcacactgttcatccggtctgctgggtaaccatgacaggaaaaaatgaagcagcgggcgtcttaccttatatatgttctctggaagcagctgacatttgttttctggatcatattcataattctatgtaggctgtgacaggaatctctatagtagagccatgatttttttttggttgggtttcagcctgcgttggagaatatgcccaatttttttttttggagaatatgccttatctggatggataaggcactaaacatttgaagattatatttcggagggtggagaatatgacaatttgatttatatcactaaacatttgaagattatgtttcggagtttggtacttgtttcttcttaatattcttaatataatgatgtgtgtttctttggtcct

SEQ ID NO: 268998 - DNA, 878 bp, Zea mays
tctttcctttcgtccggaaaagtgcggtggtttctcgtgaacgagcaacccagaaaaagtacacctgtcgcgtaagcgtcctcaggcagcagctccccggtcgcggtctctgtctctctgaagggaaagctctgtttccccttcccggtgccggagtcggggaaggtcaccgcgggcgcgagccgatggacagcaacaacctcctggcggcgtggccggtcctggggccgggcgtcgccggcgccgtattcggcgcaggctggtggttttgggtcgacgccgtcgtctgcagcgccgccgccgtgccattcctccactacctcccagggttcttcgcctcgttcgccgcgctcatgttcaactgcgtcaaccgggaggacatcggcgatggctactactcaccgtacgacgactccgagtggagggtgaagctctggctttttatttcgtacgtggtgtcgtttgtttcgctggccggggcagtgggtttcttggttcaagatgcgcttacggatacggggccatctgcgtggactggcagtgctggcatcctgcagtgcgtgtttgtgttagtgagtgggctgatctactggacgtgccactctgaagattgacttaagaagtataggtatatatggccaaggaggaggaggatggagactgcttttctcagaagcgattgcttttccgtagtacgtttctggaggcacctttggaccgtgctttccgaaacgggtggaataaagagccattttctagttgtttcaagagagatgtagataagctgtactactattttacacgtgtttatagtcgtgtatcatgttgcttaaaactactttgtgaggtgttgttttggagcaagaaacttatagggg

SEQ ID NO: 268999 - DNA, 528 bp, Zea mays
tcctatcgcgtgcgtttattgatttagaaacggaagaacaaacagcaagcgaagcatcgccagattggtatatcgatcgattgatcggtggcggaggaaggggaggacggggggcagatggcggcgtgccggggcttcttcgagtgcctgctcaggctgctcaacttcatcctcaccgtcgccggcctcgctatggttggttacgggatctacctgctcgtcgagtggatgaagatatccgaggacggcatcggcggggcttcgacggcggaggtgctcgtctctggccggccgttgttgggggctgtcattctcggtgacagcttcctcgacaatctacccaaagcatggtgagatggtttcctcgcctgtggacttttttttctgatgtatcaatactggtctcgtccatgtgatgtcgccattgattatgattttggattgagaggaactgcaaggcttgcttagtaggggtggcaattacaacttgtgaatgtgtgaaatatgcaattgatagccaaaacacgc

SEQ ID NO: 269000 - DNA, 646 bp, Zea mays
  unsure (1)..(646): unsure at all n locations
caccgcgggaaattcggcgcgattcgggcggtattagttggaattcccctgagaatcggagcgtttttttggacttggtacagcaagcgaagcatcgccagattggtatatcgatcgattgatcggtggcggaggaaggggaggacggggggcagatggcggcgtgccggggcttcttcgagtgcctgctcaggctgctcaacttcatcctcaccgtcgccggcctcgctatggttggctacgggatctacctgctcgtcgagtggatgaagatatccgaggacggcatcggcggggcttcgacggcggaggtgctcgtctccggccggccgttgttgggggctgtcgttctcggtgacagcttcctcgacaatctacccaaagcatggtttatttatttgtttattggtgttggcaccatcgtcttcttcgtgtctctgtttggctgcattggagcagggacaagaaacacctgctgtttgtgtttcgtatcctgttatgtgcctctggtgatccttgctgaagctgcagctgctgcattcattttctttgacccatgctggaaagatggaattccagtggacaaaacacataactttgatgtatgtttgactntctgagggaaaactggagaatgcagatgggt

SEQ ID NO: 269001 - DNA, 532 bp, Zea mays
cccacgcgtccgctaaaaaagaattataaacggaagaagaacggcaggcgaagcatcgccagattggtatatcgatcgattgatcggtggcggagggaggggaggacggcggcagatggcggcgtgccggggcttcttcgagtgcctgctcaggctgctcagcttcatcctcaccggcgccggcctcgccatggtcggctacgggatctacctgctcgtcgagtggatgaagatatctgaggacggcagcagcggggggttgacggcggaggtgctggtctccggccggccgttgtggggggctgtcgctctcggtgacagcttcctcgacatgctacccaaagcatggtttatttatttgttcattggggttggtgctactggctctcctcccgtctctggttggctgcattggagcagggacaagaaacacctgctgcttgggtttctatgccttcttggtcaatatggttgatccttgcttaagctggagctgctgcattcattttctttggccataacttggaaagat

SEQ ID NO: 269002 - DNA, 858 bp, Zea mays
cagtacggcggattccgggtcgccacgcgtcctccacgcgtccgcgacgcgggcctctcccgctcccccagctcgctgctcgcccgctctcctccgtcctccgcctccatggcggccttcccctccgcctccccgtcgccggcgatctccgcctcgacctggagcatggcttccctccgtacgtccctccccgcactccgcccctcccccgcgggaaggctccgttcgtcgttctcgcccgcggcggcggccacggctgcatcggtcggctgcctcgggtccttctccggcctcgcgcccgtctcgaatctcctctccctcggcgctgagaactcaagctttgagcatcggttgtttggtattgatgcccgtggaaggatagttgcgatgcgacatgggagacgcgttcctaaacttaacaggcctccggatcaaaggaaagcgctgttgcgtgggcttaccacacagctgctgaagcatgggaggataaagactacaaagccaagggcaaaggcaatgaggaagtatgtcgagaagatgatcacgttggcaaaggatggatctcttcacaagaggagacaggctctggcatttatttatgagaagcatatcgtccatgccttgtttgctgaggttgcagacaggtatggagaccgagaaggtggctacacaaggatcatcccgacgttcccgaggcggggagataatgcacctatggcgtacattgagcttgtttaggtaattgaatatcttgctatgtgattcctgaaatctgaacttccaaggtcactaaaccgcacttattattccatgtgttgacctagactgtcaacaagacaaactagtattcttatcgtt

SEQ ID NO: 269003 - DNA, 376 bp, Zea mays
gacaagctctggcatttatttatgagaagcatatcgtccatgccttgtttgctgaggttgcagacaggtatggagaccgagaaggtggctacacaaggatcatcccgacgttcccgacgcggggagataatgcacctatggcgtacattgagcttgtttaggattttccatcggttgctgtggtttcattggtgccatgcaggctgagtggtcatgtttgcgcattgccgttcggagatctgtttctttttccctttccttatcaagttgttctgtaccaaagtgtagatcacgcgtgaaatttggaactcgtcaaacttcgttctgtaattgacaaggcgccattatataatctggaaaataagttcgtggcctc

SEQ ID NO: 269004 - DNA, 323 bp, Zea mays
gaaacccaatccacagcacgagcgtgtcaaacgttatccggttcaaagccgagcggcgtctcctctctccagcggctccagccaatccggcaatcccgctcccccagctcgctgctcgcccgctctcctccgccctccgccatggcggccttcccctccgcctccccgtcgccggcgatctccgcctcgacctggagcatggcttccctccgtacgtccctccccgcactccgcccctcccccgcgggcaggctccgttcgtcgttctcgcccgcggcggcggccacggctgcatcggtcggctgcctcgggtccttctccgg

SEQ ID NO: 269005 - DNA, 508 bp, Zea mays
  unsure (1)..(508): unsure at all n locations
cggacgcgtggcgagacgcgtggggtaaaactggcattttgtagtgataacccacttgcataccaggatggagacaaaactgagtggagttactacaaggtggtcatcccccttgctcaactgcgatcaattaattcatcaacaagcagaacaaatgcagcagagaaatacattcaggtggtttctgttgataaccatgagttttggtttatgggcttcgtttactatgacagtgcggtgaagaatctgcaggaagcacttcaggaggctcagaatttacgtgcttagtgatgttcatggattggaactagcatgtcttatacattacagttgtgatatactgttttcccgtcagtttcgactgtttgtccagatttagtttgcgtaggtatcagctgtttctgtgttttgtactgacttaaaccgatgttcaatatgtgacgtgcatcctttcatggntgttctctgctatgatgagcccatttgcttttagcagtaacaatgggtg

SEQ ID NO: 269006 - DNA, 1360 bp, Zea mays
  unsure (1)..(1360): unsure at all n locations
ggtcaaatcccagtaacactggagaatacaatactgcncatcacgagaattaaacaaaatccaaaatccagaccctatgtgtcagcggtgaagtataaaccccaaccaatatagtagccgccgcaaaatggagaggaaaaaaaggcatagatctccatgcaccaatgatgcaaaatccgcatccatgctggcgcctgatttctacacatactagcagtgtgcatagatgccatgaggtatgtaggtgcagttcctaaggctaaatcatccctaacatactccctccgttcttttttatttgtcgcggtttagtttaaaaataaactagccaacgacaaatattcgagaacggaggtagtacaagctacaacaagatatttaaacctacataccactaaaccttccatattccaagagacatacacgcagaagacgatggcgaaaccaccaatctcaaaaaggttgaaccctctagccagcctttgaaacttcttatttgttgccgattcatgtctttgtaccggtgttactgatcgatcagggatgcaggcgactcactgatcgatcggcgatgtaggtgactcaactgctagctgctcagatacctctgcgagagacttgaggttgcatttgatcacagcctcaacgaagtagcatgtctcatcctttgtgttgccgtcaggcacatcgaccacaaacgactcgatcacgagggttcctggcctcccgtcaatgctctccgggtggacagttatgatggatgagtagttctgtagccggtggtccccgccgacgaacttgacgccgagtatgtgcaggtcgtcatctagctgctcgaggcgctcggtacttgttgtcgccggcagaccggtcttgacgttgacgtcgcgcaggctaccgacctcgagctggtcaccgcgcacaacgcagtttctgacgaacggcttgtaccgctgcggctggtcgaagctccggaccagctcccacacgaggtggacgggcgccttgatgtgcttgacgagggtggaagtacactggtgctcggccggcgcgtggcggtgcaggcggcgcacgtactccgtctctcctccggcgttggccacgacgtgctccgcccgcgccgtgctgccgccgacgagacccaccatctcgagcttgctcctcctcctcagccgcggctccgatcggcggttgcttcgcgtcgccggcctctatccagctcctcgccccgtttacttttgcttgcttgttggctcgcctggttggatggatgaggacgagagaaaggaatcgggggaaagaagtcgggagcggagacagtgggtttctgctggcccggacgcgtgggcggacgcgtggg

SEQ ID NO: 269007 - DNA, 468 bp, Zea mays
gtacgttgccacaagatcagcaacagcagcaattgccatctttgcaggcacagggatcagagcagcagatgcaggaagggctcagcccagccttcacgatagaccaagattgcctcaactagacagcctggagtcgcgtatgctacgattccagcaacgagctgaggtctgtacgggcacaagagtttagagtagccgatattgtcaggcgttagctgccaaaggctaatatcacgatcgaggtgtaccgtgtacgagaccattcctgagttgcgcagctggcagctaaactgcggtcgcgccttctccgagggaatcgagaaaaaggaaattataaagtgtatttggtttcaggtaaagtgaagagcgaagggcacccttaacaaggacgggtgtatgttggttgatatattatattcttgctaggaattaattattttcatgttaagtatgtttaattcaatttgc

SEQ ID NO: 269008 - DNA, 1002 bp, Zea mays
cttttctgttgtgcctttcgaatgctctgagaatggggctacccttgaagagttcatcactaaagcaaaagctgctttagtgtcagttggaattattagggaccctataatgtgcaatggtaaaaatggtggaaagcttactggtaggattattgattctgatatgcatgatgttgcccgtttccttaatcgtattctgggattgtttccagacattcagaatagattatttgaccttttcacaagcatacttgatatagtcattcagaatgcacgaattgaaggacaacttgattctggtattgttgatatcaaagctaaaagtgtcgaaatgaaagaatcaccaaagactgttcatgttgatactgtgtccggtgctagtacaatattatatacttttacagttgaccgcggagtttcttgggagttcgcacattcaatacttgaagaaaggctgaaagataaagcaggttcttctagtgatggattctatgagtccagaaaagaatgggcggggagaagacactttctgctagctttcgaaggttcagctgaaggattgtacatagtaattcggccagctgttggggaggcttcgagggaaatgtctttggttgagcttaaaagcaagtacaggaaggtctcatctgttgacaaaattagtaaaggctggcaagaagagtacgactcttcatccaagcagtgtatgcacgggccaaaatgcaaactcggaagcaattgcacagtgggtagaaggttgcaggagattaatatattgggtggtctaatacttcctgtatggggtgcagtagcaaaggcactggctaagcaggcacggcagattcacaggagaatacgtgtggtccgcttggagaccacgactgagaacaaacggtttgttgggcttatcattccaaattctgcagtggagtctgtactcgaaggtttgcaatgggtccaagatattgacgactgatttggcaagaagctactcctttggca

SEQ ID NO: 269009 - DNA, 487 bp, Zea mays
  unsure (1)..(487): unsure at all n locations
caacagaagcaaaatcatgtaatactgagctcgcttacaaaagggtattcctcttcatgttttgtttcctatctaaaattgggaaacgagaaccaaatcctaccctgtaaatggttatctggtaaactgtatacagatatacagacgaatttacacaaggttagtatgatgctgtgatcagggaggaggaaggaacatcccccaactgctgtcggatcgccaactcatcatctattgtcgtcttgtaaaggctgtgaagtggaactcgatctgcagccgccggtgcggcgcgccgccaccgtcgatgctgctgccgccctttttctcgatctccagctcctccctcagcgggatggcggccaggaacctcttgatgaactccctgcagcattccttcccggcgacgaccacctnctcggtgccttcggcccgcatctccgacgagccgtcgaacctcagcatgtaggccttgtcgcagccctcgtgc

SEQ ID NO: 269010 - DNA, 1099 bp, Zea mays
tttcctacgcgtccgcccacaaggagagagatctcgatccgcacacctcacgcctctcttcctctcgccccaaggacaacgaaaacatcaaacaagagaaccaaaggaaacagagcaagagcatcgctctcgaagcaaaacgcgcaccacgccgtcgccggccggccacttcgcacgtacgtaggacgcgcacgcaccggtgcatatatggggctcctgaaccagctgtgggacgacacggtggccgggccgcgcccggactccggcctcggcaagctccgcaagtacgcctccttctccccctcgtcgtcgtcgtcggcggcggtggcggcggcggcggcggcgggctccgcgccgcctccgggcgccgtgacgcggagcttgaccatgctgcggcggccggcggcgctgtccgtcgtcacgtcgccccgcagcgagtccagctccgcgccgtcgtccccgtcgcccgcaagcggcgctccggactcgcccttcggcgcagcgacgacgcccaggggagagggctggaagaagctgcgccggaaaggcaggatggccgacggcgccgacgcccccggcacgccgaggagccccaccgtgtacgactgggtggtgatcagttcgctggaccgctgaagcagccggccgggccaagacgaggaggacacagcacaaggatggaggaaggcagccaccatcagcagcagctagcggactgaaggaggatcggaacagagaggccccccggccatgcgacctgcttaacagagagcttctggtcacggttctgttatactacgcgttaacggtgtatgtatatacgtcatcttcctgtaaatctccgtggtgtgaggtgctgctgattttgaagagagtgatgctcctgttatgtgctactagctagctagtgctgttgctgtatgagtacagtgtagtctactattaagggttgtcgtttggactgttagtctatagagacagaaaaatgtagaagtacgtattaaagccaatcgaatagacatgtttgtcgccagtaaaaaaagtataatcctacgtatactcgtacccaacgatagtaatgcgtcccccagtgttgtgg

SEQ ID NO: 269011 - DNA, 567 bp, Zea mays
ttcttctgtccacgcgtccgcccacgcgtccgccctcgcgtccggttcgctggacctctgaagcccaagccaagacgagaactgcacaaggaaacccaccaccaccatcaacacagctagcgaactgaaggagggagggggcagaggggccatggccatgtaatgtaacgaccaatctctttcagagcttctggtgacgtgtccagttactatatacatacatacgttaacggtgtactatgtgtcttgttgtaaatgtcacccctgcgaggtgttgccgattttgtaagctactacgtactactacgctcggcatgtcaccgtgtgcaagtgcaacacaagtttgtaaaaatgactagctagtagtagcaatgctgttgctgtacgagtaggcctccctctgctttgtacaggggtagtccaacaagtatatggtttgctggtgccatgtaaaaatgtatatagaatcctacgttcacgcccagcaaggatgcgtggttgagtgttctggactctggacaatactactatccaataacagccataccgtgtttttttcctgggccc

SEQ ID NO: 269012 - DNA, 758 bp, Zea mays
taccgcttcacccacgcgtccgagagcataagaggagagaccgcactacacacctcacgcctgaaggccagatctaagccttctcgtcctcgcccaaggacaacgataaacatctaagaaccaaacaaaacagagcacgaccatcggtctctaagcaaaacgcgcagcacgccgggcgctccacgcacgtaggctagcagagcgcgcatggggcttctggaccagctgtgggacgacacggtggccgggccgcgcccggactccggcctcggcaagctccgcaagcacgcgtccttctccccctcgtcggccgcgccgtcgccgaccgcggagggcgcggcgccgcccgccgtgacgcggagcatcaccatgctgcggccggcggcgctgtccgtcgccacgtcgccgcgcagcgagtccagctccgcgccgtcgtcgccgtcgcccgcaagcggcgctcccgactcgcccttcggcgcagcgacgacgcccaggggagagggctggaagaagctgcgccggaaaggcaggatggccgacggcgccgacgcccccggcacgccgaggagccccaccgtgtacgactgggtggtgatcagttcgctggaccgctgaagcagccggccgggccaagacgaggaggacacagcacaaggatggaggaaggcagccaccatcagcagcagctagcggactgaaggaggatcgggacaaagaggccccccgggcatgcgacctgcttaacagagagctttttg

SEQ ID NO: 269013 - DNA, 565 bp, Zea mays
ttagagatctcgatccgcacacctcacgcctgtcttcctctcgcccgcaagcggcgctccggatcgtgacatgatgctagctgcagcgacgacgcccaggggagagggctggacgaagaagctgcgcgggaaagccaggatgggcggcggcggcggtgacgacgcccccggcacgccgaggagccccaccgtgtacgactgggtggtgatcagttcgctggacctctgaagcccaagccaagacgagaactgcacaaggaaacccaccaccaccatcaacacagctagcgaactgaaggagggagggggcagaggggccatggccatgtaatgtaacgaccaatctctttcagagcttctggtgacgtgtccagttactatatacatacatacgttaacggtgtactatgtgtctggttgtaaatgtaacccctgcgaggtgttgccgattttgtaggctactacgtactactacgctcggaaggtcaccgggtgcaagtgcaacacaagtttgtaaaaatgactagctagtagtagcaatgctgttgctgtacgagtaggcctc

SEQ ID NO: 269014 - DNA, 508 bp, Zea mays
gaaagtagcatagaacataagaggagagaccgcgcactacacacctcacgcctgaaggccagatctaagccttctcgtcctcgcccaaggacaacgataaacatctaagaaccaaacaaatcagagcacgaccatcggtctctaagcaaaacgcgcagcacgcacgtagcagagcgcgcatggggcttctggaccagctgtgggacgacacggtggccgggccgcgtccggactccggcctcggcaagctccgcaagcacgcgtccttctccccctcgtcggccgcgccgtcgccgaccgcggagggcgcggcgccgcccgccgtgacgcggagcatcaccatgctgcggccggcggcgctgtccgtcgccacgtcgccgcgcagcgagtccagctccgcgccgtcgtcgccgtcgcccgcaagcggcgctcccgactcgcccttcggcgcagcgacgacgcccaggggagagggctggaagagctgcgccggaagcaggatggcgac

SEQ ID NO: 269015 - DNA, 500 bp, Zea mays
aaaggagagaacatctcgatccgcacacctcacgcctgaaggccacatctagccttcctctggctctctctctcgccccaaggacaacgataacatcaaacatgagaaccaaaggaaacaaacagagcaagagcatcgctctcgaagcaaaacgcgcaagcacgccggccggccacttcgcacgtccgggggacccccacccaccggggcatatatggggctcctggaccagctgtgggacagacacggtggccgggccgcgcccggactccggcctcggcaagctccgcaagtacgcctccttctccccctcctcctcgtcggcggcagcggcggcggccgtgcagctgccgacgaccgcagaggcggcggcgccgggctccgcgccgccttccggcgccgtgacgcgacggagcgtcaccatgctgcggcggccggcggcgctgtccgtcgtcacgtcgccccgcagcgagtccagcttcccgccgtcggtcccgtcg

SEQ ID NO: 269016 - DNA, 649 bp, Zea mays
agttcatcgctctcgaagcaaaacgcgcaccacgccgtcgccggccggccacttcgcacgtacgtaggacgcgcacgcaccggtgcatatatggggctcctgaaccagctgtgggacgacacggtggccgggccgcgcccggactccggcctcggcaagctccgcaagtcgccatcgtgacatgatgctagctgcagcgacgacgcccaggggagagggctggacgaagaagctgcgcgggaaagccaggatgggcggcggcggcggtgacgacgcccccggcacgccgaggagccccaccgtgtacgactggtgcgtagcactatcctctggcccgctaatttataaaattcattcacacgcacgtattgtacatgtattatatttatgattatgatgatgatctactatctgctactactaccttggtttatcgcactgtaatcgcgtggtaccacatatatttctgaacgtaccgtacgtgctgctaggatcggagtacccgaaaatttcaacccgcaacccgctattttgatagcaatatttaatataaacaattatacaattatgtttatgtatttaatctgaattcttcatctattggccatgtttaatttacaaggtaacctgagtagctatgtttcatatt

SEQ ID NO: 269017 - DNA, 556 bp, Zea mays
agcaaggcaaggcaaggcaaggcaaggcaacgcgccgtcatctcattctccctcgcaccgacgaggtcaggtcagagaccttcgagtactactagtcatggcccgcatctagaaggcagcaagaaagggggcggatggggcgcgcgttcgtgtacgtgatcctgggcggcggcgtggccgcgggctacgccgcgctcgagttcgcccgccgcggtgggtactcccgcggagagctctgcatcatctccgaagaggccgttgctccttatgaacgtcctgcactaagcaaaggctatttactcccagaaggtgctgctcgtcttccaggatttcatacttgtgttggtgctaatgatgagttactgacaccgaaatggtacaaagaacaaggcattgaacttgttcttggaacaaaagtgatttctgctgatgtgaggcgcaagacattgcttacaggcactggtgaaactatcagctacaaaactctaattattgcgacaggtgctcgggctttgaagctgcaagaatttggaatacaaggttcagatgcttcaaa

SEQ ID NO: 269018 - DNA, 577 bp, Zea mays
catcatgctgcagttcgttgacgtggggacgatggtatcgccaacggtgtacgcgaggcggagcctgtgccacctcatgtgtgaccagcctgacgccgccctccgcgacgcaatgcaggcgcagtgcgtgtacccggactggccaaccgcgttcttcatgcaagctgtcgcgctcgcgaagctgaacatgcagagcgatgccacggacatgttgaacgaggcatcgcagctcgaagagaagcggcagaagaacacaaaaccctgatgatggcttgttcctggtccaggggttgggaatgtagctgggggagtgtgctgcagagtcctgcgattgtaactacctggtttcgcatttctgtcatgcagttttttttggggcccgtgtacatgttacatcgacgaaagtcgaaacaggcagaatgcaaggggatttttttttaaaaaaaaaaaaaaaaaaatataataaaaaaaataaaaatatatttaaaaaaaaaaaaaattaaaaatataaaatatttaaaataatagtttttatatataaaatttatattattaaaaatatttttttattataatt

SEQ ID NO: 269019 - DNA, 555 bp, Zea mays
ctggccatatatatcatcattaaactatcttcatcggcttaaaaaaaaaaaaaaaaataaataataaaaaaaaaaaaatatatagaaaaaaaaagggcggccgatcaccacgcatttgacgcggacgcgcgaggaagcaagcaccgccggagtcggagggaaaaagaaaaaagagcacggacgattcgcagctgcagcctgcacaggcggaggcgaggaggaagagagagcccccacgatcggctcgccgggacggccgagggtgcggtggtagtgcgggcgcgtggccccgcgcgtggagtcgggatccgtattgctctctagcagccggccggtggcggcgctcggcgtccgaggccagagcccagagggtgactgacagagagagaatcgtccatccatgggaggatccgggcgcggcgcgcatttcttggacgcgtgcttcctctgccggaagccgctcgccggcaaccgcgacatcttcatgtacaggggcgacacggcgttctgcagcgactagtgcaggagcgcgcaaattgcggtggacgaggcggc

SEQ ID NO: 269020 - DNA, 1104 bp, Zea mays
atccaaagcagggaccgaatggacatggaccggctcggaggaggcggggcagcagcggagggggaagatgacgccggtggtcctcaggctgttcggcgtggacgttcgccgggttggcgccagcggggagccggaggagtcgccgatggacctgaggaagagctccagcatgcccgacctcaccatcaacccgctgctgacgccggaggagaaagagggctgcaaggggtacgcctccgacgacgcggagctggcgtccggccagcagaagcgccgccgtcgcaaggcacaggacaggaagaaaggaattccatggaccgaggaggagcacaggaagttcctggacgggctaaggcagctgggcaagggggactggaggggcatctccaagggcttcgtcaccaccaggacggcgacgcaggtggccagccacgcccagaagtacttcctccggcagaccaaccccgggatgaagaagcgccgggcgagcctcttcgacgtcggtatcgcggactacaaggacaaccaggtgccaggccctcagagcatcgtcgctgccaaaccggcgcctacgcaggagataatccacaccgaccgcggcgacgtccccataccaagacgatatagaggcctcggagagattttaggcagtaacatgcaggttaatcaactgactgactactactatttcaacaagaactcccatgttcccgcggggacttcgctctccatggcctccggcctggaaacggcctcgaccgtcgacagcctggggctcagcatcgcgcccccttcccggtgcgtctgcggcggcgcggcgggggccatcaaggttctgtgactcggccgggacgccgagcgagctactcgcatttggctctcggcccctgcacgcatgcgtttcatcaagtattatcaccctcgccaggctgccgcgggcagccgggtttcggtcttgctggctgtgttggtgttgttctgttgtgttgcgttcatgtgttgcgttgtgcgcaaggaatgtttgtgaagtgcagtgcgttgtaatgtgaacgctaccagtgttgtggaatggaatcaggggagagggaacagctgggattgggg

SEQ ID NO: 269021 - DNA, 495 bp, Zea mays
gtacgtagtcgattcgtcgagagaggctcgagagattttaggcagtaacatgcaggttaatcaactgactgactactactatttcaacaagaactcccatgttcccgcggggacttcgctctccatggcctccggcctggaaacggcctcgaccgtcgacagcctggggctcagcatcgccgtcaacggcctggagctcagcatcgcgcccccttcccggtgcgtctgcggcggcgcggcgggggccatcaaggttctgtgacttggccgggacaccgagcgagctactcgcatttggctctcggcccctgcacgcatgcgtttcatcaagtattatcagcctcgtcaggctgccgcgcgcagccgggtttcggtcttgctggttgtgttggtgtgttctgttgtgttgtgttgtgcgcaaggaatgtttgtgaagtgcattgcgttgtaccctaatgctagcagtgttgtgggaaaaaaaaaaaagaaaggaaa

SEQ ID NO: 269022 - DNA, 378 bp, Zea mays
gccagagcgagacgcgactgcttttctgcttcatccacattgggagctagctagcttagcgcgttcacgcatgcgctttccgggccgtctccggtggtttagctcagcagagcggggaaggaagaagatgacctccgtgagcgcgaggcccgttggcgtggggtactgcttcggcggcgcgaggtgccagccacggtcgcgggtgcgggtttcggccgcggcctcggcagtggccgcgcccgcgcccgcgatggcggcgacgatgtacgagctgctcgccgtctaggagacggcggggcccgacgagatcaaggcggtttaccggcgcgccgcgcggttgtggcacccgtactcttgtcccggttgtgccaaccgctt

SEQ ID NO: 269023 - DNA, 728 bp, Zea mays
tttctggcaagagaagcagatgaatcccgtctgcgtgaggtttgtgagagcttcctaggtcctcccatgggcatgcttggatctgagtcatctacggatcccaaaagtccagcgtgggattctgatgttctcgggatgaagaagcaccaactcctcagggaagacatacttccatcgatggcatctttccggaaagtccagcgtctgctcaacgagtttatggatctcctatcagagtatgaagctgctaagagcaaagttgacccaatggatatcacaccggcgctaccacaacaagcaccagaagccaatgccaacgtggtcacctcgtagctgcaccagttccgttgatagttccgttgctggcgacttactgacctctcggtaagtatgataggatagcaatcttggtaagtccttatatgaaccaatcaattagttgtgcttgtaactggtagattgtttagcgagggaggcgacctcaggcaaacattgatattgaacccgttagctgtaacgctgtgtaacagtagaagaaagaagctgaggtcgccaggtaatttattgttaaactgtaggaggccgggtaaactcatgcccttcttgttccaagctaccgtatgcagtggtggcccactggccgtgtgtattttggcgaaaacctgcgtcgtcaaaaactggcattgacatcttttagaggaacaggaacaatgagcatttcggcggtg

SEQ ID NO: 269024 - DNA, 705 bp, Zea mays
cggaattcccgggtcgaccgacgcgtccgcccacgcgtccgcgatgatgcaaaaatatggagttgaaaatgtaaacgatcacttcatggcctgcaatactatttgtgatgccgctcaggaaagacaagatgctatgtatcagctggtgaaagagaaagttgaccttattcttgttgttggaggatggaattcaagtaacacctctcatctgcaagaaattggagaactcagtggaattccatcatactggattgacagtgaacaaaggattggaccaggaaacaggatcagctacaagctaaatcatggtgaactggttgagaaaaataactggttacccgaggggcctattaccattggtgttacttcaggtgcctcaactccagataaggttgttgaggatgctcttcagaaggtatttgagatcaagcgtcaggaaattttgcaggttgcataaattttaagcagagatttggtgaagagctgaatagttttggcttggcaaaggttactagaaacgttgcacaggcaaatgtttgtacagtagctaaggatgtaacgagttgggcacgaatactaccacgagtcactatccttgtgctggaatttacagtacggtggaaactaaaatggtgttatcattggcccgaataacatttgcatcagcctctctaacttctaaggtcaactttttgccacttgatg

SEQ ID NO: 269025 - DNA, 275 bp, Zea mays
cgcaaatcaaacaacaatgcttaaaggagaaactgaagaaattgggaagcttattgaaaagacgatgatgcaaaaatatggagttgaaaatgtaaacgatcacttcatggccttcaatactatttgtgatgccactcaggaaagacaagatgctatgtatcagctggtgaaagagaaagttgaccttattcttgttgttggaggatggaattcaagtagcacctctcatctgcaagaaattggagaactcagtggaatccatcatactggattga

SEQ ID NO: 269026 - DNA, 1354 bp, Zea mays
ttgggtcctacccctgctgtctttttcaaaaaactgttccttcctaggctcaagtcttggatccgcaatgttgtagcagaaggtaatggcactgaaggcaaccagcttaagcctaggattgatgatgaaacggccgatgctgtaaaggcttctgcttcggctgtttctgctattgccaaaacaaaccaacaactgcttgcttcaaaggatgaagaaaagaagatactagtgacgttgacacaagctctagattcccaagccaaggagttaaaatccttgaccgagtcaatcaatcgtaccagggaacccataaacattaccagagacgataggttttctcagcaccgcccactggaagaccatgcccctactgttataaggaatggggcaattaacagttcatggagagcctctcagcaaactaacatgtatggtgtgtcacatggtgactttggttccgcaaggtctgcttcattcgtgccagcacctgctgaacctacagctggatcattttcaagatcttatgccgagcagacgtccaccgctgcacaacgagcggataggtcctctggcggtaagccatgggagatgcagcagtattcgcagcagaggcctggttatggatccaactcccagttgaatgatgatggatcatactctgatgcccaggacagctatgctccttcctattaccagaatggaaaggcccctgattttcaagcggatgaacctaggcctttgacctacaacactgggattgaggagagaccgccgccgcctcagcgccgctgggtgccccctcagcctccaggtgttgcgatgccagaagcagcagctgccatacgtcaaccaaaggcccttccaaagcagccctccagcgatgcctctgaggcagctggtgagatgcaggtgaatggttcaagtgcatcggatgctgtgactgaggttcctgttaatggtgctactgcaagtgatgctggacgcagtgagatccaagaacaatcagtggcggcctaagtgaaaccaagaccagctaagaactgggaagcaatctaagagagattcaggatctctagtacatctggggggtttgtcatacatctctgaataacgtctgtatcagaacagcggggcaaccacaccgatgggtacccgtaataatgcaataagtagcagatagtttctgcatttagattaatgctacttgtacacaggagaacatatcaataatatttctatggctgttcgattgagggtgcttaaaacctgtgcttgtgaattgttgtattttgatcttgatcttgtgatgactagcaatcgcaatggaccaaatgcacatggtcgtttgttttct

SEQ ID NO: 269027 - DNA, 540 bp, Zea mays
ggtgccccctcagcctccaggtgttgcgatgccagaagcagctgctgctatacgtcaaccaaaggtccctccaaagcagccctccagcgatgcctctcgggcagctggaaagatgcaggtgaatggtgcttcaagtgcatcaccggatgctgtgactgaggttcctgttaatagtgctaccacaagtgatgctggacacagcgagatcgaagaacaaccagtggccgtctaagtgaaaaaccgagaccagccaagaactgggaagcaatctaagagagatttggggtttctggtacatactggggtttgtcatacatttctgaataacatgtgtcagaacagcatgacgacaacatgtcaataagtagcagatagtttctgtatttagagtaatgctacttgtacacaggagaatgtcaagcattatctatggctgttcgatcgagggtgcttaaaggttgtgaattgttgtcttttattttgtttgcattttgctgttcgcttcattccattcaggtgttgtttttctgggtttgccaa

SEQ ID NO: 269028 - DNA, 667 bp, Zea mays
gctgcctgcgcagacgctaacacacacgtttcccatggcagcgtccacggcctcgcgcatcttcacgcccttcctccaccggcaccagcggcgcacgaaggcagtcgtggtcgcagccgcgagcccgcccgacgccgaaccgactcctgcgacggcggacggtgcagggccggggaagaagaagacggtggacaccaggatacactggtccaaccccgacgaagggtgggtaggaggcaaggccaagaaggaaggcgacggccgcggcagcagcaagaacgagccgttgggagggagattcgcggacctcatcaacaacgcggccgagtctcactaccagttccttggcatagcgccagaggcggacatcgaggagatcaagacggcgtaccggcggctgtccaaggagtaccacccggacacgacgacgctgccgctcaaggtggcgtcgcagaagttcatccgcctgcgagaggtgtacaacgtgctgagcaaggaggagacacggcggttctacgactggacgctggcgcaggaggccgagagccgccgcctgcagcagctcaggtccaggctcgaggacccatacgagcaggacatcatcaactacaaacccgtgccagacatggttgccgcctcggcggcaagaacatgaagcttagcgatc

SEQ ID NO: 269029 - DNA, 619 bp, Zea mays
cttctggatagaagttggggcccgcgtgcagcgtcacagcctcccacccacaaagagataggcggatagcgtctatccccaatcctcccgccgcggcgacgccttcccctccctccttcctccgtcccatgctccgccgctgacacgttcgcccgacttaaccttacgatggccgccgccgcctccgccatcaccgccgtctccggcgttgtgcttccccaaaccttcctatcccaccggtcgccgccgccgcaggtcctagccgtggcctcctcattccgccggctctccttgtgcgcttcccatcgccgaatcactcacataatcccccgcgctgatgcaagtgccgaagctggagaaccggagcctgccactgcttcagctgaatccgaagaggaggtggccgaggggtctgtcgctgtggcggaggcggaggaaccgacgccgccgagcaagccgaaggttaagttcggcgaaataattgggattctgaataagcagttcattgaggaggctgagaaggtgaagactgtaccggatctgaggcctggcgatatcattgagcttaggatgcaacggcccaacaaaaggagattgtcgctctttaagggcataatca

SEQ ID NO: 269030 - DNA, 386 bp, Zea mays
  unsure (1)..(386): unsure at all n locations
cggaattcccgggtcgaccgacgcgtccgaaggggcacggatgagggctacagcgcgggacctgcaagccagggtggtcaaggccttcgggcctgacggtggatccggcgacaacttccccaaatttgtcgacacttgcctgactgtagggagagacatgcacttgaacgcccgtggtaatcatccaatgtgaaaccctaaaataaatctactagagcatggacagatctccaacatattggacctctctcatctttttgttttacatatttttagttcaaaataaatttacagatcataaacattctgtaacatagatagttgcaggttacggcctatcaatatataaacccaccctttttctcaataaaaaaaaaaantgaatg

SEQ ID NO: 269031 - DNA, 668 bp, Zea mays
ccccacgcgtccgcggacggtgggtcccggcccactcacaccgaactcgtgaagcacagtttccatcgtatgatgtcgaggaagaggaaaaagaggggcaaagaagaagaaggtgctgtgagcgaacactggtcgtcgcaccgccatcatcggcggtgtgagtgcatgcagcgaggaagcatgcttgccatgccgtccgcccggagcttcggcgccgcgggctggtggcgtgtgagcagggatgcttcggcggtgcacaagaaagaaggcaagtcttatcggcaagggaaggctaagcctttcttccaggtctccctctctccatctaaatcattctatgtgtttggaggagggggcaatcgatcgttacttactggtctcctgatccttagcggtcatgtctctgtgtgtgtgtgtgactgtgtgctccatctccgtgttgatttacagctagaataatgaccagttcagagtgaatgtgtgagcgtgtgtgttcaagtgtcagtgagtgaacctggcgttgtattttgaccgtgtgagtccgtgtcgtattttcagttgtctggtgtgttgtgtgtgtgagtatctctgaataagaatgtaatgctatatgtgtggccgtgtaattaacttgatcgagctgatctttaattggttctcgatagaag

SEQ ID NO: 269032 - DNA, 1309 bp, Zea mays
acgcccacgcgtccggcagaggacactcctcctcagaactctcccttccctcttgtaggggccaaaagggtcagagatctaggaagaagagaactagtccccaagcctaacaagaaagcaagctcttctgcaactgttggcattcgccttaatttgtatccatatcccaatggcaggcctatctctgcaacacccctgggcattcactttcggcctcctaggcaacgtcatctccttcatgaccttcctggccccgataccgacgttctaccgcatctacaagagcaagtcgacggagggcttccagtcggttccgtacgtggtggccctgttcagcgccatgctgtggatcttctacgcactgatcaagtccaacgagacgttcctcatcaccatcaacgcggccggctgcgtgatcgagaccgtctacgtggtcatgtacttcgtctacgcgaccaagaagggcaggatgttcaccgccaaaatcatgctcctcctcaacgtcggcgccttcggggccatcctcctgctcacccttctcctcttcaagggtgacaagcgcgttgtcatgcttggctggatctgcgtcggcttctccgtcagcgtcttcgtcgcgccgctcagcatcatgaggcgggtgatccagaccaagagcgtggagtacatgcccttctccctctccctctcgctcaccctcagcgccgtcgtctggttcctctacggcctcctcatcaaggacaaatacgtcgcgcttccaaacatccttggcttcaccttcggcgtggtccagatggtgctgtacgtggtgtacatgaacaagacgccgctgccggttgccgacggcaaggctgccggcaagcttccctcagctgcagatgagcacgtcgtcgtcaacgtcaccaagctcagcccgggccgactcccaccagtaacacagatggcggcggttcccaccaagagctgcgctacagaagcagccgcgccggcgacgctgcccagcagggacgtggtcgacgtcttggtcaaccgccacagccccgccgtccatgtgacctagctagatctcatgcccgtgcagcatgcgcccgccatatatacggactggtcatgagcatatgatggaattataagtaattaattgccatgtaagctagctaatgatgcatggagacataggtcagaggtagagggccaagcgcgctctctctctctctctatctatctatatctatttttatatctatatagagagtctatattcatgtttaatttgccgcattatattgcagatatctattaatttgcatgg

SEQ ID NO: 269033 - DNA, 645 bp, Zea mays
cggaattcccgggtcgaccgacgcgtccggcgtgttgtacatgaacaagacgccggtggcggcgactgccgagggcaaggatgccggcaagctttcctcagctgcagacgagcacgtcctcgtcaacatcgccaagctcagcccagccctcccggagaggagctccggggtgcacccagtcacccagatggcgggcgttcccgtcaggagctgcgctgctgaagcaaccgcgccggcgatgctgcccaacagggacgtggtcgacgtcttcgtcagccgacacagccccgccgtccacgtggcatagattctcgatcgatcgcgtgcatggcccatgcatgcgcccgccacacgtacgctagcttttatatattcgaaggacttgctgctggtcgtgagcatatatatatgatggagaaaatgattaagtagtatatatataagtaattaactgccatgcatggaagctagctaatggatggaggcagaggccagaacgatgaagggggaagctatacatatatgtgtgtaattaatatagatatatgggctttgtgttcatctttgcagctatgtattaatttgcatggatatctgttattcctttttatgtgtaacgtcttctaataaaatgtaattgaaccc

SEQ ID NO: 269034 - DNA, 744 bp, Zea mays
cgcccacgcgtccgcccgcgcgtgtttacttgtgatccagactaagttcgtttagcacatgcccttctccctctccctctcgctcaccctcagcgccgtcgtctggttcctctacggcctcctcatcaaggacaaatacgtcgcgcttccaaacatcctggggttcaccttcggcgtggtccagatggtgctctacgtgttgtacatgaacaagacgccggtggcggcgactgccgagggcaaggatgccggcaagctttcctcagctgcagacgagcacgtcctcgtcaacatcgccaagctcagcccagccctcccggagaggagctccggggtgcacccagtcacccagatggcggccgttcctgccaggagctgcgctgctgaagcaaccgcgccggcgatgctgcccaacagggacgtggtcgacgtcttcgtcagccgacacagccccgctgtccacgtggtctagcctctccatcatcgcaagcaagcatgaatcgagtcgagtccgaacgcataattaagcacccaatctattgaatatataaatacgcgcgccccaacatgtgcgccatatagccgtttattccaacccttagctttgtttaattctcaaatatgcaattcaagtaatgtactttcatgcaaccaggaatttcattttcccctccagaataaccataagaattttctatagcacgttaatgtacaaagttagtaatatatatatatatatactat

SEQ ID NO: 269035 - DNA, 467 bp, Zea mays
cccacgcgtccgcgcgcccgtggccaacacacacagagagaggacaactcctcacaactctcccttccctcctgtaggggccaaaagggttagagagtaagagaagtagttcattcccttgcccaacacaagaaaacaagctctcctcatcaccctaatccaagcaactgcttgtgtgttgggaaattcttgtgacccctgttatattattatccgtgtagctactagcttcattcccccctttgtacccatcaaatggctggcatgtctctgcaacacccctgggcgtttgctttcggtctactaggtaacgtcatctcattcatgaccttcctggccccgataccgacgttctaccgcatctacaagagcaagtcgacggaaggcttccagtcggttccctacgtggttgcgctgttcagcgccatgctgtggatcttctacgcactgatcaagtccaacgagac

SEQ ID NO: 269036 - DNA, 515 bp, Zea mays
cccacgcgtccagagaactcagagctcttcgtgccctcctgcaagcgccaaggaggaagagaagtgtgcgtagttccatagacccctgacaaatcagcgccatcatacaacaccagcaactgttggtttagttgtaaatctgccttgcagccgtattatctgtatcaccgtttttgtgtcgcgatggctggcctatctttggaacatccttgggcgttcgccttcggtctcctaggcaacgtcatctccttcatgaccttcctggccccgataccgacgttctaccgcatctacaagagcaagtcgacggaaggtttccagtcggttccctacgtggttgcgctgttcagcgccatgctgtggatcttctacgcactgatcaagtccaatgagaccttcctcatcaccatcaacgccgccggctgcgttatcgagaccatctacatcgtcatgtacttcgtctacgcgcccaagaaagccaagctgttcacggccaagatcatggccctcctcaa

SEQ ID NO: 269037 - DNA, 756 bp, Zea mays
  unsure (1)..(756): unsure at all n locations
aaggacatcgntgctggcgctggcagtgctggtattggagtggtgtatgctgcaagcagaaccatgtcaagaatgttgggaaacaatgacgttgcttttgagagtgcgaggagtcaattctggatagtggatgcccatggcctaataacagaagaccgagaagatatcgatccagatgcacggccttttgctagaagaaagagtgagcttggtcaccagggcctaagtgagggggcaagcttagttgaagtggttaaaaaggtgaagcctgatgtcatacttggattatctgctgttggtggtttgttctcgaaggaggttctagaggcactaaaagattcgtcctcgtcaaggccagcaatttttgcaatgtccaatccaactaagaatgctgagtgtacacctggggaagcattttcaattctaggtgaaaaggtcatctttgctagtgggagcccatttcatgatgtggatcttggtgatgggaagattggccattccaatcaagggaacaacatgtacctctttcctggaatagggcttggaacccttctgtctggtgctcgggttatctctgatggaatgctgcaggctgcagctgaacgtttggcttcatacatgaaagaggaggaggttctcgaagggataatttatcctccaatttccaggaggtggcagcagcagttgtgagggaggcagtagcagaggatctagctgagggataccgtgacatggatgcacgtgagcttgcacgac

SEQ ID NO: 269038 - DNA, 711 bp, Zea mays
gtttaagtaaggaaaaacactcaacccaagaggagagacatccagaaggcagtgcatggaagggctagaaaagttacccagaagggagctcttacctgtatgggcactgctgtcagcatgtcagagtccttatcttaacccatacctttggggaacatagcggggcctttttttgtgcaagaaccatgtatcgggcctttgttagtagcgtcacaactgcaggacttaccaccatgctacaaacatgttctcttggttctggacaacatgatactaaagttctagaggcactaaaagattcgtcctcgtcaaggccagcaatttttgcaatgtccaatccaactaagaatgctgagtgtacacctggggaagcattttcaattctaggtgaaaaggtcatctttgctagtgggagcccatttcatgatgtggatcttggtgatgggaagattggccattccaatcaagggaacaacatgtacctctttcctggaatagggcttggatcccttctgtctggtgctcgggttatctctgatggaatgctgcaggctgcagctgaacgtttggcttcatacatgaaagaggaggaggttctcgaagggataatttatcctccaatttccagaatacgtgacatcactaaggaggtggcagcagcagttgtgagggaggcagtagcagaggatctagctgagggatacgtgacat

SEQ ID NO: 269039 - DNA, 446 bp, Zea mays
cccacgcgtccgatcggctcagaaacgcaggcagcccagcccacgccgcgaggaagcctgaggccgagagaggactgagcaagcgtcccgcgagaaactggtgttccggaccaccacgcggatgggctcgggcgacccggcggccgaccccctttcttccttcctccgccaccccggcgcgttctccttctcccgtcgcgtcgccatggcgcgcgacgccaccgccacatccgtgccagcgctccgcccctggcttgttgacctcctcccgctcctcgtcgtcctcctcatcgccgcccacgtcctcgccctcggttactggatctacaggctcgccacggacgggtccaggcagcccgcgcggagcaagaagcactaaggggacggcgcccgcggccggatgcttgaaaccagtttgtatttcagtcctgcatccttggcttgtt

SEQ ID NO: 269040 - DNA, 560 bp, Zea mays
  unsure (1)..(560): unsure at all n locations
agcgnagtgacagcaggggtgaagaatctattgtccagtgggaggcagcttgcattgacgaggacggtcgaagctatcatggaagggaagccgaatccggacgtggacaactatctgctgtttgacccacgtgcccctagatcacgaagcggtgggcagttcaaagggccattcagagaagcaggggtgttcatgattggtggggggaattacattgagtacaggagcttgatggagctggcagaatgctcgcagccgccttcttccaagcatgtcatatacggagcaactgagattgtcaacggggtggagttcatcgagcaacttgcagaactggggcagaaagcggggctgggtctgggtggtggaaacaaccctccactacagtaattactaataaataagggggggttctttcacatcgtttgaacattgtcagatatgatatgatcatttgcttccttttgtatggtttaaaaaaaaaaaaaaaatatttttttaattttaattatattttataaaatataaaaggggcgggcgctctagaggatccaagctta

SEQ ID NO: 269041 - DNA, 359 bp, Zea mays
attcatttcaatcgaaccaccagtccaccacctgattgactagagcaaaagcacaagccgcccacgcatctcgattccagcagcagcagcagcagcagaagcggcgcgcagagctcgtgacgagagcaaccttccttccgttcctcgatcgccatggacaaggtgctggccttctcgatcctgagcgcgtcgccggccgacctctccttcacgggcgccggcttcggcgggagctgggcgcggctgtcgtggcggcggggcgcggacgaccagcgtgcgccgcggcgggagcagcagaagcagcagcaggaggaggacagggagaagcgagacttgcgctcccgcgacggcggagcgca

SEQ ID NO: 269042 - DNA, 1985 bp, Zea mays
tcaaaagttgtgaggcattatccatcagaagctacactcttcccatatgaactttttgtgaggctctatgtcaaggttgagttgcgcccgtttggtcttcataacctaggcaacagttgctatgcaaatgctgttcttcagtgtttgatgtttactcgaccactcacaacatatcttttggaagggcttcactcaaaaaactgttctcaaaacggatggtgcttcatgtgtgaatttgaaaaactcattgtggagggcaaacggcgcaagattgccttgtcaccaactgggatactctctcatttgaatgacattggcagtagctttggtcctggtaaacaagaagatgctcatgaatttcttaggtatgcaattgatgctatgcaatctgtatgcacgaaggaagctagaaaaggaggtgttcttcggtcagcggaagaaacaactcttgtccaattgatatttgggggctatttgcgatctaagatcaaatgttcaaggtgccatgttagttctgaacaatgtgagcccatgttagatcttactgttgaaatagacggtgacattagttcgctcgatgaagcacttgtgcgctttacatccacagaagccttggatggagaaaacaaatatcactgcagcgggcgcacgcctggggaacgtgctaaaaagaagctgacaatagaagaagcgccgaatattctgactattgcactgaaaagatatcagtctggcaagtttggaaagatcagcaaagccatcagatttccagaaaccctcaacatagtttgctatatgaatccagatactgatgacatatcgccagtttacagcctctatgcagtggttgtccatcatgatgtcatgaatgctgccttctctggccattatgtatgttatgttaaagatacacagggaaagtggtttaaggcagacgacagccaggtgaaacctgtatctctggacaatgtcatgtcaaagtgtgcttatatgctgctgtatgcaagatgttcaccgagggcaccaagctctgttaggcaggctatgtcggacccagcacacccgaagcaggccaagcagagggtggttccaggaggaccaacatggcgagtaggttccttcaacgggcaccaagctggccagcggcacagcgaccacgcggaagacgacgacgccacacatgctgcatttgacgaatatagatacgcaccatattcgccttcagattctccgagccctagcgagagttcatccctcttcagcaactccgacgcagggtcgcacagcaccgacagcagcgagagcacgaggaactcgaccagcaccgaggagtacgagtacgtgttcggagccgctgatcagatgtaccgcgtgggaggggggacacctgtggagggtggctatccgacgtattcccgttcgaggtccagcttgaatgccagctcatcggggcgggaggcatacagcgcgggtacctacgctgagcacaggactcagggcggcggtcccggtgggctttgggttgagggcgatgagagcccgtccttgttatacactgacagaagtaaacagccgtcgaacagtacgttaagagaccagtataggcagttagataggagcgatgagcgaacatgaccctgggcaaaccaggggcggtgttttattgagaagaccatctagggacaggaccgcccagacattttattgatgttgcagggtttgggctgtagtctgtagagaaataaatagtgtaatgtagcctgtaatatgtatctcgctgcaaacgtgtaaaaaagggaagaggaatgtcgttttccataaaagttgaatccccaacttggtgatataatcccgtagaacttgtaacaaaatgttatgtattccacggggatcgaccttgggacttttatgagtttatcataatgatttatgtaaatagtttatttgaaccaaatattttaaaaataacatgagtttcttattta

SEQ ID NO: 269043 - DNA, 534 bp, Zea mays
tatgtgttcggagctgttgatcagatgtacccaggaggccccatgggaggagcacctgtggagagtgatcaaatgtacccaggaggccccatgggaggagcacctgtggagagtgactattctacgtattcccgatccaggtccagcttgaataccagctcatcaggccgggatgcatacagtgcggctagctctgccgaccacaagcatcaggtcgtcggttccggtgggcaggttgagggcgatgagagcacgtccttgttgtatactgacagaagtaatcagcagttgagcagtaagttaacagaccaatataggcagttagatgggagcggacatgaccctggagaaaccaggggcggtgtcttattgagaagaccatctagggacaggaccgctcaaacattttattgatgtgcagggtttgggctgtagagaaataatgtaatgtagcctgtaatattatctcgctgcattgtgtaaaaacagaaaaaacatgtcgtagtccataaaaccaaaaaaaaaaaaagagag

SEQ ID NO: 269044 - DNA, 549 bp, Zea mays
caagatgcaaatccgatgagcgtgctaaaaagaagctgacaatagaagaagcaccgaatattctgactattgcactgaaaagatatcagtctggcaagtttggaaagatcagcaaagccatcagatttccagaaaccctcaacttggctcgctatatgaacccagatactgatgacatatcgccagtttacagcctctatgcagtggttgtccatcatgatgtcatgaatgctgccttctctggccattatgtatgttatgttaaagatacacatggaaagtggttcaaggcagatgacagtcaggtgaaacctgtatctctggacaatgttatgtcaaagtgtgcttatatgctgctgtatgcaaggtgttcaccgagggcaccgagctctgttaggcaggctatttcggacccagcacgcccgaagaaggccaaacagaaggtggttccaggaggaacaacatggcgaggaggttctttcaacaggcaccaagatggtctagcgcatagcaaccacacggcaattgaccttacccatgcatttgacg

SEQ ID NO: 269045 - DNA, 641 bp, Zea mays
cccacgcgtccgcccacgcgtccggaccagcccacggtcagtagccatcggccactaccagcctcgggcgctggctgtggcctgtgggctgggcggggcccctttaaatgccggccatacgcgcggcctaaagcctccagagccacgctgcttcccggccgaagcgtccgtccgcgcccacggtttccattccaccccccaggccccaggcttgcgccgactcgccacttgtaccgccggccggtttcgccgaaggacgaaacgcctcgcgcgcggagacctgcatataagccggccgcgtgtcgtccggcgctcccggtacaggcgatccgttcatcatccgctgcaaaccaccaggcaccagctccgcgcgcagaggccggaggactacgaccgacgagggcgacgaacaccaaggctccgaagtccgaggaggcaggaagcgggaggacgtcgggaatgggcgctgctcgtgactccgcggcggcgggccagaagcacggcaccggcacgcggtgcgagctctgcgggggcgcggcggccgtgcactgcgccgcggactcggcgtttctttgcctgcgctgcgacgccaaggtgcacggcgcccacttcctggcgttcaggcacgtgaggcggcgcct

SEQ ID NO: 269046 - DNA, 446 bp, Zea mays
ggagcgtttgacgcgagcatcgactgcggaataaccttcttcgacaccgccgaagtgtacggagcaggggtatcgggagcgattaattcagagagtttactaggaaggtttatcaacgagaggcagcggaaggagcaggtggacgtggctgtcgcgaccaagttcgcagctcttccatgggggttcggtcgtgggagcgtcatctgcgcgctcaaggcctcgctggatcgcctcggtgtctcgtcggttgagctctaccaactccattggccagggatatggggcaactaatactacctggacggccttggagactctgtggagcaagggcttgtgaaggccgtcggggtctcaaactacagcgagaaacgtcttcgagactcgtacgagcgcctcatgaagaggggggtcccgctcgccttcaaccaggtgaactacagcctgat

SEQ ID NO: 269047 - DNA, 545 bp, Zea mays
cggacgcgtgggccgggctccggcaccggcgccaccaaagctctggcagcagcagattcaccgtcctacaaggagctacagaagaagtttggcagttcgaaagaactgatcgagtcggcgaggagcatcatcacgtcgaaagaagcgccagctgcggtggcagatctaacgagccgcgtcgaagtggcgaagcaagtctctgcctgcagctacgagacgggcacgagctggggtcaggaggttggctgggtgtacgggtccatgaccgaggacgtcctgacggggcagcgcatccacgccgccggctggaggtcggcgctcctgagcccggacccaccggcgttcctcggcggcgcgcccaccggcgggcccgccagcctcacccagtacaagagatgggcgacgggcctgctggagatcgtcctcagccgtcacaacccgttcctcctatccgcgtccaagcgcctccgtttccggcagtgcctcgcctaccttgtcatcgacgtgtggcccgtcagggcgcccttcgagctctgctacgcgct

SEQ ID NO: 269048 - DNA, 482 bp, Zea mays
accaggagaagaggaagatctatgaccagtatggtgaggagggcttgaagcagttccaaagtggtggatgcggtggcggtggaatgaacattcaggacatctttaggaacttttttggtggtggtggtggtgggatggaagaggaggaagaacaaattttgaaaggtgatgaggtgattgttgaactcgatgcttcattagaggacttgtacatgggcggttcagtaaaggtttggagagagaaaaatgtcataaagccagcaccaggaaagaggcgctgcaactgtaggaacgaagtttaccatcgacaaataggtcctggaatgtatcaacagatgactgagcaggtctgcgaccaatgtccaaatgtgaaatttgtacgagaaggtgaattcttgactgttgatattgagaagggaatgaaagatgcacaggaggttttgtttttcgaggaaggcgagcctaagattgatggtgaacct

SEQ ID NO: 269049 - DNA, 650 bp, Zea mays
cccacgcgtccgcggacgcgtgggctcactcagcgtgcttcccttcagaaactcgatgggctgccacctcgccatcgccggcgccaccgccgccgccgcccgcgctcctcgtatctccgtgctcgccgccgcctctgcttcctccgcaggggaacccgcgcgccgcatcatccgccgccgcgcgccgccgggtcagcagggctctgccacagcggcccccgcgcctcccgcccagccgtccgtggcggaggtgcgccgcgccatcggcgtctccgacgacgctgcgtcggccgccgcatccatggagaagaagaacaccgcgttcatggacctcatctctaccacgcccatcggccagccggagagcgagcccgagcgccgcctccgcgaggccgccgagtgggtagtcgacaccactgagacgcgcgcttgcgaaggacagaagtctttcttagtcctatgcatgatgacatttcctgcttggttcttgctcctgtttcttgcccttggactctttaagttaccatttgatattccggttctggataatctcctaatgtaaggtgttaactattatcatttttcccttttcttttccaaatatacgagcttcacacactgaatatgaaaagaaatacatgtcactgctg

SEQ ID NO: 269050 - DNA, 453 bp, Zea mays
gtcatgctttacattctcttggctacgtttgggacatgcggatctctcccgccatcttgcattgtcctctgtgcccttactctgcccatgggcaaaacggtcgtggactacgtgctgaaacatcacgaggacaacgcgaagatattcatggcgaagtactactgcgtgcggctgcacgcgctgtttgggatggcactggcctctggtttggtcttggcccgaaatggtatattagcctgacagacaggctcatagtcataggcggcgctgaaatccaggagagggtccagagcaccctggagtttcagaatcagcgagcaccctgttcctcaatttacgttctgaatctgaactacttcggggcccactatcgaacaggccgatgagaatggggcgcagtactgagcagcttgcagtttgccaagaaacgggggagggaatggccctaggaga

SEQ ID NO: 269051 - DNA, 608 bp, Zea mays
gggcgccgacgaatccgacgtccctgacgcacagcgacgtcgtcggcacattcgggtacctggcgccggagtacttcatgtacgggaaggtgaccgacagggtggacgtgtacgcgttgggcgtcgtcctgctggagctcctgtccggccggaagtccatcagcagcgacgggtcgtcacccaagggccaggagagtctcgtcatgtgggcaactccggtgcttagcagcggcaacatctgtgacctgctggacccgaggctggacgtgaagcacgacgaggtggaggtcaggcggatggcctctgccgcgtcgctctgcctccggaggtcggctcgactcaggccgccgatatcgcagatactgagcatactacgaggagaaagcgcggcgagcatcgccgaccagggcgcgacggagccggactgcgtggacgacgaggcctaccccgccgcgaacgtgaggtcgcacctgggcctcgcgcttctcgacgtggaggactcggagtccatctccagcacggagcacagcagcggcctcagcccgttggaggagtacctgcgagaacgttggagccgatcgtccagcttcgactgatgattcatgccc

SEQ ID NO: 269052 - DNA, 1194 bp, Zea mays
gccacatgttctcgtgaaggcaaaacaacacagcgcgagcaacagcagcgaggtttaccccaattccccatttcccgtagcacggcagacgcgctcccttctgatttctgaatccccgacgccatggcctccgcaccgacgccgccgcccctcctcccggtgaccaaccctgcgtccggatcgtccccggccgccgccggaggctccgatgcgccgatcgctacgccggctttccggctcttcctgagccggatctccgactcggcgcggcgctcgctgtcggatcgccggccgtggggagagctcctcgaccgttcggcgttctcgaagccagactctctctccgacgccacctcccgcctgcgtcgcaacctcgcttacttccgcgtcaactacgccgccgtggtcgccttcgcgctgggggcctcgctcctggcgcaccccttctcgctcctcatcctcctgggcctcctcgccgcctggtgcttcctctacctcttccgcgcctccgaccagcctgtcgccctcttcggccgaaccttctccgaccgcgagacgctgctggggctcgtcggcgcgtccttcatcctgcttttcttcacctccgtcgcgtcgctcatcatctccgggctgctcgtcggcggggccctcgtcgcggcgcacggcgcgttccgcgtgcccgaggacctcttcctcgacgagcccaacgcggcccccggcaacagcgcggcccaagggctgctttcattccttggcgcacccggatctggggtttgaggcggcggacggcaagatctgatctactggcttagtgctggtttcgattgatgcaccggcttctgcgaagatcagcaaattcatcgagattttaacatatggctgagtttagtgccaagtattatacgagtttgtggtgtcagcctttcaatatggattgtatcttcattcgcaagcattgatgatacgttaatatgcttcattcgttcaatgttcgattagtatttctttttgctatacttggtatatgtttgtggaaactcatgataatttctgaccatgagttctgaggggtggcttgcgatgatgcattgattttacctcatacatgttgttagatggtgtatgtcttctctttaaaatcaaaaaaaaaaaaaaaaaaaaaaaaaaatataaaaaaaaaagaggaaaaataaa

SEQ ID NO: 269053 - DNA, 295 bp, Zea mays
ctcccccccacgcacaacaaattccccatctccccgtccccgtagcacgcgcgtccttctgccttcgccatggcctctgcacccactccgccgcccctcctcccggtgacaaaccccgcccccggatcgtccccggccgccgccggaggctccgacgcgccgatcgctacgccggctctccggctcttcctgagccggctctccgacacggcgcggcgctcgctgtccgatcgccggccgtggggagagctcctcgaccgttcggcgttctcgaagccggactctctctccgacg

SEQ ID NO: 269054 - DNA, 511 bp, Zea mays
  unsure (1)..(511): unsure at all n locations
gtccgaacgaagaaaaagcaaccgtcgagcttgcaacgccttacgcctccacactcaacagtcatggtcgtcatgggcaaggagcagcaacaacacgaggaggaggaggtgcaagggaaggtcgtccaagaagaagtgcaagtcgttcaagagacggtggtgccggtgccgtcggaggaggacaaggaggccgaggcggcgctggtgcacaagatctccagcctggccgccgccatcgcgaagctgccatccctgagcccgtcgccggaggtgaacgcgctcttcaccgagctcgtgacggcgtgcatcccgcgcagcagcgtggacgtggagcggctgggcccggagctgcaggagatgcgcggcgggctgatccgcctctgcgccgacgcggaggcgctgctggaggcgcactactccgacctgctggcctccttcgacaacccgctggagcacctgtcgctcttnccctacatcaacaactacattctgctgagccagctggagcacg

SEQ ID NO: 269055 - DNA, 395 bp, Zea mays
gtccgttcaaccagcaaagtgagtgtgatcgatcacacactgcacacactgccatggccgtcatgggcaaggaggacgagcaggagcagcagcagcacaaggaggaggaggtggtccaaggagatgtgcgagtcgtcgtccagcaggagacgtcggcggacgaggaggccgagtcggcactggtgcgcaagatctccggcctggccgccgccatcgccaggctgccgtcgctgagcccgtcgccggaggtgaacgcgctcttcaccgacctcgtcacggcctgcatcccgcgcagcaccgtggacgtggagcgcctgggcccggagctgcagcgcatgcgcgcgggcctcatcccgctctgcgccgacgccgaggcgctgctggaggcgcactac

SEQ ID NO: 269056 - DNA, 499 bp, Zea mays
agagaatgctggcctcatgaaaaggtgctttcttagctgccagcctcatgaaaaggtgcaataagtaacttggatgatgtgtacaccactgcccagatgatctcttacccctgttaaggggcgcatcacgacatcacgtagctacttcaaaaggaggaggatatgtaagcttcataggagatgatcgcatgcaaaccagtgtatgtatatggagtatatcgatctaatgctttagggctcgttcgttggcggttccagctaaattttgtattaacattgattagctagaacagtttctagcctcagcccaagctaaatttgaagtgaagactttaggtaaaacagaaatgcaactataacacaactgggttaattttacattcgctcggatgctgagatgtccaattttcaatagtgatgtaagtaaagagcaccgataatctttttccataaaaattctctagaaatgtgtcaaaaaaaaaaaaaaaaggcggccgct

SEQ ID NO: 269057 - DNA, 430 bp, Zea mays
gtctttcagcaatgtgcacccaattgggacagggatgccttgctgcgtgagcttgactatgtttgcaagatattccgtctaagtgaggactcaatggggaggaaattgttcagaaaatgtgctgagctagttgaaagattgaggggtggttctgctgaatcaatgactcctagaattctgctacaagcgctgcaagagctggacattgattcctccaagaactttgagcaccaagagccagggcggctgatcactccccaggaggcctgcaaccggatcgctgaggtcgtccaggaagcagtgaggaagatggagatggtggccgaagagaaattgcggacgtacaaacgcgcccgcctcgctgtggaggcgtgcgacagggagctggaggagaaggcccgggaggcccaggagctgaaggtggagcggc

SEQ ID NO: 269058 - DNA, 662 bp, Zea mays
gcagagaaattttctcatcacaggggactttcttctggaacgacagcacttacagcaatgatttttggaaggtccgttgtggttgcgaatgccggtgactgcagagcggtgctctcgcggcgtggcactgccattgagatgtccaaggaccacaggccttgctgcatgaacgaaaggaagcgcgtagagtcacttggcggctacgttgacgacggttacctgaacggtcagctggcagtgaccagagcgctcggtgattggcatctggatggcatgaaagaggtgggcgagccaggagggcccctgagcgccgaaccagagctgaagatggtcacgctgaccaaggacgacgagttcctgataatcggcagcgacggcatctgggacttcttctcgagccagaacgccgtggacttcgcgcggcggaggctccaggaccacaacgacctgaggctgtgctgcagggagatcgtggacgaggcggtgcggcggggcgccagcgacaacctgacggctgtgatggtctcgttccacccggacgcccctcccccgagccgagccaacaagaggaccggcagggtcaccaggagcatttcggctgaggggcttcacagcctcagagtgctcctggaaggccagtggacgtcgccgggcggcgcggc

SEQ ID NO: 269059 - DNA, 552 bp, Zea mays
  unsure (1)..(552): unsure at all n locations
agcgtagtctctgaagcagctccggcgcttatagtgcgagggcgccatctgtttcttccgctcgtccctgatcatggccgggttctgcgtcgtcgcgttcggcttgagcttgatcctggtctatcggacgaaggtcgtgtacgcaggtctgtatgggaagccgcgtacttgaaagatctaaaccctcaagggccagatggcgtggatgtacaggcagtgttgtgtcttcccttcgttctgcacaagttctttgagagtagaacatgctgctgaatgctgatgcacctgagccatagaaggtgcagatgggaggttcattgtaaagtttacaacgaacgaagtatacggaggtcgaaagttcgcggtggaaatgctgtattttgctcaaattttgctgtatttttagttgcgagaagctgtatacgtatgtaataagtacgccagagtggaggccgaaagaacgtattcttttatgatttgttgaaacttgaaaccgaaacgaatgatcactagaatccgccattcagagttgtgccaaaaaaaanntattaa

SEQ ID NO: 269060 - DNA, 568 bp, Zea mays
gcacacggccaccgaaccgagcagcatcggaccagcgggcgcaccgagccagtagtcctcgaccggccatagaagcataacactacggtctacgggggtggagcggagaggtagatggcgagcgggagcggcaaggcgaaggcgtcgtcgtgggcggcggcgatgagcgtcggcaccgtggaggcgctcaaggaccaggccggcctgtgccgctggaactacgcgttccggcaggcggcgcagcagctgcagcagcagcgcgccaggaggccagcaggcgcgagcggctcagtcggccccggcagcggcagcggcagcgcgcacgcgccgcctgcttctgctccctcgggctgcgccgcggcggctaggaggagagccaggcagcatcatgaggaggagctccggacggtcatgtaccttagcaactggggtcccaacaacttgctacgaactaccagtagctggtgatcgagcaggcgaagcgaagctgggcgggcaacaacctgagatgactccgagggcccgtgtcaagcaaccttgcctctagctagctatgctagtaggcgct

SEQ ID NO: 269061 - DNA, 597 bp, Zea mays
gagcatcatgtagtaccactcaacgtttgtccatgtgagactcgtatcacatgctcagatacctggcttaaatctatcacattacaagcctattacatgcttcaattactagagtagcaagcggaagcggcatggcgaaagcgtcatcgtgggcggcggcgatgagcgtcggcaccgtaaaggcgctcaaggaccagtccggcctgtgccgctggaactacgcgttccggcaggcggcgcatcaacgcgccaggaggccagcggcaagcgcgagcggctcagtctgccccggcagcgcgcactcgccgactgcttatgctccctcggactgcacacgtgcggagaggaggagagccaggcagcatcaggaggaggagctccggacggtcatgtacctcagcaactggggtcccaacaactagcagctacgaactaccagtagctggtgatcgcgcgagcaggcgatgcgaagctggcagtggccgcgcatcaatctgagatgcatgacccttcgtgactacccctactctgttgtacgagcgatacgatcggcaaggccagtgcttgtggagagacattggcaattttgccattatg

SEQ ID NO: 269062 - DNA, 586 bp, Zea mays
cggacgcgtgggcagcaatagagaagggttttaaggaagcttgcaattcaggctcgttgagggggtcatcctgttgaaaatttaagaattgtattgactgatggggcttcacatcaggtggattccagtgaacttgcttttaagctagctgctatctatgcttttcgacagtgctacacttctgccaaacctgtaatattagaacctgtgatgaaggtggaactcaaatttccaactgagtttcagggcacagtaactggtgatatgaacaagagaaaagggatcattgttggaaatgagcaggaaggtgacgacaccattgtagtttgccatgttccgctaaacaatatgtttggatatgcaacagctattcgatcagcgactcaggggaaaggtgaatttacgatggagtacctggagcataatgttgtatcgcaggatgtgcagatgcaactagtgacctcgtaccaggcggccaagggcacagagtgattcttctttttacagaagaacaaattttgtttgcgaacttttagggcttgttcggttagctctcaatccatgtggattgagcgggattggatgg

SEQ ID NO: 269063 - DNA, 531 bp, Zea mays
agaagctcatgatcatccccaaggacgtcaggtgggtggaggtctccaatgccgtctattacgcgctggtcaacgacttcatgaagccacgaatcgacgagattgatgagctgctatcgtatggtgtgaatgttactgtatacaacgggcagtttgacgtgatctgctctaccgacggcgcaaaagcatgggttcagaagctcaagtgggacgggctcagggccttcctgagcctgcccaggcagcctctgtactgcggccccggcaaagggaccaaggcgttcgtccggtcctacaagaacctgcacttttactggattcttggggctggccactttgtgccctgccgaccagccttgcatcgcgctgagcattgatcggcagcatcaccccagtctccagtccagttggaggggtcttgtttatgccatacgcaaagatcaaatgaggactctcgagtacagtgaaggtcgcatatatagttgaaagccaattcagttgatcatgatacatacagttctccatcatgtg

SEQ ID NO: 269064 - DNA, 698 bp, Zea mays
gtttgttgcccaccggcccgctgctccaggcagctcctggccttgctggccctgtgcggggcgtgggtggacccgcccccggcatgatgcagccccagatctcgcgcccgccgatgcccaacctgtcggcccagccggtgtcgtacccgcaggtcgtgcgcccgccgcaggggatgcctccgccaatgcgtcctggaatgccgccgcagatgccgatgcaattccgcccgcctggggcgccgcctgctccgctccctggggcaccgccacaacagttcatgtggggaccgccgccgatggggccgccccaggtgaggcccgggatgccggggccgccaccgcctggaatgaggcctggaatgcctccgccaccattcggacagccgaggccagggatgccgcctccgccacctggtccacagcagcctggacagaacccgccgcagtagcttcctggataagcttcttgcagatacacctatggaagatttttttatctcgagagaggatcataatcgcacctggggaggacctgtgaattgcaccaaagcttcaccattctggcttgtattaaggctgtaaatttttcttgatttatgttgttggtagttgtaatatcttattttttgttattctttatttaacaattatatctttttttgtttttcttcttatctcatcttttttctgatttctta

SEQ ID NO: 269065 - DNA, 569 bp, Zea mays
gtaaaatcctacaaggatgatcaagatcaacttgccttccaagctggtggatttacaagccttacaaagctgatactttctgatctggaaattgtgaaactcgagataaagaaatatgcacttcccgaactcacagatttggaggttgagttgtactacgacgaaatcgaaatcgaggtatatggcgagcatgagtttgtgaagaaaattgaacaagtggatgaatacctctatggccgtatcactcaagttccggttgctccaaagaaaattggtcagcttcctagcatgaagcaacgcgtggctagctgaagatcacaggtaaactaagacaccaatatagtaccacttgctgttatttcgatttgcctgttcagtatgtacaactctgtcatgagtcgtgagtttattagtgtggatgtgatggcagattggcatgtctacataataattgctggccgcacctgtctacagtatgcatgtattcctaaattgtaaaataagtgaaaaaacgcatatgtgcgcgtgtatcatggtgtgtactcctaaattgtaaaataagtgaaaga

SEQ ID NO: 269066 - DNA, 355 bp, Zea mays
tatagtactacttgctgttatttcgatttgcctgttcagtatgtacacctctgtcatgagtcgtgagtttattagtgtgcatgttggtggcagatcggcatgtctccataataattgctggcccgcccctgtctacaggtatgcgtgtatgtattatattattatggaaccctgcgaaaaaaaccgtatgtgtgcgcgtgtatcatggtgtgtcctcctaaattgtaaaataagtgtaacaaaaaccaagtggatcattgaatgttgaaggatgtttttgtaaccagatgttccctggactctgttttttcgccccgggaaatatgatcccttatgtaaaaaaaaaagaagtgta

SEQ ID NO: 269067 - DNA, 347 bp, Zea mays
  unsure (1)..(347): unsure at all n locations
cgtncgaccgggctggcggtgactttcngatttgtactgaancgnangcagggaggagctgtggagcaaggtggagcaggtcgtcggcgacgccgacatcaaggacagggcgcgggtgctcaaggacgaagcccaccggtgcgtcgccgaaggagggtcctcgaacgacaacttcaaaaagctcgtgaatctgctcagtgaatgatgagaaccgggagactgggagcatcgtgtccagtgtcctggcgttgtaaatgttggtgcacttagggcttgtttggtttgatggctaacttgtcatattttacctaacttttgtgtctaaagttagttcttcaattcgaacg

SEQ ID NO: 269068 - DNA, 223 bp, Zea mays
gttaaaagcataataatcatttttttccgcccatttctatgaattccaacagatcgaagaacttcaacctgggagattaaaaaaaaaacccttttcggtataacattactgatttactggacacagcacgccatattcaggggtcgctcacttcttggacacgtaggcgtgatactgcgccatgggcacgacgacggcgattacctgccggccgccgacgaca

SEQ ID NO: 269069 - DNA, 468 bp, Zea mays
acttgtatgtcgatctccatccaattacaaatacatcaccgtacacggtggtagagaccatgtcacttgcgaaggctgccgtccttttccgggcactgggactcaggcacatgctcgttgtgccaaagaccccagggagacctccaattgttggaatcctgacgaggcacgatttcataccggagcatattcatgggctgtttccaaatatacacaagtcacactaatggaacactcaatcagtccatatcttttcttttcttttttgccgtcgccttgtaggttgtagctagctgtacgaaaacgaagctacttttgtccaatatttgctatcggccatctggccttttcttttccattttgtttcttcaggagtactccagaatcatataatcactggataatattgtatttgttcaagagctggttccctggcagaacactccataaagaaaaaaaaatataaaa

SEQ ID NO: 269070 - DNA, 333 bp, Zea mays
gtactgctcgtctgctccccgttcacccctctccctctctctctctctctctctccactttcctttcctggcagcgacgagtgacgacagtggcaggcgggcgggcgggcgagcgtcgacggcgttctctaggtcttcgttgtccccttcaccggcggctgccaacgccctttgccaggtcttcgttgtcaccttcgccggcgactgtcacggccccttcgccagctcttcgtctgccccttccccggtaccgggactgaagataagatggctgccttgccattggccaccgcagaagcatgtgatgctaatgctgctttaattatgaatggt

SEQ ID NO: 269071 - DNA, 480 bp, Zea mays
ggctatagacctgtactacaatctgatgagtgaaggcttctccccaacaccatgtacatatggtcctcttcttgatggcttattaaaatctggaaagatggtggatgctgaaaatctttttaatgagatgctagagtgtggatgcgaacctaattgcaccatctacaatattctactgaatggacaccgaatagctggcaacactgaaaacgtttgtcagctttttgaaaagatggttgagcagggaataaacccagatataaaatcctatacaattcttattgataccctgtgcacagctggaagattaaatgatggtttgtgttattttagacagctacatgaattaggacttgagcctgatcttatcggttataatttgctcattgatggtcttggaaaaatctgaaagaatagaggaagcagtcagtctttttaacgagatgaagaaagaaggaattattccaaacttatacacat

SEQ ID NO: 269072 - DNA, 428 bp, Zea mays
cagaatattgttcacttctacaatgcatttgaggctgattcatacgtgtacattgtgatggagctatgtgagggcggtgaactattagatcggattttggcaaaaaagaatagccgctatagtgagaaagatgctgcagtggtagtccgccaaatgctcaaagtagctgctgaatgccatctctcgtgggttagttcaccgagatatgaagcctgagaacttccttttcaaatcgaacaaggaggattcaccactaaaggcgacagattttggtttgtcagatttcattaagccagggaagaagttccatgacattgttggaagtgcttactatgtcgcaccagaagtactaaaacgacggtctggtcctgagtcagatgtttggagcataggagtcataacctacattttgctctgtgggaggcgcc

SEQ ID NO: 269073 - DNA, 485 bp, Zea mays
gcgccttgcaatgtgctgatcgcgcggcatatctcaaggaagccttcatggtagctggacgtgtacctatgctgagaacatcatctggtgctacgcttccatggtcaatggttcaggagagatgagtgaagctgctcaaagctccattctggatggtgtacatcagtacgagcatctgatttggctttgcctataaccttttgttttagatgacgcgtcaaggaggattccaatgttgatgtcagtggtctctctttctcgatcttccccatttttactttaccttatctttcttttttaaggaaccacttcttgtgctcctgatttccttttttttctttgcccttactctgtttagcccgcggtcagagggtgtttggtttgcccctgctaaaatttagcccctctcccatcgaatgtttgaacccccgttcggggtattaaatgtagtcggcttatatgatattcataaaaacaagtaccac

SEQ ID NO: 269074 - DNA, 471 bp, Zea mays
ggacccgcgcgtcttcgggcgccgaggagtacgtgcccgacaggttcctcggcgaggacggcgcgcagctgctccgccacgtcgtctggtccaacggccccgagacggcgtcgcccacgctgcaggacaagcagtgcgctggcaaggacttcgtcgtgctcatcgctcgcctcctcgtcgccgagctcttcctccgctacgactcctttgacgtccaggtcggcgcctccgcgctggggtcgtcggtgaccatcacctcgctcaagaaagccaccttctgagctctgatggaccgcccgtcaaagtcgccggaggctggcacgtgcacttctttttcaccgtagaatatactgcatcgtacttgtctgcccccatccctctcaatatttttctagcgctttgatgtgatcatcaggtataacaaaatgcctattcttagtaaaacgagagaccgtttttttttcaggcaac

SEQ ID NO: 269075 - DNA, 360 bp, Zea mays
  unsure (1)..(360): unsure at all n locations
cggacggtggngcagacgcgtggggtcgtcgagctcttcctccgctacgactccttcgacgtccaggtcgaccgcctccgcgcacgggtcgtcggtcaccatcacctcgctcaagaaagccaccttctgagctctgatcgaccgtccgtcaaagttgctagaggcgggcacgtgcaccaccgaatccctctcagaactttttttccttctgctagtgcctatgctactgtgcgatcgtcaggtataacaaaatgtatattcttaaggggtgtttggtttgcccctgctaaaatttagcccctatcacatcgaatgtttaaacctccgttcagggtattaaatgtagtcggattataaaac

SEQ ID NO: 269076 - DNA, 668 bp, Zea mays
cggctcgaggaaggatggtgctggggacgacggagccgaggagaagggcgcagaaaagaaagataagaaggacaagggtgagaagaatgacaaggagaagaaagagaagaagaaagacaagggcaagggcgccaaggagaagacgaccgatcccgtgaagctcagagcaaagctggagaaggtggacaccaagctgcaagacctacatgccaagagagaagatatcctgaggcagctgaaagagctggaactggaagaaggcggcaaggggaaggccaacgaagagaagcctgcacatgtacagactctggaacagggtggagagagcgtggtcaaggaacagagtcatgtcgccgcagcctgatccggttacacatgcacatgcatcacactgtaaatgaaggaacatacatcagctgagttgtgaaaaatggtacgcgtgcagtgtcaggatctccgtctctcactatccagtgagaagaacggaacatataggtatagctgctgagtggagtgcgtccttctcctgatacgtgacactgtaatacttggctggcttttgtgaataaaaggagtgtgcctgctgttgtcatatgaagatagtcataaaaaaaaaaaaagaatcgaggaaaaaaaaaaaaaaaaaaaagggggccggtttaaaaaga

SEQ ID NO: 269077 - DNA, 276 bp, Zea mays
ccgagaacacattcatgtcgccgcagcctgatccggttacacatgcacatgcatcacactgtaaatgaaggaacatacatcagctgagttgtgaaaatggtacgcatgcagtgtgaggatctccgtctctcactgtccagtgagaagaacggaacatataggtatagctgctgagtggagtgcgtcctcctgatacttggcttttgcgaataaaaggagtgcctgctgttgtcataaaatctgaaccaatgaatccggtcatcacttgtccaaaag

SEQ ID NO: 269078 - DNA, 1204 bp, Zea mays
gcctccgctggcgtggtggcgggggccttcgtgtgcccgctcgatgtcatcaagaccaggttccaggtacacggatggcccaagcttaccacaggcacaattggaggcagtgtaattattgggagtttacagcagattgctcaacgggaaggttttcggggcatgtaccgtggcctctccccaactgttctagcgctcttgcctaactgggcggtctactttactgtgtatgagcagcttaaaagcttactttcttccaatgatggaagtcatcaactttctttaggggcaaatgttgttgctgcatcatgtgctggtgctgcaacaactactgtaacaaatccactttgggttgttaagacaagatttcagactcaaggaattagagccgggccaatcccgtataaaggtacacttgctgccttgcgaagaatagcacatgaagaaggcatccgagggctatacagtggcctggtccctgccttggctggtatcagtcacgttgctattcagttccctgtgtacgagaagataaaagcttatctggctgagcgagataatactactgtagaagcattgagttttggtgatgtcgctgttgcttcgtctctggctaaagtagctgcgtcaacattgacatatcctcatgaggttgttcgatcaaggctgcatggccagcgagcattctctgatgccagatacaaaggtgtaatagactgtgtcagaaaggtttatcataaagagggtgtggctggcttctaccgtggatgtgccacaaatctgttgcggacgacccctgctgcagtgataactttcactagcttcgagatgatccataggtcccttcttgatctattccctgctgaatctgaaccgcacatccaacctctcaagcattgatcatacaacatttgtaccctatccatgctgccattcgagtttaggaccccagcaaccatccagcaatgttgtttactgtgccagatggctgttgtaaaagagagaattgtttttttccccggatatgcaacagtaattcggaagttcaaacaatagtgttggctgagcattagcatcttgtatgtaatagatttgttagcatgcatttgcgggaggtatattgggtatgttttcttgatgatgatgaaaagaaaacaatcttaccacatatgaaagaatgattgctatatttttttttcacacc

SEQ ID NO: 269079 - DNA, 485 bp, Zea mays
ctccgggcgcaccgtcaccggggtgaggctgtattgcgtcgacagcaacacctgctttcgctacgacgggagcaccagaggctaggatatattgcttcatcagtgacagggagccaagatgccggccggagggttctcggtctcggcgccgtccggcgtcgagttcgaggctaagatcacgccgatcgtcatcatctcctgcatcatggctgccacaggcggtttgatgttcggctacgacgtcggcatctcaggtggtgtgacgtcgatggacgacttcctgggcaagttcttcccggcggtgctgcggaagaaactggaggacaaggagagtaactactgcaagtacgataaccagccgctgcagctgttcacgtcgtcgctgtacctcgcggggctgacggccaccaccttcgcctcgtacacgacgcggcgcctcggccggcgcctcaccatgctgtcgccggcgtcttcttcatcgtggg

SEQ ID NO: 269080 - DNA, 774 bp, Zea mays
gcttaaaccacaacgcagtcaaccaccaaagcactcgaaaatcgaaaagcaaccctgcaagtgcaggcaaagaggggcgcgaccaaacagatccaatccaatggcgatggcaccgtccgcagcatgcgtcgtctcgttccccgcccgcccggcggcgtccacggccgggccccgcgccgccgcgggcaccggggcggtccacgctgtcgcggggtcggcggagggagccaagtggtgggcgccgctgctggggtggtcggggaaggccgactacctggaggccccggcgccggcgcaggatgaggcgccgcggaggcagttcgtgggggtgatgacggaggagaaggcccgggagctgcgggcgcggatggcgcagacggagtccttccacgacgccatgtaccactccgccatcgcgtcgcgcctcgcacgctcctcctagggttggtgcgcgcgcggccagctcgccggtgggttgcgccgccgccgtagcccgttctctgtctggccgtctctgtgtacatatggtagatttgtcagtagctgctcaagctgttggtgaaggagggggaaacgaaagagcaaggagatctggattttttttagcgtgtgctcctttgcttgttccatctccctccgccgcgttggttgctccccggcaggatcactcttctgtttttccggttgtgattcgacatttccggtgtgaactggcattatgctccgcaccaagaacctgtaaccccattgttgtagtctcagtttgctttcccc

SEQ ID NO: 269081 - DNA, 304 bp, Zea mays
gggagaaggcccgccagctgcgggcgcggatggcgcagacggagtccttccacgacgccatgtaccactccgccatcgcctgacgcctcgcccgctccgcctaaaccggccggccggccgccagctggccgccgccgtagatctagagctccgcccgcttttgtgtatacctggtttcgccttcattttcggggatgtctttgtttccactaccccattgtcgtcgtcgtctgcgtggagcaggaggggcagggatctgctggttttatgaggcgccctacccctccctcccattgtccaccgc

SEQ ID NO: 269082 - DNA, 527 bp, Zea mays
cccacgcgtccgcccacgcgtccgcccacgcgtccgcacacgagaaaaagaaaatcacggtgagctcatgggttaccaagtcgctgccttttctcgtggctccggcagtggcctcgcccactgccgccctccagctcacctccatggacagagctctggtttccctgcccgtgtcagcgatgttcgtctacgagaaccccatcgatcgtccggccgagaccattagaagagctctgtcccgtgcgcttgttccctactacccaatggccggccgcctcgccgtcactggggaccagctgaagctcgcgtgcaccggcgagggcgtagcgttcgtcggtgcgtcggcgagctgcaccctgcaggacgccaggctctgcgaccggcgtcccgtggtcagtgtcgaggacctcagtatcagctatgccggccagtacagcgaggaccctccacttctgctggtgcaggtgaccgagtttttctgtggcggcttcgttgtcggggtgacgtggaaccacgtgcttactgac

SEQ ID NO: 269083 - DNA, 2652 bp, Zea mays
  unsure (1)..(2652): unsure at all n locations
tggtggcgccgcggcggaattgccgggacgaacgaggccgctagttcctaccttcgtcccccccgccgccgtcgattcgtgctgcgctcacctcgacccagttcaatatcgccggcgagggaagcagcagcagaagctccggcgagaacccccacctccggctatcgcctggggataaagtggggtcggtaggggcggtgacctagggggagcaaaagggatccgatagggagagatgaagcaatcaatttattcgtccgccgtcgcccctgctaacgcccccactactaaccctaggatcatactgtcttttggcgtttcttctccggctctttttcgtttgcctgtcggatacaaggtggaacgtcttcagaagcttctccactagattagtgtaaatagtagacttgttcaggtttagtttggttggaagaattagtttctggttcgtgttcatttctgctagcaataatggctgcgatgaacggaaaggtattgggtaaatgtggaaggaacatgaatagtctcaagagaaagcgggagaaccccgctgcatatgctgctgacatattccacaactctgaattgcatcagcaccctgtcaatgattctgctgttaggtttcatgttgataaagaccgcaaggcaaagatcgtgtgccacttcaacaagcaggttttgcagagctataagaacttcatgagtagcgcaccacctaaacgtattttgcttcgcataggtgctgtctggaaagacttcccagaaaagattgtcaaattggcacaagctgacttcagggcgaaaaaaacaatcacagaaacaggatatcagaaccagctatttttgctggattttgcccatatgacattcatagacacgaagacaggtcttcagaggccgattgcttggatcgatgaaaatgaaaagtgctacttcccggaatcatttatacaagatcagaagttatttatgaagaaagattttggcaacggaaatcatgagtacattagtgaagagcgaaatgggacacgagaaacgaatcaccagtttggagcatcagaaagttccgctgaaagttcaaacttcggttcaagtactgaagatgtttccagtcctaagagagctagagctgaaaataattccatcataaaaaaatactgtgatatgggagaagctattggagaaaatgagccatgcactttgttgcctacagcctgtaacctactaccacgccaagctaatctgggtgaggtatcacgtgcccagcgcactattgaagccgtggagaagctgttgttgcaggggatgggttcagttattgaatccaaggacattattggaatctacaggactccattattggatgaccatggacaagtccgttaccataatcacgaaaagcatgtacaggttaccagatgtcatcgtggaaacgcaaatgtccgttatgcatggcttccttgctccaaaagcactgtgcatgaaatgatgctgaatagttctttacaagttcataagccgcccattaagtgtgcagcctatggagagggcactctccttacaccagcaaatcgttcggatgcctgtgtgaaatactctgatgttgatgaaaatggcattgtccatatgatgttgtgccgtgttataatggggaacgtagaaatagttcaccctggatctaagcagtaccaacctagtagtgactattttgatagtggagtagatgaccttaaaaatccacggcattacgttgtgtgggatatgaatctgaatagtcatatctattctgagtttgtagtcactgtcaaattgccttctaaaaccaaagattcctttgtatcgcaagaaaactgtcagaattcgtctgatctatcactggtgttgaactctagttcacctgattgtatttcacaggagatgaacctggaggcacctccagcattgggaggtggatgtgcagcccccatgctaggagattcgatggcaaaggctccaagctcaccttggatgcctttctctatgttgtttgcagcgatctcaaccaaagtgtctcctcaaattatggacatggttattggttgctatgaagagtttaagagtaagaaaataagccgatgcgaactaataaaggagctgaggcacgtagttggtgatagagtgctaatatcgacgataatgcgtctccaagataagttgcctcctgtggagaggcgtgagggaccgggtgcatcagctgccaagatggtggcgaaaccgtgaggcgggtgtcggtcggtcggtgggcgaggaatgcagaagggaggaagcagctgactttgacaaccctgtgggaagcagcaactatgaagcctcttgtgtcagtctttgtatggcggctgatgtttcttctttctgtgtcgtatgagtatgttttttcctagtagattgtatcaggagtttttcatttcaaattgagctgcgcatgttcttttgagcctttggaatagttcgtcaacgaaaaaggctccttttacctttctgataacagtgttgtgcattgttaattaatgtgggtcatatagaataatatatgatgtatacaatgtttttgagtttggctctcgctgcccaaaccaaaaaaaaaaaaaaaaaaaaaaaaaaaaaaaaaannaa

SEQ ID NO: 269084 - DNA, 1122 bp, Zea mays
gtttgtttgacttatttgtttcttgatctgtggcaacccaaatttccttgctaagcattttctgtgtcgcgtggcttcgtatcgcaagaagactgccagaattcatctgatctgtcactggtgttgaattctagttcacccgactgtatttcagaggtaagatgcattaacaagatagtactccaacactagagtcaactcctgttactaacttgatatacagacgagttccactgttggagcagcaagagtgcagtaattcagattgtgtgatttgacacaatacttgacttgtgtttgcgttattgagattataacttggagctgattatattcgctatctatgatagaaacctccaaatatgataagtttccttgtgaaaccatgctgttttagtcatgttggagttggttaaagaaccagttaacaacttccttttatgcataaaacaggagatgaacctggaggcacctccagcattgggaggtggatgtgcagcccccatgctaggagattcgatggcaaaggctccaagctcaccttggatgcctttctccatgctggttgcagcgatctctaccaaagtgtctcctgagaatatggacgtgattattggttgctatgaagagtttaagagcaagaaaataagccgaggtgaactagtgaagaagctgaggcatgtagttggtgatagagtgctaatatcgacgataatgcgtctccaagataagttacctccagtggataagcgtgaggaaccagacacatcggcgtccaaggtggtggcggaaccatgagatgggtgtcaggaggtgggcgaggaatgcagaaagggaggaaccagccgacttgacatagaaaaccctgtgggaagcagcaactatgaagcctcttgcatcagtcttgtgcatggaggctgctgtttgttctctgtatcgtaggtgtctacgtttgcgaggaaattgtatccggtgtttctctttcttcaaattaaaccacgcacatgcagctgccgtactttttggaccattgaagtgtttcgtccgtgaaaaaggctccttttaccttcccgtttgccttcctaagagcatctccagtagttttgtaaaataaaactccct

SEQ ID NO: 269085 - DNA, 473 bp, Zea mays
taccggccgcccattaagtgtgcagtctatggagaggggacattgcttacaccagcaaatcgctctgatgcctgtgtgaaattctctgctgctgatgaaaatggcattgtccatatgatgttgcgccgtgctataatggggaacgtataaatagttcaccctggatctaagcagcaccaacctagtagtgtctattttgtttgtgtagttctttgtttcttcttttttattttttcatttttcttctttctgtgtcgtatgagtatgctttttcctagtggattgtatcaggagtttttcctttcaaattgagctgcgcatgttcttttgagcctttggaatagttcgtccccgaaaaaggctccttttccctttctgataacagtgatgtgcatcgttaattaatgtgggtcaaatagactaatatctgatgaaccccccgttaaaaaaaaaaaaaaaaaaaaaaaggagaa

SEQ ID NO: 269086 - DNA, 1749 bp, Zea mays
ggaggaggtggcgcgcctcgccgagatcgccagggaggaggcgcttgcgcgggcgcgggcgcgcgggggcgcgccgcccgagctcctcgacgtgctgtgggaggcccggcgcagctccgtgcgcctccgcgcgctgcagcagcgcaaggaggccgcgcacgtcctcgagctcgagaggcggttcaggctcttcgacgacctcatccagcgggcgtcgcgtcttctgtcccccggcggtggtgccggggccaggatcggcacgggtggtgccgcggtcgaccacgacgaggtcgtcgaggtcgaggccacccgggacacggagctggacgccgcgccagccgagattggtcgcggaagcaagggcggcttgggactggaacccaaggctcgtcgtcgtcgtctgcgtcgctgcatgcttcggcaggtactgacacagaaaaactggggcttatacaagcggcatgcctcatagagccatcggcaaagaaggggactacagagctcaatctccggggtaagctggtggaccaagttgaatggcgtccctgtctcgcttgggaagttacaggatgtgactgagcttgatctatctgagaataggatcatggcactcccatcaacaattggtagccttagatacttgacaaagctcgacctccactcaaaccagctgatcaatctgcctgataccttcggggaactttccagcctgattgatcttgacttgcgtgcaaaccagctaaagtctcttcctacatcatttggaaatctcacgagcctcgccaatcttgacctgagctcgaatctgttgaaggtccttcctgattgtttaggaaagttgaaaaacttgagaaggttaattgctgagacgaatgagcttgaggagctaccctatactattggatcgtgcacctctctcgtggagcttagactggattttaatcagctcaaagccctcccagaagccattgggaagttggaaaacctggaaatcctgacgttacactacaacagaatcaaaggcctgcctacaacaattggccatcttaccaggttgagggagctggatgtcagtttcaacgaagttgagactatacctgagaacatttgctttgcagccagccttgtgaagttgaatgtcagcaggaactttgccgacttaagagccctgccaaaatcaataggggaacttgagatgctagaggagctggacatcagtagcaaccagatacgagtgcttccagactcttttgggcatctctcaaagctacgtgtgtttcatgctgatgaaactccactggaagtaccgcccaaagaagttgtaaagctaggggctcaggagctggttaattatatgaagaatatggttgctgcaagggaagtgagccagaatcaaacagataagaggagcttctggacctggctccgctcactgtttggttgttacaaaaagaatcaaggattgggaccagttccagcctagctgaaccatatcgtccgcatgtattgtcatgaattattcagttttgctccatctctcaagtcagcgacgaaatgaggcatgactactattattatttcaactttatgtttgtgtatacaatggataaatattgtagcgctttcttgtacataagattaggttatgtgtaagttcatctgtacgaaacactatcatgttaatccatgaaacacgagctgccgaatattactagcaaaaaaaaaaaaaaaaaaaaacggacgcatgaa

SEQ ID NO: 269087 - DNA, 618 bp, Zea mays
  unsure (1)..(618): unsure at all n locations
ggagaggggaagggctagagagagaaacaaatgtggttgtagatgtgagccaccctctttgtatccctcgtcaacttctcctaccaacttctttttcctcccccaccccttccttaccgtctcgcgcccgctccgcagcctcgcaccacccgccgccgccggccgaccggccggcaccgccggtggcatttgaagtatggttagcttgaggcgacgccgactattgggtctttgttctgggaaagactcattgccagttgatcttcctaagccgattgaaaatgaaaaaactgtggaagttgcacactccaatgtgaagccattcagtgtgcatccactacccttggcaaagacttctgatgtgctcataaaatcctcaaatggttctgatgattcagaggaagagaaaacccagtactatccaggctaggaaatcaagtgcagaaaacggcatagaagacagcagtatgtggatcaagangcatgcattatgaggggggtttatttcaaaaatatgaaatggcaggctgccataaaagttgacaagatacagattcacttgggtactgttgggacacaggacgaagcagcccggctttatgatagggctgcttttat

SEQ ID NO: 269088 - DNA, 984 bp, Zea mays
ctcgtaggtcgatacaagactctacacagacgtcgtactaacgggtccgcctgacttccctgctacttggggggcaatggaaaagttatatgatgctggcaaagctcgcgctattggtgtgagtaacttctcctcaaagaaattgggtgacttgcttgctgtagctcgtgtacctccagctgttgatcaggtggaatgtcatcctggttggcagcaaactaagctccatagcttttgtcagtcaactggtgttcatctaactgcttactcaccactaggttcacctggtacaacttggatgaatggtaatgtccttaaagaaccaataatcatctcaatagctgagaaactcgggaaaacttctgcacaagtggctctgcgctggaacattcagatgggtcacagtgttcttccaaagagcacgaatgaagaaaggataaagcaaaaccttgatgtttatgattggtcaattccagatgacttgcttgcaaagttctctgagattaagcaggctaggctacttagaggcaacttcattgtgaatccagagagcgtttacaagacccatgaggagctctgggatggtgaactttaggaaggacgccgttgtccgtcctgactcctgagcagggagcaagcagcgttccattagggcccgtcagatcatttcacctccaaagttgctcttttgaaatgaaggttcagtgctcggaagctctggtgccatcctgtatcacgaactattgagaaatttgtcggtgattttactttgtgctacgggatgtgctgctgcagtctatcctagtgtcagttgatttttctggtaaaactgtgaccaaataagttaattcgccaggcatcattactattggaatttcatcgttttatctcctcactattttttatgctccatgtattctctatgatgagaccatgttgagtagctcactcatatagtcacataaaacaatgttttacattatc

SEQ ID NO: 269089 - DNA, 827 bp, Zea mays
accacgcgtccgagcctctagtcggccagtcgggacgaagcctctcgaacgagcgaggccacgaggtgcccgccgcgcccagccggcctcgccgaccgggcccgccggcccctatataggcaggcgccacttcctcctcgcaaccaccagacgccagtccaccaccgcttcccgtgcagcgccctccctctacgttcccccatttcctgtgttggcggcgatggcgcggcacttcgtgctcaacaccggcgccaagatcccctccgtggggctcggcacctggcagtctgaccccggcgtcgttggcaacgctgtctacgccgccgtcaaggcgggttaccgacatatcgattgtgccagagtttacggcaacgaaaaggagattggtttggcgctgaagaagctatttgaagagggtgtagtgaagcgagaagatctgtttatcacctctaagctatggaatgatcatcatgctcctgaagatgtgcctgaggcactaaatgacagcctgaatgatttgcagcttgagtacctggatctttatcttatccattggccatttagagtcaagaagggagcaaataccagccctgaaaatttcgttacacctgacttccctgctacttggggggcaatggaaaagttatatgatgctggcaaagctcgtgccattggtgtgagtaacttttcctcaaagaaattgggtgacttgcttgctgtagctcgtgtacctccagctgttgatcaggtggaatgtcatcctggttggcagcaaactaagctccatagcttttgtcagtcaactggtgttcatcttactgcttact

SEQ ID NO: 269090 - DNA, 452 bp, Zea mays
gtgtaaataaaggcttgaataaggactattttttaagttcagtggccaaattgacatggcggtatggcctccatagctcataagcagcatttacccctcttaggaattaggataagacatgtaatgcctacattattgtcttggttcatattgcataaccattggagcaatgaaagcctcacccatttttggattgtctagattggtttgacgctgaagaagctatttgaagagggtgtagtgaagcgacgagatctgtttatcacctctaagttgtggtgtgctcaaatctctggtgatattccaatatttatgtctcatgcatctcattttggaaaaactcatacgaaaagcagatttcaagtggaatttggtcttcagtgtatatacacctacaatttggtatttctatgtgatttttttgtttgagtctgaacatcaataatttatgg

SEQ ID NO: 269091 - DNA, 1058 bp, Zea mays
aagaagatctcccatttctttgccaatcaaaccatccggaatgctgtggagaaggcgaagaaagtccacttcgtggactatggtatatactacggctttcagtggccgtgcctcattcaacggctctctaccaggcctggtgcccctccgaggctccggatcacggcaatcgacacaccgcaccctggttttcgcccagcagagcgcatagaggagacgggaaggtatctaaaagattatgctgagaccttcaatgtgcccttcgagttccgagccattccatctaggttcgaggcggttcagatagaggatctccacattgccaaggacgagctgctgatcgtcaacagcatgttcaaattcaagacactgatggacgagagcgtggtggctgagagtccaaggaacatggtcttgagcacaatcaggaagatgaacccacatctgttcattcatgggatcatcaatggctcctacaacgcacccttctttgcgtctcgcttccgggaggccttataccactactccgccatctttgacatgctggagacgaacatcccgagggacaacgagcagaggctgctcatcgagtcagcactgttcggtcgagaggcaatcaacgtaatctcctgcgagggcctggaaaggatggagaggcccgagacatacaagcagtggcaggtgaggtatcagagagctgggttcaggcagctcccgatcaaccaggacatcatgaagcgtgctcgcgagaaggtcaggtgctaccacaaggacttcctcatcgacgaagacaacaggtggttactgcaagggtggaaaggacgcatcgtgctggcgctctcaacgtggaagccagatcacaggtctccctagctcctcctcgagggcggctacatggttgcagatcgagcactgcactgtagatggatggaggcctgttcgtatctttggatgcttgggctggttgttcctgggatgcaacatatagctaggctaggctgtgctattcgaactactaaagcatgttttgcactgtctctatatagtgatgccatcaa

SEQ ID NO: 269092 - DNA, 934 bp, Zea mays
cccacgcgtccggccttttctcctcttctcgattcgaaatcgagtacgtccgaatgctctagaaccttccgggcctagggatctcgatggggcccgagcaggaggaggccgtgctggagaccatctgggacctccacgacaaggtcagcgacgcgatccacgccctctcccgcgcccacttcctgcgcgccgttcgccgccgctcctcggcctccgcccccggcctcgtggacgtcaagggcgggggtctgggtctcggcgcgcgcggcggagaccaggtcgtcgccctggcggccctggctgaggaggccaggagcctgcacgccatccgcgccgcgctggaggacctcgaggaccagttcgagtgttttctcgccgtgcagacacagcaacagaccgaacgagatttcgcgatggcgaggctggagcaaagccgcatcatgctcgcgataaggctcaaagagcatcacgggagaaaccacaaggtcatagacgaggcgtctgccttcgtccgcgatgtctaccaggacgtctggccttccctgtcagctaccaagtccgagagacgcgccgtcagttcaggtacaggaggaccaccagcgagaggagctcgtcgtggctgggatcatcatctccgagaggcggtagaacgggtcgtcgtgacgtgtcgctagccaggggttgaaagggggggaggagggccttgttttgttgctctgtacatgactcgctaggacgtagtgtcgcagtagaaggtttgttgttcggtctagttggtgtctggtgtcatttcgattggttttgatcgtgaaaaccgtattttttttaaattaatatattatatttttatatttattaattaaaataaaaaagggggcgccctttctagaggatccaagtttacgtacgcgtgtatgcgaacgtatatcttttt

SEQ ID NO: 269093 - DNA, 536 bp, Zea mays
catgctcgcgataaggctcaaagagcatcacgggagaaaccacaaggtcatagacgaggcgtctgccttcgtccgcgatgtctaccaggacgtctggccttccctgtcagctaccaaggccgagagacgcgccgacagttcaggtaacccggcgaagggtccgagcttcctcgcgcggatggtgtcctctagccctgctgtagctgggagcggtttcagtctcaaaaggctggctttagctctcggcctagtcgcggtgctgcagtcttcaggggtcggtgaccgcaggtacaggaggacccccaccgagaggagctcgtcgtggctgggatcatcatctccgaaaggcggtagaacgggtcgtcttgacgtgtctctagccaggggttgaaagggggggagggccttgttttgttgcctgtacatgactcgctaggacgtagtgtcccagtaaaaggtttgttgttcggtctagttggtgtctgttgtcatttcgattggttttgatcgtgaaaaccgcatttattttccgcccc

SEQ ID NO: 269094 - DNA, 1162 bp, Zea mays
gggttcctcttaagactgtaaacaggcagtgctcttctggccttcaggcagttgcagatgttgccactgctattaaagcagggctctatgacattggtattgctgctggtttggagtccatgacagtgaacaaagttagtcttgatggccaagcgaatcccaaagttgagctgttttctcaagcacgcgattgtcttctcccaatgggcctcacatctgagaatgttgcacaccgttttggcataacacgactggagcaagatcaagctgctgttgagtcacatagaaaggctgctgccgcagcagctgctggtaaattcaaagaggaaattgtgccagttcatacaaagattgttgatccaaaaactggtgaggaaaagaagatcgtagtctctgcagatgatggaatccgagtggatacttctcttgcagtcctgtcaaaactcaaaccagcattttcaaaggatggcagcactactgctgggaatgcaagccaagtgagcgatggcgctggggccgtcttgctaatgagacgggatgttgctatgaagaagggtcttccagttcttggtgtctttaggacctttgccgctgttggagttgatccagctgtaatgggtattggtcctgccgttgcaatccctgcagcagtgaaagctgctggccttcagatggatgatatcgatcttttcgaaatcaacgaggcttttgcatctcagtatgtctactgctgcaagaagttggaacttgatcctgctaaagtcaatgttaatggcggtgcaatggctcttggacatcctttgggtgctacaggtgcacggtgcgtcagtactcttctcaatgagatgaagcgccgcggcaaggattgccggttcggagtgatttctatgtgcataggttctgggatgggtgctgctgctgtgttcgagcggggagacggcgttgatgagctcaccaatgctcggggaatctcgacccacaactggctttccaaggacgccatgtaaagctacacccaccaaaatttgccggaactggtagcattgtttccagatcgctgtagggagcgaattggggaataaaatgattttgtatttgtcgcccctgctggggatttaggaagatttttacgccactggtatttgaacttgcttacctggcc

SEQ ID NO: 269095 - DNA, 1553 bp, Zea mays
cccacgcgtccgcccacgcgtccgcggacgcgtgggaccgtatccgagcaggacagcaggttgttcagcgatcactcgagcggtcgagccctcgcgccgcggagagtgtctccagtctcaagtacagcggaggatggagagcggcttgcttgacaccgccgcggctgccggtctctgcccggtggcggccgggcgccgccgcgtcgggagcacgggcacggcgaggtgcttcctcagctgctcctgcgcttccagagactgcagggtgagcgcgtcctactcccactccatcagccggatgctgagcggggtgcggtcggcggcgcgcaagaggctcttcaggagcgacccggccgagctgctgggcgtcgccaactggtcggagacgggcggcggcggcggcgccgggggccaccagcactggtggacggcgctggagaacaacttcgtgctggaggccaccgacgacgagtacggcggggtcgtcgtcgacgccgaccggctgccggccgacagggccgccttcgcgcgctccctcgcggcgtcgctctcctactggaagtccgtggggaaaaaaggggtgtggttgaaattaccggtggatcgagccgacttcgtccctttagcagtgaaggaaggcttcaagtaccaccacgcggaggaagcgtatttgatgatgacgtactggatccccgatgaaccgaatatgctcccagcaaatgcttctcatcaggtcggggttgggggttttgtgatcaacgaccaaatggaggttctagtggtgcaagagaagtaccgcgggtcgtcgctggatggcgtatggaaactccccacaggcttcattcttgcgtctgaggaaatctacacgggggccagcagagaggtgaaggaggaaaccggggtcgacaccgagttcgttgacgtcgttgctttcaggcatgcccacaacgtggcgtttcacaagtccgacctcttcttcatctgcatgctgaggcctgtgtcgagtgagatcaagattgacgagacagagattcaggcagcgaagtggatggcgctggaggagttcgtgaagcagcccttcatccaggaagaccacatgttccagaagatcatggacatctgcatccagcgcctccgcaagtgctactgtgggctgacgccgcaccacgtcgtctccaagttcgacgacagaacgtccacgctctactacaatgtcgccgagcctgaggacgtgaactgcagcgccgcctgatgtaatatgatgtgagggggagggggagccaccccagcatctactagtctaatttttgctgcgcagaagtttcatgatatgcagcagtgttagtcgtgcgattactgagagtgaaatactagtggcagactgcgcgaggcaatagagttgccgagcctgtacatatacgtgtagggcatatgcataaccagagagctgtatatcccggggcggatccccgggcaggaggaaaattttcattgcccccgtaaattacaatttaactttagctcgccctattcaggttcagcattggtaaaaa

SEQ ID NO: 269096 - DNA, 284 bp, Zea mays
ccgcctgctgaggcctgtgtcgagtgagatcaagattgacgagacagagattcaggcagcgaaggtgcgtctccatctttatttcaaggggatttcatcacgttttttcttttaaacgagcctgcaaaactagtactggagaaaaaaaacatttcaggcttcatttcacgatattcagataatgaatgaagttcgggacagtgatcgatcgataagcttgcgctaacccaccgagagagacgtttattttcagtggatggcgctggagagttcgtgaagcagcc

SEQ ID NO: 269097 - DNA, 577 bp, Zea mays
gcgaattcatgcagggagcatgccggtgaatagcaattccttggcttttcttctaactgttcttgttttgttcatggtactgaactcgcaccagatctctcccaatcttttgctttggcttgtcttgggagtcttcctaatggccacgagcctcagaatgtatgccacgtgccagcagcttgctcatgctgcagctgccaacagttttctcggccacactgagctgcgtgtgcatgtaccgccgtccattacccttgctacgagaggccggttacagagccttagacttcaactggctcttcttgatcgtgaatttgacgatttagattatgacactctgagagcattggatgctgacaatagcccacatgctccatctatgagtgaagaagaaataaattctcttcctgtcttcaaatataaagttcaggcacaacagaggcatccccctgcccgaaaaagtgatgggccatctcagctatcagtttcttcaactgggtcccgcaatgaggaaaagcaggatggtttaaaagcagatggaaccagcaaaacttcagaggatgaactaacatgtagt

SEQ ID NO: 269098 - DNA, 447 bp, Zea mays
cgcgacatggacctgttcgagcacttcgccgccgtcgcccagcgcctcggcgtgtacaccgcccgggactacgcggacatcgtcgagttccttgtcaagcggtggaagctggagacactggagagcgggctctccggcgagggccgcagggccagggacttcgtctgcgggctcgcgccgaggatgcgccgggccgcggagcgcgccgaggacagggccaagaaggacgagcccaggatggtcaagttcagctggatctttgatagggaagccgttgtttaggcacttgttgctaactgtgatatgtgctcagatcatgtcgctagctgtcagtgtctttgtcacattgtgtttatgtgtttgaaatgccgtaagagtgtttttttcctgctattatcacaaaatttctgaaaaaaaaagggcggccgccccgggaattcagtcccg

SEQ ID NO: 269099 - DNA, 342 bp, Zea mays
ctagtgtgagggatagccttgaaattctttgtatctgtccgtcttgagatacggctcattgggaagataaaatctgccaacggagatgaagatgttggtgtgaaggttcgtgtcagagtgcagaacagtaaagtatctaggccctacaagcaagctgaatttgaaatcagttttggggagggtgttagtaaattggggtgcgttcttgattgtgctgagctgatggatgtagttgcaaagaagggttcgtggttcagctacaaagatataagattgttccaaggcatatagaatgcacttctttattttcgagtgagcccaaccatcttcgatgagatttaa

SEQ ID NO: 269100 - DNA, 588 bp, Zea mays
  unsure (1)..(588): unsure at all n locations
cagngctnagagactaccttgacacactatgctcgaacttgagatctcatacaattacctttgtgcaatctaacaatgacaaggtttccttacttttaaaagagagctttattggttctttcccaagccgggataggccttttatgaagctttttgtggacacccagttgttctcagtacatacagacctagttctctctttttatcagaaggactaagtgtctggcagacttgaatgtctgtctcgtcttgccaagcctttagatgttgagctaaactgtacatatcggcagctcagtgtttgtgcaaagagctcgaaggagaagccatataccgtcagaaaaaagtggtagattgccaggatccagttatgggtattgaagaagaatgcttgtagctgcttaagttagtctggtgcggtaatccaaggttttgttggctgtagttggtgcccccataagaagccttgtatggattgttcctgcaaatgcctgtgctgtaacggaaccgtgtctgtggcaaaatctccgaacatgaatgcgtccatttggtaaatctaagcgtgcaatgagacatcgaagaaaatgt

SEQ ID NO: 269101 - DNA, 676 bp, Zea mays
aaaaaaaaaaaaaaaggggtatggggcaattaatgactttgaaaacgcgaaatagctgatgagggaagttgttgttgagaaataggaaagtggaatgaaatccagtcttagtcaaatatttcatatctcttctcttcttgtccaaacagaaggaaaaggagacaatttgagctgagcggaaaatccatatctctcttatccatttagagcatatggatcgatttataagaatcgaatgttttgtttttatgttattttgtgatagaatgaaaagaattctatatagaatgggttgggaattatgcctagatcccgtataaatggaaatttcattgataagaccttctcgattgtagccaatattttattgcaaataattccgacaacctccggggaaaaaagggcatttacttattatagagatgggatgttggctcaatccgaaggaaattatgcggaagctttgcagaattattatgaagctatgcgactagaaattgatccctatgatcgaagttatatactatataacataggccttatacacacaagcaatggagagcatacaaaggctttggaatattatttccgggcgctagaacgaaaccccttcttaccgcaagcttttaataatatggccgtgatctgtcattacgtgcgactatctccactatag

SEQ ID NO: 269102 - DNA, 1145 bp, Zea mays
gaaaagaattctatatagaatgggttgggaattatgcctagatcccgtataaatggaaatttcattgataagaccttctcgattgtagccaatattttattgcaaataattccgacaacctccggggaaaaaagggcatttacttattatagagatggtgcgatttgactcttttttttttttagccctacctatatctcattcttacgagaaagagagagggttcgcatagagagaacaaaattagtaaaggaaacccgcgcttggggaaggtgaggtgaactaacaattccttctgtcgtgtatcctcgattgatgtggcctcagatgcttcaattgtagatttgagtattgagcgaaaggttacacctacaggataggttctgtattacagggcaatccgactctactagtaccaataggcagcataggggagaaaagcactacaccacgaaataggaatcaacaagagaaaaactttgttagaaattagccctttcctgattggtatcagggttgggaagaatggttgggataacaaacaaccatcaggtttgtactttggatacccttataaccatcaaaggtcgttgaagtggctaattcctctaaataggaggcgttgagaacaaagaaattcttggagctatcgttttcctctagcattaatataattcattggtgttaagaaaaacctcttgggggaaggttggcaagagatttcttggaaaaattacagcccccttcggtccataatgagatgggactaattcgatttttattctatagatttttcgcttagtactatgtatagaagggagaagccgtatgagatgaaaacctcatgtacggttttggaacggagattttttgaatagaatgaacgaccgtaacggatgttggctcaatccgaaggaaattatgcggaagctttgcagaattattatgaagctacgcgactagaaattgatccctatgatcgaagttatatactatataacataggccttatacacacaagcaatggagagcatacaaaggctttggaatattatttccgggcgctagaacgaaaccccttcttaccgcaagcttttaataatatggccgtgatctgtcattacgtgcgactatctccactatag

SEQ ID NO: 269103 - DNA, 1986 bp, Zea mays
tttactcgtgggcggacgcgtgggcagccacgcccccacaccaagccgtatcgtcttctccctcttgtccggttcgggtggtccgcggtcggggtgagtgagtgagcagctttgcttctccatctccccgttcccttccctccccagccccccggcccggcggcggtacgtgaccctgacgccgcagcgctagctagctcgccggaacggcaggtggcggcgcgcgacctgagagcacagcagcaccggaccggctcaggcaggcgaccggcagaaaagatggcgggagcagcagctgtggagacggcggcggcggcggcagcggccaacggaaaagcgtgctgccacgccgccaaggggcccgggtacgccacgccgctggaggccatggagaagggccccagggagaagctcgtctacgtcacctgcgtctacaacggcactggaattaacaagccggattaccttgcgacggtggatttggatcccagctctcctacatactcccaggtgatccacaggctcccggtcacccacatcggcgacgagctgcatcactctggctggaactcctgcagctcctgccacggtgacccatcggccaagcgccgcttcctgatcctgccttccttgctgtcaggccgtgtgtatgtcgtcgacacagcgacagacccaagggcgccatccttgcataaggtggttgagtctgaggacattgctgagaatactgggcttgggttccctcacacgtctcattgccttgcgtctggcgacattatgatttcttgccttggggacaaggaggggaatgcagctggcaatggcttcctgctgttggattcagagtttaatgtcaaaggacgttgggaaaagccaggtcacagtcccttgtttggatatgacttctggtaccagcctcgccacaagacgatgatcagttcgtcatggggagcccctgcagcgttcaggacaggtttcgatcttcaacatgtccaggatggcctgtatggaaggcacctgcatgtgtacgactggcctggcggtgagctcaagcagacacttgatctaggtgacactggactccttccccttgaggtgaggtttttacatgatccatcaaaggacactggctatgttggctgtgctttaacaagcaacatggtgagatttttcaagaccgcggatggatcgtggagccatgaggttgctatctctgtgaaaccactgaaggtccgcaactggattctgccggaaatgccaggattgataactgatttcgtcatctctcttgatgaccgttatctctactttgtaaattggcttcatggcgatattaggcagtacaacattgaggatcccgcaaagcctttcttggctggacaagtatgggttggtggtcttcttcagaagggcagtgatgtcgtctatgttactgatgatggtcaggaacagcagtacaatgtgcctcaagtcaagggtcatcgacttagaggtgggccacagatgattcagctgagcttggatggcaagaggatatacgtgacaaactcacttttcagccgatgggatgagcagtttttcggtgatgatcttgtcaagaagggctcccacatgttgcagatcgatgtcgacaccgagaaaggaggcctggctgtcaaccccaacttcttcgtcgattttggcaccgagcctgatggtcctgccctggcccacgagatgagatatcctggtggggactgcacctctgatatatggatctgaggtcaaggattcggcgtaattaacaggctgctggagaatccctgttgttgtatgcactgtaattaacatggtatccgtgcggtgttctgtcttgtactgcgactgttgccagtggaataaggcatggtttcatgagaactctagattaataaaagaagtcctgattctagaaaacacagtcaacgtcaaagacatcgaggaaacaataaacgttcatcctgaaca

SEQ ID NO: 269104 - DNA, 451 bp, Zea mays
cccacgcgtccgcggacgcgtgggccgccgcgtgctcgtcccaaccctgtcgccggcaagccatggcgtcgcgcttccgctccttcactcgcccggccgccgccgccttcctccggtccactgccagccgaagcccctccgcttcccttccccgcaccctcgctcctgtccctagggcttcggccacggggcggcgcatggctctggcgcggtctctgcaaccgctgcacagcgccgtctcggcggcccggctgacgtcgcggctgggggcggaggtggaccgggccgtgtcgcaggagacaggtctcagtgtccctcgataatgaaaggaactgctccagatggcagcaacatcagcagcagatagttgtaagacttggtcatcataataatcatttttgttaaacggttacgttgtttatttagtggccattttttgctatgcgctaac

SEQ ID NO: 269105 - DNA, 426 bp, Zea mays
  unsure (1)..(426): unsure at all n locations
agctagttctagatcgcgagcggcgtggcttctctccccgctcccctcctgcccctttccttcgtcctcagatccgccgattccccgtccctgcgcctccgtctcatgatctctgcgcctctgcgggtgcggctgccggcgccgaaggctgccgccggggggtcgttcctgctcggcgcgtcctccgtcgagtccaatcccaatcccaagcccaagcccagcaggatccgctgcgccgccgccacgctgtacgaggtcctgggcctgcgcgccggcgcgacgggccgggagatcaaggccgcgtaccggcgcctggcgcgggagcggcacccggacgtggcgcacgcgcccggngccgacgtcgagttcgcccggctgcacgacgcctacgccacgctctccgacccggacagccgtgcgcgctac

SEQ ID NO: 269106 - DNA, 935 bp, Zea mays
aattcgctcgagatttgtcggaaggacctctcatttttctccctaattgccgatgaggcataccgcatacgtttcacccttcctctccccactccgaaccctagccaccgtgctcacttcccagctcgaacccgccgcgggcgagtccacggcagtgcaggacctgatcctgcggtctaggccgcggcggtgagatggtgatggtgtcaggcggcggagggaacgcgtgggcgaaggagatgaccctccgccgcaggatagccagcatattcaacaagacgcaggaacacttccctactctgaaggactacaacgattatctggaagaagttgaggacatgactttcaacctgatcgaagggatagatgtcgaggagattgaagcgaaaattgcaagataccaacaggaaaatgcggagcagatatacttgtccagagctaaaagggcggaagatcttgcggcacacttaaagcaagcaggatgaaccctgtaaaggccgaggccaatgatacggctgctgggagttctcagggtattagtggcggggcaggagttcagggccagtatgcacctgccgctgttcttgggggagtgcctcagcctcgccccacaggtatggcgccccaactaatcggcagtgggtcggatcctccgcaaggagacgacgaggagaccaggagactacgcgcagagcgagcagcacgggctggcggatggactgctgaattgagcaagagaagagcgctggaggaggcgtttagcgccatattcatctaggattagatcaaaaagcaacacatggcctggaggaaagccagcatacttaaaatggctgtcaaactacaaagcgttggatgatctgtgtcgtgattatctttgggacatggaattctcacaaattgtggtgaagcaccctttgtgtgcctttggttgc

SEQ ID NO: 269107 - DNA, 356 bp, Zea mays
atcccctgcaaggagacgacgaggagaccaggagactacgcgcagagcgagcagcacgggctggcggatggactgctgaattgagcaagagaagagcgcttgaggaggcgtttagcgccatattcatctaggattagatcaaaaggcaacacatggtctgcattggcattggtaaaacctgcactagttctgcagggcaaagaataagagctgctcaatcagatgccgccatgcaaaagttaaaatgtgtctctatccatggcagggctactctaaacctaactgaatatattgctagtggtctttcacatttgcatggttggtcatattgtggccggcaagtcagtaagtgggcg

SEQ ID NO: 269108 - DNA, 555 bp, Zea mays
  unsure (1)..(555): unsure at all n locations
cccacgcgtccgcccacgcgtccgcccacgcgtccgcacacgcgtccgaggactacaacgattatctggaagaagttgaggatatgactttcaacctgatcgaagggatagatgtcgaggagattgaagcaaaaattgcaagataccaacaggagaatgcggagcagatatacttgtccagagctaaaagggcggaagatcttgcggcagcacttaaagcaagcaggatgaaccctgtaaaggccgaagcaaatgatacggtcagtagatatcttcgagatatatgtttccttcgtaaattaactgntgaaggttataaatatggcgtgtttctttagcttagagatctgataatctgatacttggttggtgtaagtacacgagcaatcccatatgcctggtgttctgggtaagttacttgcatcggaaatatttggcactagtatttagcatgtcaaccaggcaaacttttagtaaatatcatgagaattggaggtgatggaaatgctgaaatatgaagtgacagctctcagatttataacttgacatcttata

SEQ ID NO: 269109 - DNA, 410 bp, Zea mays
ggtccatattgggtaaacttcctgggttgggagcacgttttgggacctatgaacttttaacagccgtctagtagagatcgaagggaggacaactatgtctattattctgaggctatgaaggctggcatagctgctggtgctgtagaggctgttttctgcacaccatttgaacttttcaaacttcgaaaccaagttagttctgtgattccttcaaaagctatgggccctgcaaatgttgctcaagaatcatttccactgctttccaaactggtgcctggatatgttcctgatataagggtgtggaacaacaccatgagccttttatctgatctttcttccaagcattctgacatgttgggtgctctgaaacagcacccatggatgcttacgggctctgggaaaccccccat

SEQ ID NO: 269110 - DNA, 1027 bp, Zea mays
ggagtttgcttctggtgctccgcttcatccattagttgacagtattgaaccatcaaccagttcaatcaacaaggtagatcttcgtaaagagaagaactggagtgctgctgataggcgtgatgcatcgaaatttatgaacctagaagtggacagtgaaaatatgcatggactgggggttgttgctgagtcagaagttgagggacttggagaggtggcagcagatactgagacaggtgtggtggagaatgcaagtcctgagttcttgggtggtaaagattggaactcagatatccctgttgattttgacaatgaccaaacattggacaaaaataagaagggtaaagattccagatcaatgaagctttttaagagtgctattgcagattttgttaaggaagttcttaaaccatcatggaggcagggtaacatgagcaaagaggctttcaaaactattgtcaggaaaacagttgataaggtttccggttcagttcctagcagtcatattccaaaaacacctgccaagattaaacattatgtacaatcctcccaaaggaaggtgaccaaattagtaatggggtatgtcgacaagtatgtgaagccatagagtaatgtggcattgtgctgaatcagaactgtcatggttccagagtctgtgctgcattctactaaatgaggctgcaaatttggtaatctttctgatgaaacggttgttccacagtaaggtagtttgccctagttctgcaggaaatgctgtattttattggagtgacatgtctagatgtgcttccagtattgataatttgctgcctgatttcttgtaccctgtaagggtgcgatatttgtgcgaacatgctgctgaaagaactttgtttcttaatggtgattatgcatactgagagctgtaaggcttactgctgaacgaactttgtttctgaatggtgaatatgcatactgagagctgtaaggcttaacaaacttttgacttatcacattcttcaacgtggctcttttagactggttatagttt

SEQ ID NO: 269111 - DNA, 783 bp, Zea mays
tcgcactccgctgggctcggcgggcacgacggcgggccgcgctgccacgcggtggagatcgacgccaagatcctggggctggaggccatgatccgcgtgcagtgccacaagcgcaaccacccgtcggcgcggctgatgacagcgctccgcgagctcgacctggacgtgtaccacgccagcgtgtccgtcgtcaaggacctcatgatccagcaggtcgccgtcaagatggccagccgcgtgtacacgcaggaccagctcagcgccgcgctctacagccgcctcgcggagcccgggtctgccatgggcacgtaatcaaggaggagagctgctcagctcgcttgtggctgccggaataggcactgatactactgctactcaccaccggactgtcctgtcgtcgtggtcaccacggttacaacacgataggcagaaagactcaggagggagggagacgacgacgatgccggtgctgtataaactttagaaggatggatggatggatgatgataccgagcttctgctgctgttcatcatcatcttcttgtgtttttgctagtagcgtgttaattagcaggattaagcaaccaacaagcgtccaaccgttgttgttaattaagtacatgttgtgggcgaccaaccgatgttagcgttgggttggatccaaccctgtgtatagtatatggatcagcagtcgtcctatccggtggacgatgccctgatcctaatgtatgtatttttacagcaggatttcgctttgccatggagtcaggctaattgttcccc

SEQ ID NO: 269112 - DNA, 1099 bp, Zea mays
agacggtggctttcaatcgtttccacctggcgcctttggccccggctgcgcgcgtttcccgctggccgctgctatccgatttcttgattcggtcgctctgtctcgtcaagatgagcccggcaagcatgtccggagcgcggtcaggatcaagaacatcagcaagtctcatgtggccttcaagttccaaacgactgcaccaaagagttgcttcatgaggcctccgggcggcgtgcttgctccaggggaaagcatcatagcaacagttttcaagtttgtggagcatccggagaacaacgagaagccgatggacaagtgcaaggttaagttcaagattgtcagcctgaaagtcaaagggccggtggagtacgtccctgaactgtttgatgagcagaaggaccaggtcgcggttgagcaaatattgcgggtagtattcttggatgctgagcgcccaagcccacaaatggacaaactcaagcgccagctagctgaagcagaagcagcccttgaggcacgcaagaaacctccagaggacaatggtccccgtattgttggtgaaggccttgtgattgacgaatggaaggaacgaagagagaggtaccttgctcgccagcagattgaaggtgttgattcggtgtagacacgaggcagccctgtaaactatgcagaatgaacataccgttttatgggcacgcactccagctgtcaaatggatttggagcttgattttgcgaaggttcggatttggagcaatcaagcaacaatgaggcttttgtgtatttggggttcacgctgaacttctgtcctgggtttgggtgtgtgtagataagcagccactgcttggtaatagtacgtccttcagccatgtactcgtgttgttgaatgtgggtctctatgtgaatgtgatgcattctctagctgctgtcctgtcaacattaaaagtgtaattgtaatgtcaaaaggcacactccaaggtgattcagtggtagttctgccatcatgttacagtaattcttccatcacttgtttgtacaactcatacatgtcatgccaccctgagatttatgtcattcagttgtcagtcaaaaaaaaaaaaaaaaga

SEQ ID NO: 269113 - DNA, 712 bp, Zea mays
cgcaatcatacttcctaccctccccacctcttccacggttccaccccgtccctctcctctcgagaagcacccgcaccatacatcttccggcgcccgacgcggacggcgagccgctgctgctgctgccgccggaggaggaagggcaccagggccagcgggtgcaggaggaggaggagcagcagcaggccgccggccgcttggggctgtgccacatgccgctctggggggccgccgcgtccgcggcgccggcagccgagggcgacgccgcccgcgcgccgtcgggatccggcggcggcgtcaaggtgatccggtcgctgctccccacccggcgccgcctccgcctagatccgcccgccaagctctacttcccatatgagcccggcaagcaagtccggagcgcggtcaggatcaagaacatcagcaagtcccatgtggccttcaagttccaaacgaccgcaccaaagagttgcttcatgaggcctccgggcggcgtgcttgctccaggggaaagcatcatagcaacagttttcaagtttgtggagcatccggagaacaacgagaagccgatggacaagtgcaaggttaagttcaagattgtcagcctgaaagtcaaagggccggtggaggacgtccctgaactgtttgatgagcagaaggaccaggtcgcggtcgagcaaatattgcgggtagtattcttggatgctgagcgccc

SEQ ID NO: 269114 - DNA, 386 bp, Zea mays
ccctctctgtactcaggccgaattggtatcctacacagctatctaatatctactttctaatgccatcggaatgtgggcaaaagctgtgtctatcttcgccttggcgaccaccgccgttgcgcaaaccaagggtttcaactacggcgccaccaacgcagatggctcatgccgtggatacaacgactttgtgcgcttcttcaatgaggcgaagagcctacctggtgcttcaggcttcaacacagcacgcctatacacctcagtccaatgcggcaccgcagccgaccccatatctgccttccaagcagccatcgataccgacacacagattctcgttggtctctgggctagtgccggacgtaccgcttacgagaatgaactcaacgcct

SEQ ID NO: 269115 - DNA, 415 bp, Zea mays
  unsure (1)..(415): unsure at all n locations
gttcagagcattggatcatggagtggacagaccatcttagatgatgagatcctggatgaagaaaacacaggagtgtctcctggttttgttcccagtctagatgttctgatggacaggaccgctaagttgaaacgatatcttaactccaaggatttccttgatctgtggaggagtataccggaaggccttgactactacatctacagcagcatacgatgggccgaagtaagtttctctgatcctggaattgcccagctaagagttgatataaaagcacttctccacatctttaggcccttctgttcaagacctgaagcttttctcccttttctaagtgaatccctgagggttgtaaccatganaaaatcagatgcacagtgcttgcttgaaacaactatggatgacacgaagagtg

SEQ ID NO: 269116 - DNA, 782 bp, Zea mays
ccccactcagttcttaggtttgcatttattgagttctctgatgaagagggtgcaagaactgcgcttaacctcggaggcacaatttttggtttctaccctgttagagttttgccgtcaaagacagctatcttacccgttaatccaaagtttcttcccaggacggatgacgagaaggaaatggtcatgcgaactgtctattgtacaaacatagataagatggttactcaattagatgtaaagaaattctttgaagaactttgcggtgaggtctctcggttgaggcttctaggggacaatgtacattccacaaggattgcttttgttgaatttgtccatgctgagggtgccatcatggctctgaattgcagcgggatgattttgggaacactgcctgtcagggtgagcccttccaagactccggtgaagccccgtgtaaatcgagtgggatctaactgactctgcgcaagctgaactggattgttcacgggaaggcgtcgccataagctgaaggcttccgcggtccggtgcatcatgatgcgtctgctcacattcttacaaacgttttctttgtacccttttgcaaacctgttgttggaagggaactggttagatcaggcccttctatagccagctttcggtttctcctgtttcactggacgtgatggaacccctgaggatgactattttggcaatcagccatcaaagtaacttctgttaatgtccttgttgtttaaaaaaaaaaaaaaaaaaaaaaaaaaaaaaaaaaaaaaaaaaaaaaagaa

SEQ ID NO: 269117 - DNA, 555 bp, Zea mays
ctggctcgcccgcctgacgggcccggcctgaatggctcgaccgacccacgcgttccatgaagggggcatgcaagctgtctattgtacaaacatagataagatgggtactcaattagatgtaaagaaattctttgaagaactttgcggtgaggtctctcggttgagacttctaggagacaatgtacattccacaaggattgcttttgttgagtttgttcatgctgagggtgccatcatggctctgaattgcagcgggatgattttgggaactctgcctgtcagggtgagtccttctaagactccggtgaagccacgtgtaaatcgaatgggatctaactgactctgcctaagctcaaccggaaggcatggccataagctgaaggcttccgcggtcctgtgcatcatgatgcatctgcttacattcttacaaacactctgtttgtacccttttgcaaacctgttggaagggaactggttaggtcaggcccttttgccttgcatttcagacatgatggaaccattgagaaagaccactcggcaatcaaccatcaaagt

SEQ ID NO: 269118 - DNA, 1210 bp, Zea mays
ttttcgcgtgggtggatgacgacatcagggacctgccaagatctccatggaggagatcgacgccgccaagctcaccaaggacaacgtcgacgtccgcctcaagtggctcggcctcttccaccgctacaagcaccagtgttgttgttgctgttggtaggagcgaccccgcgagcgtgacacagacaaagcagccttcggtgccagggccatccattcttgagcgtgtatgatgacctgcatgcagaccacttatctggtctcaaggttcttcatggccttgactctcaaagatcagagtattcttgtcaatggggatatcaatgaaggcttgcttcgcctttgtcacaagcttcatcgtttaaggaaagaatatgcatacacatttgaaagcacaagcttatcttatcagtgttctgaggttagcaggatcttgcaaggctaggggccccggggctagcatgagacccactgaacgaatatgcataactacatttgcattaaacagaagattgaaccaaatgagctacaacataagattttatttgatagaagggtctaatgaaaacattggaccatgagagtgcagaggcagggccattgctactgcaagtcgcccctaagcctggtactaagagttgtaggaggcaagaattcacagttatcttagcctacatgctattctctgaacacaatatttacgagcttgataggcctgttttggaatacaaattatgtgtccgataggtaaataatttatgcaatgattcttagacctttggctcttactgcttcaaggattaatgtgtgactgtttagccttcaatccaagcggtatgccactaatctcaaaaattgcttctacgcaatatttacttgacaatttatagatttgttgcttcttagagatattttttcatgtaataggttataaggttgttcatgacataaagaggtttgttggtcataacttatactatatgaagattatgggagtcagccctaaattcacattttctgcaatctacagattcatgtaaaaaagttcaatctacaacagcatttcctcaaaatgtctaacagacttgttttcttcaggctagggacccaggggctacacatcttataactgaaaaacacatgagcagtatgtggttaacacttttttttcttgttcgtgtttcatagatagaggtatataatatggagacga

SEQ ID NO: 269119 - DNA, 520 bp, Zea mays
ggccatcatccgctgcacgctcgcgcgcgacgtggccgccgtcatggagtacaagggactgcccctgcagcaggccgtcgactactgcgtcaaggagcgcctcgaccagggattcgccggcctcatcgccgtctccggcaccggcgaggtggcgtacggattcaactgcaccggcatgttccggggctgcgccaccgaggacgggttcatggaggtcggcatctgggagtgagctggaggccccgccatctaaacacaaatcaaaatcagtgtgcgtgcagctgcatgtggccatcctgcgattgccatgtgtttaatctccgggtcacaggtgttgtcgatgatccaccactagtagtagcgattgcatggagattggtgctcgggtcaataatgatggtgattgtgacggagtgccctgcaaaataattaataattcgtgtgaaaaagttgattaaaaaaaaaaaaagaaaaaaaaaggacaaaaaaaaaaaaaaaaaaaaaaaaaaaagagcggccg

SEQ ID NO: 269120 - DNA, 948 bp, Zea mays
  unsure (1)..(948): unsure at all n locations
gtccaagaaaaactctcagtacacccattaactgcaccggtcctgggaaatgatcatgcagagttccgtcagcgtggtaccccttcggtagtgcctcccattcttgacggtgatatgcttgtgcaattcttggagctcaccggtgaacaacagcaagccatccttactcatgctttgccagggaaggggcaacataggcccctctcggttttccaggttttgcaaacattagagcgcgtccattacgctcttaactgaggctttcttcaatcacagttactacaaggtttggatattagagctggttgaccttcattgtttgagatgccgtcagagctgaggtttgagtgaccttcgcaatctagacggccgattccaagtctgccatgatatttatcacaacgtttgattgatgatccaactggagcttgatactgggaagtctcatggtggcgagtatcccgtggaggcaccagattcgtcgaacctcctgtgtatatacagtcggccgcttttggtagactgttgtatggcgcattctgcatagaaacgaatattctttccgtttgtttcaatagataatgtaatgtttcttacgtcagctggtcggatgctcaacgagaaataaggaaaacaatgaattgcattggccgtcctgctctatcacatgccattactgattagggatgaatgcatgcaccagctgccgcagcgatgatcttgccgcggcagctcctggtcagggctcctggtcagggacggcgcccacggggacgcagcgagcggtgatgtctggcagtgagttggttgcgattctcggcaaggtagaaacgtagagcagcttggggctttcatattgtgctaacagggaggctacgaggcttttgattgtggcctgtgactcctaanaactaaaaggcanaccaaaagtctgcttttcaaagcagt

SEQ ID NO: 269121 - DNA, 618 bp, Zea mays
gagcaaggccgtgggatcggaattcccttccggacaagacacctaccaccacccaccacccagcgcaaggccaggcggcccaggccaccactccttaccttttccccctcttttgttccttcattcacgaatcccgtcttcttcctttcttggccttctccacctcatcgccgagacgagatctctcccacacgaggagggcagcagggaagggagagatgggcgggcgggtggatcacgagtactcctacctgttcaagatggtcctcatcggagacagcggcgtcggcaagtccaatatcctctctcgcttcacgcgcaaccacttctccctcgactccaagtccaccatcggcgtcgagttcgccaccaagtccctgcagatggacggcaaaacaataaaggctcagatctgggacacagctgggcaggaaaggtaccgtgcaattacaagtgcttactaccgtggagccgtgggagcactgcttgtgtacgacatcacaaagaggcagagcttcgacaatgttcacaggtggcttcgtgaactccgcgaccatgctgactccagtattgtgatcatgatggtcggtaacaaatctgacctaatccacctgagag

SEQ ID NO: 269122 - DNA, 368 bp, Zea mays
  unsure (1)..(368): unsure at all n locations
cggacgcgtggngctgacgcgtgggttcacgaatcccttcttcttccgccttcttcgtcgggccctcctcaccgacgagaagagatctcctcttcggcacgaggaggacagcaggggagaaagatgggcgggcgggtggatcacgagtactcttacctgttcaagatggtgctcatcggggacagcggcgtcggcaagtccaatatcctctctcgcttcacgcgcaaccacttctccctcgactccaagtccaccatcggcgtcgagttcgccaccaagtccctgcagattgacggcaaaacaataaaggctcagatctgggacacagctgggcaggaaaggtaccgtgcgattacaagcgcctacta

SEQ ID NO: 269123 - DNA, 852 bp, Zea mays
  unsure (1)..(852): unsure at all n locations
attaaaaaggtggttgtaacatcatctgtggcttttgtagcctacaacggttggccaaggactcctgaggtcacagttgacgagacatggttttctgatccacaaatttgtgaaacaaatcagcaatggtatattttgtccaagacgctggcagaggaggctgcttggaagttctcaagggataatggacttgaaatcgttactataaacccagcgatggttattggtcccctgctgcagcctacactaaataccagtgctgaagcaatcctgaagttaatcaatgggtcatcgtctacatatcccaatttttgctttggatgggttaatgtcaaggatgttgccctggcccatatccttgcatacgaggttccctcatcaaatggaaggtactgcatggtggaaagagttgttcactactcagaactggtgaacattatccgcaacatgtatcctacccttcctcttccggacaagtgtgcagatgacaagccgtttgtcccaccctaccaagtatcaaaggagaagataaaaagcataggcatcgagttgattccactggagacgagcgtcaaggagaccatcgaaagcttgaaagagaaggggttcgctagtttttgactcgagcaagctgtgaaacataagtgttactgtactacgtgatgttgcattgtatacatgcatcggacttcgcagttcccaagctattttggtagctttggtctgtaagattacctaaaataaactgagccacgttgccacgctgtagcttttggacatgttatgctttgatcggattgagacacgtgatatatgatcgttgcttacncaacaaaaaagataccaattaaa

SEQ ID NO: 269124 - DNA, 341 bp, Zea mays
  unsure (1)..(341): unsure at all n locations
cggacgcgtgggcggacgcgtgggcggacgcgtgggcgcggccgacggcgcctgggagccctgggcgcgcctcgagtgctggcgcgaccgccgcggcgccggcgcgtccgacagcctgggctaccgcttcgacctcctcgtccccggcgtggaccacgccgncgtcgccctcgccgactcctccatcccctcgtccaacggcggcaagttcgccatcgacctgaccgccgcgcagccgctcagccggggcggcacgccggggtgcagcccgagaggcagcggcgacctgagcatgtggcccctggggaaagaccgcggcttcgtcatgtccgccgcggtcc

SEQ ID NO: 269125 - DNA, 526 bp, Zea mays
catgagtttgatctcccagctgttgatatttatgctggggtagctgcatccctcgcagaaaggaaaaaagggggccagttgacagagttcttgaagaatataagggggactatagatgatgatgaatgggatcaggttattggtgctgctataaatgtttatgccaacaagcataaagaaagaccagatcgccttatcgacatgctaatcagcaatcacaggaaagtacttgcttgtgttgtctgtggacgtctaaaaagtgcattccaaatagccgcacgaagtggaagtgtcgctgatgttcaatatgttgctcatcaggcattacatgcaaatgcattgacagtgcttgatatgtgtaagcaatggctcgcgcagtacatgtgataccatagatacttgctgagagagttctcacgtgaagacagaaaaactaaggggcatttggtttgaagagtcaatctattttagatgatgttgtgtatcataagtttattttataaatttggtggaataaatcgttctc

SEQ ID NO: 269126 - DNA, 441 bp, Zea mays
  unsure (1)..(441): unsure at all n locations
aatcaataaagttttgagactccttgcggactccgaccgaatcgatctgcatcgccccgccgcgtgcgccatgttcctgcggcggctgagaacttccgccgccgtccgccggggcgcgaccgacggcggagtcctggccgccgtccgcgccgagctggccaacgagatctcctcctcggctccccctccattccgttccgagctggcgcccgacttcgacaccgtgtctgacgccccgcgcgcgcaggacgtactcctgcgccgccgggccgggtccgaggaggtcctcgtgtcggcgctgctcgccccgctgcggttcgtgggccgagacccgctgcccagggccgcgctcgtcaaggtcttcgtcagtaagcctggcgcggcgcccgtcctgcacttcgactgccgtgcgtcttgngtgggggaggaggagcgcggcgc

SEQ ID NO: 269127 - DNA, 377 bp, Zea mays
aacctctgcagtctgcatcaccaactattccactagtaggtctaaattagtagccaagatgacgtcagcagcatcgttccccagcagcctcttccccttcccgaccagagcaagcacgccaccgcttccgtcgtcgtcctcccgaccgtctcactcccgcccccacctccgcatccgatctccgaaacctaataatccaacggtcgcgcccgcgtcctctcggatggaggtggcccagccccaggcgagcaacgcccagggaggggcggagccggccatgaagctactgttcgtggagatgggcgtcggctacgatcagcacggccaagatatcaccgccgccgccgtgcgcgcctgcatagacgccatcacctcca

SEQ ID NO: 269128 - DNA, 876 bp, Zea mays
ggtgacctaccccttgggtaccatcataaggaccttgtcatatatgaaatgcatttgcgtggattcacaaagcacaactcaagcaagacaaaacacccaggaacttacattggtgctacgcgtcggcctacgcgtccgaaggaacttggagtgaactgtatagagctaatgccctgccatgagttcaatgagctagagtacttcagctcctcttcgaagatgaacttctggggatattccacaataaattttttctcaccaatggcaagatattcttcaagtggcataagagactctggatgtggtgccataaatgaatttaaagcttttgtaagggaggcccacaaacggggaattgaggtgatcatggatgttgtcttcaatcatacagctgaaggtaatgagaaaggcccaatattatcctttagggggatagataatagtacatactacatgcttgcacctaagggagagttttataattattctggttgtggaaataccttcaattgtaatcatcctgtagtccgtgaatttatagtggattgcttgagatactgggtaacagaaatgcatgttgatggttttcgttttgaccttgcatctatactgaccagaggatgcagtctatgggatccagttaatgtgtatggaagtccaatggaaggtgacatgattacgacagggacacctcttgttgccccaccacttattgacatgattagcaatgacccaattcttggaaatgtcaagctcattgctgaagcatgggatgcaggaggtctctatcaagttggtcagtttcctcactggaacgtttggtcagagtggaatggaaagtatcgcgataccgtgcgtcagttcatcaaaggcaca

SEQ ID NO: 269129 - DNA, 544 bp, Zea mays
tcggggatgcaggaggtctctatcaagttggtcagtttcctcactggaacgtttggtcagagtggaatggaaaggccaacacttaggagtatgtttcaaacaatagcctcactgacaacattagtatcgcgataccgtgcgtcagttcatcaaaggcacagatggatttgctggtgcttttgctgaatgcctatgtggaagtccacagttataccaggcaggggggaggaagccttggcacagtatcaactttgtatgtgcacacgatggatttacactggctgatttggtcacatacaatagcaagtacaacttgtcaaatggtgaggacaacagagatggggaaaatcataatcttagctggaattgtggggaggaaggagaatttgcaagtctgtcagtccgaagattaaggaagaggcaaatgcgcaatttctttgtttgtcttatggtttctcagggagttccaatgttctacatgggcgatgaatatggtcacacaaagggagggaacaacaatacgtactgccatgaccattatgtc

SEQ ID NO: 269130 - DNA, 648 bp, Zea mays
atcacatcgcgcactaccttccagcgaatccatcacggaagaaattgttccccacccaccctagactcgccgccgtcgcaactcccacccgatccccaaattctccggcggtgatggccagcctgtggcgcgccgtgatggatagcgtcacggctcctccccctcggcgctggacgcggccccaggtagcggcgtcgagttctggcacggcgcagagcgcgctgggtggctaaataagcagggcgagtacatcaagacgtggaggcggcggtggttcgtgctgaagcaggggaggcttttctggttcaaggaccctgcggtgacacgggcctcggtgccccgcggcgtcatccccgtcgccacctgcctcacagtcaagggcgccgaggacgtgctcaaccgccagttcgccttcgagctctccacgcctgccgagaccatgtatttcattgcggactccgagaaggacaaggaggagtggattaactccatcggtcgctccatcgtccagcactcccgctccgtcaccgacgcagaggtcgttgactacgacagccgcccccagcccccgccgaagcttatgaccagcgaagagagtgcaccagcagcttaatggcgtggtgattcctgtgaactctctcgatatgg

SEQ ID NO: 269131 - DNA, 582 bp, Zea mays
cgagagacagagccttcttacgaggagcgcatatcgaaagtcaaagcgaagctggctgataatctcaagtagagccaccgttttcaattgttacaccaatacttggaagagaacttatggaactgtagaaggtttcttccaaaagcctatatcttggcaggtttatgacgtgcgctttttttatggcaaaattggatctgttaacatgtggagatggaaattacccggaaacatgagcttagcgtggattttaccattttgaggtgttagaaaagcgtgctgcctattttagactagatatacagactaaaacatatggagccccacatttcgggtattgtcaagttgtgcgtttcactttcaaaatagtgtaagggccttgtgttttttttcttcttctgaatttgttgtaaaatagtctagcatcccttgcaaagagggggtaatgttgttgtcacatgatggtgtgtaccaaagtgtagtaaagcatcccttgcaaagagggggtggtagtgtcctgtatgtttttttaagcaaatgtgacaaactatataagaaatgaatatttcatgtgagttatgt

SEQ ID NO: 269132 - DNA, 1274 bp, Zea mays
ggcagcttggtgccttacaaacatagcggcacggaaacctgaggaaactaaatccttagttcctgctctaccattgctcattgctcaccttggtgagaagagctctacacttcgcgcggaacaatgtgcatgggccattggtaatgttgctggtgaaggagcagagctgagaaacacattacttgctcaaggtgctttgtggcctcttgcccgtttgatgctgtcaaataagggttccacaacaaggactgctgcttgggcattgtcaaatctcatcaaggggcctgattccaaggctgcgaatgaacttattggtatcgacggcataccgaatgcaatcattcggaacttggaaaaggcggatgaagaacttgcaactgaggtggcatgggtggttgtctatctttcagcactttcagaaaaagctaccagcctaatagtaagaagttcgatgccacaggtgctgatcgggcgccttctagcatctgaaaacttgcagttgctcattccggtacttcgcggtttaggaaatcttgtagctggtgatggttacatggttgattcagtcctaattgttggaaacagtgtcacagatcaagccttatcaagtcttatcaagtgtttgaagagcgaccatagggttctcaagaaggaggcatcatgggccatgtcaaatatagcagcgggcagttttgagcacaaaaaactgatatttgctagtgaggcgactcctttgctgatgcacctcctcaggactgcacagtttgacatccgcagggaagcagcatacacgctgggcaacctgtgtgttgtcccagcaggcagtggtaaccccccaagtataatcgttgagcatttagttgccatcgtagatggtggagcccttccaggatttataaatttggtgaggtcggccgatataaagagtgcgagacttgggcttcagttcctggaactggtgatgaaaggataccctgacagccagggcccaaagctcgtggagacagaggacggccttgaggccatggagaggttccagttccatgagaacgagatgatgaggaatatggcgaatggtttggttgataaatactttggcgaagactatggcctgtgagttgtgcccccgatacatctgggtaaacgcgtggagctatttgtgggtttgaaatgtaacgatcctggaacagaaggatgcgccgttcatcatggtttccatgcaatttagcccctaatatatagctggaaatgtgaatgtgttgaaactgaccgtg

SEQ ID NO: 269133 - DNA, 429 bp, Zea mays
  unsure (1)..(429): unsure at all n locations
tccttttgcagtcattcgtgctgttttggacatttgcttatgacattgttcacatcttctgacggacatagaaagagctacactccggaggaaacacggaatcgtcgacgatgaacattcccaattggctttttgtacactcaatttttgtattggtaattgatatagtctgtagtgagactatatcggtgtagacctaagcaaagctcatgaactttgcatttccttggatgatccgtagcagttgcaatgtttcatttcaagtgaaaaatatntaaacttaattatatattttttaatttacttttttaatctaatatatttttttatttaattttttttatatcttatatgttcctatgtttctttccctcttatccttattttttgtgcgtctcatttttttttttcttattatattattttatt

SEQ ID NO: 269134 - DNA, 2158 bp, Zea mays
gtttggctaagagcgatcttgatcttcaagttgatgagctgagcatgaggtcagtggcgcatgaatcagaaaatagtcacttaaaggagtacatcatatacttggtagagattctcagaactcgattagtcctttcagagtttgatttggacaccaatcaaagtgtctgccaggagttggttgttaaacttgagaattgcatgacacagctggcgcggaaggatggtgagctaatggaagcagaggacgaagttcaactattgcaagaaaagaaccaggaactctgtggagttgttagatctctacaagttgcaactgaaggtgctaaagtggtggaaggagaactggacaagaaaatcacatgactgattgaacagtgttcttgcaaggatgtcgaaattttacttcttcaccaagacaatgaggcattgcaatcagaagtgtgagcaatgtgagagggaatttgttgttctgatggatgatgcaattacctcttcagtgaattctgcggtgtatgaagaaacagcattcaagcttatgatgaatggtaaagctacagagaatagagcaatatccctaaaggagttgctaatgaaggaggtctcttcccgagatgctcacattgaggagttgcagaaaaagttggctggcattcaggacgaacatgcagaactaaaagctgagttgaacacacatctagctctcgtagcatcattggctgatcatgtcagtgtgttggaagaagattgccgttctctgtcaaaaccctgtagtacagaagacaaagaggaaaccgcatgtgtacatcatgttcaagagggcgacgatgggctggaatctcattgcttacccaaaggaactccagagttacaagggttgattgcaagaatagaagcacttcaagtagttgtatcaaatgctaaagatcgtcaagatcgtgaatcagccgagtctgcagctaaactggcggcagcaagcgcagaaattcaagagcttaaaacaagaggcggctcacgcatggaggcaaaagaaatatgttctgacaatgagaaacaagatgttgaggtctccaaagggaagcaagtccagatcatgaaggatattgagctggaccaaatatctacttgccctccatatggcgctggaggtgccctctacccccatggaactggtgcaaatgctgaactcgatgacgaaatgcttcagctgtgggaggctgcggagaggagctgcaagaaccaaacggccaagtcctcgtcatctgagcacgacatacaggccgtcgaggatctggagagcgagcgcccttcgtctgagctagcgaggggaagagaccttggaaccaataagctagaagcgtcgaagggagctgcagagcctcatgaggcgtggagcaagaacgtacttgagaggctcacttctgatgctcagaggctgttgagcatccaagcgagcattgaagagctgaagcagaaaatggaggggcagtcaaagggaaaatcccctatgaactctgagtacagcagtgtgagcgctcaggtgcatgagacagagggccatgtcttggaacagatcaatctgaacaacaaattgactaggacggctgagaactaccccacactgtcagataatatgagcaccgagcgagaagggtattccagcaggaggaagatctccgagcaggtgcagaaagggtcggagaatgtggcaaggttggaactggagctccagaagatccagtacgtcttgctgaagcttgaggaggagcacgagtacagaaggctcaaagtctctgataagcgcacccgtgtgcttttgagggactacctgtatggaaggaaggaccgtggtggcgggcagaagggaaagaagaagcgggtcccgttctgtggttgtgttcgttcgaaatcaagaacagagccgtagcctttttgttctcgcacccctgcgcgttggaagaggtgaaggtgtcctttaggatggatcccctttgtaactgagttcagtatcctgatgaagaagcctatgtactaagatttttggtttcctgtctaaatgaggccgttcttctagccagtttaatctcaggtattactgtgatgtatcaaggactgctctttctatatatataataatagcttcatgtttggtttaaaat

SEQ ID NO: 269135 - DNA, 360 bp, Zea mays
gcgaggggaagagaccttggaaccaataagctagaagtgccaaagggagctgtagagcctcacgaggcgtggagcaagaacgtgcttgagacgctcacttctgatgcccagaggctgttgagcatccaagcgagcatcgaggaactgaagaagaaaatggaggggtcctcgaagggtacgaattctgagtacggcagtgtgagcgctcaggtgcatgagacggagggtcttgtcttggaacagatcaattccaacaacaagttgagcaggaaggctgagaactaccccgcattgtcagataatacgagcaccgagcgaggagggtattccagcaggaggaagactcggagcaggtgcaga

SEQ ID NO: 269136 - DNA, 523 bp, Zea mays
cggacgcgtgggttcagaagattcagtatgtcttgctgaagcttgaggaagagcacgggtgcagaatgctcaaagtctctgataagcgcactcgcgtgcttttgagggactatctgtatgggaggaaggaccgcggtggcgggcagaataaaaagaagagggtcccgttctgtggttgtgttcgtccgaaatcaagaacagagccgtagcctctctttttgttcgacctgcacctccaagtggtagccgtagtccgaaatcaagaaataaaacaaaatcgacctgcacctccaagtggttggctaagtgtcgcctgtgcattggaagaggaggtggtgttcctaggatccctttgtaattgagttagcattttagtatcttttttcttttatttttgaaactagcattatagtatcctgatgaagaagcttatgtactaaattttttgttttcctgtctaaatgaggccattctgaatagttccctgcgttaatactgtcgtatatcaaaaaaaaaaaaataa

SEQ ID NO: 269137 - DNA, 922 bp, Zea mays
gcttctagaaggccaccgccggggagccaaaacaccaggacaaatgcaccggcggaaatccaagggaggaggcagccggagaggaggaggaggaggcgcagcagctgaccatcttctacggcggcagagtggtcgtcttcgacatgttcccctccgccaaggtcgaggacctgctgcagatcatgagccctggcggcgacggcgtggacagggcaggcggtgccactgtccctacgcggagcctgcataggccctcacacgacagcctctctgatctgccgattgcgaggaggaattcgctccacaggtttcttgagaagagaaaggacaggataactgcaaaggcgccataccaacaagtcaacagctctgttgttggcgtcgaggcgtccaagcaggcggctggagctggggtggaaaaaccttggctggggctgggccaagaagcgacaacagcgaactggagatgtgatgaatgttgcccgacaagaaggtggtgcaccccagtcaggtgcacgtcgtagcttcaggttaaggtgaagggtaactttccgtcggttactctactcactttactgctctactactactactgctggtgacgaagttagcaagaaacgttcttctgctaccggtgggtcggtcggtcagccgttcgttggcgagattgtttgctgctggagacggacgtgctcgcagcagtttcgctggtccgtgaccgcgccatatgttgccacgaatggttgggtgttcggtacgttgaggaacgatgtgtatgtagtgtgcacgtttccggtgcatcttgttctcctcaagcctgtcctgtatgtttacccccctgcaccccctcctccctctttgtagagagagggtctgtatgttcagtggaagatggttgttctatttgatttttattttatgg

SEQ ID NO: 269138 - DNA, 302 bp, Zea mays
gacccgacccacacatcctctcgtcctttgaggacgctaccaagacctacgagctcacctgggctattcgtctcgcttccgaggcttcgcgtgcgcccaaggcctaagcgtagaaggctaggtagagtggcaggtcaggtagtgtacaggtgattgaacagacgacatcggaggccttagtggctttctatactctctcccaattttcgattcacaacatctgctccacacaccatttattattggtgatgtgaggctgaatgccaaaagcaagaacgatgcatacatgtatgatgaccctc

SEQ ID NO: 269139 - DNA, 587 bp, Zea mays
gcagtatagtggcctggtttatgtttagtttcatatactctgcaataatgacgtcatttgacagacaggaaaatgtgtattttgtgatttatgttctgatgagcacctttttcttctatctgacaatcgtacttgttccgatcatcgccctgtttggggatttcctatatctatcgatccaaaggtggctcttcccctacgactaccaaataatacaggagcaacacaaggatgagccacacgaggtccgcagggtgccactaccagagaccagccacctaagcccagagggagcggggagctacatgatctcgatgctcccacgggagtcatcaaagcacactggctttgccttcgactccccaggatacgagtcgttcttcgcctcgcagcaaggcatcggcgtgccacacaagccgtgggatgtagcccggagagcgagcatgaaaccgcaacgagcaggaaaatcctagtcgggcgaacacctctccgctgtgtaaagtcttgtatatctggtttcttgaccacaggagtttttgtataggtagcagtactgtagcccttttttcgtgtttgtcacccatatg

SEQ ID NO: 269140 - DNA, 667 bp, Zea mays
cggacgcgtgggcggacgcgtggggtcctggaacaaagccagttgaaactgctgagttgctccagagtcagggagacaagctagccgaggaagggaagtaccatgaagcacttgctaaatgggaggctgctctgatcttgatgcctgataatgcgatacttcatgagcagaaagctcaggttttacttgaagtgggagatgcatggcgtgcactgacagcagcaaccagagcaacagaactggatccattttggcctgaggcttgggttacactccgcggtcccctgggaaattttggggagccagattcagctatactgacttttgacaaggcgttagctatgaagcctgactacaccgacgcataagctgaccgtgaaactgctgctcgcctagtcaagaaacgaggacagctgcatacgtcaggtttaagtgctaacaaaagacgcttcacagttggggagtacccaaaggagggaggtgcagagggtgaagaaaaagggaaagaaacagccgagcaactccaaaagatcacccatgaaaattagctaaattaactgattttgatactgtgtaaaatagatattacaaaaaaatattacattagtgttggtcacctgctttaattcgtaaagggaaccataacacggcaatacaattaacgata

SEQ ID NO: 269141 - DNA, 332 bp, Zea mays
aatggcccccacgatcgaccccaacgagatcatagatcatctacctccgagccaccggaggtgaggtcggagcttcgtccgctttggcccccaacatcggtcctttgggtctttcgcccaagaaggtcggtgaagacatcgccaaggccaccggtgactggaagggtctccgagtcaccgtccagttgaccattcagaaccgtcaggccaaggtcagcgtcgtccccagcgcttcgagtttggtcatcaaagccttgaacgagcctcctatggaccgaaagaaggagaagaacatcaagcacactggtaacgtttctttcgacgagatcgtc

SEQ ID NO: 269142 - DNA, 985 bp, Zea mays
cggacgcgtggcgagacgcgtggggcagagcagttcctttcttgctctcctccgctagtccggtaccactcgacctcggcgtcccaccgaagacgacctcacgcggagctgggaatattccttcgcctccgtgctccctttagcaccaactgtcacggccgcttccagcacgcatcattctcgtctcccgtctcgagagattgcagggggcggcggctcgaagctggaggaagcggacgggttcgccatggggtccgagggatcctcgggtccagttgtcgttcccagaaactttaggctgctagaagaactagaacgtggtgagaagggcattggtgatggaactgtgagctatgggatggacgatgctgatgacatatttatgcggtcctggacaggaactatcattggtcctcccaacactgttcacgagggacgaatctatcagttaaagctgttttgtgatacagattatccagataaaccaccgactgtccgattccagactcggatcaatatgacatgtgtgaaccaagaaactggattggttgaaccaagtctatttcctatgcttggaaagtgggaaagggaacatacgatggaggacattctgaccagcttaaaaagggagatgtcaactccacagaatcgcaggctgtaccaacctcatgaaggcaatgaagaccaaagagtagagcagaaaggggtgtctcttagatgtgtcatcatgtaatctatgtgcgttgcaatgtacagcattattgaattgagcagcgagatgccgaggtgagagaccctctcaggaaatcatgtggttcgccttaatgttaatggtgccaccatcgcaataaaagcgtcgatgattgttaaagtgcctgcacaccatgtaacgtgtaacccagttcgcccagattctgtgaaagacaacgagttcgatgaatgtttgttaaaaaaaaaaaaaaaaaaaaaaaaaaagggcggccgc

SEQ ID NO: 269143 - DNA, 500 bp, Zea mays
agataaaccaccgtcagtccgattccagattcggatcaatatgacatgcgtgaaccaagaaactggattggttgaaccaagtctatttcctatgcttggcaagtgggaaagggaacatacaatggaggacatcctggccagcttaaaaagggagatgtcaactcctcagaaccgcaggctgtaccaacctcatgaaggtaacgaagatcaaagagtagagcagaaagggctgtcccttagatgtgccgtcatgtaataatgtacatttgaattgagcagcgagatgccgagcttgagcgaaccctctcagggcatgtttaggaacaatccccttcaattcccttgctttcaaagaagccctgtaggaaccctgctgtagctcaccttaatcgcaataaagggtcgatgactgttaaattgcctgcacggctgcacaccatgtaacagcaaccgattcgattttctgtgaaggacaacgtgttcagtgtcggctgttccac

SEQ ID NO: 269144 - DNA, 260 bp, Zea mays
ggaattgacaccacatcaagattgctgtgcgcgacttaggtgcagagttaccatttccactgccatgtagtcaacagcctcttgggcgaaagacaggtatatcgggaactagggttgccttcggatggaattgcagatttgtagtgccgagttggaatgtcaggttcccagaaactttaggctgctagaagaactagaacgtggtgagaagggcattggtgatggaactgtgagctatgggatggacgatgctgatgaca

SEQ ID NO: 269145 - DNA, 721 bp, Zea mays
gcatcatataaaaggcgagctggcaaggaaggagaagacaacctctctgtaagaatcaatacctaccccatggagaagctctcttctcgtcgctattcccggccggcgatgtccctgctgatcatcgtggccatcactatctcctgctccgtcgtccacagttcggaggctccagcccaagaagcagcagtacctcgtctggacggagaccatcagggccaagcgccgccgccaccggatgccggcaaacctcgacagccacagccgccgtgctgtcttcggcacggcgcttaacgtcctaaaatggaccagggaggacggaggatactttgagatcaacctaggccgcgacgaccatatgtttttaaattttattaggactagtctgggaaccctatttttctaatggatttccatttttccaaaaaaaatatgggttcccaaagtagtttttaataatacaaacataagagaacccgtacaccatccgtgtcaaattataagtcatatatataggtcggggtgcataactgagataatttggttcatgtatcatttgtagtcctacgagttcatccgtgtgtttggtttctcaaggtaacaccactaccactcatatataatcgttgtaatatcatgtgttgctttaactataactagtataatgatgtgtaaagcgacggcacccaaacatacttgatactcataaaaaataaaatta

SEQ ID NO: 269146 - DNA, 534 bp, Zea mays
  unsure (1)..(534): unsure at all n locations
ggtccagaaatccgggccgaccacgcgtcagagagcgtgtgttcgtttcgaggacgcacacacagacgccatggaggtgacaccaaaccacaccctgaccgtgaccgggtgggcggccatgaacgagtccgccggcaaggtggagcccttcgtcttcaagagaagggagaacggccctgacgacgtgacgatcaaggtgcagtactgcggcatgtgccacacggacctgcacttcatcaacaacgactggggcatcaccacgtacccgctggtcccggggcacgagatcacgggcgtggtcaccaaggccgggcgcaacgtcacgggcttccgcgtcggcgaccgcgtcggcgtgggctgcatcgccgcctcctgcctggactgcgaccactgccgccgctccgaggagaactactgcgaccgtgtggcgctcacctacaacggcgtcttctgggacggcagcgtcacgtacggcggctactcgcgcgcgctggtggcggacaagcgcttcgtggtgcgcgtncccgacgcgct

SEQ ID NO: 269147 - DNA, 1387 bp, Zea mays
ctagtgcctagatcgtgggcggccgctcgcgatctagaagcctatcttcaggcagtgtttctggtcaagacaaccaagagcagcctcatgatggttccaggcctctgagagaagatgacagggatgggcattatgtttttgctgttggagataatctcacatctcgctataagatcaatgcaaaaatgggagaaggtacctttggtcaggtgttggagtgttgggataaggaaacaaaagaaatggtggccataaagatcatcaggggcattaagaagtacagggatgctgcaatgatcgaaattggcatgcttgagaagcttggtaaatatggtgaaagcagatccagttgtgttcaaattcggaactggtttgactatcgtaaccatatctgtattgtctttgagaggcttggaccaagcttatatgattttctgcgggaaaacagttaccgctcattcccaattgccctagttcgggagattgccaaacaactgttggaatgtatagcatttatgcatgaattgcgcctcatacacactgatttaaagcctgagaacattctccttgtttctccggagtacattaaagtgcctgattacaaagtctcatcccaatccccaaaggaggggtcctattacaagcagttgcccaagtctagtgctatcaaggtgattgattttggtagcactacctatgatcaacatgatcagagttatgttgtgtcgacgaggcattatcgggctccagaagttatactgggacatggatggagttacccatgtgatatctggagtgttggttgtattcttgttgagctttgcacgggtgaggcgttattccagactcacgaaaacttggaacatctggctatgatggagagagttcttggacctttgccgtaccatatgcttaagagggcagatcggcactctgacaaatacatcagaaaaggacgcctgaattggcctgagggttgcacctcgcgggagagcatgaaagctgtgatgaaattgtccaggcttcagaatctggtgatgcaaaatgtggaccaggctgcgggagatttcattggtcttttgcaagggctcctgaagtatgacccagcaagccgtttaacagcacgagaagcactgaggcatcctttcttcaccgaagggtttgggcgaagaagatgatacgtccttgaagcagaccttgtttgtcctctgtctctgaccaaactgtatataaagctgaaatggagctgtttcaatcttgtttgaaacgtcgtgtaactatagttgtatcacaagggaagtcagacggatactttttactaatcctgacttgtttgagttttgcaagccaattcaatgaaagtttgggttgaacaggacccacggcc

SEQ ID NO: 269148 - DNA, 1452 bp, Zea mays
ggcttggttgggacgtctgccccgccgagatgaatcagtttgcactttgtggacaagaagttgtgaatgccttcagtgctgcagtgttgggcctatcttcaggttgtgtttcttctcaagtcaaccaagagcagcctcatgatggttcccctcctctgagagaagatgacaagaatgggcattatgtttttgctgttggagataatctcacatctcgctataagatcaatgcaaaaatgggagaaggtcagtttggatgaccatgtattctgaaatagttgatttaactcgcattgggcatgccaatacattcagcaaattttgtctataactgaatgtgtctggactctggaatacaccaggtacctttggtcaggtgttggagtgttgggataaggaaagaaaagaaatggtggccataaagatcatcaggggcattaagaagtacagggatgctgcaatgatcgaaattggcatgcttgagaagcttggtaaatatggtgaaagcagatccaggtctcatcccaatccccaaaggaggggtcctattacaagcagttgcccaagtctagtgctatcaaggtgattgatttcggtagcactacttatgatcaacatgatcagagttatgtggtgtcgacgaggcattatcgggctccagaagttatattgggacttggatggagttacccatgtgatatctggagtgttggttgtattcttgttgagctttgcacgggtgaggcgatattccagactcacgaaaacttggaacatctggctatgatggagagggttcttggacctttgccataccatatgttcaagagggcagagcgcgtttcatgccattgtctcatatcgtatgcttaagagggcagggttctctgaacatcagtgctgtgggatctggtcgatgtcttgtgcttattaatccttgtttgtagtcggcactctgacaaatacatcagaaaaggacgcctgaattggcctgagggttgcacttcgcgtgaaagcatgaaagctgtgatgaaattgtccaggcttcagaacctggtgatgcaaaatgtggatcaagctgcaggagatttcattgaccttttgcaagggctgctgaagtatgatccatcaagccgtttaacagcacgagaggccctgaggcatcccttcttcacccaagggttttggcgaagatgatgatactccttgcattctaccttgtttgtctgacttgatgtcttgcatttgacagtctgtacttttcagtggtgtatgtaggcggtagatcaatctgtataaagccgttgtagagttgtttcagtcttgtttggaacgtcgtgcagctttagctgtagcataatggaagtcaaatggatgcatttgactttaaatcctgacttgtttgaatttggaatgtcaatggaaatctggtttgaggagaaagtgaacatc

SEQ ID NO: 269149 - DNA, 927 bp, Zea mays
gaagtacagggatgctgcaatgatcgaaattggcatgcttgagaagcttggtaaatatggtgaaagcagatccaggtgagtttgctggttcagttagcacctatatgcgtgcttacgttcataagattgcttgtatataagctgtctattttgcagttgtgttcaaattcggaactggtttgactatcgtaaccatatctgtattgtaagtacattgttagattgtggcaattatgaactgacccaaaaagataaccatgtggtgcttaaacattggtgaatttggatcaatggtgagcaggtctttgagaggcttggaccaagcttatatgattttctgcgggaaaacagttaccgctcattcccaattgccctagttcgggagattgccaaacaactgttggaatgtatagcatgtgtgtgcacagttcttcctattatcgctcctgcactataatgcatatacattagttttttttgcaatatatgtgcagcattgtagcctatcattaatccatattactactcatgcttaaggaatatctaacatcatgggatgtttatgtatttaccctctctctgtaatgtgttgcagttatgcacgaattgtgtctcatacacactgatttaaagcctgagaacattctccttgtttctccggaggacattaaagtgcctgattacaaagtatattttggtcttttatttacatcacctacccaagatttaccttgccctgtgcttgttgatttctgttgtaataggttagtgaatattgaatatggtactgatcctctttttttcatttgctaggtttcatcccgatccccaaggagggatcctattacaagcgggtgcccaagtctagtgctatcaaggcgattgattttggtagcactacctatgatcaacaggatcagagttatg

SEQ ID NO: 269150 - DNA, 384 bp, Zea mays
tcagtgcttgcacaagagtttatggtgtctacacatgattatgacattgaagaagaaggaatagatccatgggtttgcattgcctcagcagtctgcacctcgtgatatggaaagcaccgggagacatccattcagacatcaaatagttcggttatctgaaacagctgatatgaagtttaaatggcgggtgcttcttcaaccaggaatcaggcatgccttatgttatggcatgttaattcaagcccttcagcaatctacaggaatcagtggtcttctccgttgggctcctgaaatatttgagcagtctggagtggctagtttgttttcagacattggatttctcctgcatcaaacatcattctcatgagtacccttaagctttgc

SEQ ID NO: 269151 - DNA, 271 bp, Zea mays
ttcttcacccaagggttttggcgaagatgatgatactccttgcattctacctttgtctgacttgatgtcttgcatttgacagtttgtacttttcagtggtgtatgtaggcggtagatcaatctgtataaatccgtagtagacttgtttcagtcttgtttggaacgtcgtgcagctatagctgtagcataatggaagtcaaatcgatgcttttgactttaaaaaaaaaaaaaaaaaaaaaaaaaaaaagggcggctgctcgcgatctagaac

SEQ ID NO: 269152 - DNA, 260 bp, Zea mays
tggtttgatttgcatgtacaagtacagaggatctgagttaccaaggttctgcagggtgaggcgatatgccagcactcacgactatcttggagcatctggcgatgatggagaggtgttcgtggaccttcgcgcataccatatgttcaagacggcagagtacgtttcatgccattgtctcatatcgtatgcttaagagggcagggttctctgaacatcagtgctgtgggatctggtcgactgtcctgtgcttattaatcctg

SEQ ID NO: 269153 - DNA, 675 bp, Zea mays
acgtcaggggaggcgcggagcagccgcgaccgcgagaaagaaaaggaagccgacgccacgcacgccatcgccgcctctatcctctcctcgtcctctccctccccctctctctccctgctccacctccaccaaccaatacacacctccctctctaaataccacttcgtccgagagcacaaagcagggtatcttcctttcaaaagaaacttggctgggtgttgacgcacgcagccggcggcaacctgtgcggggagcgccaagggctccaggaaagaatcggccgcgggctcgcgatcgggaaggggagcggggcgcatgcgcgagcactggcacggcgacggcgacggcgaggacgagcatgagccccagccggggtgcggggagggcgcggggcatgcggcggcgaactgcgcggcggtgtgctgctgctgcccgctggcgctgctcgacgtgctgctgctcgtcaccgtccggctccccgcgggcgtcatgcggcgggtgaggaggaggcgccggcgccgccgcggccacggaggtgccggagccaaccggaagaggccggcgcccgcgtcgccttcgggaagcagcggcaaggcgatgatcggagcggcgacgctagacatcgacgaggacgcgtgcggcgaggtggagtcggcggcggcggcggactggagc

SEQ ID NO: 269154 - DNA, 730 bp, Zea mays
gctgtgtacgctgctagtggcggtggccctgtcgggggtgctggcctcgaaccgccccgtggccgcgacggcgacggcggcggcggaggcggcgaacgaggtgctccgcgcgcaccagctgccggggggcctgctgccggcggggatcacggcgttccggcacgacgccgccacgggggcgttcgaggcccggctggacgcgccctgcacggcgcgcttcgaggtcggcctccgctacaacgccaccggctccggggtcatcagccccggccagatcgccgacatctccggcgtcgccgcgcaggacctcttcatgtggttccccgtccacgacatcaaggtcgacatcccctccatccggcgtcatctacttctacgtcggcgtcgtcaagaagcacctcccgctcgccgtcttcgacgcgccgccggcctgcacgcccgacccgctcctgcagcggctggaggacgtgggcgagggcggattggccgtggtgggcgccgcggcgtcccggcgatgatgggtggaggagaacggaggagggttcgacggcgccggcgagccaggatcacgagcgcagttttgagaggagaacgggcgatcgccggccttcttcgatgcacatagatagcgtgggcatttccatctgtgtgcttttttctgcttcctactagtggctatacactagtaaccaacctcgtctatcattgttcgtttcgtcaagctgttgtc

SEQ ID NO: 269155 - DNA, 748 bp, Zea mays
tcggtcggtggcacgagacaggagacgccaaggccatagcttgagcctagagcagcagcagaggcttgacctgaagctccacccgccatggcattcacgcccgctacggcctgctgcaaggcttccctggcgctggcaccgcgggcgtcgccccgcggcccggcggcctgcgcgcaggcggcgctcctctgcacgccctccacctccgtgttccgcggcctccgggcgcccgcatccgccgcgccggccccgcgccggcgccgctcggcggcgtccacgggcatagtctgcggcaaggtcgccaagggcagcgtgccgccgaacttcaccctcaaggaccagaacggcaagcccgtgtcgctgaacaagttcaagggcaagcccgtcgtggtttacttctaccccgccgacgagacgcccggatgcacaaagcaggcgtgcgcgttcagggactcgtacgagaagttcaagaaggccggggcggaggtgatcggcatcagcggcgacgacgcggcgtcgcacaaggcgttcgcgcagaagtaccggctgccgttcacgctgctgagcgacgaggggaaccgcgtgcgcaaggagtggggcgtcccctcggacctgttcgggacgctgccggggcgccagacgtacgtgctggacaagcagggcgtcgtgcagtacgtctacaacaaccagttccagcccgagaagcacatcggccgagacgctcaaggatcctgcagaccctctgaat

SEQ ID NO: 269156 - DNA, 453 bp, Zea mays
caagatgtttgtttccattccatcggtggcacgagacaggagacgccaaggccatagctagagcctagagcagcagcagaggcttgacctgaagctccacccgccatggcattcacgcccgctacggcctgctgcaaggcttccctggcgctggcaccgcgggcgtcgccccgcggcccggcggcctgcgcgcaggcggcgctcctctgcacgccctccacctccgtgttccgcggcctccgggcgcccgcatccgccgcgccggccccgcgccggcgccgctcggcggcgtccacgggcatagtctgcggcaaggtacgtggcctcgggaatggcgtgcgtgcgtgcgggaatccgtgttccacacatggcggtgattggtttggtagccgtggtcgtctcctcgttgcaggtcgccaagggcagcgtgccgccgaacttcaccctcaagga

SEQ ID NO: 269157 - DNA, 524 bp, Zea mays
tgccgctttgaagttgatcttgttgaagtttgccacccgaataactgcaacgttggactgcttgcatactccccgttggctggtggggttctcactgggaagtatcttgacgctaacgctgacatctcaaagagcaggctaaatctcttccctggatacatggcacgctacaatgactctttggctaaagaagcgacattagagtacgttaagcttgccaagaagcacgggctaactccagtccagcttgcccttggcttcgtgcgtgatcgtccattcaccgctagctccatcattggagcgaccaccatggagcaggtgaaggagaacatcgacgcgtttaccagcactccacggcctctaccacaggaagttcttgacggcattgaggatcttttcaagagatacacagatccagcaatcctctagtttttcattcaccttttttggcgaaaagtagcaatcctcggacaatacaaagcccagaaaacataatacaacctaggattgttaggtccatacat

SEQ ID NO: 269158 - DNA, 937 bp, Zea mays
aagacacataacaacgagcagcacagctcacgctcggctacgactacgatccgcgcgcatcgagggcgatgagtgacaccggctcgagcttcgcgcagtgggccgcgctctaccaccaccacgaccccgccggcggcccggtcctgcccgacgacgacgcggcggacgctggcaacggcatcggcagcggcaccgtcaccgtcgcgagcccgacgtcgggagggtccagcggcgggagccccaccaccaaggcagcgtgggggcagcagcatctgcttcacggggtggaggggccccgggtcgccgggaagccggcggcggcgcggcggcggtcccgcgcgtcgcggcgggcgcccgtgacgctgctcaacacggacgccgtcaactttcgcgccatggtgcagcagttcacgggcgttcccgcgcccctcgccggcgcgttcagggtcggggacggggccccggtcatcagcttcgccgccgactacggcttcccgcccgcttcttcttcctcggccgtcaacgtgtccttcttcgaccaccagctccaccggagccaacaacaccctgcagcgccgccggtccacaggcagcagcagcagtacgccggcgcgtcgccgttcggcggctacagcagcggcctggtgcaaggcggcggcgcaagcgacgtcttccccgcgtcggcggaggacaggatgctcctgcagagcattctggccgcccagatgccgcacatgccgccggtgtccggcgctaacaccagctctcatggcttctttgcttgaataagtaagtagctgaccaaggtactacgacggcgtcatccatgccagtatgccacatgcatggaagctagagaacatgggccagatgcagtgaggattagcagcctagcagtagcaaagaagaagaagaagaaggggtaatcacaagtttc

SEQ ID NO: 269159 - DNA, 606 bp, Zea mays
gctcagcacgatcatcgacacacacacatatcgatcgatcgtgtcacgccagcagagcacgagcacggtgctccaatccagagccatgtcgaagccagcgtcttcgtcgtcgttcctcctcctcctgctgctgtcggcgacgctgctcgccaccgtctgccgcgccgacccggacccggtgcaggacttctgcgtggccgtggcgccgggcggccacaacaacgcgtcctcctcctccagcacctacccgggcttcccgtgcaagccggcgtcgacggtggtctcggacgacttcttcttcgcggcgcacgcgggcggcgcgagcacggacaacccgatgggcgcgggcgtgacgccgggcaacgtggaggcgttcccggggctcaacacgctgggcctgtccatcaaccgcgtcgacctcgcccccggcggcgtcaacccgctgcacacccacccgcggtccgccgagctggtgcacgtggaggccggcgagatgctggtcggcttcgtcagcacggagggcaggttctactccaaggtggtgcgcgccggggagagcttcgtcatcccgcgcgggatggtgcacttccagtacaacgtcggcaa

SEQ ID NO: 269160 - DNA, 562 bp, Zea mays
cgacggcatcagtcggctcaaaacggttacgatgatactgtacgaggtgctcaggctgtacccgccggcggtgacgctgaaccgaagaacgttcaaagacatgcagatcggaggcatcacgtaccctgcgggggtgatcctggagctccccgtgatcgtcgtccaccacgaccccgacgtctggggcaaggacgcgcacgagttcaggccggagaggttcgccgaggggatctccaaggcgaccaaggaccagcagccggcgttcttcccgttcggctggggcccgaggatctgcatcggccagaacttcgcgctgctcgaggccaagatggccctcagcatgatcctccagtgcttccagttccgcctgtccccttcctacacgcatgcgccgtacaccgtccttctgctgcatcctcagcatggcgcgccaattattttcgacaggatctgactgcccttgcatgacatcgtcgatcgttgtcagcatgtgtcacagtgcaaataaactcgtatgaataatatctgtgttagggagatgagtctacgtctgtgtatctga

SEQ ID NO: 269161 - DNA, 551 bp, Zea mays
aaattcttttataagatggatacacaaaagaaattttctgaattccgaggccagcttagtggcatgctttttcatgaaaaacttgggacaatgctcgataaaatgacacgtgtcgagaataccgttgctgaattggcccttattcttggaataaatgagagaacggtcccaattatcaaagatgcggctgcattggctatgtcagatcttgccacttctattgtcacagaatttacttcacttgctggaattatggcacgccattatgctttgagagacagcatccctgaagagattgcagaagcactatttgagataacactccctcggtcttcgggtgatgtgtttccaagaacagatgctggtatagttcttgcggttgctgatagattggatagcctagttggattgtttggagctggatgccagccaagttctaccaatgatccatttggacttcgaagggtctcttatggattggtccaaatattagttgagaacaaaaagagctttgcctcagacgagctctcaccttattggcaggggtgcaa

SEQ ID NO: 269162 - DNA, 348 bp, Zea mays
ttaagaacgacgagagtataaaatgggctaaggaggccctggcagatgattggatatgtttcaggattagaggggaggaaggtcaagcttcaacattccaattcactgaagaatatataatgtacgtttaggactgttaggttgtaaatcgtcaaagtgtctatgtaatgcttcttcttggcatgctacactatatagtactaatattgatcctttaacaaaaaaaaaaaaaaaaaaataaaaaaaaaaaaaataaaaaaaataaaaaaaaaaaaaaaaaaaaaatacaaaaaaaatattaacattaaaaaactataaaaatataaaaaatagggggggcccctttta

SEQ ID NO: 269163 - DNA, 991 bp, Zea mays
ctccatcgcgacaagaccagcatcacgtgaccacgtcacgcgcacggtgcaccccttgtacagtagtactccaaactgctacccggcttcctcagccgtcgtatcatctgccgccgccatactcctgtccacctgagtacctgaccggcatccttccccctcctgcccgatccctcgaggcggagatccctaggccgtcggccgggatggcgggggcgctggccctcgcggtgttgctcgccgtcgcgtcgctccatgctgaggcggtgtggctggacgtgccacagtcggggaccaagtgcgtgtcggaggagatccagtctaacgtggtggtgctcaccgactattccatcatgtacgagtcccacccctattcgcaccccaccatcgccgtcaaggttacttcaccatatgggaacaccttgcatcacagtgagaattctacagttggtcaatttgcattcacaaccgcagaagctggaaactacgttgcatgcttctgggttgatagtgcagagaaaggatcaggagtatctgtgaatcttgactggaagattgggatcgcaacaaaagattgggatgctattgctaagaaggaaaaaattgagggtgtagaactagagcttcggaaacttgaagtggcagtacaggccattcatcagaacttgatatacctcaaagaaagggaagcagagatgcgaactgtgagtgagacaacaaattcaagggtcgtctggttcagtactctgtcgctatgggtctgcattgcggtatcggttttgcaagtccgacaccttcaagggttcttcagaaagaagaagctcatttagagtctctctgtaagatgttgcgctgtggttcagatgttgttcaccttggaagggtacaattttgccttttacatggaacatttcacaccagtgatgactgatgggctacttgtactgtatgtaatttaagtacgattggatcgccaatctatatttcaggg

SEQ ID NO: 269164 - DNA, 619 bp, Zea mays
  unsure (1)..(619): unsure at all n locations
cccacgcgtccgtgaagaaaatgttaaataatgcgccagagtatttgcagaatgttgttgagctatgccaaaacagagtggttgtcttcgataacgggaccgaggaccgaaggctccaagcgcagcaacttgacaaattgctcgatgtagtggactcggtttgtgcaaacaatggaggaaaaccattttcagatcaaatgttcactcgcatcaaggaggtgcatgatagggaaaaagaggtgcataccttgggatattcagatgagcagatatctgagttgaaggaggagattcatagaactagggatgaacagcttgcacagataaccagcatggtcgaggaaaagctaaaccgcactgtggagaagctgcaacagcagctcatggaggaacagaacgcaaggctggaggccgagaaggtggcgcatgaagctatgcggaaatcagaagcgcacatccaggagctgaaggagagactcgagaaggctcgactggaaaacgaggagttccggaggatggcgcanagcagtaaatgtgctatcctatagtacttgctagaaaaactctgtgcggctatcgtgctgacgcgtctctttttttttgtctggagcaccctttt

SEQ ID NO: 269165 - DNA, 486 bp, Zea mays
cctgactgaacctccgtaatagtagatggtatcgcgtacaaaggtggaagagctccaagctgatgtagcttctatggatactgaagtttctgctctgatgaagctgttcaggaaaataacagagagtgacagagcccctccacccagggatagaaatgacgatttgtctttggaatgcgagccagttcaccttgatgacacggtagacgacattgaccttgagaagatggagaaggagatgtcagcctacgtctcggctttgtctgccgcgaaggagaaccctaccgacgagttcatgagagcagtcgccgatgcaagattaagacttcaagccgttgtactctgaccaagactagagcgttgtactgtgtaaccaacaggagcaagcaaatcgatagtacatttgctaatcgatgtgttttgccggtgccccccctcagggccttttctgtgttctaaatcctaccttgcaagttgcatctgatc

SEQ ID NO: 269166 - DNA, 499 bp, Zea mays
accacgcgtccgcccacgcgtccgcccacgcgtccgcaccagcccctctcgcctcacgaaaaggcgcaggccaaggccaaggccaagccgccccctccctcctctcctctcctctcctctcctttcctctccactctctggcagccaaaggcgaggccgagatcctgcgcgcggaggatgccttccaggtccatgagccggctgtccgtcgagtccgcctcgggcagcggcggcggcggctgccgggaggccgagccggtgctctgcgcgcctcggccgcgcagggcccagcagcagctggtccacgtccacccccgcggcgccgacctcatcctcggcccgccgcccttccttctcaacgagagcagcgaggagggtcggtgcagctgggcggcgtttcgccgcgggtcgccgccggcgcgcgcgggcaacccgctggtgcacgaccccagcttgctgctgagccagcgccaccccgcggcggacccaacgctggagc

SEQ ID NO: 269167 - DNA, 736 bp, Zea mays
ctccgcctgaccgcgggatgtcggcggtggtgccgcagccgcagtacgtggaggagaggcggcccagatcggaactggagcctcagccacccatgtcgcccccgccgcccaaggagatgaggccccccatggacctgccgcctcccgcgccgccgtcgccgcagcacccgccgccgccaatgccgatgccgatgcctgggaacgagaggccgccgccgatgctgatgccggcggagtgcgtgatcccgacggtggacatcccgtcgtggccggcggcggggccgtgcgggtgcccgtgctgcgcgccgtgctaccatggctactacgaaggctgcaagtgctactgctgcggcggcaggctgtacggcacgaccgtccgcccgttgccagcgccgtgcggggcctacaggggctgccggacgttcagcgacgacgacccgtcggcggcgtgtagcgtcatgtgaagaatggtggtgttgctttggatttgacaggaacatgcatggtgaactaatagctggtgatgcgttgaacgaataaatgtgttcattaggcagggggttgcgttatgctgtccattttgttcgtgtctctccatgactgctctgcacggatcggagcatatgttcttgctgtcaacgtgtgattggccatagctagttactatatgagtgttcagtgctgttcaagacaaatgggatcggattcttcagctaatagagtctgtaatttatat

SEQ ID NO: 269168 - DNA, 386 bp, Zea mays
  unsure (1)..(386): unsure at all n locations
gctatcggaagaatgaaatcaaattagagtatcgtgtgaggtcaagacggtactcatggaactggagacacttcttgtacagaaagcaactgcaccaatggcacgtcagattttgcagctgtttcttgagaagtacaggcttctaccaagatcatcaatccacatatttttgtcttgtttttaaaatacatggtagttaaatcgtgtttcaacttgcccttgattaaggcgctacagctactgccaactaaatgtagtattatgtgagctctttttcatcgagaattcctaattgtacctgcttcagataccttnnnnaaaaaaaaaaaaaanaaaaaaaaataaaacaattttnnnntaaaaaaataatatataaaaattataaa

SEQ ID NO: 269169 - DNA, 701 bp, Zea mays
gaggggcgccgcggtgcgctcccctctcctcgtccaccaccgcgtccccctggtacatcccagcgggggaggctcgctccgggtcggctggcccggaattgggcccggacgggaggggcggcggcggggcgccccggttggggctagggttttcgcgcgctactcccaggcccaggacttctccacacgcctccaagatagagctggtgagctgcctaagttagtcgaggaccttatccagacatcgattagcacagggcctcgaggtgctttcaggatggcccaagggatccaagctgtgcttggggttggtggggagtggctgaatgacctctcaaagacagccaacacatcagcaggaattccatctcagatgcagcttggtttgctttctccactttaccttcgaaggctttttgagcgcatgggtgccacttatatcaagttaggccagtttgtagcatctgcgccaactttgatttctgcacaatatgttgaggaattccagaaatgctttgaccaagcaccagctgtaccatatgacgtgattgaatcaatattacgtgaggagctgcagcggccattacatagtgtgtatgaatacattgatcccgtgccaatagcctttgcctcaatagcacaaggtcatggcgctaggttgaagagctctcagaaagatgtggtgattaaagttctaaagc

SEQ ID NO: 269170 - DNA, 1571 bp, Zea mays
  unsure (1)..(1571): unsure at all n locations
caagcggcagagcgccccaaacaaaacccaactcatttttttttcccagctcgcggaacgggcggcctcgttgcaacttgcagagacccagtcctctcgctttctcaccgcgattcgcctcgcttccatccgattcgattcgggagctagaggagagagaggagaggagaggcagtgatgccgctggctgagtcgcccccgtggcgccgcaaggccacagatttcttctccacgtccagtgtcaagctgaagcaggcaggccaatcggccggggataatatagttgatgttgctgggaaggttgggtccgcggtgaagagtcggtgggctgtcttccaagaggctaggcagcagcagcagcagcagcaacgtccgccgcatgagacagtgcaagagcgtatcatcactgctgctgcctccactggtttgcttttcaggaaaggcatttcagagacaaaggagaaggttgcagtgggaaaggtcaaagttgaagaggctgctaaaaaaactgcagataaaagcaagagtatcttgaacaatattgaacgctggcagaagggagtcgcacgcactgatgtgtttggtgttcctattgaagccactgtacaacgagagcaatctggtagagcggtgcccctggtgcttgtgagatgtgcggactacctggttatatcaggtttgaataatgagtacttattcaaatctgaaggtgacaaaaaagttcttcagcagttagtttctctttacaatgaagactctggcgcatctttacctgaaggtgtgaatcctattgatctaggtgcactggtgaagtgctaccttgccagtatccctgagccgcttactacattttcgctttatgatgagcttcgagctgcgagggttagcattcctgatcttagggatatattgaagaagcttccaaatgtgaactacatgacaatagagtttgttacagcattgcttcttcgagtcagccataaatcatcacttaacaagatggactcccgcagccttgctgtggaatttgcgcctttgatcatgtggcggcaaggtgacactggcacagatttgcgtaaccacctcaagtttaccctgaaaccgcctccaaaaattgtggatacaacatcaaatgctgccacatgggacctgttagatgaggatgacgaggatgcttcatcccagatccccttagacgatgcttcaccaccagactacagctccattgaggttatccagtgtctgatcgagcatcataatgccatcttcaccgatgcaaatgaaaccgtgtggagatgatcaacgtctcttctagatctctctggtgttagctcgtgctacgtattagttccaggtaggaaggtggattaccgtccgttattgttaggtataagcattttggctggaacatntttggagtaggtttgtatatatgccgctagtgttaattctccccgggactaagatctgggtcatgtatagcaatataagtctggggtgatgtaaaccagatggacnnacagacacgatgtgctgcatttgctgaaatcgcttatacactgatgtaatct

SEQ ID NO: 269171 - DNA, 495 bp, Zea mays
cggacgcgtgggagtcctctcgctttctccctgcgatgcgccccagcttccatccgatccgattcgggagtcgggactcgggagatagaggcagacggagagagagaagaaaggcaaggcaatcgccgcgcgcgtgcttcctgccttctcggtcggctccagctcgccgttcattcccgcaatcccgttccgctcgcggtatcgggccgtggtagtgatgccgctggctgagccgccccagtggcgccgcaaagccacggatttcttctccacatctagtgtcaagctgaagcacgcagggcaatcggccggggataatatagctgatgttgctgggaaggctgggtccgcggtgaagagtcggtgggtcgtcttccaggaggctaggcagcagcagcagcagcaacggccaccgcatgagacagtgcacgagcgtatcatcaccgctgctgccaccactggtttgcttttcaggaaaggcatttcacagacaaa

SEQ ID NO: 269172 - DNA, 345 bp, Zea mays
cccacgcgtccgcggacgcgtgggtctatccacaacagttgttactgctcaccaattgtttttggtttgtagtttcaaatgcagcttcttagtttagaagaagtttaacaataggcaacgctaacaatcacctaccctgaataacttggtttgagaattgagacggcagccctttttgtcactcgaacctttttagtctgtatacctgaaatggcatttcacataaatcctatttcctccaagggcgtctgcgtggtcctatgctaacacaattattgctctagagcctggagagatgaaatccaagcaactggagtcttcagtggagactgagactgaagtccg

SEQ ID NO: 269173 - DNA, 641 bp, Zea mays
cccacgcgtccgcccacgcgtgcgcttgaatcttttgacttgggtaatggagggtccaaaactacagcaaagaagaaagaggcgtcccacaagcaccacaagaagccccagcggaagaaggatcggtcctggagggttggcaatgatggtggcgacggaacagcagttgtaagagtgtaccagaaacccgcagttaatttgtccacgggctctttaagtggcagggtctgatgccccaacttttactgctcgcacaaccccggcacacatgggcaagggcatgggacctcttactgtagcaacggctgaactctgaagctacttcgatggaaggaagaaaggagtactgagcatacgagagtttgaaaaccttagaaacaacattggtagtcgttgccggaacttgtgctgcccttccggcctttctcgtatgtatatgctgtgagttgtagcacggttgattcatactaaacgtggtggtatgtgttgttttgttttttcatgtctcacatagctgcagatacagctttgggatgcagatttgacgtggaaaaaatatgtagacgatttatacttgctaagttgctacatttttattttttacgctctggaaacataaattaataataaatattatattt

SEQ ID NO: 269174 - DNA, 425 bp, Zea mays
aaccgacctccgccaacaagaagccgccgcccgcgagccaggacgagccggccagggggaagggcgaggcgaagaggaggaagagcggcaagaagaagaagatcgggaggttcctctccaggctcgtcggcgcggagaggcggcggcacaccggcgacggcggcggcgacggcgacggcgcccagctcttccactccagaaccatgaaggagaagacggcgtccaagtgggtgttcttctgaatcccctcgtcagatcagatgccagcaccatgctgcacacacacgcgcgcttgagggccggtttcctcgatcggtcggtatggagctttttcccccccacttcaagtactcctgtgcttcaatccgctgcagttagttagcatggtttctctttccgactgtgtacacgagacaagccaaaac

SEQ ID NO: 269175 - DNA, 424 bp, Zea mays
  unsure (1)..(424): unsure at all n locations
ttgctaattgtacttcaaaagatctgtcgcctgtggagatgcaaacatgttcagacatgaaacttgcatgcttctatattcaatgttggaatctttagtcgcaaataataaacactaccatcttccgtgcaattctgcttcatggtgagcaagtcgaaggagaggccggcggcatgggcgtgcgacggcggtgacgagaggagcggcagcaagcagaggctgtcaacgagccgcgacgtctccggctccggtggtgggacggcgcgctcccggcagagccaaacctgtagaaacttgtgggcagggaacggcctctacgcttgaatcttgattagagcactccttattcacttactggctcgcgtcagtcgtagtagcttcaggcacgntcaaaaggagatagaaaacatctcgtgcattcttc

SEQ ID NO: 269176 - DNA, 491 bp, Zea mays
gtgcatgcaacatgcatcatccataccataccttaccatccgcagctgtcggggatgggcgacttcctcggagagatggccgacatgatgagccaggccacgccaacggagagcttcgaggagctgcagcagctgttcgtggacatgttccaggacgacctggacggcgccgggttcttcggcgggcttccgacgagccgcagtgcccagggtcctagcagcacctcgttgccaccgtcgacgtcgccattgcggccgacgcctcctgcaagaaggaagggtgcgcaaacaccgtcgtcggttaacggcgctgggaggcggggttcgacggcgaagcggccgaggaccggttgggctggcctggaaccggatctgggcctctctggattctgtttcatggtgagcaagtcgaaggagaggcccgcggcatgggcgtgcgacggcggtgacgagaggagcggcagcaagcagaggctgtcaacgagccgcga

SEQ ID NO: 269177 - DNA, 480 bp, Zea mays
tcgttttatctctcccaggttgcccacaagagggatgcgccccgaagctcactgtggagggttcgagggtgtttctttcgccgcggctggtagagatcatggtgcagcgcatgagggaaggacagatccctccgagccaaaaggtctactgtccgtatcccaggtgctcggccttgatgtccttgggggaagtgattcatccgatgcaggagtcctcatcaaggcacacggctgctgatgctgccacgttgaggaagtgcgtgaaatgcagaggctccttctgcctgagctgtaaagtcccatggcatgatggcatgcgttgctttgagtacaagatgtggtaccccctcgctcacccaggagatgccaagctgcagaacctggcaaggcagaggctgtggcgccaatgcgtgaaatgcaagcacatgatcgagcttgcggagggctgctaccacatgatctgcgtgcggctatgagttc

SEQ ID NO: 269178 - DNA, 435 bp, Zea mays
ttcggctcgagcgcacacctccctcccgagtcccggccatgggacgcggcagtggcctgcttctgcgtcgtggtcgtcgtccgagcacggggaccgaacgcgagcagtagcagcatcccggagcgcaggagcatggcgatggacgacggcggcgacgacttcaccttcgccgccgcccagccgcctcctagtctagtatctgcaggaggcggcggtctcataggcccgccgctgctgtacccagtcttcggccggccgagatcccctccgcgggctgctccggagacggccaccgcgcgggtgccgctaggacggttcctgctggtggacagggatccgtcgcagccgccgccgcctgctcccgcggacgacgacgacggcgacctcgactcggtgccggcggagatgttctgcccgtggtcccgtgggtggtcg

SEQ ID NO: 269179 - DNA, 417 bp, Zea mays
gcgtccgaggtaccgcagccgcacgcacaggtcctgcggcatggcgcagtggagcagcgtggccgcgagcgtggaccggtggattgggcttgggcttgggccatgccgctgcggctcaccgccggcaccgtcccgggcggcgatgccgcggcgcgggcgtgcgaggaggaacggcggcaaggtcgtcggctgcgcgtccgtcccgcgggagcaggccgagctgccgccgcttgccgtcgatggcaccgaggaagaaggcgtaggcgggtgcggaccgtgcggcggcccggggtgggtgctctgcgacttctgccagggcaggaagaccaccgccaagccggagacgcggcacccgggtgtaccgcggtgtcccaacttccaaggttgcggccttaatccggggccaaaaagccaggt

SEQ ID NO: 269180 - DNA, 518 bp, Zea mays
cccacgcgtccggccgaggccgcagggcaggcggtcgagcaggaggacccctacgggtgggccatcggcggcgccgccgcggccgggcgcgcggactggctggcggcgtaccgcgcccgcgcggcgccggcactggcggggctacgccggaactcggccgacttgtcggctgccgagaccgccgcgttcctccgcgcctgcgggctctgcaaccgccgcctcggacccggccgcgacaccttcatgtacaggggcgacacggcgttctgcagcctcgagtgccggcagcagcacatcacgatcgaggagtggaaggagaagtgcgcgctcgccacgccgccgacggcgccggcgtccgacccggtggtgccgctgccgcccagcggcgcgggctccgacaaaccaggcacgctcgccgccgcatcctgattagtcatgagggagggggtccgaggcgatcgaagatccggctaagctagcatcctctggccttggccaccacacacattacatgcata

SEQ ID NO: 269181 - DNA, 757 bp, Zea mays
cccacccagaccaaacccaggcttcccgttccctcgcttttgtccggcggccatggcggaggagcagcagcatcagagatggcaggagggccaccgcctgtgcgccaacaattgcggcttcttcggcagccccgcgacgctggacctctgctccaagtgctaccgcgacctataccagcagcagccagcaggcgcggcggcgggcccctccgctcccaccgcgtcggccttccagcattcctcctcggcagtctccggcgcggcggcggtctctcccgatctcgaacctcccgcgacggcccctgctggcgccaaggcgggcaggtgctccagctgccggaagcgcgtgggcctgacggggttcgcgtgccgctgcggagctaccttctgcggcgtgcaccgctacccggagcggcacgcgtgcgccttcgatttccgggccgccggccgcgacgccatcgcgcgcgccaaccccgtcgtcaagggcgataagctcaaggacaagatctgaggagcaggaaccgccgcctctcgcttcagagttcatgtcttccccccgtcagcggaactccggaagagcaaggacgaccgacggccagaagggacggatcgtcggattgtacgaattactcccgtgtactctacgattggtataaaacccaagcccgtcggttcgattgtgtaaagctggcggtgaaatcgctggccgttttctgaatcacaataaattcaaataagcccacattttcttttccag

SEQ ID NO: 269182 - DNA, 558 bp, Zea mays
cggaacggcagtgccgactcaagcgacgcgtacgaggtatcacggcgacgcgccatcctccagcgcccccacctcacgccccgccccgacgcccgccgcgcgcccacgacgaggcgccgcgccgtgcctgcaaagatctgctgcatcggatgggaccccgagaggcatcctgggcgcgccgcagggcggccacatcgcgcgcctcgagttccgccgccgcctcgagagggactccgaggcgcgcgaggccttcgagcgccaggtgcgcgaggagaaggagcggcgccgcagcgagcgcgaggcgcgggtgatcccggacacggacgccggcctcgtcgagttcttcctcgacaccgacgcgcgcgagatcgagatcgagatcggcaggctgcggcccaggctcagccaggacttcttcggccacgtctcgcgcgagatagcgcagatcaaatttgcagtcaccaggacagcggagatggaagacagactgatcgagctggaggcgatgcagaaggttcttctcgagggagttgaggcgtacgacaagttgcagaacga

SEQ ID NO: 269183 - DNA, 309 bp, Zea mays
cccacgcgtccgcccacgcgtccgcccacgcgtccgcgtgctaaagtgtcctcactgctgctctcctccgctccgcagctcatggcttcctcggtctccctccgtggcgccatcctccagcgcccccacctcacgccccgccccgacgcccgccgcgcgcccacgacgaggcgccgcgccgtgcctgcaaagatctgctgcatcggatgggaccccgagggcatcctgggcgcgccgcagggcggccacatcgcgcgcctcgagttccgccgccgcctcgagatggactccgaagcgcgcgatgacttc

SEQ ID NO: 269184 - DNA, 854 bp, Zea mays
  unsure (1)..(854): unsure at all n locations
tgcatccagcgtaagagtgagcaacgagctcggcgccggcaacccaagggccgcggcgttctccgtggtggtagtgacgctgctctccttcgtcctgtcggtcctcgtctccgccgtcatcctgctgtgccgggactacatcagctacatcttcaccgagggtgaggacgtgtcgcaggcggtctcccggctcaccccgctgctggcgttcacgctcatcctcaacggcatccagctccagcccgtcctctctggggtcgctgtggggtgtggatggcaggcgttcgtcgcgtacgtcaacgtcggctgctactacatcgtcggcatcccgctcgggtgcctcctaggcttctactttgacctaggagcagcgggtatttggagcggtatgatcggcggcaccttgatgcagaccttgatcttgatatgggttacattcaggaccaactggaacaaagaggttgaagaagcacagaagaggttaaacaaatgggacgacggcaaggctcctctgctgtcagcgcaagaatgaaacaactcgtctctctggtgcccaaccaaagaacaacgagacgtggatatgacctgtacggaactagggacgcccctcggcaggctcagcggagacgtcgacgtagtttgatatcaagtagcaattcccccatgtcctgaaatggacagaaccaggccaaatgcctggaatggacagaaccagatggctgatgaaattctacgtacattccatccggtccaatatataattcgtttaactattttatattaagtttgaccgactcatactattcaaaaatatatnnttgtcgtcgatattatctgaaaannnnaaaannaaa

SEQ ID NO: 269185 - DNA, 538 bp, Zea mays
agccggctttcgcccccggcctcgtaacgtcgggtaggttttccccgactcgactgcgcttctcttcgtctccttcgcgaacccgccgtcgcccactgcctcctctccttctacctcgcgcacccgccgccgcttgctgtctcctctctcgcgcgcaccggtgttcccatcgccgtctccttatctccctcgtgcagccgctgttgtctcctctccacccttgtacccgccgccgcctcctcttcagatttcctcttcttcaccctcgctgcctcctcttcaccctcgctacggcctcctcaaatcgttgagacaactagtacagttgagacaactggtgcgaggtcggacggcggggaccatgcgaacaagctcgttgctgccttctcggctcgtgcaccctcatctcaagaagtgaatcgcctcaggtgatacacaagggattttcatcaacaagtggtcgccagaagaactgaaacatcaagatggcgtttgcttttaggtcatgccattcaggagatgatgttttattattatg

SEQ ID NO: 269186 - DNA, 582 bp, Zea mays
ggacgcggacgcggctcacatcaaacaccccctcctcccccttcagctgtgctcactgccgcaaaaccacacagccacacaggcaaccagcgcccagcgccctttgacatcaccacatccacgctccgttccatggccatgtcgagcagcgccagcaagaagcaagcccaggcccaggcccagaaggccgggcgaaggcccccggcggtgtcgtcggccgcggccgcggacgcggagatgcagagggtgttctcgcgcatcgacgcggacggcgacgggcggatctcgccgtcggagctggcggcggtgtcgcgcgccatctccccgccggcgagctcctcgcacgggcggcgcgaggtggcggccatgatggaggagctggacacggaccgcgacggcttcgtggacctgggcgagttcagggcgttccacgcgcgcggcggcggcgttggcggcggcggcgacgacggcgacgacgcggagctccgcgccgccttcgccgtgtacgacgccgacggcgacgggcgcatcacggcggccgagctgggcagcgtgctcgcccgcatcggcgaggggtgcagc

SEQ ID NO: 269187 - DNA, 306 bp, Zea mays
gtcgacgtcgtctgtcggaggagagcgtctctcagcttagtagtaccgaattttcctcgagaaaaaggagaagaaagaactaagaagacagacagtcattaaaagcttcgacgactaggcttccgcctccgtcggcggtgagcagttcaggtcgagatcgaacgcggcgggcttcctcgccgacacagcggccggtggcgacggcgacagatccactgccgacgaacagtcggagtcgctctgcgccacggtgaccgccggcgccagcttgagcacacggcaccctgcttccgcggctgcggtgcg

SEQ ID NO: 269188 - DNA, 2064 bp, Zea mays
agcggctacgacgtcgctcctccggtcccttcgatccggtggggtccgtttctttcaagcgcggcctcgctggccgcctcgtggcagtgaccgtcgaaccctctataaatcccgtgccccgagcacccttcctcgatcacacaacccaaagcagccacagcagcctccttcctcctctcactctcgctcgcgctgcgctcgctacctcgcttcgcattccattcgaaaagaggggaggaaaggcaagatgttcatcgagagcttccgcgtcgagagcccccacgtgcggtacggcccgatggagatcgagtcggagtaccggtacgacacgacggagctggtacacgagggcaaggacggcgcctcacgctgggtcgtccgccccaagtccgtcaagtacaacttccggaccagaaccgccgtccccaagctcggggtgatgcttgtggggtggggaggcaacaacgggtccacgctgacggctggggtcattgccaacagggaggggatctcatgggcgaccaaggacaaggtgcagcaagccaactactacggctccctcacccaggcctccaccatcagagtcggcagctacaacggggaggagatctatgcgccgttcaagagcctccttcccatggtgaacccagacgaccttgtgtttggaggctgggacatcagcagcatgaacctggcagatgccatgaccagggccaaggtgctggacattgacctgcagaagcagctcaggccctacatggagtccatggtgccacttcccggtgtctatgatccggacttcatcgccgctaaccagggctctcgtgccaacaatgtcatcaagggcaccaagaaagaacaggtggagcagatcatcaaggatatcagggagtttaaggagaagaacaaagtggacaaggtagttgtgctgtggactgcaaacactgaaaggtacagcaatgtatgcgctggtctcaacgacacaatggagaatctgctggcatctgtggacaagaacgaggcggagatctcgccatcaacactatatgccattgcctgtgtcacggagggggtgccgttcatcaatgggagcccccagaacacttttgtgcctgggctgattgatcttgctatcaagaacaactgcttgatcggtggtgacgacttcaagagtggacagaccaagatgaaatctgtcttggtcgatttccttgttggtgctggaataaagcccacctcaatcgtgagctacaaccacttgggaaacaacgatggcatgaacctgtctgcccctcaaacattcaggtccaaggagatctccaagagcaacgtggtggatgacatggtctcaagcaatgccattctctatgggcccggcgagcatcccgatcatgttgttgtcatcaagtatgtgccgtacgtgggagacagtaagagggctatggacgagtacacatcagagatcttcatgggcggcaagagcaccatcgtgctgcacaacacctgcgaggactcgctcctcgccgcacctatcatccttgatctggtgctcctggctgagctcagcaccaggatccagctaaaacctgagggaacggacaagttccactccttccacccggtggccaccatcctgagctacctcaccaaggcaccactggttccccctggcacaccggtggtgaacgctctggcaaagcagagggcgatgctggagaacatcatgagggcctgcgttggcctggccccagagaacaacatgatcctggagtacaagtgagcgaagtggcgtggcctgcagctagatatggaggaggctgcacgaagggaactagagaggcgagattagctgtgggattgtgttggcttctcgtgttttcttttgcgttcttttcctggtcatcgctgtcgcgcttttgtattttatttgttggacccgtaactatcagggctctgctattagcgcatgaagcctgtaatggcatcgtatgataatgtgatcgagggtgctagttcccctaaggcctacaatctcaaataatattttgatagatcgatttcatt

SEQ ID NO: 269189 - DNA, 589 bp, Zea mays
gcggcaagaacaccatcgtgctgcacgacacctgtgagggctcgcgcctcgccgcacctatcatccttgatctggtgctcctggctgagctcagcaccaggatccagctgaaagctgagggagaggacaaattccactccttccacccggtggccaccatcctgagctacctcaccaaggcacccctggttccccctggcacaccggtggtgaacgctctggccaagcagagggcgatgctggagaacatcatgagggcctgcgttgggctggccccagagaacaacatgatcctggagtacaagtgagccaagtggcgtgccctgcagcgcgaggttagctgctggaagggaactagaaaggcgagattagctgtgggattgtgttgggcttgtcgtgttttcttttgcgttctttcctagtcattgctgttgcgcttttgtatttgtcggacccgtaactaccagggctctgctattagcggcacggagcctgtaattgtattgtatgataatgtgatcgagggtgctacttcccctcggcattcctagtgttggttaaaagtcgttcgacagcaacttatcgaccc

SEQ ID NO: 269190 - DNA, 534 bp, Zea mays
acacagcccaacaaaggagcgcggcggcccctccttccttcctcccacttctctcgcgcggcgctcgcttacctcgcctcgcattccgttcgagcaggggagcggcagtgagaagggagggaattaaggcaagatgttcatcgagagcttccgcgtcgagagcccccacgtgcggtacggcccgacggagatcgagtcggagtaccggtacgacacgacggagctggtgcacgaggccaaggacggcgcctcccgctgggtcgtccgccccaagtccgtcaagtacaacttccggaccagcaccgccgtccccaagctcggggtcatgcttgtggggtggggaggcaacaacgggtccacgctgacggctggggtcattgccaacagggaggggatctcatgggcgaccaaggacaaggtgcagcaagccaactactacggctccctcacccaggcttccaccatgagaggaggcagctacaacggggaggagatttatgcgcccgtcaagagccttctacccatggggaaccc

SEQ ID NO: 269191 - DNA, 348 bp, Zea mays
cggacaagttccactccttccacccggtggccaccctccttcgcgggctcctggctgagctcagcaccaggatccagctaaaacctgagggaacggacaagttccactccttccacccggtggccaccatccttagctacctcaccaaggcaccactggttccgcccggcacaccggtggcgaatgctctggcaaagcagagggcgatgctggagaacatcatgagggcctgcgttggcctggccccagagaacaacatgatcctggagtacaagtgagccaagcggcgtggcctgcagctggatatggaggaggctgcacgaagggaactagagaggcgagattagt

SEQ ID NO: 269192 - DNA, 906 bp, Zea mays
caaagctccgaaacagagcccaaaagactacgagctcgcggggaagacggggacttccggagagagagagagagagagagagagagagcaggaagcaggggctagacgcggatcggcgagcatgaggggcggcggcggcggcgggatgatggacgatgaagagagggtgggccatgcggagatcccgaccagtttcggtcccgagctgcgcgcctgcctccgatgccgcctcgtcaagacctacgaccagttcagggagaacggctgcgaaaactgcccgtttctagagatggacagagagcacgacaacgtcgtcaactgcaccacccccaacttcactggaattatctctctgatggaccccagtaggagctgggcagcccgttggttgagaattggcaggttcattcctgggtgctatacacttgctgtctcggaggagcttccagaagagtatcaagggatttgtcaagacaacaacgtgcagtatgtgccgcccaagcgtgtctaagtatcaagacggcggcaatgatggtgtcttggtcctgaagcagtatagataattaggtagaagtatctgtgcttgccaagggaactgctcctcttatgctttgtatccgagtgctaaggcagtctatttcatgttagtgataaggctgtttatttaggtggtgaaccggcgggtgattgaatcttatccaataaccttgatgcctgttcttgaaatctgtgacaacgcggttcatgtgcttctgtcatgttctttcacatctatgtatatatgaagaaaatgtaatagctaaaggtcgttggaccatgaaccctcggcccctgaagaccctatgtataagggactcaacatgttgaattctgtttcgggaccaagcaaaactggattgtaagtgt

SEQ ID NO: 269193 - DNA, 342 bp, Zea mays
caggaagccggaagcaggaagcaggggctaacctccgagcggcgaggatgacgggcggcggcgggatgattgacgatgaagagcgggtgggccacgcggagatcccgaccagcttcggcccccgagctgcgcgcctgcctccgatgccgcctcgtcaagacctacgaccaggaacccttctccgctggcgccgctcccctcccccctcctcacgcctaggcctgcggtctaggttcaccagcctcccgttgaagggagggttcgaggactgggggtttcgtttctcctggtgcggtccgttctcggcggcggctaaggtttagctcgctgcgcctctcgatt

SEQ ID NO: 269194 - DNA, 798 bp, Zea mays
cccacgcgttcgaccacgcgtccgatagagcacacattcgagtgtaaaccatccaaccaatcgtgtgttcgagttccaggagctcccgaaacctgaggtgccgcacccagtgccggagctgcccaagcccgaggtgccaccgcacccgacagccgtccctgagctcccgaaacctgaggtgccgcacccagtgccggagctgcccaagcccgagctgacaccgcacccggcggccgtgcccgagctgccgaagcctgaggtgccgcacccagtgccggagctgcccaagcccgaggtgccaccgcacccgacagccgtcccggagctcccgaaacctgaggtgccgcacccagtgccggagctgcccaagcccgaactgcctcctcacccggccgtcccagagcttccaaagcctgaggtgcctcacccagtcgcgccagagctgccaaagcctgaactccctcctcacccgaccgtgccagagctgccgcacccagaggttccggaggtgccaaaccacgagctgccgcctctaccgaaagctgagctgccaccgaagccggagggccactacccggagccggaggcgaaaccatgagcggacgtacagtccgagactcggttatctgcacattttcccgcatgcacacgtacgtgtctgttgtatagtagctatatatgatttgtgatgttgtgttcttccgtacgagtcagagagcttacatgtgataagctagtagtacctatcagtttggatccatatgtatacctgaatgaataaagaattctagttgtgtt

SEQ ID NO: 269195 - DNA, 556 bp, Zea mays
acgcatccgcaatcttcaagaaagaagaagcaaatagagcacacagtcgagtgtaaaccatccaaccaatcatggcttcgagttccaggagcaccgtgttttcacttcttctcctggtggcgctgctgctcagctgcagcggcatgagcagcgcggcgcggttgctggaagaggcgccgcccaaggaggagcacccacatcctgccgtgccggagctgccagaacctgagctgccgccgcaccctaccgacgtcgtgccgcctgagctgcccaaacccgagttaccaccgcacccggccgttgtccccgagctgccgaagcctgaggtgcctcatcaggtgccggagcagccgaagcccgagctgccaccgcacccgacagccgtccctgagctcccgaaacctgaggtgccgcacccagtgccggagctgcccaagcccgaggtgccaccgcacccgacagccgtccctgagctcccgaaacctgaggtgccgcatccagtgccggagctgcccaagcccgagctgacaccgcacccggcggccgtgcccgagct

SEQ ID NO: 269196 - DNA, 1533 bp, Zea mays
cctcccctccctctccgaaagctggaggggaaggagatccattgcttccgatggctgcctgccgtctctgacctccgacctctgcctccagcctccagccttctcctccgccctacctgaaagcaactcctgatcggattcaggctaggtcctcacagcacagccctcctctgagactcagcaaggagacctgaacacgaattgatctctgcgccgctgcaaccccggcccgtcgaagccatggggtccggggactggttcaagacgatcatcagcaagaaaaaatcgaagcggggaaagtcaaagcacgcaaagctctctggccaagtaacaaatggaggcaaccagacaaatcagaagttagacggcccttcttcaagtagtgaggaccacgaagacaatgcagcactagaggaatgggctgctactcgcattcagaatgcgtttcggaaatacaaggcaaggaagaccctgcgttgtctcaagggagtcaaaagattgcgcgttgtgggtcaggcgaatccggttaagaagcagactgctgccacgctgagttacatacagtcttggaacaagttgcagtcggagataagaaaccgacgtgctttcatggtcaccgaaggacgcaacaggaagaagaagcaggagaaccaaatgaaacttgaggcaaaactgcataatttgcagattgaatggaatggaggctcggatactatggatgaaattcttgctaggatacaacaacgggaagaagcagcagtaaagcgtgagcgagccatggcgtacgcgttcaaccatcagtggagagcaaggtctgccacaagtctaggaaacttcagctatgaagtcggtaagggtggctggggctggagctggatggaccgctggatcgcagcacgaccatgggagccgcgatccatggtccaccctgagaacccgaagaaagcacaggcaaagaaggagaacaccacaaacccatcagctctcaagctgcaaggctccattaccctaagcaacaatatcaatgaccggaaaaccctgaaaaagaagccattgccttcagcttctcctgctgatcagaagaagccatcaccgtcgccttcttccgatcagaagaaaccagtaccgaaggagcagagagcaaaggcagctggcactcctccaaaaccaaaggccaaagatatgaaggggagtcaagagaaaaagccacaaccacaacagaaagtgcctcctccggttagcgcatgaagcttcctgctgcgaaaatggttactgatcatgtaagatacatcttgtgaagttatctcatgttcaacactcatgcttgtatgtttttgttttttgttttatggtgttatgggacgaggggtgcccaatctagaatgtgcttggtttgagcgattgcgcacgcacaacatatctgatgagaattgtttttggttaggattaggatctctgttattcattgttgtgatgctgtaataagacttgccttgcctggctatctgcttgaatggaaagtcttgttggaac

SEQ ID NO: 269197 - DNA, 335 bp, Zea mays
ctcccgggctggcttcctcgccttcctggtctgcttctcctcaccgttgacgaatcacgaggccggcctgcctgcctgcctgcctgctttttctgtgctccgttcgaatggacgggcagaggagtcgatgagcggccgtgggctttgattttcccctggggtctgctcttcttggtcagcaaggagacctgaacacgaattgatctctgcgccgctgcaaccccggcccgtcgaagccatggggtccggggactggttcaagacgatcatcagcaagaaaaaatcgaagcggggaaagtcaaagcacgcaaagctctctggctaagtaacaaatg

SEQ ID NO: 269198 - DNA, 505 bp, Zea mays
cgccttcttcttctggatactgatgacctatggattggagtcctgcttcatggaccatatcggtttcctggtgcccaggctcgttctcggggtcgtcattcagcttctctgcagctacagcacgctgccgctttatgcaattgttacccagatggggagctactacaagaaggagatcttcaacgagcatgtgcagcagggcgtgctgggctgggcacagaaggccaagaagagatcgggggtgaaggaggtcagctcgccgtccgaacccatgcacggcgaagatgcggcctaggattgggatggcgagggtaacgggtagctggcgaggacaatgatgcagcagttgtaaagcacagactagctgtaattttttttttttttgcagatagaaccgtaaaacactgctcgtaatctttactgttataaatcacaccagttttgacagtactcaaaaaaaaaaaaaaaaaaaaaaaagggctgcctccggacgcgtgctggaccc

SEQ ID NO: 269199 - DNA, 758 bp, Zea mays
gccaagttcgaattggcactcgtagcatctattctttccggtccggcggatgatcgatgttgatatgtgcggtcgtcggcataatatatataatactcgacatcaaacagctagcactagtagggctgcatatgtcccgtgggctcattgcgtgcctccttgcgtgttcgatcgatcggatccccatacgatctactagctagctaagctacacgactcgaccgaggaggaggagcgcgctcaggccgtatagaaacttggagcatgtcgttaaccacccaagtgtttgggcctcccggctacaggcggtggtggatctattacatcgtcaacgatactgatcaattgagtaaagctctgaaccgacctgatcacctggtggtgttcatgttctcggcggagtggaacgaaccctgcaaggcgatgaagaaaccgttcagggacatggccagggctagaaagatgcaggccgtattctgcttggtggacatcgacaagcttaaagatgctgtggcgcacagttccaagtggaggcgctgccgacgttcgtgctgtacaagaacggcatacagaaagggagggtcgttggcgccaaggtggacgacctcagagccgccatcgacagcaacatatgattccatctccgatcgatcgatccattcgtgctgcatgcatacgatcgactaataacaacatgaggctagcaaaagacgacggacgatcggatcgtccaacaataaacaaataacattatatta

SEQ ID NO: 269200 - DNA, 274 bp, Zea mays
gtagagctctgtcccgacctgatcacctggtcggttcagagccttactcaattgatcagtatcgttgagtagagctctgaaccgacctgatcacctggtggtgttcaagcttcggcggagtggaacgaaccctgcaaggcgatgaagaaaccgttcagggacatggccagggcacacaaagatgtaggccgtattctgcttggtggacatcgacaagctttaagatgctgtggtgcagagttccaagtggaggcgctgccgacgttcgtgctgt

SEQ ID NO: 269201 - DNA, 730 bp, Zea mays
ggacctggttttaacaaaaatgggctaaaataaaaacatttcggtctcatctccgtccacatccgtcctccagcactccagctgcatcgacgaggaccgccgtagcgatttgcgaagcaagggacgggagaggaacccgaggaaggcgaaaatgatctaccgcaactggtcgctgctctcgtccacagtcgtcatttggggcggcgtcgccaccgccggcctcgccggtatcttcctcttgggcggcaaggagaaattcaatggttatctgtgccgcgaaggcgagaggcttaggcagcaggacagagccgcgatgggccgaagctaagcgttagcttctttggtatctcaagggagcaatagcccttcgaaatttcacaagattcctgcgtccctaccagaacaagtccctatctaggactaggatggaatccatccttctgcaggctttcactttcctgataataacagtaacaataaattgacaatggtttgtgttcttctgcaacctttttggctccctggtttcgcaagggttccgtgctttgtttggcgtcgtcacttgcatgtcttggtataaaaaggttgctgttgcatttggcgtacgggactaaaaaaaatatctgggtcctgtctttgacacgtggccgacgattttgccacatattgtacctacccatgatgttcagtgttgcttacgcgcgaaaaaaaaaaaaaaaaagggcggccg

SEQ ID NO: 269202 - DNA, 366 bp, Zea mays
aactttcgcctgcagctattctgcatccgtgacacgtccagcagctccatcgagttcgaggactagccgccgccgccgcacctgcacggacgccaagggacgggagagcgagagggagatccgaggaggtcaaagatgatctaccgcagttggtcgctgctctcatcgacggtcgtcatctggggcggcgtcgccaccgccggcctggccggtaccttcctcttgggcggcaaggagaaattcagtcagtatctgtgccgcgaaggcgagaggcttaggcagcaggacagagccacgatcggcatgcaaaactagagaggaagcatatgtaagcctgttcgatatatagaggtcagaaaagcttgc

SEQ ID NO: 269203 - DNA, 502 bp, Zea mays
gcgaaaacatttcggtctcatctacgtccacattcgtcctccagcactccagctgcatggacgaggaccgacgtagcgatatgcgaagcaagggacgggagaggaacccgaggaaggcgaaaatgatctaccgcaactggtcgctgctctcgtccacgagcgtgatttgggatagagtggtcaccgtcggcctagtcgggatcttgctctggggcgagttggaggaattcagatggtatctgtgccgcgatggcgagaggcttaggcggcaggacagagccgcggtgggccgaagctaagcgttagcttctttggtatctcaagggagcaatagcccttggaaatttcacaagattcctgcgtccctaccagaacaagtccctatctaggatggaatccatccttctgcaggctttcactttcctgataataacagtaacaataaattgacaatggtttgtgttaaaaaaggaaaaaaaaaaatataaaaaagggggggggg

SEQ ID NO: 269204 - DNA, 798 bp, Zea mays
ccataacaaataacggcgacacgccatccccaccgcccccgacccctacccgcgacttcgctccgcttccgccgatcggcttgccccgtcgatttcgccaacccctcgacccgatcgactccattgatcgtacctcgtcgtccggttgtcgatggccaggacatctttcaaaatggagcacgacctcgagaaaaggcagtccgaatctgccaggatcagggataagtatcccgacagaattcctgtgattgttgagaaagctggcaaaactgatgtccccgagattgataagaagaagtaccttgtccctgctgatctcactgtcggccagtttgtctatgtggtgaggaagagaatcaagctgagcccagagaaggccatctttgtctttgtgaagaacaccttgccaccaactgcctctttgatgtctgcaatctacgaagagaacaaggacgaggatggcttcctttacatgacctacagtggtgaaaacaccttcggctctgcctagagcaatcgcccctgccactgtaaataaacgagcatgatggggctgctgctattgtaaacctgtgtatatacctcagtctctagtatgctgctgccggattgcttcaatggcttcaatgacacccttagctttcaactgtttggatttctcctgtgacattgaattccttcggtatcgaaacatttgatcatttcactattacttcattaccttatctcatcagatgcgtgattgctgtttatcacaaaaaactagatactgcgtactctcagcagcaacaatttctt

SEQ ID NO: 269205 - DNA, 393 bp, Zea mays
gctcgccaacatgacggagaggtacgaggcgatggagcggcggccgggagctgccgcgctgcggaggcggcacgcggagagggagcacgcggagtacgcggtggcaaggaacgccgccctgggcggggccgggctggcggagaccggggtgcacgggtggcgccgcccgttcgtgacgcacttcacggggtgtcagccgtgcagtgggcagcgcaacgagcactactccggggacagctgcgaccagggcatgcgccgcgcgctcaacttcgccgacgaccaggtgctgagggcgtacggtttccggcacgccagttcggctcagtgacgacgtgcagccactgccgttcgattaccctgcaaaggcagtgactagctgatcgacgtgaattt

SEQ ID NO: 269206 - DNA, 687 bp, Zea mays
cggtttcgtgggcggacgcgtgggcggacgcgtgggcggacgcgtgggcgagtccatcgacctggcgctgccgagggacgacagggagcggatcaacatcgagcagcactgcctggcccgggagatcgtgaacctggtggcctgcgagggcgaggagcgggtggagcggcacgaggtgttcggcaagtggaaggcgcgcctgatgatggccgggttcagcccgtccccgctcagcgcgctggtgaacgccaccatcaagacgctgctgcagagctactcgccggactacaagctcgccgagagggacggcgtgctctacctcggctggaagaacaggcccctgatcgtctcatcggcatggcactagtgttgacttcagagaatgttgacctgatggagaatgtttcttgtaaccttcgaagtacctcttagtggtttagatatgtttggctggtcactggaactatctataggaagcctatggtgatagatactgagttgtagtagaacacatatagcctaaatgcctaatgctgtgatggcagtcactaccagcctagcctagaacaggttgatgatgtgtagtagtaagtttgggtatatgtttcagttaatcagttttgcttgggtgcattctgaagggtggcctcttcaaaaaggacatcattccttttaacttgacccttc

SEQ ID NO: 269207 - DNA, 803 bp, Zea mays
tggaggaggagcatctaggcgtcgtcccaggggaagccgtcgccgtcaacttcacccttgagctgcaccacatccccgacgagaccgtgagcacggcgaaccaccgggaccggatcctgaggctggtgaagggcctgtcgcccaaggtgctcacgctggtggagcaggagtccaacaccaacacggcccccttcgcgcagcggttcgcagagacgctggactactacacggccatcttcgagtccatcgacctggcgctgccgagggacgacagggagcggatcaacatcgagcagcactgcctggcccgggagatcgtgaacctggtggcctgcgagggcgaggagcgggtggagcggcacgaggtgttcggcaagtggaaggcgcggctgatgatggccggcttcagcccgtccccgctcagcgccctggtgaacgccaccaatcaggacgctgctgcagagctactcgccggactacaagctcgccgagagggacggcgtgctctacctcggctggaagaacaggcccctcatcgtctcatcggcatggcactagtggtggcctcgtggagaatgttggcctcgtggagaatgtttcttgtgactttctacctcgttgttagtatagatatgcttggctgagcactaaaactatatataggaagcctgtggtggtactgagttgtacaacacctataacctaataacctgatgttgtgaattgtgatggcagtcactaccagcctgataatgtgtagcagtaagttcgagtatatgtttcagttaatcgattttgctttg

SEQ ID NO: 269208 - DNA, 468 bp, Zea mays
tggtcgcgtgggcgcgccaccagcaatctgacgtgtgtccggacctgacctactttttcttcaatccaacatagccatgcgcgacgtccgtccctcactctcacgcgttcgggactgctcgcgcctctcgcctccgtgttcacatcgccctacccgccgtaccacatgccagacgctggccaccggctccgccgccgcagcgactacatcgggggtgtgcagcctcccatcagactcccgccagcgccaaacccttcgactcggcgatggccacaccggagaagaagtcatacccacctgccatggtcgcggaggaggtgagggtgtgaggctgactggcgattggacccgtccccccattccacccgccgtcgccgacgtgtctgtccaaggtgagtccgccaacgagtacatataaaattcatcagggaagggtgttcgcccaaagccttaccaggacttcggtga

SEQ ID NO: 269209 - DNA, 408 bp, Zea mays
cggacgcgtgggccgtgcgtgccccgggggccttgatcgcgcgcaccggtcagctcagcccgtctgattcgcgtgctgccagccctccgccgatcgtgaaacacaaccgtcggtggtttgcttgcttgatcgctgatcctcgcggacgctcacggtcatggcgcctcagcctgtgcgcgctccgaggctgagcgcccccgctggccacgcggcgtgcaggtgctcggccgcgccgctattcgggaagcgggcgccccccgtcgtcgcgttcccccgcgcccgtagcggcggcgccgtcgcctcgtgctcggccgtgcaggagtcgtccaccttcaccactgttagcaagaagaaggatgccgcggacggtgccaaggaggccacagcggatgcggcgaagccggccgc

SEQ ID NO: 269210 - DNA, 1009 bp, Zea mays
gtcaactagttcaagatcgcgatctagaactagtagccgagcagaagtagcgcgtcaggcaatggctccggcaccggtggccgctcccgtggcttcggtctcccgcgcggcagctgcgctcgcccccgccggcgccgtccgctccgccagggtagcctccctgcaccctttccactcttccaccaaaatcgtgctgctgccaccacggaccggcctgctcagatccgccaggcagaggcggcgcttggcggcacggagcagcacctcggagagcagcacggatgactcccaatccccgaaacaagagaaggcgccgttcgggtacacgaggaaagacgtgctgctgatcggcctcggcgtcaccgccttcggcgtcggcctcaagtacgggctcgagctcctgggagttgaccccttgcaggccggcaacgtcgtgcagctgctggtggtgctcgggatgacggtggggtggatctccacctacatgttccgggtggccaacaaggacatgacctacgcgcaccagctcagggactacgagaagcaagtcatggagaaacggctggagagcttgtcggaggctgagctgcaagctctgctcgagcaagtggaggaggagaagcagcgcgtgcctcaggtcccggaagagcctaacgctattaccttcaggaagaaatgatgatcgttctattatctgccaaatggacaccgacctagcttgtttatagcatagcttcgccttcaatagctagctccatcgatattttaagatctgtacaatacgccccgctaagccactagtgctgtcaaacatgaaattatccattttctgccgcgcgccgttatgggacaataccgtagcaccaagaaccaaatccgttctttgagatatcattgtcgttgtaactatatcatcaaaaaaaataaaaaaaaaaaaataaaaacaaaatacaaaaaaacaaataaaacacacaaaaacgaaataacactaaaatataccaaagggggg

SEQ ID NO: 269211 - DNA, 360 bp, Zea mays
cccacgcgtccgcccacgcgtccgcccacgcgtccgcccacgcgtccgcccacgcgtccggaaactcggttctcaacctgatctcatcttgatccacaaccctttcgtgcctcccaagggcaagctcgtcgaattctggaagatcctcgaagagatgaaagattctggagaacttacggcgtctctcggagtatcgaacttccgccctcaagatttcaaagagttgttatcggccgacatcaagtataaacccgtttgtaaccaactcgaataccacccctacgtactagaagctctcgaacccgttttcaaaatccaacaagaacatggtatcctcacggaagcttacggaccttcttt

SEQ ID NO: 269212 - DNA, 431 bp, Zea mays
atgcaattgtatctttaattgagtcactgaggaatgataccgtttcggaggaagctgctggtgctctggctctgctgatgaagcagcctagcatcgtgcaccttgttggtagctctgaaacagtgatcaactagccttggtggggttaatgaggcgtgggactccaaagggcaaggagaacgcagggtcagctttgtttgagatatgccggagaggtggatcgacattggcacagcgcgtggcaaggatacccgggttgaacacggtaatgcagaacatcacgctcactggaacgaagcgtgccaagaagaaggcaagcctgatcgtcaagatgtgccaaaagaaagcaaatgccatcggcgctggcgctaggaagtaccttggcagtggtggatcattcgttggtagggaacagcagattgaggcgcgct

SEQ ID NO: 269213 - DNA, 441 bp, Zea mays
cccacgcgtccggcaaattttgatgcttttgaccggctgtcaatacatgactgctattttggaccggagtagttgatcatgaaccagccgtgtcagtaaacgcttggcagttgccaatggattttttcagtagttggcacctccaggtcggcatcaataacaaaagaatgctgcgaaacaactcaatgatccatatttgacgagtatttacaaattccttgattcaatagtttttcactgtctgggtcctccgaatctgcatcaacagaataacctggaaagcaaattaaggatgcgtacctgatatgcatcggaggatcttttttttttgttccaatggtattataagcttctgtgagggaattccagcgttctttgttagttagcaatttgtaggaaccaccgagatgaaatcaatcccttctatagtttggcaagcca

SEQ ID NO: 269214 - DNA, 602 bp, Zea mays
catgtccggcggtgaaaagagggtccgttgcctgggtagggtcagggccagagttcctgatcagcttagcggaccacgaggagtggagggacgcctacaccgtgttcgggaatgtgcttcccatggacatggcgatcgctgaggagatgacactgctgccgacaagcacagacgtgtggagcaacgtgaaagtgaaggtgctgaaagatcctgtctacttcaaggtcaagagaagcagcaatgctagcgctgtctaggtgatgggcatatttcttcttgcttgtttggatggaaggctgtggcaacaccggcaaatggttgtttgaccatgaaaacctgtgttataactcacaggagacgatggtctcgcttcattgtgcaaagaaaggggagagttctaatacaacagtaatatactagcacagtagtaatatactagtacaatactcctagtacaaaggccggagattctctcttttttcctcgtgtagaacacgtgactcaacgagttcttcgtgtcttttagtttgcctcctgcgttttggcccgttaggcatctacagcacctcctatatcatattttctattttatcatctatatt

SEQ ID NO: 269215 - DNA, 640 bp, Zea mays
ctcgtaggacgtcacaagactctacagtgagtcctagtgatctatcacaccgcacaccaagtttgaggctgttgtgtatgtgcttaagaaggaagagggtggccggcactcacctttcttccctggttaccgcccgcagttctacatgaggacaaccgatgtgacagggaatgtgactgtgattatgaatgacaaagatgaggaggcgaagatgtgcatgcctggtgaccgtatcaagatggttgttcagctcatccagcctgttgcttgtgagcagggtatgaggtttgctatccgtgagggtggtaagactgttggtgctggtgtcatcaacaaaatcattgagtaaactggatatatcatatccaccacgagaattttccttgtttactcaaagcgaaatgctctgtagttgttattatgtgttgagttttaggggttgttcttgtgaaattgtagtatgacactctttcgccaagtgaatttgcataatttatgacattcacgacaaaaatacacttatctggttgcaactgatttggctaagaggtaccatctactgttacatgtccaattgtttcttggttctgttaccctataatagtgttgatacacttaaaaatgaaaaaataaaaaaata

SEQ ID NO: 269216 - DNA, 303 bp, Zea mays
tgcttgtgagcagggtatgaggtttgctatccgtgagggtggtaagactgttggtgctggtgtcatcaacaaaatcattgagtaaactggatatatcatatccaccacgagaattttccttgtttactcaaagcgaaatgctctgtagttgttattatgtgttgagttttaggggttgttcttgtgaaattgtagtatgacactctttcgccaagtgaatttgcataatttatgacattcacgacaaaaatacacttaaaaaaaaaaaataaaaagggcggcagctcgcgatctagaactagt

SEQ ID NO: 269217 - DNA, 397 bp, Zea mays
gccgcccatctaccccgtcgccttaacctatctcctctcaaaggctcaattcggctcgctggtaggccctcgcccacctctcgctagtcgctccccacttcccagtctctgcggccggacgccgcggcgagatggcctcgacctgcttccgcgccgccgcccgcgtggcctccgccgccagtcgctcggcggcggcctaccgctccgctccctccgcggcacgcgccgcggcaactgccgcccaccgcatatcgtgcttctccagggtgccggtggagctcgggtgctgcgcgggattgtcactgctgccgctgcacagtgcggtggcgtcagccaggctgacgtcgcggctgagcacggcgtcgagctgccgtgctctctctcagcagatgggtca

SEQ ID NO: 269218 - DNA, 952 bp, Zea mays
cggacgcgtgggcggacgcctcggcgactcacgacgacggaaacagtagtgctgccagtagagctctcagaactcgggaaaaaaaatgtcagaggccgccgtgcgtgtgatcggcctatggcgagcccgttcgtgatccgcgtcctgatcgccctgaagctgaagggcgtcgagttcgagttcgtggaggaggtggtgggcaggaagagcgagctgctgctgaggtcgaacccggtgcacaagaagatccccgtcctgctccaccacggcaagcccatctccgagtctctgatcatcgtccagtacatcgacgaggtctggtcctccggcgcgccggccttcctccccgccgacgctcacgcccgcgccgtccagcggttctgggcgcagtacgtcgacgacaagctgccttgggcgatccgcatactgaagggaacggacgacgggggcatggagcaggcggcggggcagctgtccgcggccctgcagctcctcgaggaggctttcgcgcagctcagccaggggaagcgctacttcggcggggacagcgtcgggtacctggacatcgccctggtgtcgcacgtcggctgggtgaaggcggtggagaagatcgcgggggtcactctgctggacgaggcgaaggttcccaacctggtggcgtgggctgaccggctgtgcgcccacccggccgtggtggacgcgatccctgacgccgacaagttcgttgagttcagcgtgacctatgggtcgttctcttaatcctatcaatgctcccaaagtgagcaaaatggctccgcattgcgctttgtgattttcactgcgcatgtgccggtgcatgtcaccgtcaatagcatgtagtttgtatacatgtccttctgtgaaaataaagctttgctgcccgtcaaagggaaatcgacatatatatacactagtggctcgatctgtattcttc

SEQ ID NO: 269219 - DNA, 784 bp, Zea mays
accgggccggaaattcccggggacccacgcgctagccgccgagtgccgccccccgcccgcccgccctccgccgcgcgtcggacggtgccgagggaagaggcaccatgaggttggagaagtgctggttctgctcctctaccatctaccccggccatggaatccagttcgtccgcaacgacgccaagatcttccgcttttgccggtcaaagtgccataaaaacttcaagatgaagaggaaccctcgtaaggttaagtggacaaaagcatacaggcatttgcatggcaaggacatgacccaggatacaacctttgagtttgagaggaagaggaacaggcccgagcgctacgaccgcaatttgacggagcagaccctgaaggctatcccgcttattacaaagattaggcatgatcgtatggaaaaacacatctcaaacagacataaacctggtaaacgcaaggagatggaaaaggattccaaggagctggagcaggacatcgccatgctcccgaagaagcttattagcaaccatcttgcggctgagaaaacgaaggtcaaggttgaagttgttcagcagcagacagaagataacgcgatggaagagtagtgcgtggcattttgtgtgcttgtgttttcatgtctgatgcagatccttttgtatttgcgtaagaagctatgtagttgatgaaagatgtttatttaatatatatattaatggatggattcgtggaccgagtatcagcaagtttgttgttctggaatgtaagcttgctcgcttatgctatt

SEQ ID NO: 269220 - DNA, 453 bp, Zea mays
  unsure (1)..(453): unsure at all n locations
cccacgcgtncggcttttctttccctcccgttccccgtctgcctccctctcgtcgcatcttgcccagttcccccagctccccccaccttccgttgccttctcgaactcaacccccgcccccgtcgcggatcgtcatggccgccggcctcgccttccccgtcgcctcctttccactcgcctgcgtctcctcacctccccaccccgggcaccgcatctgctgcgcgatcccgtcgtcgtcctcgcgccgcaccgtcaaatcctcgccgctccgcgcgactaccgtcctctccagggaacgacggggcacgggccgtggcgcgtccgtagtgtgcgctgtccaaggccaggacacgaccatccaagtcccagatgtgacaaagtcaacatggcaatcactcgtgatcgagagcgagcttcctgtccctggttgagttctcggtggggatgggtgcg

SEQ ID NO: 269221 - DNA, 470 bp, Zea mays
atcatagcatgataactagctaatccttgcccagatactaaggcaaagaaggctttggggttccccggagaagtcattaacagcaatcaacttgtgaggcgaacaatagacagtaatttgatccttaaagtcttcattgccaactctgctcgtgttgtggaagccattggttcggagtttgtacccttgacccgttacgggcttaatatagtgattggtaaccaaataattagaggtgtacgaggattgtcacaggatccatatccgtgttactagttttaagatgtttcatttcagttctctagattagtgttgatttttttttctctccaaatgaggctaggaacagccagcagttcatttctgtaagttgaatgcagacatctctgtgttgcatatcaacctccaaggatgtgtcagcctgttgagaacccgaaattatcttttatttgaattttatttattactcc

SEQ ID NO: 269222 - DNA, 466 bp, Zea mays
cggacgcgtgggtggaggaaagcctgtgcgccgtggagaagcgcgggcgggtgcacgtcatcaccctcaccggcgcgggggagcaccgcctcagcccggccctgctctccgccctccgctccgcggtcgcagccgcccgccgcgcctcccccggtgcgctcgtcctggccggcgagggcaagttcttcagcaacggctacgacctcgcgtgggcgcgcgcggggccggccccggcgccggagcaccgcctctccacgatgcgcgccgcgttccgcggcctcgtcgccgacctgctcgcgctccccgtgccaacggtcgcggccgtcacgggccacgcagcgggcgctggctgcgcgctcgcgctggcgcacgacgccgtcgccatgcgcgcctcccgcgggttcctctacatgagcgaggtcgacgccgggatcaagatcgtcgattttgtcggcgagctgggtcc

SEQ ID NO: 269223 - DNA, 3035 bp, Zea mays
ttcactcgtccgagaagattggcatgaggcgcccacgcgtccgaaaggaggccaacagtgctgaaatggttgaagagaacaggaaaacaaaacacaatgactcatcagtagttaagcattcaaaattgcccccagtatgcttacgtgtggatcccttgccaagaaagaaacctggaaatggttcttctaggtctcctagtccaccaaggaaggatactgacaacacgaagaaggacgtggatgaggcccagagccagatcctggagcctaaacagtctagtacaagtaaggatatcactgtgtctgaagtgaaagaaaaatcgccttatgaaatgaagaaggaagttgggtttagaaatgaaacagtggaagctgcttctgttgaacatctgcaggaggaagaagctcccacaagtaaagatggccaaaaggtccaagctgctagcactacagttggtgatcaagaaaatgcagccctgaatagcatagaggaagatcatgtgcaagaaaatgctggtgcaggaagcttgaatggatgtgacaaaagaaaaaatgaagatgggacagtgattgaaagtgaaactgcgaaagatgatgccagaacatatggagttaatttgtcagaatcagatgctgcagttcgtattcagtctgcctacagagggtatgatgttcgaaaatggcaacctttggataaactctggaagatcaagcatgtgcatgaacagatgcaagttgtgaggaagcagattcaatgccttttagattcttgcagtaagccaacacaaaaagagcaagtggccataggtgaaactattatgaatttactcctgaagcttgacgcaatccagggcttgcatccaagtgtaagggaagctaggaagtctgttgctcgagaactgatttgcttgcaggagaagcttgatactttatgcaaagcagcatctggagacttgaatcacacagatagtaatgatgatgaatctgaggggaccaagaacattatccaaactgaagctcctactgtaataactgaagcttctgatagaaagagaactattgaactgggtaaggtacaagaaccatgttcagtggactccatggagccatgcaacacagttccatctggagtttcctgggaggtgaggccagatgtagacgctagcgaggagaagaatgaaaaacaagagtcatgtagcaccacagtggacgaagcgcacgaacaagggaaaactgagggacagattgaaattcaggtagcatcatcgatggatatgataagtgatgaagcttttacagctgacaaccaggagcatggaattggagaatcaaatgttacttcagtggaacaagtgactgaagaagagaaaccagcatctgaggatgaagtaaaagagccaccattggtgaactccacggcactattgtatgatactacttcatcaggggattccagtggactgaaacaatacacagcttcgaccgatcagaatctctatgctgaatcaaatacagggtcgtctcctgcatccactgaggacattgacataagtactctggctgtggaaagtgaagtggcggctgagaatgatggcccaattaacagtcaggtgcatgaaactgtagctctagaaaatgtggaaatgaaagatgatgtttcttctgctgaaaatgagcataacagatcgagcagccctgttattcatttagaggacccactagtgtctttgaaggatgttgagcagcatggtccaactcctactaaggactttgttgtacctaacacagaagaccaacaagaagccagagatatcagcttgcaggtacaagctgtggattccatgaaagattgtggcgaagtaccagatggaacaatagaggcttcgacgaatgatgatgaattagaactgggtacttctgcagatgtagaaaagaatgatcaacctaccttgctggaaccaagatcggagtctgtctctgtcccagaactgtccgtcttggatgaatctgacgataaaatgcaatgtggtgtttctggcaaggatgaggaagcacatgtggaggagaaaactgtaactattgctgttgacaaggtaacaggaggttctgcaaatttcgaggatcctctttgtgaggcatcgaggaaggaacctgacattgagaagagtcacccaagcctcggagaagaggaagacgatacaataggtggaacagtcttccctggttcaggtagctgtgaattatcatgtccacaggatggtggcatcgcagtctacgaggggcctgagatggtgtcaccagagagccaaactgatgctcggaaagaaaacatccattcagatgtcgctgagacagatgaatgcaccaagactcagaaggccgctctagcaggcacagagggagaaaattctgctgaagattctggtgtgccggtgtctgagatggacaaatgcaacgagatgccgaaggatgctccgacacttacagcagcaggtgcaaatcctgctgaagacgaagcttccctgaaagacctctctgtgcagacagagaacaaggcttcttctgcctccccagctcctgatgatccgaaggccagcgacgagaagacgctggcagaagagaaccagaagctgaaagagcttctgcaaaagcttctggcgtccggcaacgatcagatgggggtcatcacggacctaagtgagaaggtcaaggtgctggagcggaggctggcacgcaagaagagaccaaaggtgagggtgcacaagccatccaggcatgcttcctgtgtccactgaaaggataagtctgtaaggttttgaggttttatgttgtatggatccccatgttgcttcctgtgtccagctattgtgcactgtgtaggtatagccatgctgtggcactgtgcttcgtcttggacaacacaaggtgtggcatgttctgtattttatgtctgtataatgcatccaactacatctagtgttctgtgagcaattgattgggacaaatcgatatgacatatgcgtctgtgttgtgct

SEQ ID NO: 269224 - DNA, 498 bp, Zea mays
cccttttggaagctaggatggggcaacctcttggcaagaagtgcatctatcttgggctctttgacagcgaagctgaggcggcaaggtgccactggcttatgacagggctgcccttcgcttcaatgggagggaagctgttactaactttgagcctagctcctacaatgcaggagataataacctgcgtgacaccgaaaccgaggcaattgatgatggtgatgccattgatttggatttgcggatttcacagcctaatgtgcaagaccccaaaagggacaataccttagctggcctccagccaacatgtgattcccctgaatcttcaaatacgatggcttctcagccaatgagctcatcatccccttggcccgggtatcaccaaaacccagcagtgtcatttcaccatcagcgcttgtactcgtcagcttgtcatggcttctttccgaaccaccaggtccaggaaaggccggtggagcgaaggcctgagctgggcgccca

SEQ ID NO: 269225 - DNA, 539 bp, Zea mays
caggagcatactgaaagatgctggaatctcatcagacaataagttcacttctattgctcttagcaacttctttgctggtgctgctgccggatgtacaaccctggtcctcatctatccgctcgacattgctcacactcgtcttgcagctgatatcgggcgtacagacacccgccagttcagaggcatccgccacttcatccagaccatctacaagaaaaacggcatcagaggcatatacaggggattaccagcatcgctccacgggatggtcgttcaccggggcctgtactttggcggcttcgacactgccaaggatgtcctggtccctttggagtcccccctgtggcagcgctgggttgcagcccaggcagtgacatccatggcagggctcatctcgtaggcactgggccacgtgcgccggaagatcgatgatgctctcagggatggcggtgcagatgtacagcagcacactcgactgctggaggaagatgtacaggctggaggcgatccggtcattctaccgtggcgcattgtctaac

SEQ ID NO: 269226 - DNA, 1161 bp, Zea mays
ctagaactagtcaaggattctcagcggtctgcaccatctgttccggtttcatatagcacatcacatccgacagtggatgcagattcgagaacactttatgttagcaatgttcactttgctgccaccaaggactcattatctcgccatttcaacaagtttggtgcagcgctgaaagtagtcattgtcactaatgctccaacgggccagccaacagggtctgcctatgtagagttcttacacaaagaatcagctgaacgagcgttgtccgtgaatggcacatcatttatgacccgtattctcaaggttgtccggcgaagttctcatgaagcagctcacttttatggttggcctggtagtggacggtcatcaatatatgggaggcatggtaggatggcatacccaagagctgttatccctggtggttcctttagagggcgtgctccgatgaaagctggtgctagaagtttacagtggaaacgggagccttcaggcactgattcaagtgcaggtgcgaaaactgacatgagtgtggcattttcctctgaacaggtgcttccacgtgcaacataggggagtatgttaccgctgagctgatataatgagaaccaagtggtatcccactcgtcgctcctggccctaatggctgaatatggacagcaagctgagaagattgttccttcctgctgcactgtaaaagaaaagtacaaaaaaaaatgaaaaatataaaaatctaaaacaagagattctgggggagtttggcatcagattatggctatcattctggtgactggatttggtcctcttggccatatgcgagtaggctgacagcctgagcaattttctatggactccagcaatctgaaagaggattcacattcaaaataatcagagcttggatgtattggatggaagatgcttttcaagtagaacaagatgtgcagattttggaccaggtatttagtgacaatccgggcgtcatcgatgtaagcctcaactgtatagaagtaacctatctatctgtacccttgtgtgaatcaatctccttcccaacaaaaaggggggaaaaggcagcacaaaaaaatatgttctcttttgttttttcctctccatgaactgttttatttattgtactaatatagctgattattcagttggacattc

SEQ ID NO: 269227 - DNA, 783 bp, Zea mays
tttacgcgtccgttggccaattgcatacaacggagtcatattctcacttgtgctcacccagatcatctgccttggtgtatttggccttaaagaatcgccggtagctgcaggcttcactgtacctcttatcatccttactcttttgtttaaccagtactgcagaaaccggcttcttccattattcaagacttttccagcacaggatttaatcgacatggacagggaagatgaacgatcaggaagaatggatgaaattcaccacggacttcattctgcttattgccagttcgctgacactgtagatgtgcccttggataaaattgaaatcgttggtggggatgaggagcaaggctctagctcgggtcagtccagtgttaaagaaacgtgcgaggatcccaagaagcacctggctcaccctacactaaaaggactccctgttaaccgcctccggcatgccgtgaggtcggttactttcctgatcagattgcagaaaagaggtttatcagaacagaaaatcggataattagttagccgccaaccccctttgcttgttggctatataaatgtacagaggcatacatgcatatacgatcgttcccttagaagagagaagggccaatgtagaagtctgtgggagaacatcatcatgagtgttgaggtgcaattttgttttgtcgcatggatgagtttgttggttctgcgggttatctggcagattcagctacccaaaccttagccttgcacgttgatgaattaatgctcatggttttgttgtaagagatt

SEQ ID NO: 269228 - DNA, 614 bp, Zea mays
  unsure (1)..(614): unsure at all n locations
cttgggctgtcggcctcacgttttccactgcttccagaggcttcctctcgagtccgcagtctctcttccctacgaagttcagaagttgtcacaatgactcgcggcgaccagagggaacgcgaccggcagagggcgcaggcgcggcggcccgcggccaaggggcgcgacgacgggctcaccccggagcagcggcgggagcgggacgccaaggcgctgcaggagaaggctgccaggaaggcggcgcaggccgcgggaggcgcctgcgccaagggcggcaagaacaccggcaagaagtagccggggtctttactctttagttcgcaggatctgctcgtgttggaagatctgtatttgcctagatctggaatgcaatgcgatttcgtgggcgttgtctcgagcagtgctgaaacaacggttcacagtaaaatttgtagcaaagatttaaaaagaacgagggcgttggcactttgctttgcaagtgatctgcgtagcgtaacaaggcccgtttgaaggtaattttgttaacaaaaggatgggctcattgaccatcagaagtttacgaacatagataaaaccgaacacacctcccaaaaaaaaaaaaaaaaaaaaannaa

SEQ ID NO: 269229 - DNA, 527 bp, Zea mays
ctagtctgactcatattatccactgcttccagtggcttcctctcgagtccgcagtctctcttccctacgaagttcagaagttgtcacaatgactcatatccttggccacacattgtttttttttctgttcctgttgttctatcgattcttgtaagggcgggttttgcagttcgttgctcttttatgtcatggtggactcgttgttttttatgttttctgttggaacggcgtgtttcggatgatggttccgtttcgtccttgacctgggctgggctgcacgcggcgaccagagggaacgcgaccggcagagggcgcaggcgcggcggcccgccgccaaggggcgcgacgacgggctcaccccggagcagcggcgggagcgggacgccaaggcgctgcaggagaaggctgccaggaaggcggcgcaggccgcgggaggcgcctgcgccaagggcggcaagaacaccggcaagaagtagccggggtctttactctttagttcgcaggatctgctcgtgttggaagatctg

SEQ ID NO: 269230 - DNA, 724 bp, Zea mays
actgaatttacaatcaagcaagggtggttgcatactggtgatattggatactttgatgagggagtgacagcttttcgtagttgatagacttaaagaactgattaagtacaaaggttttcagattgcacctgccgagcttgaagggctacttctgtctcatccagaaattctggatgctgttgttatcccgttccccgatgctgaagctggtgaagttcctattgcttacgtcgtaaggtcctctgagagttctttgactgaagttgatgtccagaaatttattgaaaagcaggtcgcatactacaaaaaattgaggagggtgacctttgtggacagcgtaccaaaatctgcttcagggaagatcttgagaagagaactcatctctaaagtcagatcatccaagctatagcaagccggcttctgtgttcagaagctagaacgacttccaatttgaaaatttgtcagattgagcgtaaaggtttacatgttactgagcggagcttatcaagcaatacattcagcttgacacagtttgtgggacatgtatacatggtggtgtcggatgacttgtatcgaatattgggcctgatttacattcactattcgaaaatagtacagatatgtaatatggctctgctgcgtgtacatcttacagacagttgtacgaagaaatattgtccgacagtttgtgcaaccagcgcattatctgtgggactgttatagc

SEQ ID NO: 269231 - DNA, 683 bp, Zea mays
atgtgatcgttctatatgcctctatctacaaggatgtccccatggtggttaatctctctggccggtttcatttggagaaaggcattgaggagcgcctaggcaaagagtttatggatagaataaacaaggaaggctacatcgatgtcaaagacaaattaggaaaggttttgtacagagtaaccaaggagagcttgatggaacggctgagccatgatatgcacgcaacgagcctttccatcagcaaagagtgcaggttctttacaattcacggttcagctgatgagatcatacccgtggaagatgcgtacgagtttgcaaggcttataccaaaccacaagctgcgtgtcatcgagggagcaaatcactgctacactgctcaccgtagagaactttctgatgccgtagtagaagccatcacatccagtgaggcaggggagaccacaccctagatctgatgcagaacggcagcctgcctttccaatcctgcaatgccgctcttccatctcagtcacattgccttgtcacaatttttaaaagaaaacgagttctttgaaaatatcgtttgaatctagacgttgttaactcgttgtatcatgacatccttaatgctacgtttggacgtcgatattggagagtatgaaattgaattgggttgaatatcaaatcagacatgatagtgaaaa

SEQ ID NO: 269232 - DNA, 465 bp, Zea mays
ggggaacacacagaacatactcctgctgaagcgctgagaagtagataagaataatatggggttcagtgaggcacaggaagagctcgtcctccgttcatggaaagccatgaagagcgactccgagtcgactgctcttaagttcttcctcaggatctttgagatcgcgccgggtgccaagcagatgttctccttcctgcgcgacgccggcgacgcgccgctggagaaacaccccaagctcaaggcccacgccgtcaccgtcttcgttatggcatgcgagtcggcgacgcagctgaggagcaccggcgacgtgaacgtgacggaggccaccctgaagcggctgggcgcgacgcacgccagggcgggcgtcgccgacgcgcatttcgaggtcgtcaagacggcgctgctggaacacatcaaggacgcggtcccggacatgtggaccccggagatgaaggcggcgtggga

SEQ ID NO: 269233 - DNA, 459 bp, Zea mays
cccacgcgtccgcccacgcgtccgcccacgcgtccgcgcaactgcctctttgcggcggcgggaaacaccactgacacgtcttctctccggttgcgagcacggtcggaggagctagggtttcgccgcggcgagatgtcggcgtacgacgaggtggagatcgaggacatggagtggaacgcggagctgaaggcgtacacgtacccgtgcccctgcggcgacctcttccagatcacgctcgacgacctccgcctcggggaggagattgcgcgctgcccctcgtgctccctcttcctcaccgtcgtctacaacgccgaggatttcgccgactccaaggagccgacccacaagccgtccccgagcccagtcgccgtcgcctgatgtggcccgttcgaggctagatggacgaatggaatggatctcggagcaggaaaaaaggaacgagttcatgtttgacacaca

SEQ ID NO: 269234 - DNA, 358 bp, Zea mays
cggacgcgtgggcggacgcgtgggggggtttttgagttttgacaatcagaacaatagcctccaccgtccaccctcacgcaactgcctcttcgcggcggcgcaaaacaccaacacgtcttctctccggttgcgaggagggtataggatttcgccgcggcgagatgtcggcgtacgacgaggtggagatcgaggacatggagtggaacgcggagctgaaggcgtacacgtacccgtgcccctgcggcgacctcttccagatcacgctcgacgacctccgcatcggggaggagattgcgcgctgcccgtcgtgttctctcttcctcaccgtcgtttacaacgccgaggaccttgctgacgc

SEQ ID NO: 269235 - DNA, 505 bp, Zea mays
attttgccctaggtgtatttgagaatgctgttaacagaggagttcagaatataagctttggagatctgtcaggaaatcttggacgaacaatgtataaattcaagttccagataccgtcttacttttcccttgtaattcgaagccttgctgttttagaaggtatcgcaatcagcttcaatccaaagtataaagttctggggagttcatatccatggattgcaagaaaagttctcactgacagttcgctaaagcttcgatcaactttgcagactcttctttataaggatggcactttccaaattgatcgcctggaatctttgttaactgagtcacttcgtgcaagaacagagcaatcattggtcagaaatgaacaagatgtcgacagtacgagatatgcaattaagcaagccttgtcattcacactcgctgaccagggtgcctttgtgaaggacttacttcttcaggagattgctaagggaatagatgcacttggtgtagccacatt

SEQ ID NO: 269236 - DNA, 912 bp, Zea mays
atcaaatcaggacaggcatgctgaactaggcgaggtggactgggcgagcgagcgagatggagtggacgacggtggagacgagggacggcgcgaactgagcgtgcggctgttcaagccccccgcgtccggaacggggttggagccggagccgagggaggacgtggcggtggtgctggtgcatccctacaccatcctcggcggcgtgcagggcctgctgcgggggatggcggagggcgtcgcgcggcggggttacaccgccgtcaccttcgacatgcgcggcgcgggccggtccacggggcgggcgtcgctcacgggctccaccgaagtcggggacgtcgtcgccgtctgccgatgggtcgcagagaacatcaagccgcgcggcatcctcctcgtcggatcctcagctggggcaccaattgccggatctgcagttgataaagtggatgaagtgattggttacgttagcatcgggtacccctttggtctgatggcctcagtcctattcggaaggcataatgatgctatactcaagtctgaaaaaccaaagcttttcatcatggggaccaaagatggcttcaccagtgtgaaacaactgcaaaacaagctcaaatctgcagctggacgggctgatacacacttgattgaaggagctgggcacttccaaatggagggccctgcttttgatgcccagatggtagaaattattattaaattcattaattccttgccaaaatagcatttatggtgactgtttgagagtttgcaaaaattctagcgatgagcaaagcttgttatttaaatacagccacgatggtttgtattttctcatcctgcatatgtgtgctctctggtgttattgaaacagtgtaactgtgtgtgttgtatcttaatatattctgatcccacctcccc

SEQ ID NO: 269237 - DNA, 847 bp, Zea mays
acaggtagggtttcggccaccagccatggccgactccgcgccgtccatcccgggcgtcatcgcctccctccaggcctactccacggccctctccgcctttaccgccgcatggcgtgccgtcgagacccacgcctccaccctcgactccgccctcgccgcccgcctagccggcttctcggagctcgagctgatctgctcggcgatggacggagccggcctccgcgcgtacctcaccgagcacagggacgagctcaaggatcccacgcgcgccctcgacgcagccctccaagttgcgcccgacccggggcttctggtcctctccgcggcagcgagtttctgccgcacgctgccggaggtggccaagagcgacggtagcgtcaaggcgtcctgccgcctgctcatcgccttgctcgaccggctgcgcgcgattggtgtcaagccgtcgcctgaggcgcgcgaggaggccagagctgttgcgacggactggaagcgaggcaagcggatcgggacggagacgatgtttaagcaggagacgttcgccttcttgcatgtcgtgggagttgttggggctcgtggaggatgcgggcggttccagcgaggtgcttgatcttgtcgtgtcgatctcaggttgtgagcgcgccgtttatgcattcgtcgtcctgggcctggacctcgaccagcatatgccaagtaagtgacatttatctctttcttggacaaggaggaagtcggtaaaatgtcttgtttaaccagattagtgaatattaggatgcctatgagggataaggtaacgggtgaattctgtgtcttggtcttgtgagtaagctattgcttaaaaatgatcaac

SEQ ID NO: 269238 - DNA, 329 bp, Zea mays
tatcgagccgcaatgctcgatgaaagcacaagtcaggaattggccacaccttcgagggcaaccaaatccccttccaagcctacatcaaggattgcaaggaagatcactccaagaaaattcaaaaagtgaatgtttttgtgtctacaaaactatgatattggatgcttttgtaatcttaattaattagaacggaggcatttagatgatattttggcatatgtatggattgttgacattaaacttgttattgtgcttgctgttatgcttctgtatgggattattgacatttggatgacatttgggcttaatatttaaatcaaacttgctat

SEQ ID NO: 269239 - DNA, 718 bp, Zea mays
cggacgcgtggcgtgacgcgtgaggtcatatctagctatagtagctcccttgagaagcatttgagggaggagccatgtctgaggagaagcaccaccaccacctgtttcaccaccgcaagccagaggaggagggcgcctccggcgaggtcgactacgagaagaaggagaagcaccacaagcacatggagaagctcggcgagctcggcgccatcgccgccggcgcgtacgccctgcacgagaagcacaaggccaagaaggacccagagaacgagcacgggcaccgggtcaaggaggaggtggccgccgtcgccgccgtgggctccgccggcttcgctttccacgagcaccacgagaagaaggacgccaagaagcacgcccacaactgatccgtcgcggttgctgttccatctgttcttccagcctcgtcttcgtctactgtgtgccggccaggccttgatttgggctaccgatatttgcatggacgtaggaactgtgttggtcggtcctcggcgttcttgtatcaagatcaaatcaggccttgaataagtgtgtgtgcatatatcttttttttaatttttatctctttttttttgtatcgagagatgtcctgaataatgtgaatttacgtgtgtttatataaacgaatttaagaagtccgccaaaaaagaaaaaaaaaacccgcgcgtccgcccacgcgtccgcccacgcgtccgcggat

SEQ ID NO: 269240 - DNA, 294 bp, Zea mays
acaagtcatatctagctatagtagctcccttgagaagcatttgagggaggagccatgtctgaggagaagcaccaccaccacctgtttcaccaccgcaagccagaggaggagggcgcctccggcgaggtcgactacgagaagaaggagaagcaccacaagcacatggagaagctcggcgagctcggcgccatcgccgccggcgcgtacgccctggtgagaacaaaaaaaccaacctcgatctctttgatcgcctgagccatgcatgccatggtccagttcttgatctttgtgtgc

SEQ ID NO: 269241 - DNA, 644 bp, Zea mays
  unsure (1)..(644): unsure at all n locations
agagaccacacagaccccaatatagttgttatgctggttggcaacaaatctgatctccgccatcttgtagcagttcaaactgatgaaggaaaagcattcgcagagagggagtcattgtatttcatggagacctctgcactcgagtcgactaacgttgaaaatgcattcgcagaggtcttaactcagatctaccgtattgtgagcaagagagcagttgaagctggcgaagatgcagcatctgggcctggcaagggcgagaagattaacataaaggatgatgtttcggcggtgaagaagggtggctgctgctctagctgacctgccctgctgtattttttttggagctgtggtgatgtagcttatggtacggcatttccagcgaccgagaactggtagtggcattagcagcttctatgttacctagagagtttattgtcaaactgggggaaaaaaactgaaggttagatcggtgtagatctttctggtactgtattgtgtatccggcaataggcatgggaatgtttttttttttgctgtgaatcccctggtcccatgtttaaacttatgaattgttcaaaataaaaaggtgcttcatgcttgccaaaaaaaaaaaaaaaaaaaaaaaaaaaaaaaaaaaaanaaaa

SEQ ID NO: 269242 - DNA, 350 bp, Zea mays
cggacgcgtgggcggacgcgtgggcggacgcgtgggcggacgcgtgggctgcactcgagtcgacttacgttgaaaatgcattcgcagaggtgttaactcacatctaccgtattgtgagcaagagagcagttgaagcaggcgaagatgcagcatctgggcctggcaagggcgagaagatttacatataggatgatggttcggcggtgaagaagggtggctgctgctctagctgagctgccctgctgtattttttggagttgtggtgatgtagcttatggtacggcatttccagcgaccgagaactggtagtggcattagcagcttctatgttacctagagagtttattgtc

SEQ ID NO: 269243 - DNA, 506 bp, Zea mays
gcgttctcttcactcactcgggagtcgggtcctcctcgactcagctcctccacaaacaaagccaccaccatcccaacccaaacacatcggccgaccacgggcgccgccatgtccaccgctgacgcggcgagcccggccctggcgccggactgggacgcgccggcgggcgaaggcctggccctggcccagttcgccgcgggctgcttctggagcgtggagctggtgtaccagcgcctcccaggcgtggcgcgcacggaggtggggtactcgcagggccaccgccacgcccccacctaccgcgacgtctgcggcaacggcacgggccacgccgaggtggtccgcgtgcactacgaccccaacgcctgcccctacgacgtcctcctcgacgtcttctgggccaagcacaaccccaccacgctcaacagacagggcaacgacgtcgggacgcagtaccggtcgggcatctactactacacggcagagcaggagacgcttgcgcgcgagtc

SEQ ID NO: 269244 - DNA, 450 bp, Zea mays
tttagcagagcagcgaaaagcatggatgccgaagccgccgccgccgccgagggccaggtgcggcactggaccgcggacgtcaacggcatttccctccacgtcgccgagcgcggcgccgccgacgcgccggcggtcctcctcatccacggcttcccggagctctggctctcgtggcgccaccagatggccgcgctcgccgcccgcggcttccgcgcgctggcccccgacctccgtggctacggcgactcgtccgtgcccaccgaccccgccgcctactccatcctccacatcgtcggcgacttggtcgcgctccttgaccacctccaactcacaaaggtgttcgtggttgggcacgactggggcgcgatggtggcgtggcacctctgcctgttccggccggaccgggtgcgcgccgcttgtgtcctggggatcccctacttcccccgcggg

SEQ ID NO: 269245 - DNA, 412 bp, Zea mays
cggaccgtgggcggacgcgtgggcggacgcgtgggcgcgatttccgtgctcggcttctccctcccgctatctctatctctgcgcgcgagctcgcccctgctcgccctgctctcccatggccgcgcccaactccgtgcgctcgccggatcccctgctcggcttcgactgccgttccccgtgctcgcgttatctccctcctctctgccgcagctcgctgagtccctctgtttcctcccatggcgcggggttccctgcaggctgctcgcggcacccatctcctctgctcgaccgcgagctcgctccctggtcatgccgctccctcgcctaatcgtggtcgcgcgcgcgtgtgccttctcttggtggtgctcgaccccggcctcaggcagccacgtccgtggtcggcgggcatgct

SEQ ID NO: 269246 - DNA, 589 bp, Zea mays
  unsure (1)..(589): unsure at all n locations
tccctcgcgtccgcccacgcgtccgcggacgcgtggggaccgaccagagtaccggacacgcagcgagggggaggaagaaggaagcaagagggaggaccgagcaggcctaggccctagggtagtcccgtccggtcccctgcggtgcaagtccggccggcgggcgggctgactgcctggcgtcggtagggggcgacggcgatctatatctgtcgatgggctactggtgggaccgcgtcgtgctgccggtgcggcgggcctggctcggcgtcgcgtcccgcttcggggttcgccagaccgggctgtggaggctgcggcaggaggtgagcacgtgcgagtacgaggacgtgcacgtgatgtgggagatgctgagccgcaccacggcgccggcgccggcgccagcgcccaggcggcacagccggttccggccgcagccgcggccgtggggcggcaggttccgtctctgccgaggcttctagtggtagatcaaggccgccgcgcgcgtcagctccgatgatgttgctgcggtgcggngtactagtgatttcgcttcattttggcttcttttttctgactctctctctcttggtct

SEQ ID NO: 269247 - DNA, 561 bp, Zea mays
tcgagactaccgaccgggctccggtccagttatcgatcgaggggaacgaagcaagacaagagggaggccgaggaggcctagccgcctagggtagtcccgtccggtctcccgcggccagcgacggactgcctggcgccggcgaatcgatgggctactggtggcaccgcgtcgtgctgccggtgcggcgggcgtggctcggcgtcgcgtcccgcttcggggttcgccaaaccgggctgtggaggctgcggcaggaggtgagcacgtgcgagtacgaggacgtgcacgtgatgtgggagatgctgagccgcaccacggcgccggcgcccgcgcccactaggcggcagcacagtcggttccggccgcagccgcagccgcggccgtggggcgacaggttccgcctctgccgaggcttctagtagaccaaggccgccgccgccgccgccgccgccgacgtcgccgccgccgtcgcgcgtgtcagctccgctgctgctgctgcgggatagatatagcgcttccactcaatttcttctgctttttcgggttcttcttcttctctggttc

SEQ ID NO: 269248 - DNA, 394 bp, Zea mays
agaaggtgagcacgtgcgagtacgaggacgtgcacgtgatgtgggagatgctgagccgcaccacggcgccggcgcctaggcggcccagccggttcgggccgcagccgcggccgtggggcagcaggttccgtctctgccgaggcttctagtgctgttgctgcggtgcggggtactagtgattccgcttcattttggcttctctctctctctcttgttctttggttttcgctgcttgtatgtaccgtcgtcgtccatccctcctggctctgagatgtacttccattcctcctcgtgtgtatccgtctccacccgcctgctgcagatgatataccggggcatgtgaatgaacagagctgattcccgccgggtaataatcctgccccctgtttcgacc

SEQ ID NO: 269249 - DNA, 1999 bp, Zea mays
cggactcgtggggtcgcagagagggttgtggtgggtgctaaaagtccaaaggcagataagcagtatgtgtgggaagcagaggctgacagcagctcgtatgttatcaaggaagaaactgatcctgagaaaatgctttcacgtggaacagagattactctttatttgagagatgaggacggatatgagtttgctgaccctaccaggattcaaggcttagttaagaactactcgcagtttgtctcattccccatatatacatggcaggaaaaatcaagaacagttgaggttgaagaggaggaagaatcaaaaggtgaagaggctactgaagaatcaaaaagtgaagaggctactgagggtgaaaagcagaaaaagaagaaaaccataactgagaagtactgggactgggaattggctaatgaaacgaagcccatatggatgaggaatccaaaggaagttgagaaaactgagtacaatgaattctacaagaagacatttaatgagtttctggatccgcttgcttacactcacttcaccactgagggagaggtggaatttcggagtgttctctatgtcccagggatggcgcctcttagtaatgaggagataatgaatccaaagaccaaaaacatccgattgtatgtcaaaagagtgttcatatcagatgattttgatggcgagctgtttcccagatacttgagctttgtgaaaggtgtagttgactcaaatgatctccctctcaatgtttctcgtgagatccttcaagaaagtagaattgtcagaattatgcgtaagagacttgttaggaagacatttgacatgattcaagagattgccgagaaggatggcaaagaggactacaacaaattctgggagagctttggcaagttcatgaagcttggttgcatcgaggacacaggaaaccacaagcgtcttgcaccattgctgaggttctactcttccaaaaacgagacagatttaataagtctggaccagtatgtagaaaacatgcctgaaaaccagaaggcgatctattatatcgctactgatagtctccagagtgcgaagactgctcctttcttggaaaagctggttcagaaagatattgaggtcctttacctcattgagccaattgatgaggttgccattcagaatttacagacatacaaagagaagaagttcgttgatattagcaaagaggatttggaattgggtgatgaagatgaggacaaggagaaagaaagcaagcaggagtatactcttctatgcgactggataaagcagcagcttggcgataaagtcgccaaggtccagatctcgaagcgactcagctcttctccatgtgttcttgtttctggtaaatttggctggtcagccaacatggaaaggctcatgaaggcacagacccttggtgacacatcaagcctggagttcatgagaggtagacgaatttttgagatcaaccccgaccatcctatcatcaaggacctgaacgctgcttgcaaaaacgagcctgaaagtactgaagccaagagggcggcagagttgctatacgaggctgcgctgatctccagtgggtatactcctgacagtccagcggagctgggaggcaagatctacgagatgatgaccatggccctcggcgggagatgggggaggttggagacagaggaggctgaagtcatcgccagcatcgacgacgcggactcgtctgaaggtgccacgaccacgaccgagaggtagtcgagccctctgaggtcaggacagagagcgacccgtggaaggattagatagttctgtatgcaaggattatgccctggtgtggtgtatgagcactggatgtaacgaaagtacgaaccagagccaggatagaggaatgcagcgtttgataagaacactggtgttaaaagtgtagatctctggtttgggttgtgctgataaatttttgtaggctataaccatccaatgaaaaatgccctctgcgctttcgtgcattctttct

SEQ ID NO: 269250 - DNA, 694 bp, Zea mays
atcatcatccgtttgtgtggtttcatgcagggtcttattgggcaatatgctgttcctatactagaagagaagtccgtctggggaactgatgctccaactcggattgcttacatggatacccaggacgtagctcgactaacgtttatagctatgcggaatgaaaaggccaacaagaaactcatgacctttgctggcccacgagcttggacaactcaagaggtgattactttgtgtgagaggttagctgggcaagatgccaatgtaaccactgtacctgttgcagtcttgagatttactcgtcagttgacacggtgcttccaatggacaaatgatgtggctgacagactggcattttcagaggtgctctcaagtgacacagttttctctgctccaatgaatgagacctaccagcttctcggggtggatgggaatgacatcctcagcttagagaagtatttacaagattattttactaacattttgaagaagttaaaggatctcaaggcacaatccaagcatactgatatattcttttgatataagaacgatttctgtgacctagggacataattacaaatctgtgtctcaaatgacagatgagtgagcacaatttttcctgtatatttgcatttttgcatgtgcaagaatgctctgtgctattagtgatgtgtatataatcttaacattttgagct

SEQ ID NO: 269251 - DNA, 595 bp, Zea mays
taaataatatgatttcatttagtcaagtcctgtatgttctaaaaaatccttaaaccctgtgctagcatcttgtgtttgttctatttcaaaaatggtttttactgttctttactgtattgcttctatgcatattctttaaaaccgtgtgttaacttgtgctattgtgcattgcagaagctagaaaaggcgaaaaccgaagattgaaaaagaccagcaagcagttttaaaaagcagatgaaaggcgggcatttttgttgatgtcttatctttcgtgtcaattgtgtttttgcttgtcccgtagacctttcaggatatctggagtgtatcttcaagtatgtgatatatatatatacgattcaagaacctgtctgggatgattattcatctttcgggacacgtcctgtttggatccctatataacaacatcgcaaatgtcttgtgtatgtaacattttttactctggaactgctaatgctcagttaagaagtggggacacgtgtgtgtttttcctcctttgcagccaactttcatgacatctcaaatactactgaagtagtattcgtatacaaggtgaaacatctgagaaagcatgtga

SEQ ID NO: 269252 - DNA, 471 bp, Zea mays
  unsure (1)..(471): unsure at all n locations
ganatctccattccaagcgagggttttgctgctgctccagccggacccaggacaagaagcggcgcgatggcggtgggcgacctggcgttcaaggcgctgacggctgggctgggcgtcgccacgctctacctcgccgccaccttctccgtcaacgtctaccgcggcctctcgtggcactccgagcagtccaagctagaaaaggcgaaaaccgaagattgaaaaagaccagcaagcagttttagagagcagatgaaaggcgggcatttttgttgatgtcttatctttcgtgtcaattgtgtttttgcttgtcccgtagacctttcaggatatctggagtgtatcttcaagtatgtgatatatatatacgattcaagaacctgtctgggatgattattcatctttccggacacgtcctggttggatcattatataacaacatcgcaaatgtcctgggtatgtaacattttttac

SEQ ID NO: 269253 - DNA, 879 bp, Zea mays
gcgggtccggacccagcctacctccatctggcggctggcgggcacccggagcacgaggatccggcggcgccgtggtccccggggcggcgcccgtctccgtgcccagagtgcgaggcggcggcggcggccatgcgccagccggcgttccactggtgcgtgcacgacgcggtggtctccgctgtgttccgctcccacgtgggtcccatcgagcgccctccgaagaagaccccctctccgcctccgcttctgcctctgccgccgagccctggtcgcctcctcggcatgcccgtctacgagttcatcgaccagcacctgctcttccgtcgtcgtcgcctgccccactctagcagcaactgtacgtagacaaaaacaagcgggactgctggagtggatgggattggggatgaattgtggatggacggaggttgcgtgtgggagttggtttgcgcagcgcgaggaggtagaggattttcgtttcgatagtagctagtcaccgcagcagtcgtttctcctccttggtgtgcaaggaagccatgacgtggtacctggacggacacgcttgctcgctcttgtctcggtccggcacgcggcagggcttcttcgcctggttcaccgtggcactgtagcagtagaaaaccaaatttccccctttttttcctttttctttcctgtggcctgtgggttgtggtgcactggtgcgtgcctgaacaatgtggcatgggcgagtccatggcttgattcgtttcggccatatttgtggactcctcttttgtttttccttttttctgagagagaagagagagagatttgtttctgttatatcgaagtggtatatgcagaaggcttctattgcagccttgtgagtgtcaaaaaaataaa

SEQ ID NO: 269254 - DNA, 443 bp, Zea mays
  unsure (1)..(443): unsure at all n locations
cccactttttgacaacccaaacaaacaacccccctacacacacacacggaggcccggtccgggtggccgtttcgattcgatgcttgtggccgcccatcagcgaacgagtcgcagccggatcccgactcacccgagggcgctcggccgcctctgaagccggaaggagcgcgcgcgtcggacatgggggagctcgcggcggcttcctcgcccccgccgcccgccgtgctgcaggtggtcttcgtcgacggcgagcagagcgtggacctgggcacggtcgccgtgcagccgtcgctgagcggtgtgaagcggctgcaggccgtggtggcggaccgcgtgggcgtcgcgccgtaccagatctcggcgtccctggcgcggccccgccgcgcgcgccgcgtgcccctcgacgacgccaccgacctcgtcgtcgncgtcgcgcgggaggg

SEQ ID NO: 269255 - DNA, 284 bp, Zea mays
cccgtccttctccacctagctcccccgcgccaagaacacgccagctagcaagcgcgctcgatcgaataccgttaccgtgtcgccatggccgccaccgcgtctctatcagccgtcggggcgccgctgtcggtgcccgggctcaggaagccgctcggcgtgtcgtcgctccggcccctgcagccgagggcggcgaggatgacgacgacggccgtgcgggcgtcggcgtcgccctcgtccacgtccatcaaggagaaggctgcggccgggctgaccgcggcggccct

SEQ ID NO: 269256 - DNA, 612 bp, Zea mays
cccacgcgtccgcccagcctgggactacagatattcaaggtatccgcatcagcataaacaggtaaagcatccgcatgatcagtcaatagcgacgtaccgtggacatacagtcctccggacattgatccgttgctacttttctccttcgtatagcactgggcaaaagtacatatatacagggtcgtatgactccaatgtttgcatctatgatgtggtaagcggatcccaggttgcgaagctgaaatggcatcaaatggcgattcgggactgcagttggcacccatttgagcccacgcttgtgagctcatcctgggacggccgggtagtgaaatggaccagcgcacgtgatgaaggggcttctgatgtcgattgagttgagtcgaccgtgcaggtgcagcgcgagtgatctttactgttcgtggttgtgggctaaaaaaaaacatacccaatcttgcactaaaaaaaaggagagtaagcacagctcgtaataaagaaagaagatcatgtgttgcagtggtaatttgtaaatgtaaatactgaactgaaaccatgtgggcaggaccgagtgcataagcacctttgtgaatatggttgttccataaagccttttcc

SEQ ID NO: 269257 - DNA, 430 bp, Zea mays
cggacgcgtgggtaacaacgtccttgtatatatagtagtacctgcagtctctggtcgacgatggcgtgtccgatgcagggaagtacacagcagaagctagcaaacagcatgagtggtgccatggacatggcgcgagccgcgtgacccagcaaactacatacatacacctagcactagcagagaccagagattcagagctcaggagctcaggatgtgtcgttgagtgcgaagctgccgatcgaaggagggagagaaggttctcgaccgtcgtcttgctgcttgccggtcgcggtctcagtcatcgaccatgtggagcttggtgcggcagggcctccgatggggcagggggcggcgacggcggcggacggcgcgggtggtggacgagagcgcgctcggcgcagacggcggcgatatcgacggcggcggtgct

SEQ ID NO: 269258 - DNA, 590 bp, Zea mays
ctctgctcaccggtcaccacaagcagcgaagaatcacccgacccaaaaccttattgccttgctggctgcaatggtcaccagccctgtccggctactccccgtgctcttgtcgctctgtataatctccatcatccacctgtgtcctggcgtcgtctccacttcgcccctctccttcgacgtgcagttcataccgtgcagctacgacccacaggaagtcggcttccatcagatcatcgccccaagaaacctcagtagcagaatgggtgcgagccgtccgtacacggcccaccagaagagtcaagtgctccctcgcaagaagcggaagaagttcgtgcctgacaggtgcgactgctcaaagcagatcgacggggtgatgtacatgcgcccggcgccgctccgggacgaggccaccggcgacgtcgcaagcttcaagatgaccttgtgttacagaatcaaccctcgtcaagcagatgatggtaccgaattcaaccacggtggccgcaacattgggctggtcctgttcctcgtaccttacccctggaattccaatgatgagaggatagagggtgggctcgacagcaagtgcacag

SEQ ID NO: 269259 - DNA, 834 bp, Zea mays
tcgtcatcgcgtccgcccacgcgtccggagaggagaggaagcagcaagaggagccgaggaagaatatatccatccacccacccacacaccagacacacataccttattctccgccgtttcttggcctccggaaatctcctcccccaagttgcaagcatgggcgggttcagcctcagcggcgctacaggtctcgcggcgtaccgcgaggaagaagacgaggagctgttcgagacgtcgtcttcgatctccggcgactccgacgacgagggccaccagctctccgatggagaggggggcgcctatgatttgtcatctgtgatggcacagctccctgtcaagaaagggctatccagatactacgacggcaagtcccagtccttcgcgtgcatgtctgaagtgcgatgcctggaagatctgcgcaagaaagagacgccctacaagaagatcaagacatcaaggagtagcgtcgcgttagacgaagagcaggactgtcatacgccgggtcgtacgaacagcagcagagcgcccggaagttgttgcgcaaacctggtggctcggaacaacggcaaaaacatgctgtacagacctcccccagtccctgtaaacaaaagtggataccgtcagtaggctctaggacattactggatgatatctatccagggtttcacctcttgtttttttttttcccatttttgagggattttgttgacaggcgtattggcctgtctcagatgtaatgtaagagggtttccttctctgctcttagcagagttatctcctatgatcttgtccatgagacattgctccgtgtaaataatagtgaccccgtaaccc

SEQ ID NO: 269260 - DNA, 1710 bp, Zea mays
gaattaccggcatgttgaagtagatatgaaggggaaaagattctcttggcaggggtatagcaaaactgccctttatagaagaagagcggttgctggctgagattaaaaaagttgaggatactttgacgcctgaagaagcaaggagaaacagtaccatgtgcaatatgctttttgtgaatggcgcccattcactttctccctatatctactctctcaacagtaaattcgggcatctgccagacaaagaccgtggtgcaatcaaagaaaaacttgatccttcagctagtggaggaatgaatggttacattgcactctgtggtggggacccgtcccctcctgtcttcagatctcctgtagatgggcttgaggacatcatggataatcaagtgatatgctcaatctacaagcttccagatccacacaagcacatcgctcgtccaccagctggtgttatcatacccaagaagagtgtagaagccggtgatctgaaaccaccaccagtgctgtggcatgaagacagcggtaggaggcctcatgataacaaccaccggaggccttatgataacagcaacaggcaaaacccatcaggagctctatctggccgccaactcggggaagctgcccatcgacttgttgtaaacagcttgaatgttcggggtggtgggcaaaataattccccatctatgccatatcagacaatgatgagtggtatgaactatccaaatggaaggcatcatgtgggtaaccatggagtgcctccgagaatggaacagcctgctggtcgttctggctggcatgtttctgatgataacatgaccaatggtcaagcagcttatggtcagtatcagcctgaaaggttgggaccttcccggcatgaacgaggtaaccatggaaggcaacagtataacccatatgcaagagataaccaccatgattctagtggaagagttcagccacctggataccatcaaaaccgtggcaacccacagtctgctgctccatcagcaggtcctggactgtatgggccataccccccagcatatgctggtggttattctgggggataccagcctgtaccatatgggggtcaacaatggcagcagcgaccttatggaggcgggacaccccccacaagacctaactcacaccaatcacaaaaccgttatggtaccttagacagaagttctaacaagaggtcctcaggtcatggccaatactaatccctaaatgcataggcccttattgagtaaaggggaaatgtaatccaaatccttgacaaatcactaagcaatgccttcatccaaacaaaaccccttactgttgtggccctatccttgttagtaatcaccaaacaatgccttagtacaaacaaccccttactgttatagtcctgttcctgttagtaaaaattatcaggtatcatgaatgatgtcaccttagccagtgacctactacaagcttcttggtcgatttatcaagaactccaaggagcaaatgttgttaaatattagctttgctgccagatggtggcatcggctgttctttcatttgtgtttctcattcatggggggtggttatataggtgattggaaagttttgaactgtggtgatagggtatggaaccaacatgtatacagttagttgatgatggatatatcccccctcatgtatttggttcttgagatgccagtaaagggtgatttctttgtc

SEQ ID NO: 269261 - DNA, 1169 bp, Zea mays
ttccacgcgtccgcccacgcgtccggacagctggaaccccagctccaaatagctaatccacttccaaatccctggagcaccaatgctgggagtgcacaaggagcaacacggtccagtggcaacacaagaactggtgcttctggtcatgttggaggtactggtgccactggtggattgggagggcttggttcaccagatttgagtagtttgcttggtggtcttgctggcagtccaagaactggtgcttctggtggtttaggaggtttgggttcaccagatttggggaatatgcttggtggttctcctgatgtttctcttttcagtcagatgttgcaaaaccctgcaatgatgcagatgatgcagagcattatgtctgacccacagaccatgaaccagttgcttagcttcaacccaaatgcacgcaacctgatggaatcaaaccctcagatgagggaaatatttcaaaatccagaatttcttcgccagctgacatcgcctgagactttgcagcaattactcttatttcagcagtctttattaggacagcttggtcaacatcaacctaaccagggtagagacaattcaggcagtgccacaggtacgcctggaaaccctagccttgacaccttgatgagcatgctcagtgggcttggttcgggaggtggcataggtgttccaaatacttccaatgtgccaccggaggagctctatgccacacagcttactcagctccaagaaatgggtttcattgacactgcggagaacattcaagcactgctcgctaccgctgggaatgtacatgctgcggtggagcgtcttctcgggaaccttgggcagtagctaaaacgagcgagccacacaccgccagtaaatcttaaaatgtcgcgcatctgcaggagtgttcggcttaacgttcttcaagcccttgaatttgaagggggtggcgtccataatcccgaaaacaaaataatcaaaaagtcaggcagccattaacttttctcatacatggtggtcatgtctttgttttacagtgttgtatttgcaatttggattggtgtacatacatatcggtcggatattacctcatagaatgtatgtagttttgtgttttgaactgttgattcttgattcccaatcaatcaaatccccctaaaaaaaaaaaagggcgg

SEQ ID NO: 269262 - DNA, 453 bp, Zea mays
gtaagcacagcctcaaatccattttcagctcttctcgggaatcaggggtctagccaacctggtcaaggtcaacctgcaacaaatgctccaactactggttcagaatcgacaactggaaccccagctccaaatactaatccacttccaaatccctggagcaccaatgctgggagtgcacaaggtgcaacacggactcctagtggcaatgcaagaactggtggtgttgggggcactggtgccaccggtggactgggaggattgggttcaccagaattgagtagtttgcttggtggtcttgctggcagtccaagaactggttctgctggtggtttaggaggttcgggttcaccagatttggggagtatgcttggtggttcacctgatgtttctccgttcagtcagatgttgcaaaaccctgcaatgatacagatgatgcagaacattatgtctgac

SEQ ID NO: 269263 - DNA, 712 bp, Zea mays
cccacgcgtccggtttgtgcggtcgcaccggatgcagcgtaagcactaccgggggctgtcgaacccgcaatgtatccatgggattgaggtggtcaggtcaccaaatcttgtagggctcaccgaggcagaccttaggaggtgggcggacctgactgggagggagctcaatttcatcatcccacaggaagccagtgatttcgggacatggaggaccattccaaattcagagcttgagcttgagaagccacaccctgtcatgaagagcaacggcacccaaaacccaaagaaaacaggcttgaatctgtcgtcaccgtccaatcattcaggcgaagatggtatggatctctctccagttagcagcaagcgtaggaaggaattgtccccacaggccatggatgaggaagtattcttcccactgaattcttgccctcagaagacacaacaagatgtggagatgcactcaccaacgcagcctgctgcgtggctccatgagtttactggggtgatgagaaacgcctgtgggccagtgactgctgccaagtctatctatgaggatgaccagggctacttaataatggtcagcttgccgtttgttgatcagcagagggtgaaggtttcgtggaggaacactctgactcatggcattgtgaagatcgtttgtgttagtactgctaggatgcaacatataaggagacatggcaagatgttcgcg

SEQ ID NO: 269264 - DNA, 625 bp, Zea mays
ttttctcacgcgtccgcccacgcgttcgcccacgcgtccgcccacgcgtccccccacgcgttccgggagatggttgcttctgcgtttggagaagacaaatctggttcccgacagactcgattgaccgttgaagacctgaattatctgtttatggtgtagaatcgctcctgagagtgaacagttttgctcattggattggtgttagacgtggtagataaaaatgttctctgaaaaaataacaaaatgctttcatttagggattattagttcttgtagcttgtacagttgcagagatttaggggttgctagcgacgtgtcttccaattctttttgcacgggaagcagtaagatgctgaactaggtgaattcttcagatagctgctatagtgcctgttaacttggggggtgttttctatgtactaatttctagttcctccattttattttcttttacttcctaaattgtcaaacacagatactaaaatagagataatctctcttttagtctatgtgtttagcaatttaggggctaaaagggactaaaatagagagactaaagacaccccttaatgtaatgaagataacgacaatgaagctcagatgatatatatgtacatattcttct

SEQ ID NO: 269265 - DNA, 398 bp, Zea mays
  unsure (1)..(398): unsure at all n locations
cggactcgagggttactgttatgatcatgtgactcaaagctgcaagtcttgactcgaatatggctgctgcctgccacgtacttatgctagatctttggtggaacccaaccaccgaggaccaagctgtggatagggcacaccgtattggtcaaaaacggcctgtcacggtatcaagattaactataaaagacaccgcggaagatcgtattcttgctctccaggagaaaaagccggagatggttgcttctgcgtttggagaagacaaatctggctcccgacagactccattgaccgttgaacacctgaattatctgtctatggtgtagaatcgctcctgagagtgaacagttttgctcattggattggtgttagacgtggtagatanaaatgttctctga

SEQ ID NO: 269266 - DNA, 512 bp, Zea mays
gccagcagcacaagaaccagagtccatagacatccatcaagccaagaagaatggcattcctcagcacgaacgcgttgatgagcgtccccatcacggcggcagcccctcctcgccaccgccgcagcttggtcgtggtaagggccgcggccgtcaaatctaacgagcacctgcaggaagagcaagcatccgtggccgacggagctcgtgggcgtcgccgagccatggtgttgttggccgccaccgctgctgtcactggatcatccgtagccatctgcaggtctgctagagctgcaggtgtcaccacgctgagcggacagtatgtcaaaatagagaacgtcaaggacccatatgtccagggtgtcggcgaatgggctgtcaaggagcacaacaggcagactggtgagagcttgcagttcgccgaggtggtcagtggcatggaacaggtggtcgccggcaccaactacaagctcaacctcgcaaccaaagatccaacgtcgtcttaccaagcagtt

SEQ ID NO: 269267 - DNA, 955 bp, Zea mays
aacccaagcctcctcgtcctctgtcagactaccactctctccctcgcggactcgcggttgatgtcctcgcggcggattcgcatcttccgcgtcagggacagggagagtactccgtcggacggttggaggagaacagggggagaggagctctgagatggagacggccgcctcggcagcgcgcctggtgaactacccgctcgtcgcggcgctcctcgcgttcgctctcgcgcagtcctccaagttcttcaccacctggtacaaagaaggtcggtgggatgccagacaacttatagcttctggcgggatgccatcatcccactcagctacagtgacagcactttcagtggctgtgggaatccaagaaggctttcgtagtgcaacctttgcaactgcactagtctttgcatgcgtggttatgcatgatgcttttggagttcggttacatgccggaaagcaggcagaggtgctgaatcaaattgtctatgagctgccagaggaacacccattatcagagacaaagccactgcgtgaaatccttggacatactgttcctcaggttgtggccggttgcatccttggaatcctcatggctgtcgttatgcttttgtctctcgggaggtcttagtcaagtgttgttcaccctatatctcgctggtgatggctacaaagcataaaaacatgatctccccatggttctggctgtccaagtgttcgatagtacaaagttctaaccgaatttagatctggactgtaggtttcaggttgtagctcgagttggttgctgtaaatctgaaagggccactttcaattccaaccacggtgtaatgtaagctttgttatacaatcagcagcggtaagatcattttgcggatcagtatggtcgataccatgccgtcgcatttgctttatactcctttaattaattggaaattgcgagtcattttggcacttccag

SEQ ID NO: 269268 - DNA, 392 bp, Zea mays
cggacgcgtgggctgacgcgtgggtaaacggcgagccgcccgtcaaacaatcgttaaacccagaagcctcctcgtcctctctctgactctctctcaccctctcccctccctcggggtcgcggttgcttcctcgcggccgattcgtatcttccgtggcagcagggagggtacggtactcctccggccggcgggaggagaagaggagcttcgagatgggggcgtccctcgcttccgcgggcttggtgaactacccgcttgtcgcggcgctcctcgcgttcgctctcgcgcagtcctccaagttcttcaccacctggtacaaagaaggtcggtgggatgccagacaacttatagcttctggcgggatgccatcatcccactcagctacagtgaca

SEQ ID NO: 269269 - DNA, 605 bp, Zea mays
cggacgcgtgggcggacgcgtgggctgttctctcgccgccgttctagttccgctttgccttgaggtgcacgtggcggtggaagcttcccgggcggtggcggttgttggttcatgtcgatggcgcaggtgtgctgcgactcggccgtagcggcggcaccggtggccgggccggaggcggaggcgagggccagggcgcgcgccgagaggcgccgccgggccgcggaggccgggaggtggaagcacgcggcggctgctggcacggcagccgcagatgccacgaggaagcggagcctcgaggccggggagctgctcgtggcgcggaagcacggggccgcgtcggtggccggccgccggagggagatggaggacgccgtgtccgtgcgcgagtccttcgccgtggagggcgaggccggcggcggcgggaggcgcgacttctacggggtgtccgacggccacggctgctcgcacgtggccgaggcgtgccgggatgccatcatcccactcagctacagtgacagcactttcagtggctgtgggaatccaagaaggctttcgtagtgcaacatttgcaactgcactagttcttgcatgtgtggctatgcatg

SEQ ID NO: 269270 - DNA, 615 bp, Zea mays
cccacgcgtccgcccacgcgtccgaaaaaataaaaaaaaaaaaaaaaacacgcgttaaaaaagggcattgatcattacatggaattctattaagatattatatgaaagtcgaatttcttccattctcatttgagaatgcgaatacaaggaggtattttgtgtttgggaaagtccgaagaaaaaaggatttggaatctaccttttcttttgctttttcccttataaaaataactcaatcaaaatccaattatctactctacaagaatgaaatgcttgttatgcctaatatacttagtttaacctgtatctgttttaattctgttctttgtccgactagctttttcttcgccaaattacccgaagcttatgccattttcaacccaatcgtggatgttatgcctgtcatacctgtactcttttttctattagcgtttgtttggcaagctgctgtaagttttcgatgaaatctttactattctgcctgccaaattgaatgatgtattcattccaaaaaaaaaatggataagagccgagaagtcttatattatgaaccttcgattctaaaatgaaaattctttacattgaatgtatagctgcagcaataaattttgatca

SEQ ID NO: 269271 - DNA, 882 bp, Zea mays
gtccacggtccgcgacgtgggacccgggagaagcagagggagagcagtcaccaaaccaaaccgctctcgagtctccatccattctctccgctcatccgcagctctctagtctccagctctagctagccttagcctcgtccaagggacgaaggggccaccatgagcgtggtgatcctggacggctccacggtgcgcggcttcgtggcggacgaggcggccttcgcgcgcagcctggacgcgcggttcgccgcgctggacgccaacggcgacggcgtgctgtcccgcgccgagctccggcgcgcgctcgagtccttccgcctcctcgacggcggcggcttcgggtccgcccagccggcgccgctccccgccgaggtcgccgcgctctacgacgccgtcttcgagcagttcgacgccgaccacagcggcgccgtcgaccgcgccgagttccacgacgagatgcgccgcatcatgctcgccgtcgccgacgggctcggctcccagccgctccaggtcgccgtggacgacgagggcgggagcttcctgctcgaggcagccgagcacgaggccgctgggatcgccgccaagatcgaagccaaccgcaaggcggaggcggaggcggaggcggccaagtgacgacgtgtccctcgtgcgggccctgcgcttgattttctgggtgtttgctactacgtactagtactacttacctggcggccgatgtgccgccgcacgtgtacggtatactacgtaactagaagcggccagcaccagctactcaaatcactgctgatgctacttgtgaacggaataaaacctgtcaatcattttagtggtcttgcttgcataaaacacttatttgtcgtcaaaaaaaaaaaaaaagggcgg

SEQ ID NO: 269272 - DNA, 464 bp, Zea mays
gaagcataatggtatcgcagagctgttagagattttcgggagtataattaatggcttggctgtgccactcaaggaggagcacaaattgtttttagtacgatcactgattccactccacaaaccaaaatgcgttgccatgtaccatcagcaactgtcttactgtgtcacccagtttgttgagaaagattgcaagcttgctgatattgtcattaggggtttactgaagtattggcccgtcactaatagctcaaaggaggtgatgtttttgggtgagctagaggaggtgctggaagctacacagccagcagagttccagaggtgtatggtgccactttttcgtcagatctcccgatgtttaagcagttctcactttcaggtggcagaaagagcgctcttcctatggaacagcaatcacatcgagggtgtgatcaaacacaacagcaaggttatactgcccgtagtcc

SEQ ID NO: 269273 - DNA, 745 bp, Zea mays
atcggctcacgcactgacgcacatccattaccttctataatacgtctgcggtgtcaaaatttccctctcagccgtgttgctcgccgccgccccgccgtgttgctcgccgacaccgccccgccggcagccaaaatgccgttcaagaggttcgtggagatcgggcgagtggcccttgtaaactacggcaaggagtatggccgcctcgtcgtcatcgtcgacgtcgtcgaccagaacagggctcttgttgatgcccccgacatggttcgttgccaaatgaacttcaagcggctttccctgactgacatcaagattgacattaaacgtgtcccaaagaagactacactgatcaaggcaatggaggaagctgatgtgaaaagcaagtgggagaatagctcatggggcaagaagctgattgttcagaagaggagagcatcactcaatgactttgacaggttcaaggtcatgttggcgaagatcaagaggggcggtgccattaggcaagagcttgctaagcttaaaaaggtggctgctgctgcttagattgctttggtggttcctctattcgatctcttgaaatgtaatgcacgaattactttgacagttagcttgtcaagatgtcaattttaaactggcttatttagatattttgtccaaaatgctattctgaatctgagatagtgttggattctgatatctatcaagtgttgcattgttgttacattcaacgttgttgccggctggcttt

SEQ ID NO: 269274 - DNA, 639 bp, Zea mays
gttcgatcctttgcaccatcgtcaccgtcgccgtgttcgacaacgggtacgtcctcggcggcggcgagggcagcaaggaccagaggatcggcaaggtgcgcgtgcggctatcgacgctggagatcgaccgcgtgtacacccacttctacccgctgatgacgctgacgcccggcgggctgaagaagaccggcgagctgcacctggcggtgcggttcacctgcacggcgtgggccaacatgctgggcatgtacggcaagccgctgctgccgaagatgcactacagccaccccatctccgtgctgcagctggactacctccggttccaggcgatgcagatggtggcggcgcggctggggcgcgctgagccgccgctgcggcgggaggtggtggagtacatgctggacgtggactcgcacatgttcagcctgcggcggagcaaggccaacttctaccggatcacctccctcttctcgggcgccgtggcggtggcgaagtggatggagggcatctgcaagtggaagaacccgctgacgacggtgctggtgcacgtgctgttcctgatcctggtgtgctacccggagctgatcctgcccaccgtgttcctgtacttgttcatgataagaatgtggaactaccggc

SEQ ID NO: 269275 - DNA, 604 bp, Zea mays
ctcctgcgccatctgctgatccgaatacccggtcccgtcttctttttgtacatctagctcgcctgcctacctacctacctacctacctacctacctcaggctcgatccaccacgtcgtcggtgggcgccgggatcggggccagaccgccagagcggctgtgggggttgcctgctgctctgctcatctctatcctgcgggcgtgggccatgggctgtgggccgtggggttggtcgttggcccgtccacaggtcgttatacgatggctcgtgcaaaatcatacacgcgaccccccaaccatccaagagtagctagctgttggggtttttcacttttcaggctgttgctcatcaacgtcgttgtatagtgtgcactgtgcagtgcatataatatactccctctgtttctttttatttgtcactggatagtgtaattttgcactatccagcgacaaataaaaagaaacggagggagtatgtagtttgtgtccttgctaattgctatttaggtgtttgtggcacgaaactatatatatatagagagaaattttctctcgtttataaatgttccccttgttacgccaatcatcagctttcacttctattt

SEQ ID NO: 269276 - DNA, 486 bp, Zea mays
ccccagtatgcagaaaatggctctcttgatgatattttgtttacaccagctagaagatctagggctttcaagatcgcagcgatgagatgccctcttccccgaccaccagatcacagcgatggagctggatccggtcgccgctggggcatcctcctcgccagccagtcgcagatgtccctgatggcaagcttcagcaatcgtcaagtacaaagacatcctcccgtgcaaaattcaatttgcccaatcctaatctcttctatatagcctcacagatcgcagcgatggtgccggatctggtcgccgctggggcatcctcctcgccgccgccttcaccggtgtcggcctcgttcccgccgtggcaaatgcgagttgaacaagtggagcttatcaagagtttcagaattcgggtatgccaggctgcatgccacaagaggcgatatgctgtatcagtttggaagctcaagtacgatggatggtttggaccaa

SEQ ID NO: 269277 - DNA, 812 bp, Zea mays
cgccatcgcaggacatgctcgagcactgctagaatggcacagctccgcaaaattttgtggagcttgtggagcaaaggctgtacctactgaagccgggaggcgtaagcagtgcagcaacgattcctgcaagaagaggatataccctagaattgatccggttgtgatcatgttggtcattgataaagaaaatgatcgggcactcttaagccgccagtcaagatttgtgcctcgtatgtggagttgtcttgctggtttcatagagccaggagaaagcctggaagaggcagtgagacgaggaaccttgggaggaaactggtatcgaagttgggcaagtcgtttatcacagttctcaaccatggcctgtttggccaaatactatgccgtgtcaactgatggtgggcttctttgcttatgctaaatcatgggagatgaacgtggacaagcaggagcttgaaggtgatttttgagacttcattaggaatccaaggctgtttctttcttttgacttggattccattaacttctcttcctgttcctacataattgtttggtcttgctattattattttcttcctctactacgacatagtgtgctgatgttatgtatgcgtctattgcaatcctttggcaacactcttaagcttttatctgagctggttgatgcatgaaacttgatattttacaaaaagattatgtgcaggttatacaccctgaaaatggggcttactttgctgaccctttttagagcatggatggccacaaagcttcaacttggatctcaaatgccatttcttttgtatgcatgcagatgc

SEQ ID NO: 269278 - DNA, 859 bp, Zea mays
ggcactcttaagccgccagtcaagatttgtgcctcgtatgtggagttgtcttgctggtttgatagagccaggagaaagcctggaagaggcagtgagacgagaaacatgggaggaaactggtatcgaagttgggcaagtcgtttatcacagttctcaaccatggcctgttgggccaaatactatgccgtgtcaactgatggtgggcttctttgcttatgctaaatcattggagataaacgtggacaagcaggagcttgaagatgcccagtggcacaaccgcgaagacgtcaagaaagcgttaacgtttgctgaatacgagaaagcccagagaacaagcgctgccaaggtcgatcagatctgcaagggcgctgagaaagggcagaacccctctgccgacttcaaagttggaagcggcgagcctgctccaatgtttgtcccaggaccctacgccattgctcaccaccttatctcgtcgtgggctttcgagggagcaccgaagctgcctagttcattctcaaacctataagcctggctgcctggaccctggtgttcagacagaacgatgacaggaactggacccctgtgctgcggccgtgagtgtaattctgatagtgtccgttgccggttgtgataaaataaaatagcaatagagtactgggtacagaagacttgccggaggattcggcatcaatggacatgtatatccattgcctttttatatgttgatcctttttgtatcacacgtaatgttgcatagatacaacaatgatgtacaacacacagtgtactcatgcatttatacatgtattcagataactggattcaatagtaaaaaaaaaaaagagaaagacaaagaaga

SEQ ID NO: 269279 - DNA, 710 bp, Zea mays
agtgtgctcgcctgcggtaccgctccggactgctggacccacccgtccggctttttttcttatgctaaatcattggagataaacgtggacaagccggatctggactatgcccagcgtgccaaccgcgaagacgtcaagaaagcgttgacgtttgctgaatacgagaaagcccagagaacaagcgctgccaaggtcgatcagatctgcaagggcgctgagaaagggcagaacccctctgccgacttcaaagttggaagcggagagcctgctccaatgtttgtactaggaccctacgccattgctcaccaccttatctcgtcgtgggctttcgagggagcaccgaagctgcctaggtcattctcaaacctataagcctggaccctggggttcagacagacgatgacaggaactggacccctgtgctgcgggctcatggatcacctgtgttgccgtgagtgtaattctgatagtgtgtgtccgttgccggttgtgataaaataaaatagcaatagagtactgggtacagaagacttgccggaggatttggcatcaatggacatgtatatccattgcctttttacatgttgatcctctttgtatcacacgtaatgttgcatacttgcatagatacaacaatgatatacatcacacagtgtactcatgcatttatacatgtaaaaaaaaaagggcggccgctcgcgatctagaac

SEQ ID NO: 269280 - DNA, 795 bp, Zea mays
aaatgttgagagttctaaatgctgttcgtgatcctgagattgggatgccactgaccattcatcagtacaagctgcttactacatcggtgctcattggacgtctcattaatgctaatcagcaccttttggcccttcgcatctctgagtaccttaacctgaacccggaggttgtgataatgcattgggcatgtgagaagataacagcatcaacaactcttccagatacagtccttcttgatggtctgcttgataagctcaggctatgtaaagggatatcatatgctgcagtggcagctcatgcagataacagtggtcgacgaaggttggctgcaatgctcgttgatcatgagtcacagtcctctaagcagatccccttgttgctcagcatcgatgaacaagacaaagcattatcaaaggcaattgaaagtggcgataccgatcttgtgtaccttgtgctattccatatttggcagaaggtagctgtagagaagaaagctcctttggatttttttggtgttataaatgcaaggcctgtggctagagatttgtttatggcatatgcaagacattctaagcatgaagaattgaaggacttctttttatcgactgggagacttcaagatgccgcctttcttttgttgaaggaatcatgggaattggagaagaaccccatggcaagcaaggggtctcctctccatggtccacaagtgaggctcattgagcaggcccatagactttttgctgaaaccaaggaacatgtttttgagtccaaagcttctgaagagcatgccaaat

SEQ ID NO: 269281 - DNA, 510 bp, Zea mays
cccacgcgtccgcgcgctcgtcggcgagccgcgccgcaagaacctctggatcgtgtgcaggaagacgagcatcgacgaggacgtgtacaaccagctggtggagcgggccaaggaggaaggctacgacgtgagcaagctgcacaggacgccgcaggacgacccgccgccggagagcgacgccgcgcccaccgacaccaagggggtgtggtggttcaagtcgctcttcgggaaatgactgcccgtcaccgcacgcgcgcgtgctccggtacggtgcttgcagttgcagcaaataaaaccaggcctgagtgagtgagggttggtattttagctttgtagtatctgtctcgctatctgtgtgtgtggaactgtggactgtgctgttacgttatacgtgcatgtatttttaagatttctctagctaattgcatcgatcggagaggtagtcactcacgggattatgtgagtttgcaaaaatgtctatacgtatacaatttgcattgcttgacagcc

SEQ ID NO: 269282 - DNA, 760 bp, Zea mays
aacctcgagtcctcgacaagcacccaaatcgacgaattcttcccccctctccgatctcgacgcgcaccgatgcgggcgatgtcgtcggcggttaatggtatgctgcgggcacggctgcgcggggcagcgcgcgttcgcggcggcggcggcgagggggccgggcggtggacgaccccaggtcacgaggagcgccccaaggggtacctcttcaaccggccgccgccgcctccgggggaatctcgcaagtgggaggattgggagctgccctgctacgtgacctccttcctcaccgtcgtcatcctcggcgtcggcctcaacgcgaagcccgaccttacaatcgagacgtgggcgcaccagaaggcgctcgagcgcctccagcagcaggagctcgccgctgccgacacccaggccgagtgatccgcgcgtctcaggtcctctcgaactctcggctgcctctgatttggttccaataagatggccacaatgtgcggtcctgaatgttctggacttctggtattgatggaacacgagctgaacactatgctgctgttttttctgttctgttttgaaatttgcccggtgatgatggcgaatgtcctgaatattctgaatattttgaaatgtttgactgttgtattatcatcttatccttccgttgtactaccgcatgagcacaatttaggattttactttgctatcaaaaaaaaagatgtcaagcagatctgcaatataatactttctctacacatagcctgaaaaa

SEQ ID NO: 269283 - DNA, 1335 bp, Zea mays
tcgttatcatgccgctgacggcgccctcagctgggtggacagtaacctgcgggacggggcgcttcatcgtgcagccgcccaccaccatgttctacgtgttcctggccatcgtgctgggcacgctgctgatcctggccgtcctggaggtgaagtgggcgggcgtgacggtgttcgagtggttcaggaacgggcagttctggatgacggccagctgctccgcgtacctggccgcggtgtgccaggtgctggtgaaggtggtgttcaggcgggacatctcgttcaagctgacgtcgaagcagcccgcgggggacgagaagaaggacccctacgcagacctgtacgtggtgcgctggacctggctcatggtgacgcccatcatcatcatcctcgtcaacatcatcggctccgccgtggccttcgccaaggtgctggacggcgagtggacgcactggctcaaggtggccggcggcgtcttcttcaacttctgggtgctcttccacctctaccctttcgccaagggcatcctggggaggcacggcaagacccccgtggtggtgctcgtctggtgggccttcaccttcgtcatcaccgccgtgctgtacatcaacatcccacacatccacgggcccggcggcaagcacggcggcgcgatcggaaggcacggcggcgacgcacaccaccatggcaagaagttcgacggctactacctctggccgtgaagcgccgagcagccagcatcgtcatgcatgcacatataccgcctgccctgatggtgacgatggtgagccgccaaggtgaagagtgtacacgttcccgttcatccatccatcgtctccttagtactgctgcccggtgattagtcgatgaagagtgaaggtgaaggctacccacacacacacatttggtcgacgtacccgccaaaatttgaattttttttcttcccccttctcccccctccctctcccttctcattcttttttcttttagttttgtccagaaatcgaaaggtgtgttgatttgatttagtttttttaattaccgtgccccgtggtaattaattatgtacgtacttatatatatatatacattacgccgaagaggaaggagcactttgtataagagaggaatggggaacgtacttacgggtggggggccggggtgtaagtgtctgcctgtctgtactgtacatggcttagaggagtcacatgcagagagggagggccctggctttggggtggtattcttttggtacatggatcaagaataaattgaatttcattcttgttgtttggaaaagaggtgtacaccctcctccctcctggactctggttcctg

SEQ ID NO: 269284 - DNA, 552 bp, Zea mays
ggcacggtgacggaggacgtggtgacggggtaccggatgcacatcaaggggtggcggtcccgctactgctccatctacccgcacgccttcatcggcaccgcccccatcaacctgacggagcggctgttccaggtgctccgctggtccacgggctccctggagatcttcttctcccggaacaacccgctgttcgggagcacgttcctgcacccgctgcagcgcgtggcgtacatcaacatcacgacgtacccgttcacggccatcttcctcatcttctacacgacggtgccggcgctgtcgttcgtgacggggcacttcatcgtgcagcggcccaccaccatgttctacgtgtacctggccatcgtgctgggcacgctgctgatcctggccgtcctggaggtgaagtgggcgggcgtgacggtgttcgagtggttccggaacgggcagttctggatgacggccagctgctccgcgtacctggccgccgtgtgccaggtgctggtgaacgtggtgttcaggcgggacatctcgttcaagctgacgtcgaagcag

SEQ ID NO: 269285 - DNA, 440 bp, Zea mays
  unsure (1)..(440): unsure at all n locations
naattcttcccccctctcccatctcnacacccaccnatncgggccatntcntcgggcggggattttatgctgggggcgcgggttctcnnancanctccccttctcngctgcgactnttaaggggcctggctgtagactaccccatggcacgaggagcgccccaaggggtacctcttcaaccggccgccgccgccgccgggggaagacgcgcaagtgggaggactgggagcttccctgctacatcacctccttcctcaccgtcgtcatcctcggcgtcggcctcaacgccaagcccgactcacgatcgagacctgggcgcacgagaaggcgctggaacgcctcaagcagcaggagctagccgccgtctccggaggcggtgacgcgatgccgatgccgagtgatccgctggtcagatcacccgcaactctagatatattgtt

SEQ ID NO: 269286 - DNA, 508 bp, Zea mays
gacgtccgatgagggccgtgtcgcgtcagcttagcgggaagcagacgccatggccatcgacgagggcggcgagaaccagcaggacaagcctgccgactctgccgctgccgctgctacttgacggcgtgcgtctgttgtgaaagtgactgatgggtgttgtcagcgtgctttgatgtgcgtatcttatcggctcctcttgggttcattctcttttctttcaggaatagctggtgagtttttgatgtgaaagctctaaactaaatttctgtacggattcaaggcgttgctcctggaagctggagatacttacgtgtacgtatgaggctgcgcaaccaacccccacgttcgatggcgtacacagttctggcaaccacgatgctctcgcgttggttgctgctgtaatctaaaaacgcttagacctttggattcaataactcaccacatacttgatctgtactgtacatctcatctaagacatcttttggaaaagcagaatttcacaggagtc

SEQ ID NO: 269287 - DNA, 462 bp, Zea mays
cggacgcgtgggcggacgcgtgggcggacgcgtgggctaccaccgggcgggcacctactgggacttcccgcgaccgcctcccgctcctcctccccgctgccatgtcctccgcttccaacaccgccccccactccgtcgtcgccgaccccactactcttgcccgcaaagtcgcagacatccgtgccgccggacccaccaaactccaggttatcgccgacttcgatggcacgctcacgcggtactggtacgacggcgcccgcgggcagagtagccatggactgctcaggcaagggaacgaggagtacgacgccaagagagaagcgttgtaccagcactaccaccccatcgagatctgccccgacatcccactctcggagaaggccaagctcatggaagaatggtgggagaagactcatggtcttcttattgaaagcggtcttacatacgaagctatcacaaaat

SEQ ID NO: 269288 - DNA, 460 bp, Zea mays
gccctgcctctgctgcgagatggaggcccgggctcaccagaagatggaggaggtggccatggagcagctgccgtcctaggcacaagatggattgccccggccggcagcccatgcaatcgcattgcatctatctcatcgatctacttacgtgtctacaccacatgcgtgataataatctgcagattgacctggctactagctggtatattgtcaccgtgattgtattaagtttttgtttaacaaaagggtagaagtcgaagtccgagccggcgaaagaaaaaatactggagaaaaaaaaaagagtgcacgaaggagacggaggcgagcgaacaggctggcctaatttcatttgtatgctaatgttacgtgtgtcaatgatgatggagtggttaaattattagtaaaaaaaacttaatcgacttgcaaaacattccaattatagacaactggagaaaaagcg

SEQ ID NO: 269289 - DNA, 632 bp, Zea mays
  unsure (1)..(632): unsure at all n locations
gggaatanggtatggagtaagggatacagggagctgtttgatttgttgtccaaatatcagagcatgttggttggtcttgaagtggatttatatggcagcggagaagattctgatgaggtctgtgaatctgccaaacgcgtgcgcccgcccgtccgtgttcatcctggtcgtgatcatgcagatcccttgttccacgagtataaagtattcatcaatcccagcaccacagatgtggtctgtacgaccaccgctgaagccctggcaatgggaaagatagttatatgtgccaatcacccgtcaaatgagttcttcaagcagttccccaactgccgtgtctatgacaatgaagacgagtttgtacaactaacactgaatgctctatcagagcagcctgctccactgacagatacgcagaggtacgagttgtcatgggacgctgcgactgaaagattcatcgaggcctctgatataaatcctcatgtgccggagtccagggcccatcaaaactctagggctttggtgcctgcttttctaagaactcgtaaactgaaacagaacttagaggatgcgtcagtttacctgcaccaagccctgtcaggtctggaagtcactcgctgtgcgtttggtgctgt

SEQ ID NO: 269290 - DNA, 591 bp, Zea mays
caaaaaatgaatatattgagtactttgctccagattatacattgaaagttgcaaatttgaacatggacaattgaacagtaagacctatctcagttcaatcaaagtgcaagtgatggagagtttgcggtacatacagcatgctcctggtgttcaaatgcaagaggttcctcccgatttttatatcccggactttgatgaagatgaattggatcctgatgaacgtgttgaccagcacactcaagacaagcagattccccgtgatgatgagtactatgaaggtgacaatgacaacgatcacgacgacggcacacgctaatctgcttcttctgaggccctggtgtaaatggaaacctgagattcttcactgttgtgtgtagttcagcagccttgagatgtaatagtttgtcagttgacagcagggatctaatttagcaggtcaaagtggtttagacttttataagggattctgacccctcctgaattacacattgtagtacaagtctgcatatttttaagcatccaaaaatccaaattcctcagtggtattagtatctcaagaatatacaaattcctcgctcagtaacattgctg

SEQ ID NO: 269291 - DNA, 337 bp, Zea mays
  unsure (1)..(337): unsure at all n locations
cacaaagtgcaattccattccaagatacagcgaaatcttcaggtacgaggagaaagcatggcctgcttgtgcgtgtgactagttgggcaccctgctgggtactggaatggacccacgctcccttgttgcttttgtttggtacagtgctggttgttgctacctatatttgctttacagcagcgtcggtgtgtagctcttttaggaaactgagatgttggtttggcctggaaacttaacaatatcgtcacacacatatatgtacatatggggatgaagatatgatcgtcagtatgccatcctttaaaaaaaaagattctcattttaaaaaananaannn

SEQ ID NO: 269292 - DNA, 451 bp, Zea mays
ggtccggacacgtcgggcgctaccgaccgctgcaagaactgccggtccagcgcgtcctccgccgggtcgctggacgactacatgtcggcggcgcggcgcggctgccggtgcgcggagctgcacggccggttcgaggagatcacgttccaggccgacgaagagcaggtgcggttccagggctctgggtgcagctccgacgacggaggcgggcaggctgagcagtgcgccggggacggaggcagtaaggcttgaggacatccatggcaatggcactactgtaactggacgttcagaccagccttgacctggttcctcgcaggagcaactcctgtgttaaaaatctgaaaatgccatcagtgcagccgcacagctgcttgtaagtgaacttttttgtagctctggttgagcatacgatcgttaagacggccagacgggtatagtttgaagtttc

SEQ ID NO: 269293 - DNA, 559 bp, Zea mays
cggattcccggtatatatcgatccacccatccctcgcagctccaaagcattgaagcaaagaaccctgcaactgcaacaagccctgacgcttaatacatcggccggcactcgatcggcagcagatcaaagatggcggcggaggagggggagaaggcgaagagcggcggcggcgggcagcagatgacggtggtgcgggggctggacgtggcgcggtacatggggcggtggtacgagatcgcgtcgttcccgtccttcttccagccgcgggacggccgcgacacgcgcgccacctaccggctgctggaggacggcgccacggtgcacgtgctcaacgagacgtggagcaagggcaagcgcgactacatcgagggcacggcctacaaggccgaccccggcagcgacgaggccaagctcaaggtcaagttctacctcccgcccttcctccccatcgtccccgtcgtcggcgactactgggtgctctacgtcgacgatgactaccagtacgcgctcgtcggcgagccgcgccgcaagaacctctggatcctgtgtaggaagacga

SEQ ID NO: 269294 - DNA, 288 bp, Zea mays
atcaaagcacgaccctgcaactgcaacaaagccagcggcagtcaccacacgtacgctagcttaatacatcggccggcactcgatcgatcggcagcagatcaaagatggcggcggaggagggggagaaggcgaagagcggcggcggcgggcagcagatgacggtggtgcgggggctggacgtggcgcggtacatggggcggtggtacgagatcgcgtcgttcccgtccttcttccagccgcgggacggccgcgacacgcgcgccacctaccggctgctggaggatggcg

SEQ ID NO: 269295 - DNA, 1184 bp, Zea mays
ccagtgggtgaccctgtctctgacggtctgacccgtcgcctccctctccccttgacgtgcgggtgcggctcctcctcgccgacggcgccagcgccgcctccctcgccctctcggcatagaccggcgacggtagctgcatcttcgagtccgcagtgaaaactagaagggaagaacagcctcctaatggataggaacaacgaactggaagaggtggtcccaaatgactcggaccctcttattgggagggagaacagggagtcagagtcatcagtagagctgtcaccgccacagccagcaactgtgaacctgctggagattgaggatgaagagaccgacggctcttctgctgcgtgttgccgcatttgccttgaggctgagtctgagataggtgatgagctaatatcaccttgcatgtgcaagggaactcagcagtttgttcaccgttcttgtcttgaccactggcgatctgttaaggaaggatttgcattttcacactgcacaacttgcaaagctcagtttcatcttcgagtggaaacctgggaggataactcatggcgtaaaatgaagttcagggtctttgttgcaagggatgttctactcgtatttcttgctgtacagcttactattgctatcatcggtgcgattgcatactttttagacagggatggaagtttccggaacagttttagcgatggttgggaccgcttcttgtcaaagcacccaatacccttctactattgcataggtgttgtgattttctttgtgctgcttggattcttcgggctgatagtacactgctcatccttcaacgacaaccaggatccatgcctagctgggtgccggaactgctgctatggttggggcatcctagactgcctgcctgcttccctggaggcatgctttgccctggttttggttttcgtcgttgtgtttgccatccttggcatcgcctatggcttcctcgctgcaaccatggcgggccagaggatttggcagaggcactatcacatcctgaccaaaagggacttgacacaggaatacgtggtggaagaccttcacggcaactacacagcgccgaagcttgatccggagcatgaggaaccggctgagatgctgaagcttctttagagagagaaagaggtgcacgccttcctgtatcccgggcaagtgcattaacatggggc

SEQ ID NO: 269296 - DNA, 452 bp, Zea mays
  unsure (1)..(452): unsure at all n locations
gcccgcgtccaaccacgcgtccgcccacgcgtccgcccacgcgtccgcggacgcgtggggcgcggcggtagcgctcgcgtccttcccgtccgccgcctccacctccgccccttcccgcgtctcggccagcagccaccgcggtcagcggcactccagggccgccaccgtcagatgtcccagcacgtcgcccaacgtgtcccagggcgcgccggcgccggcgccgcccaagccgcaaatcgagctcgagttcgtcgggccgaagcccggtgccgacggctccttcccggtggaccgggcggaggcgaccagcggcgagaagctcctccgtgacgtcatgaacgagaacaagatcgagctctacgccgcatacggcaaggtgatgaactgcggtggcngcggaagttgcggcacttgcatcgtcgagataatcgatggaaaggagcttctgaatg

SEQ ID NO: 269297 - DNA, 438 bp, Zea mays
aaaaaaagaattatattagcaaaaggtcgtcaattaattaactcaataacaaatcagctgctcgttttgatttgcattacacgctgcttctacagttccactacctctttcatcatcttcttctctctaccactaacactgggggtcactgaactgaacgtgagctacgacagaaagcatcatgtagttcatcataaggaggattgcgaaaggggggaaaacgagggggagcgattaaattagagcaaaaggaacctaagctttggggttggactttctgggcgtacggtggtgcgttactcttctgggctggagtcggacaccggctcgtcgtcgtcgtcgtcgtcttcttcctcctccggatggttgacgtcgctgcgaccgccgcgctgctgctcgtgggacccggaccccaggtgcagatgctccgagttgctg

SEQ ID NO: 269298 - DNA, 686 bp, Zea mays
cccacgcgtccgcgcacgcgtccggggggaaaaaaaaggaggctcactgtacaccgagctcacgcagggcgtagcaaatcaggtaggcgaaatcggagcagaggccagggacgcgccagcgcgagcgataaggcacactgacatggccgccacggcgtactccaccgcgctccccggcggggcgcgcctccccgctgccggagccgccgcaccgccctctgccctcctcctcccgcggcgtaataaactgtctccgctccctctccggctccaagatgcgccgaggctgtcgttgctccgggtgaaggcctcctccgacgactcctcggccgcgagcggggacgagctcatcgccgacttgaaagccaagtgggacgccgtcgagaacaagagcactgtcctcacctacgccggcggcgctgtcgtcgctctctggctgacgtccgtcatcgtcggcgccatcaactccgtgcctctgctccccaagatcatggagcttgtcggcctcggctacaccggatggttcgtctaccgctaccttcttttcaaggaaagcaggaaagagctcgccgacgacattgagtcgctcaagaaaataatttgctgggacagagttaaacatgttgttctcgggaaactttttttgggcgatttcttttgggaacacgttggctcttggtttagac

SEQ ID NO: 269299 - DNA, 399 bp, Zea mays
tacggtttggttgatctcaaggttaagggagatggcaactgccagtttcgagcgctgtcagagcaattttaccgaactcctgaacatcacagatttgtccggcagcaagtggtgaagcagctcgaaatcgcatcctgagatttatgcaggatatgtccctatggactacagggaatatctcaaaaagatgtcaaagagtggagaatggggtgaccacgttacattgcaggctgctgcagactcgtacggtgtaaagatcttcatcctgacatcattcagagatacatgttatattgagattcttcctgttgttgagaaatccagaagagttatatgcttgagtttttgggctgaggtgcactacaactccatatatcctgaaggagagttgccgttttg

SEQ ID NO: 269300 - DNA, 357 bp, Zea mays
gtgggggaccgattggataccgatatcctgtttggtcagaatggaggctgcaagactctcctcgtcctctcaggcgtgacttccctgcagacgcttcagagccccgacaactcgatccagccagatttctacacgaatcagatttcagattttctcaccctcaaagcagcaactgtctgaagagcccgcgttccatttgcacagcatgtcagcatcggcctttttttaacgaataaggaaatacaaaggacggatttgttttttttcactcttgtgtaatcatgggatatctttatgtgcaacatcagccatgcaaatatcataaggatgccaagaattaatctaaattctctagtc

SEQ ID NO: 269301 - DNA, 740 bp, Zea mays
ggtcgaccgacgcgtccgcacaacatcatcatcatcatcttctcgctagtcgagcgagcccttgtagttaattaagctagtcgatcgatccaagagaagaagaagagcagcagacaggaatggcgtcgctctcgatgacgacgagcgcagcggcccgcgcgcagtggacgcctaggcagaacaagctgttcgagcaggcgctggcggtgtacgacaaggacacgcccgaccgctggcacaacatcgcctgcgccgtcggcggcgggaagtccgcggacgacgtcaggcgctactacgagctgctggaggaggacgtcggccacatcgagtccggcaaggtgcccttccccgcctaccgctaccccgccggctacggggccgccgacaggctgaaacagctgaagatctaggaggtcaattgaacatataggacgaacgatcgatgatccagaagatgcaaacatgtgtgtatataggattaatgggacagtatcagtatgcatgcaatggtccatgctgcaagtgcatgcaagtggtgtgtgaaagcaagaatcagattagatgcatgcatatgcgtgtgttaatttagtagtaatcattgtagtatgggatgagtcctatgctagccagtcacgcgcgatcgtccgtgccgacccatcgttccccaatgcttctgttccctctccctcctgcttgtccgcttgtgtgtatctctgaatattatgtatttttattgttat

SEQ ID NO: 269302 - DNA, 961 bp, Zea mays
acgcattgcggcgcgcgacacaccgaaccacccacctcggcggcggcggcggcggcttttctgcctgcgaagagagaaaccaaggagaggggcaactcggaagagggcgaggatgcctcggccggagttccaggcgccgccggatgtgttctacaacgagtcggaggcccgcaagtacaccacctcctcccgtatcatcgaaatccagtctaggatttccgagagggcgctggagttgcttgctctccccaacgatggcgtccccaagctacttctcgacataggatgtggttctggacttagtggtgagacattgacggagcatggccaccactggattggctacgatatttcaaagtctatgctcgatgttgccttggagcgtgaaacggaaggagacctcctacttgcagatatggggcagggcttgggcttgcggccaggaattattgatggtgcaattagtatttcatcaattcagtggttatgcaatgctgacaagtcttctcatgaaccaagattgcggttaaaggctttcttcggctcattatatagatgcctagcaaggggagcaagagctgttctacagttttatgctgataatgtgaagcagagtgaaatgattgtgacttttgccatgcgtgctggttttgctggcggagtggttgttgactggcctcatagttcaaaagcgaagaagtcctaccttgtcctcacttgtggaccaccttcagttactacatcacttccaaaaggtaaaggtgaaaatggtgaggcgtgcagcgatgatgacgataatgagagcagtggcgaagatggcgacagaacagtgggcatatatgaaaggaataggccgaagaagcggcagaagacgaaaaagaacggcaaaggcaaggactggctcctgaggaaaaaggagcagatgagaagaagaggacatgatgtgcccgccgacacgaag

SEQ ID NO: 269303 - DNA, 840 bp, Zea mays
accacgcctcggccgacgcgctccgacgtcactgccttgtgggccttacgtgggcctcatggcttaaaatgccatgccccagcaactacacgagtcaacacaggcccggcccggcccggcccggcccaagaacccccatctctcgattcctccaacaaattcccctttcccttactccccatccccacccacacacgccgacgagcaaaccctagcgagcgagagagcccggagccgagagaccagccagccatggcgctgcgtgccctgtacaacgagatccggagcatgaaggtccgcgacgtgccggcttacctgaagccgcgcttgacctgggacaacgtcaagaagagcgccgaccaggccgtcgaccgctacatcgagaagtacatcgacacgagctcgccggaccctctctaccacgtctgcatcggagggatgatcttctcctacttcgtcaatctgccctgggagcgcgcccacctcgcccacctcgaggagatggagaggaccggtgggaagcactagatccgctgccccgtccctcgccggcagcgcgggaggacgggtgactttcatggggtccattcaggctgatggcttctgttttcttctgctgttgagctactggagtcatgttactttggtcgttggttttgtacccagacagcaagaaactgtccagcttattgtcttgttcctcgcgtcttgtcataagtaacttcaaacaaaggagtgcatgcattgtgattaaaaacgttttcagcaattgagtacgaaaaaagagtaaaaaaaaaaaaaaaaaaaaaattaagaaaaaaaacacccctacaagagaca

SEQ ID NO: 269304 - DNA, 1105 bp, Zea mays
gcctgccgtacgcgcccggaattcccggctcgaccgcacgcgtgcgtctcaacccggtcaagagaaacctcctgtgccgttgttgaaggatgcttttggtgctgagaggaggaaagctaagatgctaaattgctccattgcatatgggaaaacggctcatgggcttgctcgtgattggaaggtttctgttaaggaagcaaaagatacactgaaactctggtatagcgatagaaaggaagttctggcttggcaaatgaagcagaaacagctagcacatgagaagcgtgaagtttatactttgcttgggcgatcacgccgttttccaaatatggctcatgcaacttctggccaaaggggtcacattgagcgtgctgctatcaatgctcctgtacagggcagtgcagctgatgttgctatgtgtgcaatgcttgagatagacaggaatactcgtcttaaggagcttggttggacgctactcttgcaggtgcatgatgaagtgatactggaagggccttcagagtctgcggagctggccaagtccatagttgttgagtgcatgtctaagcccttctatggcaccaatatcctgaaggtcgaccttgctgttgatgccaagtgtgcacagaattggtatgcggccaaatagacctgttaagtgtcccagaagggcgtcaattccttcggtgaaactcggcggattttgaactggtatctgctggctgctgctagtagcctagtgagctcatctccacgtggatgccatgcactgattatttcgctgttgatctggacagtgaggggtcagcactgagcagcgaaggcactgtacactattccgtattccctataggtcgggtagcttcaccttccacactccctgttaggatctctcgatcattcatgcctgatgtagttggtcgtcctggataacagtgaagactaagcatgccgtgttcataagatttatttagcatgctaatgtgttgagttgctgaccagttctgctgacgtctaacactgttgcacgcactgcaacaatgttttgacccccagagaatgtagttgacccccagcgttcttaatctccttaaaaaaaaatataaaa

SEQ ID NO: 269305 - DNA, 481 bp, Zea mays
gctggtacgcctgccgtaccggcccggactgcccgggtcgaccgacgcgtccgcccacgcgtacgcggagaaccaatgggggcggcgccgtcgtccgacgactcgtcacgcgccggagacggccgggctgtggcgagcagcgcctgcctctggcactggcactggcagcaacagcaaccaggcccagtcgaagcgggcgccgccgcctcacaagttccacgagatagttgcgcttgcgcaggaggcgacgacggccggcggcggcggcggcggcggcactgctgctgcagccgacctggaggatcaggcgtgcagcaccggggtctacctggctgggaaaaccaagaagtactgggtggacgagaagaccaggtgcaactgcttcgtgctgttcgctagagcgctgtccatcacttggggcgacgatcccagatactggatctggcatcccgtcagagaaaccaagtacgtgctatctata

SEQ ID NO: 269306 - DNA, 630 bp, Zea mays
cggacgcgtggctgtctgagctcctgttggctctctgtgctactcggcagtgcagtggcgtgcagcatcagtgcaactctgcacgccatcccgctggccaccctcagccgctggctagtggattaccaccaccgtctctgcgctacagaattttgtcatccggaatcagattcctcaggcagctcgcatgctaaagtcaagcggctctacgttattccctcttcacttcattgtcagcaatcctaaaagctcgcagcagcagctagcagctcgttcttgttcgtcagctctagcctaccctgcgctggctcttctttaattctgcagggaagttccagtttcagctagagtgcaggcggagaaccaatgggggcggcgccgtcgtccgacgactcgtcacgcgccggagacggccgggctgtggcgagcagcgctgcctctggcactggcactggcagcaacagcaaccaggcccagtcgaagcgggcgccgccgcctcacaagttccacgagatagttgcgcttgcgcaggaggcgacgaccgccggcggcggcggcggcggcggcactgctgctgcagccgacctggaggatcaggcgtgcagcaccggggtctacctggctgggaaa

SEQ ID NO: 269307 - DNA, 1097 bp, Zea mays
  unsure (1)..(1097): unsure at all n locations
acggtcgcttgggcggacgcgtggggcaagtcgcatcgcacgtacggtctcaggcgcatcggcctcgccgctgcacaacgccggagacgatacgacggcggctgcgggatgacggtcttccacttcctcaactgcgccttcctcaccttcgggcctcacgtcgtctactactccgccacgcccctgtcagagtatgatacaatcggcacttctataaaagcagctgctgtttatcttggaactgcgcttgtaaagcttgtttgcttggcaacattgctcaaagtacctgagaatgatagctttgacccctatcaggagttaatgaaagtttttattggattcatagatgtagctggactgtattttgctttgacccagctgacccacagaaacatctctcagaatcataagttccaggctgttggtcttggttgggcttttgctgattcagttttgcaccgactggcacctctctggattggggcaagagggcttgaatttacatgggagtacatatttcaaggacttgaagcgaatgctaatcttgtgatgaccctctcccttgctgcattggggtccttgatgtggcttaggaagaacaagcctaggactttggttccaataatttatgcatgtgctctgctcttggcaacaatgccatctatcaccagctacttgaggaggtcattggagtggcagacaccaaaggtggttggcttcgagctcttctcctcccttgttatggctttcatcagctggcagctgttctcggcttgtcagagaccgatgtaacaagacatccataccactgccaattttacgtgcaatttgaagctcctgcagatgctcctgagtacgtcagaagaattaggaagatcctttgaactttgagctacaactcttcttcttggcgttcggttacagaacattttacttagaacatctgttgtaacttgtgagctgtagagcagaaacacatgcctgaaatgagttattctataacagatgctcatgtaggcgtttgatctgaaacatttgtttattattaaaaaaaaaaaaaaaaaaaaaaagggcggccgcccgggaatncggacggt

SEQ ID NO: 269308 - DNA, 601 bp, Zea mays
  unsure (1)..(601): unsure at all n locations
cccacgcgtncggaccgatgtaacaagacatccataccactgccaattttacgtgcaatttgaagctcctgagtacgtcagaagaattaggaagatcctttgaactttgagctacaactcttcttcttggcgttcggttacagaacattttacttagaacatctgttgtaacttgtgagctgtagagcagaaacacatgcctgaaatgagttattctataacagatgctcatgtaggcgtttgatctgaaacatttgtttattattattgcggtgtgcatttcagatgctctctttaaaggcgcatcatctagcggatagatcatggcccagagaccgggttttttaaaatggaccttttggccaaaaaaattaaatattccccttggcatcttgggatcataggtttgggcccgaatccttggcggggggacggccatgacgttgacggggcatatttgggggttaaccatgtaggcattgccaggcttagcgttgacctttaaaatggtcgggttgtaccgtgtaaaagttgctggaagccggtgtaaacgcatgtataatgtatattaatgcatcatgagagcatgtccaagaggctt

SEQ ID NO: 269309 - DNA, 1956 bp, Zea mays
  unsure (1)..(1956): unsure at all n locations
tataatctcttatctctggcaacagcgcatcactcacacaatctgtcactccccgacacgcgcacgagctccactccccactccgcacccaacccaaggcgccactgccatggacgcgggcggtccgccgccgctgttcctcctgggcgccgtgctggccgcggcgctggggtggctgctcgtggtctggcgggcggcggcggggcggcggcggtccgcgtcggcgcggctgccgccggggagcacggggctgccgctcatcggggagacgctgcggctcatcgcggcgtacaagtcgccgaacccggagccgttcatcgacgagcgcgtggcgcggcacggcagcggggtgttcacgacgcacgtgttcggcgagcgcaccgtgttctccgccgacccggccttcaaccgcctgctgctggccgcggagggccgcgccgtgagctgcagctacccgtcgtccatcgccacgctgctgggcccgcggtcgctgctgctcacctcgggccccgcgcacaagcgcctccactcgctcacgctgacccgcctcggccgcccggcctcgccgccgctgctggcgcacatcgaccgcctcgtcctcgccaccatgaggggctgggaccgccccggcgccggcgccatgcgcctcctcgacgaggccaagaagatcaccttcaacctcaccgtgtggcagctcgtcagcatcgagcctgggccgtggaccgagagcgtccggcgcgagtacgtgaagctcgtcgacggcttcttctccatccccttccccttcgcctccctcctcccgttcaccgtctacggccaggccctcaaggcgaggaagaaggtggccggagctcttcgggaggtggtaaggaagaggatggacgacaaggcggaggacgactgtggcgccagtaagaagaacggggagaagaaggacatggtggaggagctcctcgaagcggagggcgggagcttctccgtggaggagatggtggacttctgcctgtccctgctggtggctgggtacgagaccacctccgtgctcatgacgctcgccgtcaagttcctcaccgagacacccaccgcactggcgcagctcaaggaagagcacgacagcatcagaggggtaaaaggcaaaggccaagctctggaatggagcgattacaagtcgatgccgtttacacaatgcgtgataagcgaaacgctgcgcgtggccaacctgatcagcggggtgttcaggcgtgcgaacaccgacatccacttcaaaggctacgtgatcccaaagggctgcaagatcttcgcgtcgttccgagccgtgcaccttagcctggaccactacgagaacgcccggaccttcgacccttggagatggcagcagggcaagagcaagctgcagagcgcggaaggggccagtctgttcacgccgttcggcggcgggccgcggctgtgcccgggctacgagctcgcccgggtggtggtttccgtcttcctccaccacctcgtcacgcgctttagctgggaggaagccgaggaggacaggattgtcttcttccccaccacgcggaccctcaagggataccccatcatcctacggcggcgaccggattgcgatgatctctgacctcatggctatgttctccccccttatcttcttcggatcaaggccgaaggctaagcattagatagagtaaggtggatgtcgtggctagtaggtgcatggtggtttctgccactcactcactcactcactctgttgtctgtttgttcctgttcctctctgttttctcttgctctgtaacctggacctggtacgagtcagcagccagcagcaaactcgcgttttgcctgtaaaatctaaaatctgatatgagatgcaaatgcccccgcgactgagacgaanaataaaaaagcaaagttgaattttgagaaccaaataccaagtaaaaaaaacaaaaa

SEQ ID NO: 269310 - DNA, 688 bp, Zea mays
tgagacattgctcattgaatgtccacaaagtagttgtgttcctgaactctaaatggagatctaagaccaatttgtgaaacaacagttggttttgataccatatgcaaggtgaactcgcagttaataagcaatgcatgcatagatgccctttctgctgaaaagtattactattttattcggatgatgggacgtaaagcatctcatgtagcattggaatgtgctcttcagtcacatccaaatatggttatcctaggcgaggaggtttctgcgggggaacttacaatatttgatattacaaagcagatatgtgatgctgtgcaggcaagagctgaaaaagacaaatatcatggagttgtacttattcctgagggccttgttgagagtattcctgaactgtatgctttgctcccgggggttcatggactgcataataaaggtgtttctgttgagaacatctcttctcatctctcaccttgggcatctgcactatttgaatttttgcctccgattattagaaaagcagctgcttctccatcctggatctgacgattcagctcaactgtcccagattgaaattgagaagcttctagcacagttggttgagaccgaaatggacaaacgcctgaaggaaggcacttataatggaaagaagttcaatgctatctgccacttttttggataccaggcc

SEQ ID NO: 269311 - DNA, 931 bp, Zea mays
  unsure (1)..(931): unsure at all n locations
ccgcacgtaccgatccgcaattcgagccacgacgtcacgctagaactagtncggacggcgtcgcggggtcacactatgcaataatgcctaataacggcgtccgcgccgtggcgacgcccgtcgcgcgagaagagccgctcctacggcgggaagacgacgcagcaccgccgaaggccgccggtggcgatgggcagccgctcgacgcgggcgcccgtgacgccggcagcttcccgtggctgccagccgcgggcgtcgtgtacctcacgctcagctccgcgatggccctgcaccgctgctggcccgaccccggcgacgtcgcgttcgtcgtgtcggcgtacgtcgacctcgtcctgctcttctgctgcctccggaggtacgagcgcgcggagcctgggtcgtcgctcagggagcggctcaagctggcggtgtggctgctcacgtccgcgctgacgctcctcttctcctataaggtcgccgccgtcatgccggccgccgttgctgccatcgtctggctcatgggtctcaccaccatctgcggtggcttcctcgctttcttctgcttccagaagaaggcgtgactttcgctctatggacagagagaaaaaaaatgtcggaggttgacgatggacaagattaccgggttatcaatttttttttggtgataagcaattttttggcacaaatttaaagaaataactcagtttgtctagaatataattgtatctagacatttaagaaatgaaaacaacacatgagtcagccaaacgaggaatggaggaaagaaattagtgtaaagcaactccaataattatctaaaaagagcatgctaaaatcatatttaataagttgctaaatagctacgggagtaaaaaataagaaaaattctctgttgagggtaatgcttcgtagccgaagatcctagaaagaacac

SEQ ID NO: 269312 - DNA, 1035 bp, Zea mays
cccacgcgtccgctacaacaccgagcagcgagaaggggttggtgtccagcacgaattgaatcgtcgccagaagtcatggcggattcggccacttcccgtccaaccgttctcgtcaccggcgccggcggccgcacaggccaaattgtctacaacaaactgaaagagaggtctgagcagttcgtggcaagagggctagtcaggacagaggagagcaagcagaagattggggcagccggtgatgtttacgttgctgacataagagacgcggatcgtctagcacctgctgtacaaggtgtggatgcgctcataatcctcaccagtgctgccccgaaaatgaaaccgggtttcgaccctagcaaaggtggacggcccgagttctactacgaagacggaatgtaccctgaacaggtggattgggttggccaaaagaatcagatcgatgctgctaaagctgctggagtgaagcatattgtgctggtgggatctatgggaggaacaaatcctaaccatccgctgaacagcatgggtaatggcaatatactggtatggaagcgcaaagcagaacagtatttggcagacagtggaatcccttatacaatcataaggccaggaggtctacaagacaaggacggaggagtgagagagctacttgtggggaaagacgatgaacttctccagactgacacaaagtcgattcctagagccgatgtggctgaggtttgtgtccaggctctgcagtacgaagaggccaagttcaaggcatttgatttggcctcaaagcctgaaggtgtgggcacgccaacaaaggactttagggcactgttctcccagatcactgctcggttttgagcgagctgctgagaagcctactcgagttctagattttatggtgtcacaatccattttatcgtgggcttgtcctggagatacaaccaggtagcttgttggagctgcggtttggtgcaattgcaaccagacgacattcagcagtgtacaagcaaacaatgcaccataaaatggattgatacaagctac

SEQ ID NO: 269313 - DNA, 394 bp, Zea mays
  unsure (1)..(394): unsure at all n locations
agggcactgttctcccagatcactgctcggttttgagcgagctgctgagaagccaactcgagttctagattttatggtgtcacaatccattttatcgtgggcttgtcctggagatacaaccaggtagcttgttggagctgcggtttggtgcaattgcaaccaggtagcttgtatcaatccattttatggtgcattgtttgcttgtacactgctgaatgtcgtctggttgccaattgtgtgaactgttgacagccattaaaacaagttatttggaaccctgtttgcataaattgttgggaacaatttatcccggccaaaaaaaaaaccaaaaaaaaaaaaaaaaaaaaaaaaaaaaaaaaaaaaaaanaaagggcggccgctcgcgatctagaac

SEQ ID NO: 269314 - DNA, 598 bp, Zea mays
  unsure (1)..(598): unsure at all n locations
cggaatnntcccgggtcgagcgccacgcgnntccgctccgattcccaaccagggcaaggcaggtactcatgtgtggctgttcataggcgaggcagcggggcccatgagaggcgtcnagcaggnccaaccgttcgtcactccctcgcagncttctttaacctggggcgaaaagcgcgagagaaanccgagaccgccgccgccgcagcttggcagttctcctaaccacgagcgtcgagccaccgttccccatgtcgctcgtggcaaaaacacacctcagagaccgtgagctcaggtgctgctacaaggccaccgtggacggcttcagtgctacggacttccaccggcggtgcgacttcaagggcccctgcgtcgtcgttggctacaccgacggtggcttccgtttcggcgggttcagcccggaggggtaccgaagcacggacgactactacgacacgctggacgcgttcctcttctactgggcggaatctacggaggtctcggcgccgcccgtggtgctgcccaaggtgggcgggagctgcgcggcgctgttcgactactcccgcggcgggccacagttcggcgccgacagcctgctcat

SEQ ID NO: 269315 - DNA, 400 bp, Zea mays
accacgcgtccgaggtccccctgcgccaacggtcaatgcatggaacctatcaaaccaagccggcgattctccgatcccaaccagactcatggtggcgttcatggcgagcagcggggccatgaacgcgtcgagcaggccaaccttcgtcacccctcgtagcttctttaactggggcaaaagcgcgagagaaaccgagacgccgccgccgcagctgcagttctcctaccacgacgtcgagccaccgttccccatgtcgctcgtggcaaaaacacacctcagagaccgtgagctcaggtgctgctacaaggccaccgtggacggcttcagtgctacggacttccaccggcggtgcgacttcaagggcccctgcgtcgtcgttggctacaccgacggtggcttc

SEQ ID NO: 269316 - DNA, 348 bp, Zea mays
caaaccaagccggcgattctccgatcccaaccaggcaagcagtgtacgcagaaattgatgattcccccgctttgatctccgtacgtcctgtcatctcatcgatctgcttcgcatccacgcctgagcagactcatggtggcgttcatggcgagcagcggggccatgaaggcgtcgagcaggccaaccttcgtcacccctcgtagcttctttaactggggcaaaagcgcgagagaaaccgagacgccgccgccgcagctgcagttctcctaccacgacgtcgagccaccgttccccatgtcgctcgtggcaaaaacacacctcagagaccgtgagctcaggtgctgctac

SEQ ID NO: 269317 - DNA, 392 bp, Zea mays
ctcgagccgctgcgtgctgctcctctcctcccctctctcctccatttgctgccgcagctctccgagctcgcccccgccgccgccaccgcaggcgcagcacagcacagattcggagagcctgcccttagcacgcagcgccagtgaagaaggccgagataatggaggtggagacgatgctggacgacgacgtgttcttcgccgagctcagcaagcggatatcgctggtcatcaccgacaaccacgagggcccggactttttcgccgtgcaaatcattcccggcgccgccgccgccgtcgtgccccttcaggggttcgcgtcgcgcgcccatgtgccgtcgcaagcgttgctgcttgcgccaccggccttaccgctgtaccaccactaccaccac

SEQ ID NO: 269318 - DNA, 1559 bp, Zea mays
acgcccgccatgccgacgaggcttgccccccaccgccgatcgcacacggtcatatgattgcactgaatcctgacatggtactactgtcttggaaacaacttccaccaacggtcgatccagtgaaacactaagacacccgttgccactggaaaggagagagcaaagtgatttgctgtctcctggcgatcgttgctcgtgaggcctagtgatggcagatgctagctcaaggactgacacctcaattgttttagacgacaacgacaagaatcataggatggagaatggaagtggtgcggttgtaccttctaattcttcagataggtccgacaggtctgataaacctttggaccaaaagacaatgcgacggcttgcccaaaatcgtgaggcagcaagaaaaagtcggctgaggaaaaaggcatatgtgcaacagctggagagcagtaagctaaaacttgcaagcctggagcaagaactccagaaagctcgccagcagggaatcttcatttctagttctggagaccaaacccatgctatgagtggaaatggagctatgaccttcgatttagaatattctcgatggcaagaggaacaaaataagcagataaatgagctgaggactgcagtaaatgctcatgcaagtgatagtgacctccgtcttatcgtcgatgggataatggcacattatgatgagatattcaggctgaagggcattgctgcaaaggctgatgtgttccatatactttcaggcatgtggaaaacacctgctgaaaggtgcttcttgtggcttgggggtttccgttcgtctgagcttctaaagctccttgtgaatcagcttgagcctctaactgagcagcaattgctggggctgtccaatctccagcaatcttcccagcaggctgaggatgcattgtcacaaggcatggaagcattgcagcaatccttggcagaaacgctggctgggtcccttggtccatcaggatcttcaggaaacgtggcaaactatatgggtcaaatggctatggccatgggaaaacttggcacactcgagaatttccttcgccaggctgacaatctacgacagcagaccttgcatcagatgcaacgtatcctgacaatccgacaggctgctcgtgctcttcttgcaatccacgactatttttcacgattgcgcgctttaagttctctgtggcttgctaggccacgtgaataacgaagggccgtcagtattttgagttccctctgccttacggtgctgctgcgtcgttcgcagcgatgcatcacagatctttggtggtactgtttttgttgtacaattacttttggccgctgcttggtccaaattgtactcaggtgggtgtacaagtaggtcaatataatcctgtaagttatggtgatttatgggtgtgttagcaatgcaataataattagagagggcaggatcagggtttctgttgtttgtactggttagagatttagtcctaatgtaacttcctgggacatggggggcggaatgggaagagagtaacaagaatcttcctttggttactgtagtaaatgtt

SEQ ID NO: 269319 - DNA, 1168 bp, Zea mays
gaaatccccgttcagccttcttccagctttttctactctttgctactcgtcttctctgggggcagccttaaggccatcccttccctgccttaggacggcctttgatatcttctccccgtctcagcttttggtgcctcgtcatcggcgacctaaccgccggcgaccggataaactaagccagccccttcgctccgaaagtcgtctctcgtagagagcacttgctcacctgtcttccacctcctcctactctccgctggacttgctcggagtggagatccatccggacctggttcgatttcttcatttcgggttcgattcggtttttctatcccagagcgaaagatcaatatcacctgacacaacataacgatttcgtggaagccgaggttgcttctctgctcagtgggtggataactggattgtggattttgctaactacatgctgggttatcagcctatcataaggaaagcaaagaagagacaacaaagcaatttgttgtctctttcttaggagctggcgagtactcggcatggcagatgctagttcgaggactgacacctcgactgttttagacatggatgataagaatcaaaggttagaaaatggacagagtggagctatggccctggcttcgaattcatctgatcggtctgacagatctgacaaacctatggaccaaaaggttttacgacggcttgcccaaaatcgtgaggcagcaaggaaaagtcggctgaggaaaaaggcatatgtgcaacaactagagagcagcaagctaaaacttgcaagcctggagcaagaactccagaaagctcgacaacagggaatcttcatatccagttctggagatcaaactcatgctatgagtggaaatggagctatgaccttcgatttagaatattctcgatggcaagaggaacaaaataagcagataaatgagctgaggactgcagtaaatgctcatgcaagtgatagtgacctccgtcttatagtcgatggtataatggctcattatgacgagatattcaggctgaagggcattgttgcttaggctgttgtgttttcatattacattagggcctgttctatattcttgtttttattaccttttttttttttttatttcatcttttcttctttttttctttatctcatttttttttttttttt

SEQ ID NO: 269320 - DNA, 612 bp, Zea mays
tccacggtgtgatgtcacggagcggtggcggctttcccgatccactgtgcgggagaaatccccgtgcggccttcttccagctcttcctactctttgctactcgtcttcgctgatttctgccttaattccatcccttccctgcctagaacttgctttgcttcaccccatcacagcttttggtgcctcgtcatcggcgacctaaccgccggcgaccggataaactaagccaggcccttcgctccgaaagtcgtctctcgtagagagcacttgctcacctgctcctcgccctcctctgctggcagtggacttgcgcggagtggagatccatccggacctggttcgatttcttcatctcggttgcttctctggccagtgggtggatcactggattgtgggttgtgctaactgcaggctggcttgtcagcctatcataaggaaagtgaaaaagagacaacaaagcaatttgttgtctcattcttaggagctggcgagcactcggcatggcagatgctagttcgaggactgacacctcgactgttgtagacatggatgataagaatcaaaggattattttacgaaatttcaacttctctctgtgggacatctaatggt

SEQ ID NO: 269321 - DNA, 331 bp, Zea mays
ctgccgctccaattccatcgcttccctgctttagaaccttctctgctagcttctccccgtcacagcttttgctgcctcgtcatcggcgaccaaaccgccggcgaccggataaactaagccagctccttcgctccgaaagtcgtctctcgtagagagcacttgctcacctgctccccgccccccctctactggcgctggacttgctcggagtggagatccatccggacctcacctggttcgatttcttcatttcgggttcgattcggtttttctatcccagagcgacagaccaatatcacctgacacaacataacgatttcgtggaagccga

SEQ ID NO: 269322 - DNA, 629 bp, Zea mays
agcccacgcgtccgcggacgcgtgggtggtcctggtattgtgaattggagtgaaggaggaacaaagatggtagctcatgttcctttttaccttttagcccagcaaaaaggtccaccgtctcataatttttcatttgccgacctcctcccaacagaatgaagaaaatatctgcatgagtgcattggtgcaggcatgatttctctagcagaaggccatataacgattttgttttgaagatccaagttcctttttaaaaaaggggctggtctgaacattcaggcttatttctctagcataatactcataaagagtcctgtacttttaggtcttgttcggttattcctataatacatggattgatggaattaaaaaaaatttagaagaactttgacttgcttaggaattcaacacatctaatcccactcaatccatatggattgagagctaatcgaacaagtcttacatggttgactatgcactcgagttatggaatgtatggtattacatttctaagtggtggatcgtagtgtaaaaaatgtacacgtctgaatttgttcgaaatgacaagtatctgttttgtttgaaaaaaaaaaaaaaagggcggccgctcgcgatctcggacgcgtggg

SEQ ID NO: 269323 - DNA, 902 bp, Zea mays
tgctcaacgtctaatctctgggaacccatctcttggacaccggatcacggtcatcaagggcaaggttgaggaagtagtgcttccagagaaagctgacatactgatttctgaacctatgggaacccttttggttaatgagaggatgctagagtcttatgtcatagctagagacagattacttgctccagatggtaaaatgtttccaacaaccggtaggattcacatggctccattttctgacgaatacctttatgttgaaatagcaaacaaggctctcttttggcagcagcacattttttttggtgttgatcttacacctttacatggttcagcattccagggatatttttcacagcctgttgtggatgccatttgacccaagattattaatttctccaccaatatatcatacacttgattttactagcatgaaggaagaggagctttacgagattaatattcctctgagctttgtagcttctgttggcactagagtacatggattagcttgttggtttgatgtattgtttaatgggagcactgtgcaaaggtggcttaccactgctccaggatcccctacaactcactggtaccaactacgatgtgtgctttcacagccattgtatgtcatggccggccaagaaataactggccatcttcgtctcgtagcccatagtgctcaaagctacacaatatacttgacaatgtcagctaaaatgtggggtgtgggtgcggagcaaggcggtatcctacagacatctactgggaaacttgaactgaaggagccatactacaggttgtctcagccacaatcctgcacgttgccacaagatcagcaacagcagcaattgccatctttgcaggcacaggtaagatgtacctttttttgtagcagtagttat

SEQ ID NO: 269324 - DNA, 787 bp, Zea mays
actctgacacgtgcgctgtcacaggcattgtatgagatgttcggtcaagaaatcactggtcaccttaatgtcgtactccatagtgctcaaagctacacaatatacttgacaatgtcagctaaaatgtggggtgtgggtgcggagcagggcggtatcctacaaacatctacaggaaaacttgaactcaaggagccgtactacaggctgtctcagccgcaatcctacatgttgccacacgatcaacagcagcagcagcaattgtcatctttgcagccacacggatcggagcagcagatgcaggaagggcttagcccaggcatcacgatagaccaagtagacaaagattacggcctcaactagacagacttgagaacctgagttggatgctctgatattccagcaacgagctcaggtctgtacaagtacaacacttcagagtgctccttagcctatgtttgtcaggcgttagctgccaaatgctaacatcacgttcgaggcgtacgagaccattccagagttgtgcagctgcagctaactgctggcgcgcccctgctccgttacttacgagggagtggaaaaaagcaattataaaatgtacggtttcaggtaaagtgaagatcggatgcaactaacaatggcgtgcatgttgtttaatatattattgctagaaattcatttattttccatgttcagtgaattgtgttcaatttgtgcgtctcgtggcgtatctgcatgcacaaatcttaagcatgtttgattcatgtggcttcattcgcagtttgttttg

SEQ ID NO: 269325 - DNA, 367 bp, Zea mays
ggtgctctgggagatgatcaccggagaggaggcctactccgcctactctccggtgcaagcggccgtcggaatcgcggcctgcgggctgaggccggagatccccagagagtgtcctccttttctgaggtcactgatgaacaggtgctgggacaattcccctctgaagcgccctcagttctctgagatcatatccatcctacaaaggcagcagaacgttagatagtgttcttttcttttctttttttctcttccccccttccttctatattattatatatgctatatatcagtttggcttggctgtttgcatgcctaatcatgcaggaaactgcatctgagaaaaaatataatataattatatatgtgc

SEQ ID NO: 269326 - DNA, 841 bp, Zea mays
caagtccaggcactcatcaaagagaggaaacgatggccatgcgaagaactccagggcagcagctcctgctgccaaagagtacgacgacgacgatgacgaggaggacgaggaacacacggaaaccttttgtggaagctgcggcggcctctacaacgcgaacgagttctggatcggctgcgacatctgcgagcggtggttccacgggaagtgcgtgcggatcacccctgccaaagcggaccacataaagcactacaagtgcccggactgcagctcgaagaaaataaggcagtaggtcccagtgtgcaccgccggccatcgctgacctgtctgatcccaaaccatactccattgcttgcctgccttgccccaaggtcgcagctagcagatgcgaattccttcatttgtggggggttgttgtgtgatggatagcctggtaggaagaggcaaaggactgatatataatgactcgtttattgttcatctttttgcctgcttcgtcggtcgtcgcagtcgttgtggctgcatgaactgatgagtggtttgttcgtgctagttgtaggctgtttcactgatttgcgtgcgtatgtggactgtcctttcaaatttgtaggcctgaaaccgtacttccatttacgtggctacgcgagctgatttgccggtctgcctctcccatctgtatcctggacatggcagtatggtcacgaagtccagatggcgatatgcctgactgccggtaacggagggcagctgtggtgtagtatatctcagtcacatgggaggcgttagataatttttgaccaaatgttataaaataagacactattaaatagtttttttatat

SEQ ID NO: 269327 - DNA, 339 bp, Zea mays
  unsure (1)..(339): unsure at all n locations
ggcggcctttacaacgcgagcgagttctggatcggctgcgacatctgcgagcggtggttccacggcaagtgcgtgcggatcacccctgcgaaagcggatcacataaagcactacaagtgcccggactgcagctcgaagaagatgaggcagtaggtgtaggtccccgcgtgatctgactgacccgtgtgatctgatccagaccataactccctccgtttgtttgtctcaaggtcgcagctagcagatgtgaattccttcatttgtggggcttgtttatgtggtggtaggaagaggcaaaggactgatagatagagatacatgaccgttttctntatatat

SEQ ID NO: 269328 - DNA, 574 bp, Zea mays
tcctcgcgtacggcgccgctttgggttggggtttaagcgcgtgtaagggaggccggaggcgacgacgacggcgccggcgtcggagaagaagaagcagacaactctcgtatatgtcttcttgccccttttccgatctggtggtcgtagcgctcatcatcgccgtcgtcgccgtcatcctccgcgccctcgcttgctctggccgatctatgcgcaaggggctcaacggctggaacaaatcctcgtcgatgctcagggacgggttcggggtgaagtattccggattcctccacataaggccgtgcggcttctgtagaggagattgacggattcggccgatttgcgctcgtctccgtcattttttttttgcacccagagtttcttgtttttctttagaagttttccccccatagttttggcaattttggcgacaagttttggagttctccccgtcggaagagatagaagagagatgtctccgttgaaccagcttcaggttctcctcaagaaggccctggcgatgaagcccttcgctaagaagatgtctgagtttggccttaaaccctctgctgccctc

SEQ ID NO: 269329 - DNA, 822 bp, Zea mays
agtcgccgctttgggtcggggtttaagcgagtgttcagggaggccgggacggaggcgacgacgacggacggtgccggcgtcggaggagaagaaagaagaagtagccagctctcgtatatgccttcttgccccatctccgatctggtcgtcgtagcgctcatcgcccccgtcgtcgccggcctcctcctcctcctcctccgctccctcgcctgctccagccgatctatgcgcaaggggctcaacggatggaacaaatcctcgtcgatgctcagggacgggttcggggtcaagtattccggattcctccacatacggccgtgcggtttctgtagaggagactgacggattcgtcctcaaggccgtgccgtttctgtagaggagactgacggattcgaccgatttgcgctcgtctccgttatatttttgcgccagagtttttttgttttttttcttcagaagcttttccccgtagttttggctggagttctccccggcagaggagatacaagagacatggccccgttgaaccaccagcagcatgttctcctcaagaaggccctggcgaagaaacccaaagctaagaggatgtccaggtttggccttaaaccctccgctgcagccctcctgaagtcccggccgcagcagccggcgcctgccccggcccagccgaggcgccgcgtccgggttctcttcgaggatcctgacgccacggactcggactccgacgacgaggaggccggcgcctctacgtgcccggcgaaggccaagcgcttctccttcgagacgttcgtcggcaaggtcccagccaggccgagtccttcc

SEQ ID NO: 269330 - DNA, 736 bp, Zea mays
ccgggtcgaccgacgcgtccgcccacgcgtccgcccacgcgtccgtgaagaggcctcctgtcgggcgcggagagagcttcatcaccaaggtcatgtggcggaacatcgtcgggcagagcttgtaccagctggccgtgcttggagctctcatgtttggcggggaacgtctcctgaacatccacggcgcggactccaaacccgttgtcaatacgctcattttcaactccttcgtgttctgccaggtgttcaacgagataaacagcagggagatgcagaagatcaacgtcttccgcggcatgttcggcaactggatcttcatcggaatcatagccgcgacggtggcgttccaggtggtgatcgtcgagttcctcggcacctttgccagcaccgtcccactcggctggcagctgtggctggtgagcgtcggcctcggatccgtcagcttgctcgtcggcgccgtcctcaagtgcgttccagttgaaccggacgatggagttcgcgccagtccaaatggctacgcgccgctgcccggcggccctgacaacatataacagctgaacctgagcggccgacaaggtactgacgacgtgctgatttttttcgcgttaggggtcataacagattatattatgtaaaaagagatggtggtgacgacaaggcacctctattttgatgggtcatacttagaagtggtaatagcctctagattttacgctacaaactttaaagatcgaaa

SEQ ID NO: 269331 - DNA, 329 bp, Zea mays
gtcctcaagtgcgttccagttgaaccggacgatggagttcgcgccagtccaaatggctacgcgccgctgcccggcggccctgacaacatataacagctgagcctgagcggccgagaaggtactgacgacgtgctgattttttcgcgtgagggaacctcgtcggaaccaaccaaccactgtctaggttcagttttaacagattatattatgtaaaaaagagatggtggtgaccacaaggcacctctattttgatgggtcatacttaggggtggtaatagcctctagattttacactacaaactttaaaagatcagtcggactttattact

SEQ ID NO: 269332 - DNA, 315 bp, Zea mays
cccacgcgtccgcccacgcgtccgcccacgcgtccgggtggatcgggtggaagatggtttagggaagagtagagaccatagaccactgcatggctacactatataattatcatcaataacgtgcactatattgaatgtcaatgcaccacctctatatgctgaatgctatgtatctcaaactatgatttgtaacgactcgaaggattgagagcttattctctgaacggaatatagaccaatattattagtatatattccatgtttcctggcgacaaatatgttagataatataaaaaaaaaaattaaaaagggcgg

SEQ ID NO: 269333 - DNA, 1392 bp, Zea mays
ggtagaagatccaaattcagatgcattcaagcgtcaccttgcaaggataccagacttcttgtggatttcagaagatggcatgaaggcacaagtatatgatggctgccagagctgggagacatcattcataattcaagcattttgcgctacagatcttgttaatgactatggttcaactcttcagagagcctatgagtttatgaaaaattcacaggtcatgaggaaccatcctggtgaccaacgttattggcatcgccatagatcgaagggttcatggacactttcatctgcagacaatggatgggctgtatctgacactacaggagaagcacttaaggctgtactgttgctgtcaaagatctcaaacaaaaacaaccttgttggggatccaatagaaagagaaaggttgcatgacgctattgattgccttctatcttttgcgaacaaagatggcaccttttctacatatgagtgcaaaagaacttattcttggttagagattctaagtccttgtgagactttcccaaacattgttgtcgattatccttacccagaatgcacttcatcagtgctccaagctctgatattgttcaaagacttatatcctggttaccgcacagaagagatagaagcattagttagaagtgcagcaacgtttattgagaccaaacaacaagaagacggttcatggttaggtaattggggtatatgtttcacctacggggccttcttttcgattaaaggtttagtcgcttctggaagaacgtacaagaacagcccttgcatacggaaagcatgccacttcatattgtcgaagcagctcagtactggtggatggggagaaagccatatcgctattgaaactcaggtgtatgtaaatctcaaaggtgaccgtgctcacgctgtgaataccgcctgggcaatgctcgctttaatttatgctggacagtttgaacgagatccaacgccattacatcgtgctgcaaaggaattgatcaacatgcaactggagacaggagagtttcctcagcaagagcatgtaggatgcttcaactgcagcctctacttcaattacccaagctaccgcaacttgttccccatctgggctctcggtgagtaccatcgtggccttcgtgcaaagaaagacaagtgagtccgtgtgtctatatatatatatatatagagagagagagagtacgtatagcattgtgaggaataaaacaggttgcgtcggtggtgagtgcgcagaaacaagatgtgcttttatgtaggcgtaccacagtgtacaatgttggtcgttgttagactgtaaggctatcatgacgttgtatattgtaatatatatatagtgttccatatgtttcaaattatataagacgttttatcttctct

SEQ ID NO: 269334 - DNA, 424 bp, Zea mays
tcccggtcgaccgacgcgtccgcggacgcgtgggcggacgcgtgggcggacgcgtgggcggacgcgtggggcaagagcatgtaggatgcttcaactgcagcctctacgtcaattacccaagctaccgcaacttgttccccatctgggctctcggtgagtaccatcgtggccttcgtgcaaagaaagacaattgagtccgtgtgtgtatatatatagtacgtatagcattgtgaggaataaaacaggttgcgtcggtggtgagtgcgcaaaaacaagatgtgcttttatgtaggtgtaccacagtgtacaatgttggtcgttgttagactgtaaggctatcatgacgggtatattgtaatatatatcctttaaaaaaaaaaataattatttatttttatatttattaataaatattatggggggg

SEQ ID NO: 269335 - DNA, 807 bp, Zea mays
cccaaccatagtttcgtccgactctcatgatgccctaccatttgttggaacaattattcgagcgatgcaggttatatatgttgatagattctcacctgcttctcggaaggctgctgtaaatgaaataaagagaaaggcagcttgcaatagcttcccgcgggtcctgttattccctgaaggcaccacaacaaatgggagattcctgatttcgttccaacatggtgcattcatacctggctaccctgttcaacctgttgttgtccattatccacatgtgcactttgatcaatcatggggaaatatatcgttattaaagctcatgttcaagatgttcacacagtttcataatttcatggaggtagagtaccttcctgttgtctaccctcctgagatcaagcaagagaatgcccttcattttgcagaggataccagctatgctatggcacgtgccctcaatgccttgccgacttattattcatatggcgattctatgattatggcacgagcagtagaagctggaaaggtgaactgctcaaattacatggtagaaatggcttgggttaaagatgtttacggtataagcacagcagaagtgatggaactattggaacatttcctggctatgaatccagataacgatggacgtgtgaaagctgaagatttctgggctcattttggtctggattgcagtcctctgtgcaagaagatatttcactatttcgatttaggcattaaggggtcgattacgttccgtcagttcttggttgggtgcgcgcacctgaagaagcaaccactgttccagggttc

SEQ ID NO: 269336 - DNA, 672 bp, Zea mays
cccacgcgtccgggttgggtttattgaggcgtggaggatccctggtgtggccccttgcgccctctgccgtttcttctgcaagcttgtggcgtatacgttcctgtactggcttcccttctatatcagccacacaggctatcggtggagaatacttggcggactccgcagccggggtactgtcgacgctgttcgacgtgggcggcgtcgtgggcggcatcctcgccggccacatctccgaccacctggacgcccgggcgctgacggccgcgagcttcaccttctcggcgataccggcgctcttcttctaccgcgtctacgggaacgtctcgctggcctggaacatcgccctcatgttcgtcacggggatgctggtgaacgggccctacgcgctgatcacgacggccgtgtccgccgacctcggcacgcacagctcgctcaacggcaactcccgcgcgctggccaccgtcacggcgatcatcgacggcacggggtccatcggcgccgcccgcggcccgctcctcacgggctacatctccgccaggagctggagcgccgtgttcacgatgctgatggcgtcagcgctcgtcgcggggctgctgctgtccaagctggtggcggcagaagtggtcgccaagatggagtcccggaggacgcccgccgctgctgcgagcg

SEQ ID NO: 269337 - DNA, 490 bp, Zea mays
tcgtccacgcgtccgggatgatatgagaagattagatgtgtctccaaatattgttacttataacatgctgataaatgcatgcgtccgtgatggtaagctgcaagaggcattccaactgcatgatgagatgctcagcagtggagtcgtgcctgatgatactacatatgacatactccctcggaccaataatagttgattttccacctgccaggattgcttgctccttggtcaagcctccagtctgacacagtgtattaccaaccagagggaatacgagttagcttgaaacttttggaagcaagtcctgcagatgctgaaaatcatgtttcaattctgccagtaaagtatgaagaaccttaacatgcgattcagcagattgaaatttaggaaacttgcactgtaaatgaagtgaactccttgtcagttataatttttcctttccaatatatctgtacccctttaaagcacgactttgacacgtcgcgcactc

SEQ ID NO: 269338 - DNA, 1323 bp, Zea mays
ccctcgtttccgcccacgcgtccgcccacgcgtccgcccacgcgtccgagttgggcgaacttgccatgtccacaggcaagctagagatggcggaggaatgccttcttcaagcgaaggacttaagtggcttgttgctactgtactcatctcttggagatgctgaaggaattgaaaagcttgcttctttggcaaaagaacacggaaaaaacaatgttgctttcctctgcctttttatgcttggtaaagttgaagattgcatacagttgcttgtagacagtaaccgtatacctgaagctgcattactggcgcgttcatatcttcctagcaaagtaccagagatagtggcaatttggagagacgacctgagtaaaattaatccaaaagctgcagagtctctagcagatccttctgaatatccaaatttatttgaagactggcaggttgctctaactgtagaaaaaagcgttgcttctcagagggatcattatcctcctgctgaccaatacttgaatcatgctgagaagtcagacatgattcttgtggaagctgtcaaaaggatgcaggtcattgagcacgaggaacctgaagatgcagctgaggaaaatggagaacctgatcaacagtgctaactgaacatgaataggggccgagggaagcacaacgcattggctgcaaatgttattttttcccgagggtaacaaatgtggcccccagttttaccctgaagcaccggaaactggtgatgcttgtggccattggaggccacctgatgcttgtccgatctttctgagtgaaccccaagcttgacatattgatgcttgctacacttttgttgtcgatatgcttcttctgccaacaacataggcaattctttcttctcggatcatctgcggacccgatttctatgcgctcgaaccaatgaactgggtggggactgtggagccattttgtgatgaatagttcgaataatcagtatagaggtacgttgtaaaatatgccagattaccatagccatcgaattctcctaggagatgacagtttttgttagccattcattgtaatgatgttacttgataaggaaggttacgtgtagtatatgattgcggttgcgggccgagggttttgcccatgttatacttatatatagtggtatcaatccatcggatcgaaggctctcgtctactgatgcctaatcaatgccgatgactgcgagaattcaatgcctagatatgcagtgtaacagtgtctcgctgcacacctattcatcgtttcaaaccatggtccatggaatttattttgatgctggaatgctgcggcatgtcc

SEQ ID NO: 269339 - DNA, 703 bp, Zea mays
gagcgagtgagaactggaatttgggttggagactgctttatctataacaactcatcgtggcgcctaaattattgtgttggtggtgaggtcactacaatgtatcatttggatcgccctatgtacttgttgggatatcttgcgaaccaaagtcgagtttatcttattgacaaggagttgaatgtcattgggtacacattacttctgagtttgattgagtacaagacccttgtgatgcgtggggatttggatcatgcaaacgaaattttatcatccatacctaaggcgcaatacaatagtgttgctcattttttggaatctagaggtatgttggaagaggctcttgagatagccacggatgctgactacaagtttgacctagctgtgcagcttggaaaattagatgttgcaaaggctatcgtcatagaagcacagagtgaatctaaatggaagcagttgggtgaactcgccatgtccacaggcaagctagagatggcggaggaatgccttcttcaagcgaaggatttaagtggcttgttgctgttgtactcatctcttggagatgctgaaggaattgaaaagcttgcttctttggcaaaagaacatggacaaaacaatgttgctcccctctgccttttcatgcttggtagagtggaaagattgcatacaggtgcttgtagacagtagccgtatacctgaagctgca

SEQ ID NO: 269340 - DNA, 792 bp, Zea mays
gacccacgcgtccgcccacgcgtccgcccacgcgtccgcccacgcgtccgttcatctcgtggagatgctgaaggaattgaaaagcttgcttctttggcaaaagaacatggaaaaaacaatgttgctttcctctgcctttttatgcttggtaaagtggaagattgcatacagttgcttgtagacagtagccgtatacctgaagctgcactaatggcgcgatcgtatcttcctagcaaagtaccagaaatagtagcaatttggagaaacgacctcagtaaaattaatccaaaagctgcagagtctctggcagatccttctgaatatccaaatttatttgaagactggcaggttgctctaactgtagaaaaaagtgttgcgtctcagaggggcaattatcttcctgctgaccagtacttgaatcatgctgagaagtcagacatgactattgtggaagctttcaaaaggatgcaggttgttcagcatgaggaacctgaagatgtggctgaggaaaatggagaacttgatcaacaggcatttgaagagactgaaatgcagaatacagatgatgatgctgatgaacctgaagagacagttttagtaaatgggaacaagggtgaggaacatcagggtacggacaatgaaggagctttatctgcctagaattcttggcaaatatgggaaccccaagttttgcctacgtgctaactcaacatgaataggggctgaaagaagcacatctcattggctgcaaatttttttttctgaaggtaacaaatgtgggccccctgtttt

SEQ ID NO: 269341 - DNA, 505 bp, Zea mays
cgacacacgcatacagttttagtttgttcaactacacacgcaaatcggaatcgaaaccctatctcggatccgatggctcgttcgccgccgccttcttcgtcggccggcggcgcgcagtacgcgcagcagttcctcaacacggcgctctcccagcggggcccgtccgcgctgccgtacgccgaggacgtcaagtggctcatccgcaaccacctggtagcgctggccgaggccttcccctccctccatcccaaggccgccctcttcacccacaacgacggccgcgccgctcacctcctccaggccgacggcaccatccccatccaccacgccggtgcctcctacaacctccccgccgtcatctggctgcccgagccctacccgcgctccccgccgctcgtcttcctctccccgacccgagacatggtcatcaagccccaccaccgcctcgtcgacagctccggcctcgtcgccaacgcgccctacctccgctcctgggtcttcccct

SEQ ID NO: 269342 - DNA, 953 bp, Zea mays
ctgttttcctcgtgtctctgtttggctgcattggagcagggacaagaaacacctgctgtttgtgtttctatgccttcttggtcatattgttgatccttgctgaagctggagctgctgcattcattttctttgaccatagctggaaagatgtaattccagtggacaagacacataactttgatgttatgtatggctttctgaagaaaaactgggagattgcaagatgggttgctcttggcgttgttgtttttgaggcagtgctctttctattagctctggttgtcagggcaatgaacaaacctgcggagtatgacagtgatgatgaaattattgcaattggccgaagccctaccatgcggcagccattgatccatgcccaaaatgtgccggccaccggtgttcctgtcccaacactcgatcagcgttcaagtagaaatgatgcctggagccaaaggatgcgagagaagtatggtctggacacgagccagttcacgtacaacccctcagacccaagcaggtaccagcagaatggcgctccacaggctgaagaaaggagtcgatgcactataatgtgaagaattcttcatgacgtcctacgtcataatggttttcttgaacgggctacctcagcttgtgtagtttggtgttgttcagacttcatagctgtgtgtgtggaatgcaaaaatcccgaccatattgtttgtcacgcttgatgtcttctctgcaaatgttctatgcacttgtaattttaccgtgaatgacgaactgttagccattgacatcatctattttgtattttaggggggttgtttcttcttgccagtcctaccattttcatgtagctctgtttaatcatgatgctttactcaaatatatgtaagatttggttgtgccaaaaaaaaatttaaaaaaaagacgaaatagtgaaaggggatgttacgatataaaaatgg

SEQ ID NO: 269343 - DNA, 687 bp, Zea mays
  unsure (1)..(687): unsure at all n locations
ccggnnctgaaatncccgggccggcccacgcgtccgcccacgcgtccgtgtaattccagtggacaagacacataactttgatgttatgtatggcttggtgaagaaaaactgggagattgcgaagatgggttgctcttggcgttgttgtttttgaggcagtgctctttctattagctctggttgtcagggcaatgaacaaacctgcggagtatgacagtgatgatgaaattattgcaattggccgaagccctaccatgcggcagccattgatccatacccaaaatgttcctgccactggtgttcctgtcccaacacttgatcaacgtgcaagtagaaatgatgcctggagccaaaggatgcgaaagaagtatggtctggacccgagccagttcacatacaacccttcagacccaagcaggtaccagcaaaatggcacgccccgggctgaagaaaggagtcgatgccctataatgtgaagaattcttcatgaggtcctacgagataatagactttcttgaaggggctactgtagtttggtgttaccagtgttgttcagactttacacaacggtgtgtggaatagaagaatcccgcccatattttttgtcacgctcgatatgacttctcagcaaatgctctatgcaccccatttttctctgtgaatgacgaactgctagccgttgacatc

SEQ ID NO: 269344 - DNA, 779 bp, Zea mays
gtcccaagattcttacatgcctacacccggtggcaccagctacgccacctcgcctcttcccactcccgccgccgcctcctcctcgcagcttccgccgctctactcgtcgccttatgcggcgccgtgcatggccggccagatgggcctgaaccagctcggcccggcccagatccagcagatccaggcccagttcatgttccagcagcagcagcagcagcagaggggcctgcacgcggcgttcctgggcccgcgggcgcagccgatgaagcagtcagggtcgccgtcgccgccgccgccgctggcgccggcgcagtcgaagctgtaccgcggcgtgcggcagcgccactggggcaagtgggtggcggagatccggctcccgaagaaccgcacgcggctgtggctcggcaccttcgacaccgcggaggacgcggcgctcgcctacgacaaggcggccttccgcctccgcggcgacacggcgcgcctcaacttcccggccctccggcgcggcggcgcgcacctcgccggcccgctgcacgcctccgtggacgccaagctgaccgccatctgccagtccctgtcggagtccaagtccaagagcggctcgtccggcgacgagtcggccgcgtccccgccggactcccccaagtgctcggcgtcgacgacggatggggaaggggaggaggagtcgggctccgccggctcccctcctcctcctcctcccccggagctggcagcggacgtaccagtgacggagatggcgaactggacttcacggaggc

SEQ ID NO: 269345 - DNA, 459 bp, Zea mays
tctcgcgtccgctcaccctcctcctacaccacctcgcctcttcccacccccacctcctcgcctttctcgcagcttccgccactctactcgtcgccttacgcggcttcgacggcgtcgggcgtggctgggccgatgggcctgaaccagctcggcccggcccagatccagcagatccaggcccagctcatgttccagcaccagcagcagaggggcctgcacgcggcgttcctgggcccgcgggcgcagccgatgaagcagtccgggtcgccgccggcgcagtcgaagctgtaccgcggcgtgcgccagcgccactggggcaagtgggtggcggagatccgcctccccaagaaccgcacgcggctgtggctcggcaccttcgacaccgccgagggcgcggcgctggcctacgacgaggcggtctttcgtcttcgtggtgacacggggcgccttaactttccg

SEQ ID NO: 269346 - DNA, 747 bp, Zea mays
ccggggcgggccacgcgtccgcgctagcccatcttctcacacaaaaatatccgcgcgaccccgacctccccctcccactccggacgcgggcggcagccagcagccagcaggcatggggatacccgtggtggttcccgtcgcggcggcctactcgtgctcctcctccctcgccgcgccaccgagggccgccgccgccgcggcgagggcgccgagccgcgcgcacgtcgcggcggccgggatgtcctccagggcgtcctccttcgtcgggggcagcggaggcgacctcgcggcggtggccgcgtcggtagccgcgcggcccaggagggcgggctccgggggaggcggcgcgctcgggtgcaagtgcctcttcgggctcggcgtgccggagctcgccgtcatcgccggcgtcgccgcgctcgtgttcgggcccaagcagctccccgagatcggccgcagcctcggcatgaccgtcaagagcttccagcaggcggctaaggaagttcgaaactgaactgaagaaagagcctggggaaggtggcgatcagcccccacctgcaacccccacggcaacgggggtaggtggcgcggagaaggggcttgaggcatcaagtagcaaggagagcacgtgaggatctatcaagtgttgttagtgttgttggtgtaaaattgtattctggtcttctggagttagcatcaagttcatgtcctttttaaccacgtcgcgggttcaggccattgtagcgatat

SEQ ID NO: 269347 - DNA, 459 bp, Zea mays
gagcgtgacacccgacctccccctcccgctccgggcagcagcagcagcagtcatgcggatagccgtggtggctcccgtcgcggcggcctacccatgttcctcctccctcgctgcgccggcgagtgcgacgagccgcgcgcacgttgcggcggccgggatgtcctacagggcgtcctctttcgtcggaggcgggctcgcggcggtggttgcgtcggtagccgcgcggccgaggagggcgggctctgggagaggcgacgctctcgggtgcaagtgcctcttcgggctcggggtgccggagctcgccgtcatcgccggcgtcgccgcgctcgtgttcgggcccaagcagctccccgagatcggccgcagcctcggcaagaccgtcaagagcttccaggaggccgctaaggagttcgaaagtggactgaagaaagagcctggggaacgtggcgatcagccccc

SEQ ID NO: 269348 - DNA, 392 bp, Zea mays
taagcccccacctgcaacccccagggcgacggcggtaggtggcgcggagaaggggcttgaggcatcaagtagcaaggagagcacgtgaggatgtatcaagtgttgttagtgctgtttatgtaaaattctattctgggccacggccggccatgagggggtgcggcgggtgcggtcgcaccgggcccccaaaaacagagggcccctctggacactggacgttagcatttttttccccgctaagcatatctaccctagatataaatacacaagagcgatgcactattgatcagccctcccctagattgctaaactcccgtcccaattacttatctaatattcactttattaaaaaatagtatttgatttaaaaaaaaaaaaaaaaggccgcccgc

SEQ ID NO: 269349 - DNA, 661 bp, Zea mays
ttaagctttcttatttgagctttatgatactatgtactcaatacttgtgctcttgtccagcaggttgagcagatagtggttgaaaggtctgaaggttggcattgtggatatttttgctatcatgcatggattcccagacaatgtgaggacgaaccagaagggcgagttctgggtggcgatccactgtcggagaagtatgtatcctcggctaatgagctgccatgtcaagctgaggaagtttttgctcagcttcccaatccctgccaagtaccactacctgatgcatatcgatagcaagctctacgcgttgatcatcagggacagcccgatggccagatgcttcacatcatggaggacgacaagggagaggtggtgagagttatcatcgaagtggagggtctgtctgatgccattcatcgctgtctttgacctcgtgaaggcgtcttagccacttcaatttgattggaaatattgttgttttaagatacgggtccatggttaatgttgtacgcttctctgagaagacctgtcattccaataatttggttctggagcaacctggagctgtatactgatctagcttcttttagtaacaaatgtaagttgctcacattttctttagattgtctatagaactttgaacgaccagctcttcccttct

SEQ ID NO: 269350 - DNA, 582 bp, Zea mays
cccacgcgtccggggaaggatatgcccaagtacatgcggccggttgaggctggctcccttgcagatttcctccggtccttccaaacccagccgccgtctgtggcaccgatgccggcgctgaactcttcaagcgtggaggagccgcctcttccaactgctgcgccgagaaacgtgccgcctggtggtggcgccccagcggacgccgccgggactgctggcggcgctgctccttctgatgcgagttccggcggcgctcctccttctgacgcgcgtcacacggctaccggaagtagcggtatgctgcttgtggtgctggtttccgcggctctgctgatctgattctgagcagacacatgagactgtatagtagacagagccgaagcaaatgcaaatctccgttggattcgatcaagctttgaccagcgatataccatacacttgtttttctcgggtatatatgtttgtatttggccgcatttttcacgtccacatgtgtaaaaatttgtcagtggaaacgttatacgtatcagccggaaattttatccggcgatgatcaaagttctgacaaggattaagcgatcc

SEQ ID NO: 269351 - DNA, 937 bp, Zea mays
tttggatttctcgatgcatttgatcctagctatactccaaatactactgatcttcctgggaagaggtactgttttgcaaatcaacctgatgttggcttgtggaatattgctcagttcactggaccactgtcctctgctgaacttatcagccaagatgaggcaaattatgtgatggagaggtatgggacaaagttcatggatgagtaccaatctatcatgaccaaaaaactgggcttaactaagtataataagcagctaattagtaagctgcttagcaacatggcagttgacaaggttgactataccaacttcttccgtcttctttcgaatgtcaatgcggatcctggtattccggagaatgagctgcttgtcccactgaaggctgctctcctagatattgggaaagaaaggaaggaagcatggattagttgggtacagacttatattgaagagctggtggagagcggcgttcctgatgaagaaaggaaagccgcgatgaactctgttaatccaaagtatattctccgcaactatctctgccagtctgctatcgacgcagctgagcaaggcgattacgaggaggttcggcgggtgcttagggtaatgcagaatccgtatgacgagcagccgggaatggagaagtatgcacggttgccaccagcctgggcatacagacctggagtgtgcatgctgtcctgctcctcgtgaaccccatgatgcaagacgtggacccattacaaaaatgcttgggtgcttatagtcttcctcctgtataggggtccatctttgtgctgtaatgtgtcaagcatcgcatgctattttttttcccggtgatgccagtgtgtaagaaccatgtcgttgcaggaatagtgaagcagtgggacctggtattgtgaccacctagtatcccgtacggaaatggaaatttggcggtttt

SEQ ID NO: 269352 - DNA, 589 bp, Zea mays
tacggtcggaatccgggtcgaccacgcgccgggacgctggtgaccacgcgtccgcccacgcgtccgcccacgcgtccggtaccgagtaggagcaaccgcttgcgtcagacgcacactgacggagagtgatcactgatttctggtcatggcaaccgtaactgaggaagttgctccggtcgtcaccgtctccgaggagccggcgccggaagcggcgaaggaggtggtggagaagccggaggaggggaagaagcccgacgaggagggtgacgagaggaagaaggccgaccccgccgccgagaaggagaagaaggcgaggaagccgcggagcaggaagcccaagtccgccgggctgcaccacccgccctatttcgagatgatcaaggaggcgatcctgtcgcaggacggcgggaaggtcggggcgagcccgtacgcgatcgccaagcacatgggggagaagcaccgggacgtgctcccgcccaattaccgcaaggtgctggcagtgcagctgcgcggcttcgccgccaagggccgcctcgtcaaggtcaaggcttccttcaagctcgccgccgccgaggaaaagaaaacctcc

SEQ ID NO: 269353 - DNA, 561 bp, Zea mays
cggacgcgtgggcggacgcgtgggcgagtaggagcaaccgcttgcgtcagacgcacactgacggagagtgatcactgatttctggtcatggcaaccgtaactgaggaagttgctccggtcgtcaccgtctccgaggagccggcgccggaagcggcgaaggaggtggtggagaagccggaggaggggaagaagcccgacgaggagggtgacgagaggaagaaggccgaccccgccgccgagaaggagaagaaggccgaccccgccgccgagaaggagaagaaggcgaggaagccgcggagcaggaagcccaagtccgccgggctgcaccacccgccctatttcgagatgatcaaggaggcgatcctgtcgcaggacggccggaaggtccgggcgagcccgtacgcgatcgccaagcacatgggggagaagcaccgggacgtgctcccgcccaattaccgcaaggtgctggccgtgcagctgcgcggcttcgccgccaagggccgcctcgtcaaggtcaagccctccttcaagctcgccgccgccgaggaaaggaagacctcc

SEQ ID NO: 269354 - DNA, 447 bp, Zea mays
cccacgcgtccgcggacgcgtgggcgggaggacgacatcacacagccatcgccggccggaagctctcagctctgagcagaaggaggcgggtcgtcacacggtcacacacccgtcagcatgagcgaccgcaggtacgggtactcgtacccgccgccccaggggtactacaacaacggaccaccggtgatggcgccgccgccgtaccagtacgcagctcctccaccgccgaggagggagccgagcttccttgaaggatgtctcgccgctctgtgctgctgctgcctcatagacgagtgctgctgcgacccgtcggtcatattcgtgagctgatccggccgcagtccgcagcacatgccatgccattgtaccagcccaagagacatgtcgcatgcatacgtgtgtgttcgcatgcacttggcgcctcttgttggtgatagatgatgtttt

SEQ ID NO: 269355 - DNA, 861 bp, Zea mays
tgttgctctgtattttgctgcatccagtccacaccttgtaaaaggtgtcacactgcttaatgcaacaccgttttggggattctttcccaaccctgctacatctccccgattgtcaaagattttcccatgggctgggacatttccgcttccatcatttgtgaggaaaattactgaagcagtttggcaaaagataagtgacccaaaaagtattcaggacatactcaaacaagtatacgctgaccattcaacaaatgtggacaaagtattctctcgtattgtggagataacacaacacccagcagctgctgcatcgtttgcctccattatgtttgctccaaggggtcagatatccttccaagaggccatctctaggtgccaagaccaaggcattcctatatctctcatgtatggaagagaagatccttggattagacctatttggggccttaaagttaaacagcaagtgcccgaagcaccttattatgaaattagccccgctggtcattgtcctcatgatgaggtccctgaggttataaactacttgctccgtgggtggctgaagaacctcgagtctgagggctcagtcgacctgccgtttctagaagaacgcagctatgctgagcgtggtgtatccagggagctggagtttgtcagagaaggatcaaggaagtcagttagtgtgcggctctatggtaccaagatttccctatggagccagctaagctcattcttgaacacacgtgtccccaagtcacggatagtcttgagataatccatcctcaactcaatagatctcaatcttagaagctttgattcagatattgtatttattactttattaaattggtcagagacagtgtt

SEQ ID NO: 269356 - DNA, 672 bp, Zea mays
gtctctgtttgaacttagtggaggacaacgatcccttcttgctcttagtcttatcctggctctgcttctttttaaacctgcaccactttacatattggacgaggttgatgctgctcttgatctgagccacactcaaaacattggtagaatgatcaaggctcattttccgcactctcagttcatagttgtctctttaaaagagggtatgttcaacaacgccaatgtgatatttcgaacaaaatttgttgatggtgtgtccaccgtgacacgaacagtgccttcgaaacagagatgaccagtttacacatcatgcatcttctgaaccaaaactaggcatataattccaaatctgtcattttaaggagctgctataatcaaacattttcgctgtttattcagccaggaaaattattccatgaaagctgaaccccacaattacttgacgctgatgcctcaagcccctcgcttgtcaggcaatgacatcaaaataggtgctgtaactgtaatctcatggcgtgacgttcatgatgacctcgactggcttctacattatgcgctttcttctgacctgatgtgtaattagcggttgaactattttgtgttgaaggtcgaccgtgcagcatgtatgtttcagccatttataaccaaggtcatgtataattctcccttgcc

SEQ ID NO: 269357 - DNA, 340 bp, Zea mays
  unsure (1)..(340): unsure at all n locations
gtcgtcgtccactccggcatctccgattctaccaccaccgccgtttcttggggcaccgtggtcttggtccgctgccacgacnnnaacggccggactgtgttccggaaggacggcgtcgtgactgaccgcatcggcaggttccgcgtgcacctcgcgcacgggccgggcagcggcggcagcagcagccaccagctccggtccgtcacgtcctgctcggtggcggtgcacctcccgcaggcgtcgccgccgtgcgtcgccaccgccagctccgctcgcgggctccacctcgtcttccaccacatcatgcacgatcacggcggcggctcttccgtttttttct

SEQ ID NO: 269358 - DNA, 496 bp, Zea mays
gtttcgtgatgggctgatggcgggtcaaggttgaagccatcaaggcaacgtacgcctaggagtggagacgacgagagtggaggagggctgctgatgggcggaggagacgaccggagagcggcggcgctccagcgatcctcgtcgccatggagcgtgggcgagcggtggcgggcgcacgccgggatggtcctcgtcatgctcgcctacagcggttaccacgtcctcgccaagtccgtcctcaacgtgggcatgaaccaggtcgtcttctgcgtctaccgcgacctcctcgcgctcctcgtcgtcgcccccgtcgccttcctccgcgagagaagggttaggcctcccgtgacgcctcagctcctcgctttcttcgctctgcttggcttcactgggctgtatgggaacccgctcctttgtctcgtcggcctccgctacacaaacgccttctacgccgcggcttttcagccctccataccaagtgcttacgttttttttg

SEQ ID NO: 269359 - DNA, 540 bp, Zea mays
  unsure (1)..(540): unsure at all n locations
gaattcccgggtcgaccgacgcgtccgcccacgcgtccgcggacgcgtgggcgctggacttgaagggcctgccctcgctctcgcccgacgacgacnacgaggtggaggcggtggccaagaagccgcttcgcgcggccctggcggaggccggcacggtcaagtacgtcaccgcgccctcggccgcgtgatcccgtgctctggccttcccccaccgcgcaccgtaccggtggccgcgcgctatagcttcgtgtgtggccatcgcggaacataagaagaatctctcactataaaggccttcgttctgtgtttgcattttggtttttggattagggtgtctaatttttcaccagttccttttccccttgtgtaagtgtggagcttactatatagctagcgcccatttcaaggtgctgcaagcgttggtcaggaattgggctagagtgtttgtcctgtaccgagggattatgtgtatttttgctatttcgctcggtaaaattaatacaataataaaaaaatagggagccgcaaaattatggccat

SEQ ID NO: 269360 - DNA, 692 bp, Zea mays
gaatcgtaggaacctgccgtgcgtggcgtcaaaaaagcactcttggtccaaccaaatacaatacaagcaagcgaccaggagggacaggaaggatcgcagcggaggagatagctagggaagggcaaatctgcagggcctgagagggtgaggtagagcgcgccagccagaatgcaggagcaggcgccgagctcgcggccttccagcagcgagaggtcgtccagctccgggcaccacgtggacatggaggtcaaggaagggatggagagcgacgatgagataaggagagtgccggagctgggcctggagttgccgggagcctccacgtcgggcagggaggctggccctggcgctgcgggcgcagaccgcgcccttgcccagtcgtccacggcgcaggccagcgcgcgccgccgcgtccgcagccacgccgacaaggagcacaagcgcctcaaaaggttactgaggaacagggtgtcagctcaacaggctagagagaggaagaaggcttatttaactgatctggaggtgaaggtgagagatctggagaagaagaactcggagatggaagagaggctctccaccctccagaacgagaaccagatgcttcgacagatactgaagaacaccgctgtaaacagaagaggttcatgatgcactgctagtggagagggccacggtcaataccactgaatgac

SEQ ID NO: 269361 - DNA, 962 bp, Zea mays
cccattctttcgtggacgcgtgggttcctaccattagcagtagccacagccagaacaccagcagacagcagcatcagcagggaggaacacgatgagcggcgccggtccggatctgcagctgccaccggggttccggttccacccgacggacgaggagctggtgatgcactacctctgccgccgctgcgccggcctgcccatcgccgtccccatcatcgccgagatcgacctctacaagttcgacccatggcagctcccaaggatggcgctgtacggcgagaaggagtggtacttcttctccccgcgggaccgcaagtacccgaacgggtccaggcccaaccgcgccgccggggctgggtactggaaggccaccggcgctgacaagcccgtgggcacgcccaagccgctggccatcaagaaggcgctcgtcttctacgccggcaaggcgcccaagggcgagaagaccaactggatcatgcacgagtaccgcctcgccgacgtcgaccgctcggcgcgcaagaagaacagcctcaggttggatgactgggtcctgtgccgcatctacaacaagaagggcggcgggctggacaaggcggcggcgccggcggccggcggcgaccacaagcctgtgttcgccacggcggcggtgagctccccgccggagcagaagccgttcgtagcggcggcgggcgggctgcccccggcgttcccggagctggcggcgtactacgaccggccgtcggactcgatgccgcggctgcacgcggactactccagctgctcggagcaggtgctgtccccggagcagctggcgtgcgaccgggaggtgcagagccagcccaagatcagcgagtgggagcggaccttcgcctccgaccccgtgaaccccgcgggctccatgctcgaccccgtcgtcggccacgccggcggcgacccgctgctgcaggacatactcatgtact

SEQ ID NO: 269362 - DNA, 675 bp, Zea mays
acgtccgtccgtccgttggcgtcgtcaccgtccaaatcaaacaaaaagaacttggcgataatgtgtcgctttcgtaatgaacgcggggataagcgtggcccatggttttgggccgctgaattttttttacgtgggccatgctaggtggggtggggggctgcaccgtgcccaatgattcgaccgcgtcgcggtcctccgcgcgcaagtattcgatgcccatgggtcatggcgtacagatcattttcgcccgtcgcgcccctgcgactgcgacggcgacggagagccagtggggtctgggattagacatcgaaatgacgctttgtgattcttaagctcatccatttcttgtcagctgcacggatgacaaactaagttctctattgtgttgacgggtgcagttggatgactgggtcctgtgccgcatctacaacaagaagggcggcgggctggagaaggcgccggcggccggcggcgaccacaagcctgtgttcgccacggcggcggtgagctccccgccggagcagaagccgttcgtggcggcggcgggcgggctgcccccggcgttcccggaacttgcggcgtactacgaccggccgtcggactcgatgccgcggctgcacgcggactactccagctgctcggagcaggtgctgtccccggagcagctggcgtgcg

SEQ ID NO: 269363 - DNA, 441 bp, Zea mays
atccacttgcctcggccgctatcgtgaccgggaacaacaactgcgagatggccacggtggagacctcgggcacggcgatagggtcctccgggagatgggcactacacggcaagacagccctcgtcaccggcggcacccgcggcatcgggcgtgcggtagtggaggagctggcggcgctgggggcggccgtgcacacatgctcccggaaggcggaggagctcggcgagcgcatcaaggagtgggaggccaggggattcagcgttaccgggtccgtctgcgacctctccgagagggaccagcgggagcggttgctccgcgaggttgccgaccgcttcggcggcaagctcaacatcctcgtaaacaatgtaggaacaaacataaggaaaccaactactgagtttactgcagaggaatactcgtttctgatggctactaatcttg

SEQ ID NO: 269364 - DNA, 532 bp, Zea mays
cgacgaaacggttcaggagagcctcggtgtccgcaaggtatagcagtcctacgtgctcgatcgtgcatgcacgcacaggggggtttttttttttctctctctctttttcttgaggaaacaaaagccaagattttcagtaaatttggtatcgaacacacactgaacatccctgcaacttttgttgttaagaggttgtttgtttaggactataatctgtctagattatataatccaacaaataatgtgttatttgctggattatataatctggacagattatattctcaaacaaacacccgctaattcttccaggggacaatcggagcgtggaaacgatgcaaccaggacatactttacaaccagaacgtccaaagtgtagtgccgtaccattcgaggctagccgcgaaagggtacagggcgctgatatacagcggcggtcacgatcgtatcatacccttcgttggcacacaagcatggattaggtgtctcaacttgaccgttgtagatgactggcgaccatggtatgttggtg

SEQ ID NO: 269365 - DNA, 600 bp, Zea mays
tcgcgagatgtgtggtggaaagtacagtgatgcagccagtgttgcgtgcgcggaggtcacccgagctatagccaacatcacgtcggctgtcaaccgggaacacgtcctggagcctgcttgcccggacgacgacgacgacgagctgttcggccccaaaactaccatggcggagacagatggcggcacgagtcgtaggctgatgctgcagtcggcagactatttcctgccagctgggttcaaatgtagaagagcttcgtacgtcctatcccgcgtctgggcaaacgacgaaacggttcaggagagcctcggtgtccgcaaggggacaatcggagcgtggaaacgatgcaaccaggacatactttacaaccagaacgtccaaagtgtagtgccgtaccattcgaggctagccgcgaaagggtacagggcgctgatatacagcggcgatcacgatcgtatcgtacccttcgttggcacacaagcatggattaggtatctcaacttgaccgttgtagatgactggcgaccatggtatgttggtggccaaggttgccggattcacaaggtactcaggcaacctaacatatgcaactgtgaagggcg

SEQ ID NO: 269366 - DNA, 497 bp, Zea mays
gcgagaagaaggcggacaaagagaagggcggcggagagaagaaggccgacaaggaaaagggcggcggcgagaagaaggccgacaaggagaagggcggcggcgagaagaaggccgacaaggagaagggtgccgacaagcccaaggaggagaagaagaagcccaaggaggagactgtgacgctgaagatccggctgcactgtgacggctgcatcgagcgcatcaagcgccgcatctccaagatcaaaggcgtgaaggacgtggcgttcgacgccgccaaggacctggtgaaggtgaccggcaccatggacggcgccgctctgccggcgtacctcagggagaagctcagccgggacgtggaagtggtggcgcccggcaagaaggacggcagcggcggcggcggtgacaagaaggacaagggcgcaggagacgggggagagaagaagaaggacggtggcggcggcggcggggcaaagaagaagaaggacaaggccggggcc

SEQ ID NO: 269367 - DNA, 530 bp, Zea mays
gtctctttgaggagatgaaactgaagaatgttaaaccgaatagcctcacatgctgcattttaatgaccagctatgcagcattgaacaagatagatgacattgaagaacttctaaaagaaatggtagaaaaagatgtgactcttgggtggtctgcatacagcacacttgcttctatctatgtaaatgctggacaatttggaaaagcagaatctgctctgaagaaacttgagggccttatcagtgctcatgatgacagacagccttttgatttccttctgagcctatacgcttcactaggaaatttgagcgaggtcaatagggtatggaatgtgataaagtccaaattctcgaaggtaactaacacaagctaccttggcatgcttcacgctctttacaagctcaatgatattgaccgtatgaagcagatctatatggagtgggaatctaattatgaaacctttgatgtaaagctgccgaatttgatgattcgcagccatctgaaggttggcatgaccgaggaagcagaaatg

SEQ ID NO: 269368 - DNA, 625 bp, Zea mays
cccacgggtccgaaaaacctcccgaaaagactattcggcgagccaaccaccaccagcgtcccgcgctagctgcggcaccgcatggctgccgtgaccagcaccgcctccatctgcccggccgcagccggcgccctctcttcgctgccgtccttcatcacgcgcaagcccaccagcggcagcaggaggttgcagcaggcagcagcgacgacagtctgccactgccgctctgctcgggtagaggaggggctgctgggccggagggacgccttattgctcggcatcgtcttctccgccgcgacgccgccgctgctcgcccctgccggcgctctggcggacgaggccaccgccgagtcgcaggagggcttcactacgtacgacgatgaggccaacaacttcagcattcaagttccgcaaggctggctggtcggcgccggcgacgccagcggcatcaagtctgtcacggcgttctaccccgagcaggccgccaccgactccaatgtcagcgtcgccatcaccgggatcgggccggacttcaccagcctcaagtccttcggcgacatcgatgcgttcgccgagggccagatgaaccgcctggacaggatctggcagaagccgccggggctca

SEQ ID NO: 269369 - DNA, 511 bp, Zea mays
gttggcagcgcgccgcggcagcagagggggagagagagaggcagagcgagcgagcgagagagcgctggtcatggcgtcactgtctgtcgccgccgtggcggccaccatagcgatgccaagcagcagcggtgggagagggcgccgtctcagggtcgcgtccatggccacccagaagggccagaagccgacgcccaagaccgtctccggcacgagaagatcgggcacgacgacggtgttcccggtgggcgagccgggcccgcggccggcgacgacgagcggcaaagcgccggttaagctgctgacgaacgtggagaagctgcggctgctgaccaaggcggagcgcgcgggcctgctgtcggcggcggagcgcgcggggctgtcgctgtcggcgatggagcggctgggcctactgtccaagctggaggagctgggcgcgctgtcggcggccacggaccccggcacgcccggcgcgctgcttgcgctcgcgctcccgctgctggccgccggcccc

SEQ ID NO: 269370 - DNA, 376 bp, Zea mays
cccacgcgtccgactagttttagaccggtcgcgcgcggcctgcgactgcgagccgaggaatccaagtagccgggtccggccggggtgtctttcgttgtttccgccggttgcgagatcggagccagcatggacaggtcgtcgtgggactagctcttgctgcacgccgggagaagaaggggatggtgaagagagggtggctggcggtccccatagtactcatgtatcacttctgtttctttctttttttttttttatattattttttttattattattcttttttctttttctcatttagcttttttttatttttcttcaactatacattcttttttactcttaacttattttctttatacatctatcctttctttac

SEQ ID NO: 269371 - DNA, 628 bp, Zea mays
cctgtttatgtctatgctactcactctcggtttggtcttacttctgaccaaagtatttatggaatcgtccggccagaaacgggcgagagcccatgctgtcgtagaggcctcgtcgagtgcgtccgctacgcctaattctgaggatgatgataagcggaaaaaagtgtcccgccaagacgccaatggcaaagagtcagagccgcccataaatggggcgcaacctgaagtaccatccattgcgttcttaaagaaaagaattaaaacagttctaaggtcctgtcgagataggaaccctagggagagcacattacgctctacttacgaggatcttcaccttgaaacggcgagcgccgagaagcgggtaaaaatcgcccaggccctagaaaatctgtacaggcgaagccaatatttccggagtaacaaaaggcagcagccccataccgacttgattattcaaatctgcgattgggagcgtacgaagaggtaaagaaattcactggtgtaggcataggaaaccgaggccccccaaaccatttactatcggtgggggtggggggggaaagaaaaatcttctttgttatccattttatttttcataaaagaaattaattccttcctaccttttttt

SEQ ID NO: 269372 - DNA, 459 bp, Zea mays
ttccgatctgtgttgatgcggccaacggagttttattaccccactggctacctacctggatgggagccatgcagcgattactacacctattcctacctcaatgacccagcagtgcagaatgctttccacgctaggacgacaagttggtcagcgtgcgcgaacttgaactggacggacgcaccgatttccatggtgccaacagtcgcatggctgattgagaagaagctgcccgtttggatttttagtggcgattttgattccgtgtgcccacttcctgctacgaggttttccatccatgatcttaacctgcacgtcaccactccatggcgcccgtggacagcaaacatggaggtcggaggatatgttcaacaataccagggaggattcacgtttgcctctgtcagaggagctggtcatatggttcccgcttcccaggctgatagagcattagtattattg

SEQ ID NO: 269373 - DNA, 509 bp, Zea mays
tttctcacgcgtccggccttgagggttcagtcctgggtctccctcctccttccctgaactgagctgcaagctgcagccgcaggcttggctggttgggtcaactgtgccgcgcccttcctcttgttcctgctcaatctcacctctttgatggcttcatcccactgctgccagtgcagcctcttcttcactggcaggcaggttcctctagtctgtagtctcttctgaccggtggttgttgcagtttttaaccgttcttccctctgacagccaggcataggtggcaaaatccagcgccctgtagattcagctccattccctgctgcctgcagctccctgtcaatctttggaagccggccgcagagctttcaagttcttgccgctctcctctgctctctcgctcgctctttcgctcacctctgcattcccccctccctctgtctctagtttccttgctggcaaacggacgaaggaaaacggccaagatgggagctttaagcagcatcggcgtc

SEQ ID NO: 269374 - DNA, 755 bp, Zea mays
agggccgcccttttttttttttttttttattttttttttttttttttttttttttttttttttttttttttttgtttttttttttgctggaatggaagcattctttttggttcgttttccattgcattattacacacagctggatacatgggcttgatgaagcccggccggccgtgatttattttagcccgcccacagatgcaactagataccgaaataaaaagggtaaacaacatgatcgatcgatttattatgacacaaacacgtacaaacatgcatatatgatcgactctcgatccatgatcatcacgggaagacctcgatgatggacgggatgcctcgggtgtgcgtgatcttgtagtcacggaacccagccgccaggaagatcctcctccactcgtgctcctcccgctccgccccgttcacgaagctcagtatgtggagatccaacacatacgtctccctgcacgtcttgtcgtcgtcgtcgtcgtctgcccgagatccgagcaccgtgtctattattatcaccttcccccctgcttccttgccaccgatcgcttccttgcagcgctccattatcttgatgcacttgtcctcatcccagtcgtgcaggatccacttgagcatgagtgcgtcagccgacgggatgtgctcgaacatgtcgccgccgtggaaggacaggccggcggtgccggcgggagcctcggcgacgacgtgggggaggtccatgacggtgcacctctggatgtgcggga

SEQ ID NO: 269375 - DNA, 305 bp, Zea mays
cccacgcgtccgaagttctagatcgcgagcggccgcccttttgtttttttttttgctggaatggaagcattctttttggttcgttttccattgcattattacacacagctggatacatgggcttgatgaagcccggccggccgtgatttattttagcccgcccacagatgcaactagataccgaaataaaaagggtaaacaacatgatcgatcgatttattatgacacaaacacgtacaaacatgcatatatgatcgactctcgatccatgatcatcacgggaagacctcgatgatggacgggat

SEQ ID NO: 269376 - DNA, 470 bp, Zea mays
ggggaacgtctgcatcgcgtcgtttgactggaggtgcagtggggtctgcaatccggtcgagaggatcaagtacgtgcactcgcgatgcggcgaagggcaggatgcgatctggagcgcctccttctgacaagatggtgatggaatcatggaatgattatatatatacagacgcacgcctgcttgtgtgcaggcccaggccatagctgcattagaaggctcgcgttgtgtacacacagtgagttcagagaaggggaggcatgcgtgtctgatacaggaagaaaccactggagcacaatctcttatcttttttgggggggagggttcagaaataggtgatacagccatacagagctcatgtgggtgggtatacatgttttttttcagtcgttagtgcagaaaacacgaatacattcgatttaattcattcgtcccctcttagaagctctgatcaggatcagagaagtttctgc

SEQ ID NO: 269377 - DNA, 766 bp, Zea mays
gcagtgtccaaaactaagttgcccttttttgttagggggaaaatgctggaagaggagagtagtcctaccacgttattaggagaaaaataaatttgagagtggttctaagagcaatccgtggtacaaatatgacatggaattattttgggttagaagaaaagatttttggctgctctcaacagtaaaaaaggttcttaaggtgttcattccatccctttgccatgatgctgatggccttatatttcagggctgggacgatccatatgtaactcgtactcatgaaggtctcctgaagtggaaataccctgagatgaattctgtggactttctgttcgagcttacgaatgataatcgtcaactggttttcctttatgagagaggaaaaaagaaactcatggatggtgcccggatagcatttactgacgatgtagatccatcctctatcgccgggaggattgttgaatgctcctggaataaggaagaacagtgttggtcctgtatgcgtattagatctgataaatctactccaaacgacatcaacacataccggaaggtgatgaggagtatcacagataacattaccgaggagaagcttctcgaagagactgatgagataacgctcctgccgatgtatgccgataggatgaatgttcctgttcatacagagatggcacatcatcaggcgaagattgccaccacagtgctagtctcgttgctagagtgctgggtcgctctcctagccagcggctggcttatgtagctgtgt

SEQ ID NO: 269378 - DNA, 389 bp, Zea mays
cccacgcgtccgcccacgcgtccgcgtcatgcctttaaaataatacagtaaaactcttcagccagcacgatgatatgctgggggacactcatcaggtctgagcagtgaagtgatccaaaatctgctgctggtggtaggtcaccatatatagctgggtacatatgttagctatagctggttacataatagagatatatatagttgtatacatgcatacatacactacacaaataatgtaggcgaaagatatatgtacatgcatgccagtatattgacaagggttgtcagtatctgtatagacataatctaaaaaaaggagatagaaacgtaggtagggtttggatttcattagcttggctagtagtagtagtggtcgagatcgatttgtg

SEQ ID NO: 269379 - DNA, 401 bp, Zea mays
cccacgcgtccgcggacgcgtgggggccgtttttgttacagtgcagtctaccaatggttcccgacttcccgttaaaacgcgcattgctcacatcaagatctctctcgtagtcgtgcaagtgaaaatgttcgttcggttgctttgatgcgcacgtaggactgtaggagtatagtgctactcctgtgtatgtcccccggttttttatttggtggtaaaaggagctctgacatgagagcagacacaaagattgacctttctcctgtagacgacgcagtatgctcgtcagctcgtcaggatgtagggctatagtagctgggtagctggactctttcctctccgtccttgtcctgaaacaagggctctcgttgttgtttgtgtcattcaattattttaaatttatt

SEQ ID NO: 269380 - DNA, 635 bp, Zea mays
gtatgtcattacctatgactttccggggtcactcgaggattatgttcatcgtataggtcgaactggcatagcaggtgcaaaaggaacagcgtacacctttttcactgcagctaatgccagatttgccaaggaacttattaatattctggaagaagctggacaaaaggtcagctctgaattagctgctatgggtcgtggtgcacctcctccatcttcaggttgccgtgatagatatagggggtatgggggtggccgatcgtggagttgacgttcaaatgcttagttgctgctaagagcaatgctttacgtttgtttgttgatggatatgttgttttggcgcactgataagagcaatgctttacattttggctagtattcggtaatgatggattcacatactctgggatattgacctgtctcgatgctagaaaagtggcatgatatcatgcctgcaatatcattagtttatttttagccatagtttcagattgacagcattgcccataattagctcacatcagaggtaagaatttgtagtaaacatcattccatccatgatttggtgctcaaaaaaaaaaataatatataatatatttgtggtttccgttcttaaagatccatgctttctttccttt

SEQ ID NO: 269381 - DNA, 1559 bp, Zea mays
gttttgccaacaatccaaatctttgtggccctggtacttcgaagccctgccctggggatcctgccttttccccaccgcctccattcaatcctccgtctcccccaactcaatctactggtgcttctagccctggagcaatcgctggaggtgttgctgctggtgctgcattggtttttgctgttccagcaattgcatttgcaatgtggcgccgtcgtaaacctgaagagcatttcttcgatgttcctgccgaggaggatccagaagtccatcttggtcagctcaaaaagttttcgttgcgggagcttcaagttgctactgatactttcagtaacaagcacattttaggaagaggtggttttggaaaagtgtacaaaggaaggcttgctgatggctcattggtagcagtgaaaagactaaaagaggagcgtacacctggtggtgagcttcagttccaaacagaggttgagatgattagcatggcggtgcacaagaaccttctccgacttcgtggtttctgcatgacacctactgaaaggttgttagtctacccatacatggctaacgggagtgtggcatcacgtttacgagagcggcagccatctgagccacctcttagctgggaaccaagaagacggattgcactgggatctgcaagaggactttcttacttgcatgatcactgcgatcccaaaatcatccatcgggatgtcaaagctgcaaatattcttttggatgaggacttcgaggcagttgtgggtgatttcgggcttgccaagcttatggactacaaggatacccatgtcacaacagctgttcgtggaacaattgggcacattgctcccgagtacctatctaccggcaagtcttctgagaagactgatgtttttggctatgggatcatgcttctggagcttattactggccagagggcatttgatctagctcgtcttgcaaatgatgacgatgttatgcttcttgactgggtgaaaggactgttgaaggagaagaaggtggagatgctggtggacccagatctgcagaaagcctacgaggaggtcgaggtggagagccttattcaggtggcactcctctgcacgcagggctcccccctggaccgtccaaagatgtcggaggtggtgaggatgctcgaaggtgacgggctggcagagcgttgggacgaatggcagaaagtagaggtggtgaggcaggaggctgagtcggcaccgctccgcaatgactggatcgtcgattccacgtacaaccttcgtgccgtggagctgtccggcccaaggtagccactccacgactccgatgaaagaaaacactgaattggccaagattcagtctaattgctgcttgtgtatatgaaaggtagcttttggaattgttagcgacaatttgaaaggatcgatcttttttttttggattcctcgctagctcagatgttggttacgctgaggttgtgttaaggtgaaaattcgtacatctaagggtgaatttctaaaaaaaaaaaaaacaaaaaacaaaaaaaaaaaaaaaaaaaagggcggccgcaccgt

SEQ ID NO: 269382 - DNA, 1754 bp, Zea mays
aagcgtggacgcctgcgggtgccccgccgcaatttccggggcgatcccacacgcataggcccagaggcagtgccgtgaccgattcgagacgcaagagaaggatcgagacgaggcggcggttttccggggcagcatcgtctcggccacgaagatgtcttactcaaggggctcaagtgaaaggtatggatctcgctcaccttactcgagaagcacaaggtaccgaagtcgctctaggagtgtcgactctagtgatgctgaaaaccctgggaacaacctgtatgtgactggtttgtcggctcgtgtaacggatcgagatctggagaagcacttctccactgagggtgaggtgattgatgcaagcgttgtgtatgatccttggacaagggaatcacgggggtttggttttgttaccatggctgctgttaaagatgcagatcgctgcatcaaatatctggaccgttctgtgttgcaaggtcgggtcataactgttgagaaggtaaaatcataagattgggagcatctaactttcttatttaacttggctactaaatgatatttatatcattccttagtactctacactgaacattttagtgctctgtccattgaagattttgttgacagcaacagggtagatgttggtagctgctctgcaacaaactgatacaacctaacaccaaaccatgccaacctcagccaaagggttgtatgccctacattgcatattatttttcttaaatatgtttattcagattgtagatgattgctctcttgcagtcttgcttttggtatcaaagacacttccttatttggtcccctattacacaggcaaagagaagacgaggtagaaccccaacacctgggaagtatcttggcacaaaatcatcccgtggacggaggtactccacaagctactcacctgatcggaggggccgttacagttcccgctactcacctgatcggagggactgtcatggtagagaccggtcatactctccatatgacagaaggcgatcatactctccttacggcagggatgaatcatattccccttactatggccggcgatcatactcaccttactacagcagacggtatcgttcaaggtccccatactgctacagaagacgcaggtcaccttctgtttcgccatactaccgccggcacaggtacagatctgtctccaagtcatccagttcatctccaagggccagaggacggagctattcgtgcagtttatcaccacagagaagctactcgcgcagccattccccagaatccgagagatcaacaagctattctcctaagaaagggagtaaaagggaaccctcgcgtagcagatactctggcaagagtcgtcattcaagggaaagccactctcatagccgcagttcgtactccaggtctgtgtccagggagcgctcagcttgatctgcgaggtgtgtcgtcctaggtggttataagatatgcgctgtatttgcatctatcagaacttgtgtacttcgtatattacgaacttgagaactgtatggatgtgtgcattgtgccaaattatgttcattctgtgctatctttctgatgctatcttgctattgttggtttgaacttggtaatttagtttacaaaatcattcgaaaaaaaaaaaaataatggtccacaacgtcgtatggggcaggattggtccttggaaaaaaaaaaaaaaaagaggttgttttttaaaggggatccaaaaattaccttaaaaaaaagggggg

SEQ ID NO: 269383 - DNA, 560 bp, Zea mays
ggttttgttaccatggccgctgttaaagatgcagatcgctgcatcaaatatctggtccgttctgtgttgcaaggtcgggtcataactgttgagaaggcaaagagaagacgaggtagaaccccaacacctgggaagtatcttggcacaaaatcatcccgtggacggaggtactccacaagctactcacctgatcggaggggccgttacagttcccgctactcacctgatcggagggactgtcatggtagagaccggtcatactctccatatgacagaaggcgatcatactctccctacagcagggatggatcatattccccttactatggccggcgatcatactcaccttattacagcagacggtatcgttcaaggtcccgatactgctacagaagacgtaggtcaccttctgtttcgccatactaccgccggcacaggtacagatctgtgtccaagtcatccagttcatctccaagggccagaggacggagctattcgtgcagtttatcaccacagagaagctactcgcgcagccattccctagaatccgagagatcaac

SEQ ID NO: 269384 - DNA, 655 bp, Zea mays
gtttgtgtcgtgaccgattcgagacgcaagagaaggatcgtgacgaggcggcggttttccggggcagcatcgtctcggccacgaagatgtcttactcaaggggctcaaggtatggatctcgctcaccttactcgagaagcacaaggtaccgaagtcgctctaggagtgtcgactctagtgatgctgaaaaccctgggaacaacctgtatgtgactggtttgtcggctcgtgtaacggatcgagatctggagaagcacttctccactgagggtgaggtgattgatgcaagcgttgtgtatgatccttggacaagggaatcacgggggtttggttttgttaccatggctgctgttaaagatgcagatcgctgcatcaaatatctggaccgttctgtgttgcaaggtcgggtcataactgttgagaagattttgttgacagcaacagggtagatgttggtagctgctctgcaacaaactgatacaacctaacaccaaaccatgccaacctcagccaaagggcacagtgcactcgagtgcatattatttttcttaaatatgtttattcagattgtagatgattgctctcttgcagtcttgcttttggtatcaaagacacttccttatttggtcccctattacacaggcaaagagaagac

SEQ ID NO: 269385 - DNA, 481 bp, Zea mays
tctctttcgcgtgggcggacgcgtgggcagaggcagggccgtgaccgattcgtgacgcatgagaaggatcgagacgaggcggcggttttccggggcagcatcgtctcggccacgaagatgtcttactcaaggggctcaaggtaagcactatttattttataaccttgaatgacctactttaaaaaccttcttgtttcaatttgtcttcaagtgatcttgctcggtgttctgatagtttttttacaagtgaaaggtatggatctcgctcaccttactcgagaagcacaaggtaccgaagtcgctctaggagtgtcgactctagtgatgctgaaaaccctgggaacaacctgtatgtgactggtttgtcggctcgtgtaacggatcgagatctggagaagcacttctccactgagggtgaggtgattgatgcaagcgttgtgtatgatccttggacaagggaatcacgggggtttggttttgt

SEQ ID NO: 269386 - DNA, 316 bp, Zea mays
ccggtcgaccacgcgtccgcccacgcgtccgccttttaactccctttcttaggagatactctggcaagagtcgtcattcaagggaaagccactctcatagccccagttcgtactccaggtctgtgtccagggagcgctcagcttgatctgcgaggtgtgtcgtcctaggtggttataagatatgcgctgtatttgcatctatcagaacttgtgtacttcgtatattacgaacttgagaactgtatggatgtgtgcattgtgcccaaaaaaaaataaataatgaagtttaaaaaaaaaaaaagaaaaaaaaaataaa

SEQ ID NO: 269387 - DNA, 764 bp, Zea mays
cccacgcgtccgggcgccggccatggcgggagggtgatgctggcgaggaagtaccagcaggctctggaagcgtctgtcgccaggaacttccccgacaatggcatcatatcgtgcatgagccacagcacggacaacttgtacagctcgaaacggagcgcggtgattagagcctctgacgatttctggccgagagaccccgcttcccataccatacacgtcgcgtccgtcgcttataacaccgtctttcttggggagttcatgcagccagactgggacatgttccatactgttcatcccatggctgagtaccatgctgcggctcgagcggttggtggctgtgccatatatgtcagcgacaagcctgggagccatgacttcaatctgctcaagaagctcgtgcttcccgacggatcgatcctgcgcgcaaagctccccgggaggccaaccagagactgcctcttctctgaccccgcaagggacggcaaaagcgttctcaagatatggaacctgaacgaacactccggcgtcgttggcgccttcaactgccaaggcgccggctggtgccgggtagccaagaagaacctcatccacgaccagcagcccggaacggtgagcggcgtcatccgggcgcaggacgtggagcaccttggaagggtggctgatcacggctggaacggcgacgtggtcgtgtatttgcacgtgggaggggaggtggtgtacctgccgaagaacgccttgctgcctgtgacgctgagatcgcgcga

SEQ ID NO: 269388 - DNA, 881 bp, Zea mays
cggacgcttgggcggacgcgtgggctataactagtcggcacgcgtgggctcaactgttctctggccgccgctctagttccggtttgccttgagggagcacgtggcggccgaagcaccccggttcggatacgatacacggttcagtgcgatgttataacacgtctttattggggagttcatgcagccagactgggacatgttccatactgttcatcccatggctgagtaccatgctgcggctcgagcggttggtggctgtgccatatatgtcagcgacaagcctgggagccatgacttcaatctgctcaagaagctcgtgcttcccgacggatcgatcctgcgcgcaaagctccccgggaggccaaccagagactgcctcttcttctgaccccgcaagggacggcaaaaggttagattcgcagctctctacgatggctggtctgttcttgttcactaagagccgtctgctagctgaatcccgtttgatgctcttttcacagcgttctcaagatatggaacctgaacgaacactccggcgtcgttggcgccttcaactgccaaggcgccggctggtgccgggtagccaagaagaacctcatccacgaccagcagcccggaacggtgagcggcgtcatccgggcgcaggacgtggagcaccttggaagggtggctgatcccgggctggaacggcgacgtggccgtgtatttgcacgtgggaggtaaaccatcattttttttaaatgaacagtcagatcattgtcaagctaggggacgtcagtctcgttctcgtgaccccttttcggtttcatcttgttaacaacggacaacgaactgtacttatcagcacatcagtgacaagcaactcttgttgtgttgtgtgt

SEQ ID NO: 269389 - DNA, 894 bp, Zea mays
cttccgccacaaaaataaaaaatttttttaaggaatcttagttttaatttcttccgaagggtccaatggttgaaaaggtccttgaaggggtccggccactgttagataaaataagacctttaaatgttggcctaaataatgaagcacaaattgcccccaattggagtagtactacccttccataaaatgggagacgaggacgcaatggggctaaccagttcgcggctccaatcaaatatttgcacattcatgaatgtgaaagcttctctatgggtatattttgtatgccaccttcttcagttatcccacttcataatcatcctggaatgactgtacttagcaagcttctttatggaagactgcatgctgagtcttatgactgggttgatgtacctgatcatccaattgatcaattgcaaccaaggccagccaagcttgttaaagattgtgaaatgacggctccagagacaactattctataccctaatgcaggtggtaacatccacactttcagagccattacaccttgtgctctctttgacgttctttctccaccatactccgctgaggatgggcgacactgttcatacttccgaaagtctcagatgaatcagccacctgttgttttgcctgctgagatagatagctctcaggtagtttggttggaggagttggaggaccatcagcccccagaaggctttgttgttgcgagaggtctgtataaaggccctgtaattaggagataatttgctttggggcacagaatccaccaaactgcaaatcagctgaaagacgatattgcaagcatcctcaggtcatgtgcagcctacggtttactttgtacatgtcaaagtgacctgtgataattcaacagcagttttacaggacaagaat

SEQ ID NO: 269390 - DNA, 453 bp, Zea mays
cgggtccggatttccggggtggccccagccttccggttttggatcgcgggcggccgttttggaggttccaggcttacgtccgctggcttgcgacgtattagtttttttttggggcaacctaaattaaattaactggccgtggttttccaccgtcgggcctgggaaacccctggcgttcccaaacttattggcttggcagaacatccccttttggccggttggcgtattaccaaaagggcccgaaccgttggcctttccaaccagttgcccagcctgattggcaattggacccccccctgtagcggcccttaaagcccggcggttgtgggggttccccccagcttacccgttccattggccagcgccttagcgcccgttcttttggtttttttcctttcttttttggccacgttggccggttttccccgtaaggttttaaatggggggttcctt

SEQ ID NO: 269391 - DNA, 440 bp, Zea mays
ccgggccgaccgcacgcgtccgcgcaaacagccaactgccatcaccttccccagccgttgcgcccgtccccccgccaccaagggccgaggtctccggagcgcgacctggctgcaacgcaggcaatggagtcgccgttccgcgcggacctgctgagggggaaggcggcgctggtcacgggcgggggctccggcatcggcttcgagatcgccgcgcagctcgcgcgccacggcgcgcacgtcgcactcatgggccgccgccgcgaggtcctcgacaaggccgtcgccgcgctccggtccgagggcctaaggggctgcaggcaggcgaacactttgtagttgtaactttggagtttaatattgccaatgcctttacttatcaaatgaaattcacaatgctccataccatgcttcaagctagtaaacaattcagcaacccaaga

SEQ ID NO: 269392 - DNA, 431 bp, Zea mays
cacgcaaactgccaactgccatcttcttccccagccgctgtgcccgtccccctgccaccaaggtccaaggtctccggagcgcgacctggctgcaacgcaggcaatggagtcgccgttccgcgcggacctgctgagggggaaggcggcgctggtcacgggcgggggctccggcatcggcttcgagatcgccgcgcagctcgcgcgccacggcgcgcacgtcgcactcatgggccgccgccgcgaggtcctcgacaaggccgtcgccgcgctccggtccgagggcctcagggctgttggttttgacggggatgtccgaaagcaagaggatgctgccagagtgatcgcagcaacggttgagcattttggcaaactggacattcttgtcaatggtgctgccgggaacttccttgcctccccgggggatttgaagc

SEQ ID NO: 269393 - DNA, 436 bp, Zea mays
atctcgctactgaggtatatctatggttgcttttgccggtcgggaactagagctgctatggcctgctagatgggaggctgggacatgtgtctcacaatagatgaatgatcagaggggggttttggtgtatgcgcctctcccggatgatgacccagggtgggacagggaaaacagccttttcactcgccctgaagatgatctccgcgagtgatcgacagatggcgccgcctacggagatgacgtttctttcacctcccattcttttttaatatatcatagtcatatgatagaggatgtcttctcttcttcttcttcctcctccctatctatctctactgtattgactcggtcagatactaatttctgtgaatataacttatccatcattgctataaaaaaaaaaaaaaagggggccgttttagaggatccaagctta

SEQ ID NO: 269394 - DNA, 468 bp, Zea mays
gaatggtcgcgcccacgcgtccgtgaatgttttccaggcggcggcgcggtagcgtgaaaccgggcgaccgagcaagcgacggccatggcgttctggcagacgcgcgattttctcttctgtggcatatgcggcaccctcctcaccttcgactccgtccgctccgcctcctgccctctatgcggcttcaagcgcgatgccaaagaaattgaagggaaagaaatacagtacacgatgaccgccgaggatattcgaagagggttaaagacacaaacggaggacgttgttgggcaaagaccagtgacaaataaagcctgtccaaaatgcgaccatccaaaagctgaattttacaacatacagatgcgttcagcagatgagggagagacgacgttctacatgtgtaaaggatgcggctgtaatttcaaagacgaatgaggagttatcctaccacttctacggatatatggcatt

SEQ ID NO: 269395 - DNA, 396 bp, Zea mays
ccttaatgacgctcttgcttcgcattctttttagctggcagctgtggttcctgtgcatgccgattaataggcgatggggatggaaaggagcttttaagacccacttgcctccggaaacaaggagccgccttacaattggtgttggctccaattttgcttgccagttccttcggaggatgctcggtatgttatttacgtacagctttatctttctgttagcattgctatgatgagaaacaatacagtgtgcctcggtgtaatattcatgttccttggagctgtatgttttgtacttttgtatataaatagttcaagttccacgagtggttgctttaaaaaaaaaaaaaataattaaaaataaattaattatataaattatttataatccttaaaata

SEQ ID NO: 269396 - DNA, 843 bp, Zea mays
cccacgcgtccggcaccagcggcgagatcatgcgcaacaggtgctcgggaagtggcccgccgacgtcacggcgcgcctcgacctcgtcttcgccgacgcgccgttccccgccgagggcaagtccgacggcgagggcatcttcgaccctccctactacgcgtggttccagttgcgacaagagttttatggagtacaggaatttcgacaagtgcctggcctacatcgaagagctgatgataaaagacggccccttcgacggactgatgggtttctcccagggttccattctgtcggcggcgcttccggggctccaagaacaagggctggccctgactagagtcccgaaggtcaagtacctcatcatcatcggtggcgccaagttccagtcaccgacggtggccagcaaggcgtacgccaacaagatcgcatgcccctcgcttcacttcatcggtgaaaacgacttcctgaaagtccatggtgaaaagctgatagaatcatgcgtggacccattcgtaatccgtcacccaaagggccacacagttccgaggctcgatgacgagagtttagtggtcatgcaccgtttccttgagaagattgagggggaggtacttgagtattcgtccaaagatgtcaacgaaaccgaagtgggcatgtgataaagactttagaccattagtacttgatgttggcgaaaaggctatacttgtactatttatttacagaatgaacatgtgatgtaacctcgattttcatgaggcatgattatgaaaaatacagaataatcgttttatattctaaaaaaaaaaaaaaaaaagaaaagaaaaaaaaaagaaaaaaaagaag

SEQ ID NO: 269397 - DNA, 546 bp, Zea mays
ggttcctgtgcttgcacgggttccgcaccagcggcgagatcatgcgcatgcaggtgctcgggaagtggcccgccgacgtcacggcgcgcctcgacctcgtcttcgccgacgcgccgttccccgccgagggcaagtccgacgtcgagggcatcttcgaccctccctactacgagtggttccagttcgacaagagttttatggagtacaggaatttcgacaagtgcctggcctacatcgaagagctgatgataaaagacggccccttcgacggactgatgggtttctcccagggttccattctgtcggcggcgcttccggggctccaagaacaagtgagagatcatggttcatacaagactcgaagcagagcaggtggttctgtattgcttgcttgctagttcttactctgtcgcctttgtgttttcgtggcaggggctggccctgactagagtcccgaaggtcaagtacctcatcatcatcgggggcgctaaggtccagtcacccacggtggccggcaaggcgtacgccaacaagatcgcatgcccc

SEQ ID NO: 269398 - DNA, 593 bp, Zea mays
cccacgcgtccgcggacgcgtgggtgcttctacgagaggatatagagaggaagaacagctcgtccgagaccatgaagagcagcccacacctggtgctgatcctgtgcctccaggccgctctggtcatgggcgtcttcgccgctttggctaaagaaaatgccctggttgagagcaaggccatcgacatcaacccggggcagctcaagtgctgcaccaactgcaacttctccttctcggggctctacacctgcgacgacgtcaaaaaggactgcgaccccgtctgcaagaagtgcgtcgtcgccgtgcacgcctcctactcgggcaacaacaagttcaggtgcaccgacaccttcctcggcatgtgcggccccaagtgctagatcagagaggaagaacgcgcgctgctgctagctgctatagcttcgttcttccggcggcggccggtgcatggttcacgtactgtgtgttgtgctactacgatacgtactggcttcttgtgtgttgggttcttgttcttctctcgacagtgcaccttgcgcgccaacaataaaccgtggttggccatgaataaatagtactatgaagttattggc

SEQ ID NO: 269399 - DNA, 539 bp, Zea mays
gcttcgtgaagaggagaggcctgaaaccggccatcagagcgtatgacaagctggtcctcatagggtgcgagcctggccaggtcacctacgcatcagtcatcaacgtgtactgccggctcgggcgcagcgacagagcagaggccatcttctccgagatgatcgagcgaggcttcgacaggtgcgtggttgcctatggcaacatgatctcgatgtacggcaagatcaggagggcgtcggaggccacgaggctgctggccctgatgaagcagaaggggtgcgagcccaacgtgctggtgtacaactccctgctcgacatgcacggcaggctggggaactcgaagcaggccgagaagatctggaaggagatggtgcggcgcaaggtccggcccgaccggatcagctacacggccatcatcctggcgaacaaccgggcgggggagctggaccgctgcatggagctctaccaggagttcagggagaccggaaggaaggtggacatggtcatggctggcctcatggttgggtgcttttcaagacca

SEQ ID NO: 269400 - DNA, 949 bp, Zea mays
tttttagtttggacaaggttgctgcacagaactacatctcaactcggcttcgctattctcttagagcatatgcatctatcttgtatcttcatgtacctgatactttcagaattatcctgcggggatgtgatgtggagccacataatgtagttaatgatttgatgtatcgggagtgcgtgttgtataaaccacaaattgctggacttacagagtcatctgtaatcacaaccattgggtttgttaaaggtgcaccagatatagatgtacaagggcttaatgtatatcacaaaaaccgtctaatattgcccttctggaaagttgcaaacaactcatacgggaaagggcgaggagttgttggcattctggaggccaactttatcaaacctacccatgacaagcaggattttgagaagtcagtcctttatcaaagacttgagttccgcttgaaagaaatgacttacgaatactgggaccttcattgccatcgtgttggatatgacaacaaaaaattacctaaagcaacccgtgctattaatcgtgccaatcatatgaacggtggcagttccccaacaagtgctccacctcggttgcttgcagttgatattccaacaagcagctctagtatacctagattatcagcctctgcagcaagagaaaagatcagtagtctcgattctcttcccaagagcatgattggattgaagaggaagtttaatcctttcggtgctgtggcggccagtgctgatcaggatggactacatcatatggataaaatagatgtttctcaacgaagacggtttaatgaatacaaaactttgaccctggagaatgacaagttgcgaaatgaatgcttacaatacgagggatcagagaaacaacttgtcctgaaggaacaaaagctccgatctgaaattgctgaggtggaaaagaagtatcaggaattgttggg

SEQ ID NO: 269401 - DNA, 427 bp, Zea mays
agagatcctcgcagttgacactccttcagaaggaggcgacgctgttattgtcagtagcagtgacaattctacatctactccttcagctgtctcgtggcgagcccggttcgttgggcaaggttacaagcaggtttgtgggcgagcggatgcgtccggcgacggcgttgttcctgagatggcagcgcacctggagggagcgctgaacgtaagctttgacggtgtgtaccactctccggggggttccgatgatgaacaaaggccctggtatggctctccggcgatcctcaagcagtgggtgcatcatcttctcagctgacatagtgacatacaagaggagctagctgccggaacagacagaaactgggatgtgtcctgcagctgacatgacaccattggccaccaaagggcaaaggggaattttctctct

SEQ ID NO: 269402 - DNA, 598 bp, Zea mays
gttagaaacttgtcgaagtcgtcgtagttttacgtgctcccgcccgtcccgtgcgccatggcacgcagcaacgccttgctgtggttgttgcttctcgcgctctcgtgctggtcgtggtgcggcgccgtcacggcgcggccgaccccgagcgccagcaccagcaccaccacggccggcggcggcttcatcaggtcgtggtgcgcggggacggactacccggccctgtgcaacgcgacgctggccccgtacgcggcggaggtcggggccagccccgcgcgcctgtcgctggcggcgctgacggtcacgctggacggcgcgcggagggcgacggccgcgatgaaggcgatggcggcgggcggcgcgagcagccaccacctcgtgcccgtggcggccgaggcggcggcggactgcgtgggcatgctcgaggacgccgtggacctgctgcggcagtcggtggaggcaatggagcgccctctgcaaggagcccgccagcgccagcgccagcgccagcgggcaggccgggcggagcgttaggttccaggtgaacagcgggcaaacgtgggcgagcgccgcgcttacgaacgacggtatgtgcatt

SEQ ID NO: 269403 - DNA, 718 bp, Zea mays
cggacgcgtgggcgcagcttagatcgagtccaagaggttccccatgagggacctatgtgcgatctcttatggtcagatccagacgaccgatgtggttggggcatctcccctcgcggtgctggctacactttcgggcaggacatatcagagcagtttaatcacacaaacaatctcaaactcgtagctcgggctcatcaattagttatggagggatataactgggctcatgagcaaaaggttgtcaccatattcagtgctccaaattactgctatcgatgcggcaatatggcatccattttggaagttgacgactgcaacagccacacattcatccagtttgaaccagcccctaggagaggtgagccagatgtgacacgaagaacaccggactattcctttgagttgtggtgttaccaattcccagcttgtgctgtgataatcgatgtcaacgtctgctggatcaagggccagacagaaataacaggggaataccaaagcactatgcgaaacttgaggtcctcattgccattggtcagtgcaagagatgtctgcaatcctgagagaaagcaattgtgccaagccatgcccgagtttcagccttttcaggtgatatagaggagcggccatccatttgttacagctctcgccgccctcccttttatgcactttttacagaggcttggaattggcaaaaaaagaccgaactttcaattgtact

SEQ ID NO: 269404 - DNA, 713 bp, Zea mays
tccattcgtccggtgccattgacatcaactcgattctcattttcctgaacgcctcgacggacgcaccacatttcctactggagctcatacaaggcagctcaacttcaacggtggtgtttctggacctgcttccacggaaagacctcgcgtttcacccggactaccggcggaagtactacgaggaaactggaatggatgagcagcgcagaaagatcgaggagctaccgcaggctcgtccatacagatctccgtcacttcttcgtgcgcagcgcatgctcgcctacagcaataatggtgagcattgactgtggacaagggggtgagaaagccttggaagagataatacatggacagttagcaaaggtcattcaggaggctcttcagacttggcttgacaactgtgttgattccaccatagagatggatgaggcggagagggactgcctgctcaagagggaccggattgtaaggtcgaaatcgatagaggttgacctgactgcaaaccttcccaggatgtttggtccggatgtgtctagtcgggtcataactgaaatccgcaaggcctttggtgtacaagacccgtaagtcgttcataaatacaagcatgtagttactcttattgtagagaaaaattgttgtgagtccatgaaacccccttatttgaacaatcgaaagtatatgtgctaaagttgtgtataaaaaaaaaaaaataa

SEQ ID NO: 269405 - DNA, 1319 bp, Zea mays
ctctctcctctccactcgcacactcgcaccctgcgtccgcctgccgcctaccccaggcggccccctcccatcgccatgcctccgtccgccgccgccaccgccgccgccttcctcttcccggccgtcgcgatcccctgccgcgtgttccctcaacggcgggcgaggagcctcgccgtccgtgccgtcgcctcccctccagccttcgcggtcaagcccgccccgctgccctccaagactggaaagtgggagtggaaattcgagaacaagccggtaaacatatactatgaggaacatgagcaggaggttgctgagaatatgaagaacattctcatgatccctacgatctctgatgtgagcactgtggaggagtggaggggtggttgccaaagatattgttgggcggaaaggagaacttggctaccgtgttacaattgtcgattggcctggtcttggttattcagataggccatcactgaactacaatgctgatgtgatggagagctttctggttgaactaatgaattcaccaaacagtccagtcgcaaatgcagatgatgaactgatcattgttggaggtggtcatgcagcaaccatagctgttcgtgcagctggtaaagaccttataaaaccatctgctgttgctgctgttgcacctacttgggctggaccccttcccatcgtatttggccgcggttctgatatggaaactaggtatgggcttctacgaggaaccctcagggctccagccctgggctggatgatgtacaatgttctggtgagcaatgagaagtcgatccagtctcagtacaagtcccacgtctacgccaaccctgacaacgtgacgccagatatcatcgagagccgatacgagttaaccaaaagaaaaggcgcacggttcgtccccgcggccttcctgacaggcctccttgatcctgtccaatcgagggaggagtttctgcagttgttcgccaagttagacggagacgtaccagttctggtagtgtcaacggtcaatgctcccaagagatccaaggccgagatggaggctctaaggggctctaaaggggtgacgaagtttgtggaggtcgcaggcgctcttctaccgcaggaagaataccccttggcagtcgcggaggaactctacagcttcctgcaggaatcattcgcagcaagaaggtgaatgtgcgtgcgtgcgtgcgcacaactgtgccagaagacaggttctcaagtcccacacatcgtgagtaaattcgttagcctgctacagtgtactggaggtttttagcaacaataaagcggcatcactcgttcccttccct

SEQ ID NO: 269406 - DNA, 619 bp, Zea mays
cggaggcacctcacacacacacactctctctctctccactggctgacgccgcgaccgccccaacccaactgcccttttcggagatctcgccgcctccgccgtcgacttccgtcgcccccctatcccgcgtccgggcttacccgatggcacggctgcactggcttgaggccgtcctgccgctggggatcatcggcggcatgctctgcatcatgggcaacgcccagtatttcatccacaaggccgcgcacggcaggccgaagcacatcgggaacgatatgtgggacgtcgccatggagcgccgcgacaagaagctcgtggaacaatcctccggcaactagggtattgatcaacctcaaacttttctggatgttgacgaacctcgttcaaaagcacagaagtactgctcttttgtttcctgtacaattggaaccaagacttgtttgttttgctttgaaatatcaacagttcggagaataatctgtatctgacatctgtttaattgaacaaagccaaatactttgtcaattgtgtatgcacaattatttccgccgccggggcagatccatgaacaccggaaaaaaacatgtttcacagtttataaaaaaaatgaataatatta

SEQ ID NO: 269407 - DNA, 554 bp, Zea mays
  unsure (1)..(554): unsure at all n locations
attttgcaagctgttttatctgcaatcagcaagggcatttgagcaagaactgccctgaaaacaaacatggcatctatccaaagggtggttgttgtaaggtatgtggcgaagttacccacttggccagacattgtccgaataaagggagacaagatttgatatcctccagagatgatgatgtcaacatggaagagcacagtcaggaatgtcctgcggttcaccatggtggagatgacctagaagatgatttcgttaatgaagaagaaccaaaacccgccaaatcaaagaaggcaaagcaatcaggttcaagaccagccacagggacgggaaatgacgtgaagagcgccagtgccaagacaaaagcgaaacaagctcctaaagttgtaaaattctttggttaaagaatgggaattttgttgtagcttaagatacgaatgttccatctggacaaccttgtactgtcaagcggttgtgtgtaacgctgatgncgatgagaatacgtcagaacactgcatacgacaaaaaaaaaaaaaaaaaaaaaaaagggcggccgc

SEQ ID NO: 269408 - DNA, 558 bp, Zea mays
attcatctcgtctgtcaagatccttgaagataaacctgatctttcacggtggactctgaagtacgaggtgcttgggcgggatgtagaattttcttggcttgcacgtaacatgacacctattaaaaaccagaagatccattggcgatctcttgaaggtcttgctaatagaggtgctgtccggttcttccccaaaagctcatcctcctgtagagtacaactgacggtggcatatgaagttcctgaaattttggccccagttgcatcagcactgaaaccgtttctggaaagcttgcttctcaaaggtttagagcgctttgccacatttgccaaggagcgtaatagcaagatactagtacaccatactagttccattctagtgaagccacataacaatgcatgtaaagaatgatgtcattatggatgtgcccaaataatgtacccaaagagaagtgaatacaaatctgtcaaaagttgaagtctgcttcatgctgtatgtcattgtagtgttataacgccattataaaatcttgaatataattattggtagcattacatgcc

SEQ ID NO: 269409 - DNA, 579 bp, Zea mays
cccacgcgtccgcccacgcgtccgatcctattatgggagctttaaggatagaatgaaccagtgtagtagagaagacggaatgaatagcatgtctcaaatgatgcagcatacttcagcctaatatcccttcccattgtttcattctatcctattatgggagctttaaggatggcttatccaaataaatatgagatttatcgaagggttgacactctcaatggaaaagagaactatattcttatagctgaattcacgaacaagccaactcctgatgagatcaccagtgctttcaaaggacaaaaaagggaagaaaaggcatcttctggattctggggtttcttaagtggtttattttaagtcaagcgatctgctgtacggcgatgcaatcctcctcgtatatttttatctgataagggtttggtgccgtgacccacagcgacaaggtaaagcaccttggcgccgagatctcaggcctgcgttgtgggtgactgggtgtggcctggtaacttggcactgatgttgtgggaccttggctccacaggccgtgacgttgagtttggcaaatgctttaaaagatgt

SEQ ID NO: 269410 - DNA, 549 bp, Zea mays
cccacgcgatccgcccacgcgtccgcccacgcgtccggacggaatgaatagcatgtctcaaatgatgcagcatacttcagcctaatatgggagctttaaggatggcttatccaaataaatatgagatttatcgaagggttgacactctcaatggaaaagagaactatattcttatagctgaattcacgaacaagccaactcctgatgagatcaccagtgctttcaaaggacaaaaaagggaagaaaaggcatcttctggattctggggtttcttaagtggtttattttaagtcaagcgatctgctgtacggcgatgcaatcctccttgtatatttttatctgataagggatgtaatatggttcggaaaatatccgttcggatccggattcgaagatggtgaacactggttcagatggaattttcggatatccggacttttttcggataacggatacgaatacggatattttgttcggatatcgaattcgaatacaatatgtctgacattcgtcggatatcgaatatctggatattttctcggataaatc

SEQ ID NO: 269411 - DNA, 950 bp, Zea mays
gcaccaccaagccctggctcttatattgtcaagaagatcgttcgcttggaagttcccgtcgactcttaccctaatggccaaggggtaattctctaaagcgagttgaagcatcaactggctgccgtgtttttattagagggaagggttccgtcaaagacacagaaaaggaggacaagcttaaaggaaaacctggctatgaacatctgaacgagccactgcatatattgatcgaggctgagttaccagcgaacatcgttgacacaagactgagacaggcacaagaagtcatggaggaattgctaaagccagtggacgagtcacaagatttgtacaagaggcaacagctgagggagttggctatgctaaactctactctgagagaagacagtcctcaccctggaagtgtctcccctttcagcaacggcggcatgaagcgcgcaaaaccaagccagtagagaaaggtttcaggctctcctccaccctcctccactccagtcgttcttggtgcagcaccagcaaggtgtgcctgcccttgaacctgcgctgcttcgtgtcgtgggtgcttgtgtaagaaaaaaaaggtatatgcattttgctgctgctggacggacaggtggtcgagacgaggaggaaatcgctggtcgttgaactgtctccatcttcggtggatccggccattttgctgctgtaaggtgatgggcattcgttctattcgttactgactgttgaccagattatgatgccgtggtttcaggggagactagctatgcctatggccctgataattagtgtgagctggttcgtttaggtgtttaattagtttgtattattattattcgcgttacgttgtggagtagtagcaaacgtcacagctggtgatgcactccgctctgacagtttgatgaggacagctttgaataaaccatgtgaattcaggttgattttggtgg

SEQ ID NO: 269412 - DNA, 671 bp, Zea mays
tcggacgcctgggcggacgcgtgggcggacgcgtggtcttacgcgtgggcggacgcttgtgcagacgcgtgggggaagaattgctaaagccagtggacgagtcacaagatttctacaagaggcaacagctgagggaactggctatgctgaactcaaccctgagagaagacagtcctcatcctggaagcgtctcccccttcagtaacggcagcatgaagcgcgcgatgccaagccagtagagggaagcttctggctctcctccaaccctttgagtcgtccatggcgcggcaccgacaaggcggtgcccttggaactcgcgctgtccgtgtcttgtctcgtgggtgcttgtgtaagagatggtatgcatctgctgcttgacaggatagtctgggtaccaggtgcgtcgtcgtctcctggagacgaggagggatcggtggccgatgaactgcctttgatcttggtgggtggatccggccgtgctgttgttgtaactgcttgtaagggtgatggacattattcgttttattcgttgttggctgttaaccctgagtagattatggtgctgaggagatagtggtttcagtgggagactagttaaaccctgatagtagtgtgagctgttcgtttaggtgtttaattagcttgtactattctcgaatatttgtcgtccg

SEQ ID NO: 269413 - DNA, 471 bp, Zea mays
attcccttgtggaaccactcgtccggccggaaaagagaaagcaggagcaccaattcggcgcatagccaagccaaggaaatggcgcactaccaccccgtgtccgcggacacttaccaagacctcgaggctggcttctccggccactcctcctcccctctgaagcccgcggcctcgccgaggcggcccggccgcatgttctgcgacccctgcgacgacggcgacgagctccacggccgccaccactacctcgacatctgcttccggtgccgtaaactcctgtccggcaacagagacatcttcatgtacagaggtgacctgccgttctgcagcgaggagtgccggcaggagcagatcgagatcgacgaggcgagggagcagcggctgaagcagacggggcgggccgagcagcagcggcagcggcagcagaagcagagcccccagaggatccccatctgggcgtggtaggatgag

SEQ ID NO: 269414 - DNA, 855 bp, Zea mays
gggtccacgcacgcgtccgaactgctgcacgcgcggaccgacaaaaatccagcactagccaaagcacaggcgaagaagcagcagcgagaggccaccacaaacatggcgaccacggcgtttctacccccggccaagctgccgctgcaggggcgtcggttcgctagccccaaaacggcgggacgtatcagcgtcagggtccctccggcgcgagcgcagcaagagcagcaggtgaaggaggaggaggccgaggtggcgagcgtgccgccgccacaggacgcggagaagcaggcgaggaagggggacgcgcagtccctgccgcggcagcctttggcggagagcaagaacatgagccgcgagtacggcgggcagtggctgagcagcaccacgcggcacgtccgcatctacgctgcgtacatcgacccggtgaccaacgcgttcgaccagacgcagatggacaagctgacgctcatgctcgacccccaggacgagttcgcctggaccgacgaggcctgccagatggtcttcaacgagttccaggacctcgtcgatcactacgagggggctgagctgtcggagtacacacttcggttgatcgggtcagaccttgagcactacatccgcaaactgctgtacgacggggtgatcaagtacaacatgaggtccagagtcctcaatttcagcatgggcaagcctcgcatcaagttcaacagcaaccagataccagaaaagatatagaatgtacttatccaacgcccttaaaagaatggtttctctccattcgattaccctgcaagatgtatactctgcagtcccagatacgatccagagcattccagaattcatattacgcagatg

SEQ ID NO: 269415 - DNA, 463 bp, Zea mays
  unsure (1)..(463): unsure at all n locations
cgggcggaanacccggtcggcgacgcgtacggaagctctcaactacttatttctcctgattcctctgatcaacgttatgattccattcttcgtgaagtcctttgctgttgtttggtcagcagatacagttgctttcttcgtgatgtatgcatggaagcttggatggctgcaaaggttgaaatgaagatttttggtgtgctctcttggtgatgtgtgtatgaaagcttggatatttggtttgaaaaggtggagtcggtagcttttttgctgagagaaacatttgtcctcaaaattttcacatcttttggagggagctgcatgattagtttattccaagatttagttcatatagccttttatatcttgtgtatatgcagggagtatgaaaaaacagcctttcacatttaagtgataaatatatgtacctgaagtctggacatttttgttgactacgaactgaaca

SEQ ID NO: 269416 - DNA, 350 bp, Zea mays
gatttgtcctcaaaattttcacatcttttggagggagctgcatgattagtttattccaagatttagttcatatagccttttatatcttgtgtatatgcagggagtacgaaaaaacagcctttcacatttaggccttgttcggttagcttccaatccacatggattgagtgggattgggtgggtttaaatcccaactaagtcaaactctttcttaattttttccaatctcatccaattcatgggtaacgggattaaccgaacaaggccttaagtgataaatatatgtacctgaagtctgaacatttttgttgactacgaactgaacagctctaaatggttcttgatttctc

SEQ ID NO: 269417 - DNA, 1050 bp, Zea mays
aatagacttttgtcctggaggagaattatttgcactactcgatatgcaaccaatgaaacttttcagagaagaatctgcaaggttttatgctgcagaggttgtaattggcctggagtatctccattgccttggaataatataccgtgacctaaagccagaaaacattttgctccaagaggatggccacatcgttctgactgattttgacctctcgtttttgacttcctcaaaacctcatgtgataaagcattctacatcaaggcgaagaagatctaaggagtatctgcccccaagctttgtttcagatcctgccactccatcaaattcttttgttggaactgaagagtacatagctccagaggtcatcactggtgtaccacatacaagtgccattgattggtgggctcttggaattctcttgtatgaaatggttgtatggacgtacaccttttcgaggaaagaacaggaaaaggacatttcataatatcctgcacaaagaccttacatttccaagtagcattccggttagtcctgcggctaagcaattaatccatggattgctacagagagatccctcttctcgacttggttcaagtgctgctgcaaacgatatcaagcaacatcccttttttgaagatatacactggccactcatccgttgcatggagcccccagagcgtgatgttccgctgaaactaactcggaaggaacctgaacaaaaagtgaagcctgaggaggatatatactcatgttcagattattgagacattttaagggcaggttgtacgatccccccctcccgaccccgtgcatgactttcagcctgaagagattttatattaccgagtggaaataacgttgctgagcatgtacatagtaataaaagaggtttataggcatgcaagatttccagcctgaattgcacaagaggtcgttgtaagtcattcttttggttaggttaagtgaataatccatcaacaggataaagttcttgtaaatgtacactttctttggcatatataataaaaatcttactaatttccgttggtc

SEQ ID NO: 269418 - DNA, 1086 bp, Zea mays
tggagatcgccaagagcccccgcgtgggcgccgccgacctcgcctccatccgcatggtcatgtccggcgccgcgcccatggggaaggacctccaggacgcgttcatggccaagatccccaacgccgtgctcggccaggggtacgggatgaccgaggcggggcccgtgctggccatgtgcctggccttcgccaaggagccgttcgaggtcaagtccggctcctgtggcaccgtcgtcaggaacgcggagctgaagatcgtcgacccagacaccagcgcgtcgctgggacggaaccagccaggcgagatatgcatccgcggcgaacaaatcatgaaaggttatctgaatgatccagaggcgacaaagaacaccattgataaggacggatggctgcacaccggggacattggttatgtggacgatgacgacgagatcttcatcgttgacaggctgaaggagataatcaaatacaagggcttccaagtacctcctgcggagcttgaagcccttctcatcacacatcctgaaatcaaggatgccgctgttgtctcgatgaaagatgaagtcgccggcgaagtcccggtggcattcattatacgcagtgaaggctctgagatcagtgagaacgagatcaagcagtttgttgcaaaggaggtcgtgttctacaagaggatcaacagagttttcttcacggattctatcccgaagaatccctccggcaagattcttaggaaggacctgagagcgcggcttgccgcgggcatcccaagcagtgacaacacacagtccaaaagttgatacgtactttcgtactattcttttctagctgtgccaaaaatcatgctgtgctctattcatgagatggcaatggtatacacaaaacgccaagcggtcgttatcgattcttctagatgggcaagggtaaggtatacttcgtttgtgtccgacatattatgtatttgtatcatgtatagatacgttttgttgacaacaagtgctgattataatgtataccatgtttgggaacctattgcccttgttcaaaaaaaaaaaaaaaaaagggcggccgctcgcgatctagaaccga

SEQ ID NO: 269419 - DNA, 427 bp, Zea mays
tcccacgcgtccgcccacgcgtccgcggacgcgtgggcacaactccaccgctagcagcagccaacggactcccgtcgggatggccggggcgctcctcctcctgctggtgacgcccgtcgggctgctcgccgcgctcgcgctcctcacgcggccccgggccgcgcgggtcccgctcaaaggccgccacgtcttcatcacgggcgggtccagcggcatcgggctcgccatggccacggccccggcgcgggagggcgcgcggctctccatcctggcccgcaaccccccccgccttgaggacgcgcgcgccgtcatccagcgcgactcggcgtggaccgacgtttggcgtcatcgcgtcgacgtgcgggacgcgtttgccgtcgcgcgcgcgctcaagaagccggccgttttacgttcttgtctgcaacac

SEQ ID NO: 269420 - DNA, 725 bp, Zea mays
attctggagggcggcctttttgtcatcaatttagtctcgcggtcagcctcagtgagggaaacggttgtttcaagactgaaagcggtcttcgaacacctgtactcactgcaacttgaagaagacataaatgaggttctgtttgcatcaccgagcggaagattcctagaaatcaatgacattactgcaggagcctccaaactgcaggacttgctcaaaattccggttgatgtagaatcagatatacagaagttgcagaaactccagtaacaatctcacctgacgcggagcaccatccatttgcatccacttgatttaggtgctgttcagttctcaccccagcagggcacaccaaaatgtcctttgttttgctcgtggaagccaaattgggaccagctgttttggacaccagaattttgtccaactgcgctatagaaaatttttggcctgccagaatgtcttttacaaccaaagaggtgaaaaatctggcttgacctgattgggcctagaacaggctagagcgcatttcaaactttgaaacctccacaaattggccgtgttttcccatatgttcaactctgcatgggtaaaacagtgcagctgtacagatttaatagcaattttttagatttagaggatgtgtggtggaaacataatgtgcatcatggtctctgatggtttacaaatttcagcgaatatattgatcagaattcaggctgtgttgtgat

SEQ ID NO: 269421 - DNA, 507 bp, Zea mays
  unsure (1)..(507): unsure at all n locations
gtnggtcncggctcgcgcggcgccgncctctccgagtgtctacgcacgaacacagcacgcgccgcaccccgctctctctctcctgcgttcccatctgccggcggggagtgagcacattgaggacggtctactcctcgttcgcgtgcggttcgtcccgagcgatccggcaaccatgaacatcttcaagaagaaggtcgaccccaaagaggctctcaggaccagcaaacgtgaaatggcggtcgccacgcggggagttgagagagagattggttccctgcaaatggaggagaaaaggctggttgcagagataaagaagactgccaagactggaaatgaggctgcaaccaaaatattagctcggcaacttgtcaggctgaggcaacaaatcctcaatttgcaaggcacacgggcacagattcgtggagtagctactcacacacaggcaatgtatgctggcacttcaatctctgctggaatgaaaggtgcaagcaaagctatgtcagcaat

SEQ ID NO: 269422 - DNA, 428 bp, Zea mays
gcttgacgtcgcatgcacgcctcgtagcctggaatccctaaagtcgacccacccgtccgatggcagcgccgagctggatccggctccggcagtcgcgtgcaaccctcctcatcctgctgctcattgccctcaacatctccccctcctccgccgccaacttcgagggcttcgactccgacgaccttcccgccgcggccggcggcctcgatgctgacgatgacgaggaaggcctcgacggcgtcgacctcccgccccctccgcccatctccctctccacctctgcgccatcacctcccgtcacgacgacatccgcgccgaaccctaaccccgctacgcgtacgcctcgggaccccaccccggcgctcgacctctgggacgaggacgagttcgagggcatccccgtgccggaagcgatccccttcgacgac

SEQ ID NO: 269423 - DNA, 424 bp, Zea mays
  unsure (1)..(424): unsure at all n locations
cccacgcgtccgcccacgcgtccgttcactcgtccgcccacgcgtccgcccacgcgtccgagcacagcaccaccgcgctagtcatccccttcgtcgtcccccagcacacacacacccttcctccgctgcctcagctatggcagcgccgagctggatccggctccggcagtcgcgtgcaaccctcctcatcctgctgctcattgccctcaacatctccctttcctccgccgccaacttcgagggcttcgactccgacgaccttccctccgcggccggtggcctcgatgctgacgatgacgaggaaggtctcgacggcgtcgacctcccgccccctccgcccatctccctctccacctctgcgccatcacctnccgtcacgacgacatccgcgccgaaccctaaccccgctacgcgtacgcctcgg

SEQ ID NO: 269424 - DNA, 896 bp, Zea mays
tcccacgcgtccgcccacgcgtccgcacacacacacactctctcgcttgacctacccccctccgccccccgccgggcctgcagggtgttcgacgcttcgcccgcccgcccgagcgccgccacggcatggcttcctccatctccgccgccgctaaggcctccgcggccttcgcccacaagaaggagctggccgcgccggcgccgcaccgcgcgggctcgagccgccggaccaagccgtgccgcgtgcgcgccgtcgcgtcgcccgcgcgcaccccccgcgccccgtcgtccaccggctcggtgaagaccgcgatgacgatgacggagaagatcctggcgagggcgtcggagcgcgcggcgctggagcccggggagaacgtgtgggtggacatcgacgtgctcatgacgcacgacgtctgcgggcccggcgccttcggcatcttcaagaaggagttcggtgaggatgccaaggtctgggaccgcgcgaaggtcgtcatcatccccgaccactacatcttcaccagcgacgagcgcgccaaccgcaacgtcgatatcctcagggacttctgtctggagcagaacatcaagtacttctatgatatcaaggacctcagcgatttcagggctaatccagactacaagggtgtctgccacattgcacttgctcaggaaggccactgccgaccaggcgaggttctcctgggtactgattctcatacgtgcaatgctggagcctttggtcaatttgcaaccggaattggaaacactgatgcaggttttgtgatgggcactggaaaggctcttctcaaggtgccacctactatcaggtttgtattagatggagaattcccgccttattaacttgcgaggtctcggatttcgcaaattatgggtgag

SEQ ID NO: 269425 - DNA, 437 bp, Zea mays
tcgtcattaccgcctcgtgtgcagcgtgctcgctcacctcctctgtcgacgcaccaccccgaagaccccccgccgcgctcgcagggtgttcgacccttcgcccgcgcgccctcacgacatggccgcctccgtctccgccgccgccaaggccgccgcggcgttcgcgcacaaggtccagaaggagctggccgcgccggcgcagcgccgcgcgggcttgacccgccggaccaagccgtgcagcgtgcgcgccgtcgcttcgcccgcgcgcgccccccgcgccccgtcgtccaccggctcggtgaagagcgcgatgacgatgacggagaagatactggcgcgggcgtcggagcgcgcggcgctggagcccggggagaacgtgtgggtcgacgtcgacgtgctcatgacgcacgacgtctgcgggcccggcgccttcgaca

SEQ ID NO: 269426 - DNA, 668 bp, Zea mays
agagctatacgtccatgcagcctacctagcctggattccttaaaagtcgacccacccgtccgggggaacctgagctccatgagggagcacgccgatctactcagctccgtccgagacgacatcaccgagtccagggcctccggtggcatgtcgccaagagtgcatttgctcagggaacgagcttccattcatggcagcatcaaccagattgatgaggtaattggccaagctcaaagcacaagagtagctcttaacaatcagagggccatgtttggagacattcaagggaaagtgaagcagctgggtgaaaagttcccggtaatcagaggtcttcttggtgccatcaagcggaagaaatcaaaggacaccataatcctctcggcagtgatcgcggcctgcaccatcttcctgatcatttactggctttcgaaatgatgggtcgcacctgagagaagctcccgatctcccttggcccggattagctggttgatatcagatagctgtatcgtctgcctcaccgagaaagatggaacgaacgagagatcagtttcttcagcttttcattgattttgttcgacaactgttgtgccctgtatctgagattccacatgtagagaatttttgctggttcagtaaatacacatatacatgcatggtaacatcaagct

SEQ ID NO: 269427 - DNA, 477 bp, Zea mays
atcagaggggccatgtttgaagaccttcaagggaaagtgaagcagctgggtgaaaagttcccggtaaccaagggtcttctaggtgccatcaagcggaagaaatcaaaggacaccataatcctctcggcagtgatcacggcctgcaccatcttcctgatcatttactggctttcgaaatgatgggtcgcacctccccccacccggactcctgcagctccagcgccgtgccgcgtccgacgacgacgacatcatctccggcacggcgccgcgcgagatccgatccggctaggggtctggggccggggccgcttgtgatgcgaaggagaagcgcggggagtggggagtactcccgatctggatccggccgcgtgccgtcgtggggaggttcggactcgcaaggaggatcaaacggccgcggcggcgacggaggaggaacgtctgttcgatcggaggcgagggcagtttagccggtggaga

SEQ ID NO: 269428 - DNA, 644 bp, Zea mays
cggcccttttgtccgcccccgcgtggggccacttcctgctctcgctccgccgccgccgcctccctccccagtcgatcaccaaacctcagtccaaactccaaacccccgccgcatcagaaagaaaccctaggccatggacgccgcggcgctggagtcgctcatcctggacctccacgccatcgaggtcgtgaagctgggctccttcacgctcaagtccggcatcaaatcgcccatctacctcgacctccgcgcgctcgtctcccacccgcgcctgctctccgccgtcgcctcgctccttcacgcgctcccggccacgcgcccctacggcctcgtctgcggcgtcccctacaccgcgctccccatcgccgccgtcctctccgtcaaccgctcaatccccatgctcatgcgccgcaaggaggtcaaggcccacggcaccgccaagtccatcgagggctccttcagccccggggacaccgtcctcatcatcgaggacctcgtcaccagtggcgcctccgggctcgagaccgccgccccgctccgcgccgaggggctcgtcgtcgccgacgccgtagtcgtcgtcgaccgcgagcagggtggcagggagaacctgccgctaatgggatcacgctgcactcgctcatgac

SEQ ID NO: 269429 - DNA, 979 bp, Zea mays
gctgttgtggaggacaagcgcagcatctccggcaccttcgccgagctcaggcagcaggggaagactgccttgattcccttcatcactgctggagaccctgacttggccaccacagcaaaagcactcaggatccttgatgcgtgtggttcagacgtgatcgaactgggtgtgccttactccgatccattggctgacggccctgttattcaggcctccgcgacgcgcgctctggcaaagggcaccacatttgaggatgtcatctccatggtaaagggggtgatacctgatctgtcctgccctgtagcgcttttcacatattacaacccgatcctgaagcgtggtgtccccaacttcatgagtattgttagagaagctggggtacacggtcttgtggtaccagatgttcctttggaagagacagatgtcttgaggagtgaggctgccaaaaacaacctagagctggtgctattgacaacaccgactacaccaaatgaaagaatggagaaaattgcacaggcttcagaaggatttatttatcttgtaagcactgttggagttactggtacacgtgcaaatgtaagcggcaaggtgcaatctcttcttcaggatatcaagaaggtgacagaaaaacccgtggctgttggctttggtgtgtcgactccagagcatgtccggcagattgcaggatggggcgcagatggtgtgattatcggtagcgcagtgatgaagacgttggaggaagctgcttctccagaagaaggattgaagaagctagaagagttcgccaagaacctgaaggccgcattgccgtgaaccaaccattttcgttagcaaagaaattaagattttttttttcctttcaatcttggctttcagggttgttggttgttgtgcagtgcaaataattgtgtccctatgttgaatgctcaaatgaataaatcaagcggacgcgtgacgggtaggttgaggcgggaattcc

SEQ ID NO: 269430 - DNA, 557 bp, Zea mays
ctttaaatccaacccacccgtccgcaatatttaaaactgctcctctccgatagggagtcacttttggatgatcttgagggcgaaaactctaatcaaagtgattcagatcgtgtcacactagcaataagtattgaggacacaggtgtcgggataccactgcaagcacaagatcgtgtttttacaccgtttatgcaggctgacagttcaacttcaaggaattatggcggtactggcatcggtttaagcatcagcaagtgtctagctgaacttatgggtgggcagataagtttcaccagccatccttctgttggaagcacgttcactttctcagccacactgaagcactcatacaaagatatttcgggtgattcaagtaggagcttgacagaggcactaccaactgcttttaagggaatgaaggccatcttggtagatgggagacctgtacgtagtgctgttacaagatatcacctcaagaggttgggaatacttcttcaagttgtgaacaatatgaacgcaatagtaaaagctttcccaggacaaaatggagcagccgg

SEQ ID NO: 269431 - DNA, 1043 bp, Zea mays
agaaaatagagcctgctccgcagaccaataagcccaaaggcgccatcaaccgagagccttcgtcttccttcttcatcctttgctcctcttcaaacgctcgagaaagagagagagagacgaaaccctccttcgaaaccctagcatagccactgccttcccgcacgctaggaaggggaagatatgggcgccgaggaggacgccgctgcacgccgcgagcgtctccgcgccctccgtgccgccaaggacctcctctccacccccgacggcgccccaaccccttccaccgacggagaacaccaaaatggcaaccatgagatggcagaagagccagaattaccaggtcatcaggatgcacctggtgaggctgctaaagaggatggtagccccactgaggaggccgaagaggttgaagatgatggtgagcttccagccatgaagttcagaaactaccttccccatgatgaacaacttcgaggaggcaagctggctccagtgtctcttcccaagtttgaagacccaattagtgccgaaactgcagagccaaaggaagtggagaacctttttggaaacatagcaccaaagaatccaaattgggatctgaaacgtgatgtgcagaagagaattgataaactggaaaggcgcacgcagaaagcgttggctgagattgcattggaacagcagagggagaaggaagccttggaggaatctcaagattgaccgacctgtataagtgaccagtgactcatgctggttggtccctcgagcagacgtcattatcttatttagataatgtaatgtactttgggatgctttgtgtatctaccatcttgggatgtactgaattgagtttgggacgtgtattgtcagctcaaggatgtagcaaaccagtagtaacttcaaaaaaaaaaagatgtagcaatcctgttctgttagacggacctggtcaaactcccgtactgaatacaaacaaagcacaccttcatgctgtgttggactcggtattctcaggcaatggacgaataactgacttcttttgttgtgtt

SEQ ID NO: 269432 - DNA, 421 bp, Zea mays
ataaactggaaaggcgcacgcagaaagcgttggctgagattgcattggaacagcagagggagaaggaagccttggaggaatctcaagattgaccgacctgtataagtgaccagtgactcatgctggttggtccctcgagcagacgtcattatcttatttagataatgtaatgtactttgggatgctctgtgtatctaccatcttgggatgtactgaattgagtttgggacgtgtatctacctaccatcttgtattgtcagctcaaggatgtagcaaactagtagcaacttcaaaaaatgagatgtagcagtcctgttctgttagacggacctggtcaaactaccgtactaaatacaaacaaagcacaccttcatgctgtgttggactcggtattctcaggcaatggacgaataatgccttc

SEQ ID NO: 269433 - DNA, 303 bp, Zea mays
  unsure (1)..(303): unsure at all n locations
aggatgcacctggtgaggctgctanagaggatggtagccccactgaggaggccgaagaggttgaagatgatgggtaaggccatgaagctgacaatctttactcagtatatgacgatgcacttcttatcctactcataattcgcacctgtttgcagactccatatatgataatagttcatgtttttgttcattttgtgaaattctatgtacgtgaaaaataagagtctctagcttggcattagtggtttttaagtctgggttgtttcttaatgctgtgtgagcgagttaataattttatagaag

SEQ ID NO: 269434 - DNA, 1276 bp, Zea mays
gccacggacaatcgaaaccaacagtgagagctagcctcgccaaaccgccggcgccgcagcatgcctgtacctctcggctctcgctcttatccccacccacctcgctttctcccctctacaagaaagcgaccaccgctgtgaatcagcagagctgcagtgagagcaagtgagaggatcagaggaggcatccgtgaccaaagatcgagtagccaagaagaagagagatgaacgccgacttcggcgcgcccaaggagctcgcgggaggcctgcagcagcggcgggccctgtaccagccccgcctcccgccatgcctccagggaccgacggtaagggcggagtacggtgacgcgaccacaaccatcgatcccacctgtgcccaagccgtcgcgcaggccttcccgcacacctttggccagccgctcgtcagcttcgtcgcgccggccgccggcgccggcgccgttgaggagcgccacccgatcagggtgggcgtggtgttctctgggaggcagtcgccgggagggcacaacgtcgtctggggcctccatgacgcacttaaagcctacaatcctcagagcttgctctacggattcgtcggtggcacggagggactgtttgcaaacaagacgttggagatcacagacgatgttcttgcttcctataagaaccaaggtggtttcgatttgctcggtaggagtatcgatcagatccgcactactaagcaagtgaatgctgcaatgacaacatgccacagtctgaacttggatgggttggtcatcattggaggtgtgacctccaattcagatgctgcacagcttgcggagacccttattcagaataactgtaagaccaaggttgttggtgtgccagtttcattgaatggtgacctcaagaaccagtttgttgaaacaacagttggatttgatacagtatgtaaggttaattcacagcttgtaagcaatgtttgtcttgatgcgatctcagctggaaagtactattattttgttcgtctgatgggacgaaaagcatctcatgttgcctttgaatgtgcacttcagtcacacccaaacatgctcatcttaggcgaggaggtagcattgtcaaaactcacactgatggaaattataagcaagatttgtgatggagtacaagcaagggcaaaattagggaaatatcatggtgtgcttgttattcccgaaggacttatagaaagcattccagaaatgtatgctcttattcaggaaatcaatatccttcacaacagtaatgttcctgtggc

SEQ ID NO: 269435 - DNA, 472 bp, Zea mays
cccacgcgtgcgctccactctcactgactcagaggcgacccgcggccgaccatgcgggcagcagcggcgtccgtggcgttggtaccccgcctcgtcctcttcgtcctgctgctgtccggctccggcgtgccgactgccctgtcgaagtcaacgctggagtgctgcgcctcctccagcgcctgcccggcgctgctctcctacacgctgtacgcggacctgaagcttgcggagctggccgcgctgttcgcggccgacccgctggccatcctggccgccaacgccatcgacttcgcggtcccggacccgggggaccgcatcctcccggcggcgctcgcgctgcgcgtgccggtgccgtgcgcctgctccgacggcatccgcaaggccacctccgcccggtacgtggcgcggacgggggacacgctggcgtacgtggccggcagcgtctacggcggactcaccacggccgactgga

SEQ ID NO: 269436 - DNA, 1537 bp, Zea mays
tttttgcgtgggcggacgcgtgggcggacgcgtgggcggacgcgtgggcggacgcgtgaggctgtagttctgttcctccccactcactcctgcgcttcctcgccgcgcggttccttctccctgatcctcctttggcttcgcggttcatggcgatgtggagggccgccgctaggcagctggtcgaccgggcgctcggctcaagggccgcgcacacgtctacaggcagcaaaaagatagtcggggtgttctacaaggccggggagtatgccgacaagaaccccaacttcgtcggctgcgtcgagggtgcactcggcatccgcggctggctcgagtcgcagggccatcagtacattgtcaccgatgacaaggaaggccccaactgtgaactggagaagcacattgaagacatgcatgtcctgattaccaccccattccacccagcttatgtcactgcagagaggataaagaaggcgaagaatcttgagcttcttctcacggcaggaatcggctccgatcatattgatcttccagcagctgctgctgcgggcttaactgtggctgaggtcactggaagcaacactgtctctgtggcagaagatgagctcttgcgcattctgattctgctcaggaacttcttgcctgggtaccaacaggtagttcaaggcgaatggaacgtagcaggcattgcccatagagcttatgatcttgaaggaaaaactgttgggactgttggggctggtcgtattggcaggctcttgcttcagcgtcttaagccctttaactgcaacctgctttaccatgacagacttcagattgacccagagcttgagaaagaaattggggccaaatttgaggaggacctggatgctatgcttccaaagtgtgatgtgattgtgatcaacacacctcttacggagaaaacaagaggcatgtttaacaaagagaggattgcaaagatgaagaaaggtgtaattgttgtgaataatgctcgaggagcaatcatggatgctcaagcagtcgcagatgcatgttctagcggtcacattgctggatacggtggtgatgtgtggttcccacagccagcaccaaaggatcacccctggcgctacatgccaaaccatgccatgacccctcacatctctgggactacaattgatgcgcagctgcggtatgcggatggtgtgagggacatgctgaataggtatttcaagggcgaggacttccccgtgcagaactacatcgtcaaggaaggccagcttgccagtcagtaccagtgaccgcgcgagatgttgctgtgccgtgtaggcttttctggtgagaagctgcgaggaagaaactcctgttgcgtacttgcgttactgtatgagtagctctgagaaacctgtcagcggccacctgtaataaaagaatgccttgctggtatctcaccgtggagatcaataagtctcttttttttccttctctgtaactgaactgcatgcactgtctttttttcggctgtgacaacgcaaatggtaaccaactggagccatttgac

SEQ ID NO: 269437 - DNA, 796 bp, Zea mays
tcgcgcggttgagcggaagttggcacaacccgcacccctgtgcatctaaaacgcttcttccgagtcccgacccgacagcataaagcatattcgagtgcgcacacgagcagacccccgcagacagccaggcacactcgcgcgaccatgtaccgggcggcggctgtcatctcgaggtcctcatcagcactgcggaggcagctcgcgcggggcgtggccggggagctgccgcgtctgttggcgcgagggtatgcggccacggcgaaggaggtgtccttcggcgttggcgcccgcgccgccatgctgcagggcgtcaacgacctcgccgacgccgtcaaggtcaccatgggccccaaggggcgcactgtgatcatcgaggggtcccataaaggtcccaaggtcacgaacgacggggccactgctgcacaaagcctggagttcgaggatagcgcgaagactgctggggcgaatctggtgaagcaagttgctgatgctacgaacaaagctgcaagggggggtaccacctgtgcaactgtgcttacacaggcaattcttactgaaggatgcaaggccgtggcagccggtgtcaacgttatggacttgcggaatgctataaacaacgcaataaatgctatcactgctcacctcaaaagtaaagcgtggaagattaattctccagaagaaattaaccaggtagcaaccatttctgcaaacggtgaaaaggaaattggagatctaatatcaaaagctatggaaaaagttggaaaggatggagtcattactattgttgatggcaaaa

SEQ ID NO: 269438 - DNA, 1323 bp, Zea mays
atgcccgccgacctcctggccgcggccgactgcggtggcatccacgggcatgctctcttcttcgacgccctcgtgcagctcatcccgccgcgcttttatctcccatccggcgacgaggaccgcccgtggcaccagggcctgtccaaggcggcaaaggcggccttgaaggccaagtcccgcgccaaccccaaggccgcccgccgcgcccgcctcaatcccgccacgccgcccgcctccaccctcgacctcctgaagaagtccgtcgccggccaggcagcggaggaagaggaggaagaagtcagaagaagagagcggggcatctggggatgaggaaagctccgaggatgatattgatgaggaagcgggggatcaagaggatgaaatgccgattgcacccgctgcagtggtgtctgggggtcgttccgtgacctatgaggagctgcgagaacgccttcaacgccgcattactgtgcttcgaggcaaccggtgcaccaggcctgagttcttgaataagcccacgaaggagaagggtaagacgtcaaaggcgaagaatgaaaagaagggcaaaggtgagggcatgaagcgtaagcgtcgatgatggcaccgaagatgtggatgtcaaggatgggaagaaggtaaagaaggaagctgaggagaagccagatatcatgtacgcaaatgtgtttgttgacccaaaggaagcaaggcgcaggaagaagaggagggttaagaacaagaagaaggcactggagcaggctaaacggttgcaggaggcaaagaaggatcctgagaaggcaagcaaaattgcttgggatgtggccagaagacgtgctgctggtgagaaggtccatgatgaccccaagctgattaaggagagcttgaagaaggaggaaaagcggcagcagaagcatgctgcgcagtggaaggagaggcagaaaactgtagataagcagaggaaggacaagcagaagaaaaggacagagaacatccgggatcgggcacagcagaagaagatgcgcaagattgagaagcgtgagataaaacttatgcgccctgggtttgaggggcggaaggatggttatgtcaacgagtaacatctgtgtccaagtttgtctggatgatgaattactatgtcctcgtttagagtttcatttgcccctatgggtagttggtgcttgtaataggttaccagatcatggctgctcaactcccttaattattgaatgaaccccacttttgttatatagcagttctacagatgattttgggaaaaaaaaaaaaaaaaaaaaaaaaaaaaaggacggcccgctagggatctagaac

SEQ ID NO: 269439 - DNA, 1532 bp, Zea mays
cccacgcgtccttctcccgtccctttccacgcccaccgccccgcatccaccccgaaaccctagtggatcgtcgccatggccgcagccgccctccttcgccgcctccccgctgcccgggcccaggccccggcattcatggcggcgcgaccgatctccgactccacggcagcgctcaccatcgagacatctgtccctttcacctcccacctcgtcgacccaccctcgcgtgatgtcaccaccacccccgctgagctcgtcaccttcttccgcgacatgtccctcatgcgccgcatggagatcgcggccgactccctctataaggccaagctcatccgcgggttctgccacctctacgacggccaggaggccgtcgccgtcggcatggaggccgccatcacccgctccgattccatcatcaccgcctaccgcgaccactgtacctacctcgcccgcggaggggacctcgtctccgccttctccgagctgatgggccgcgaggccggctgctcccgcgggaagggcggatccatgcatttctataagaaggatgccaatttctacggtgggcacggcatcgtcggcgcgcaggtgcccctcggatgcggcctcgccttcgctcagaagtacaagaaggaggagacggccacgtttgcgctctatggtgacggtgcggctaaccagggacagctctttgaggctctcaacatttcggccctctggaagctgcccgccatattggtttgcgagaacaaccattatggtatgggaacagcggaatggagggcagcaaagagccctgcctactacaagcgtggcgactatgtgcctggattgaaggttgatggaatggatgttcttgctgtgaagcaagcgtgcaaatttgcaaaagatcatgctgtcgcaaatggcccaattgtccttgagatggatacctacagataccatggccactctatgtcagatccaggaagcacttaccgcaccagggatgagatttcaggtgtcaggcaggaacgggatccaattgaaagggttagaaagttgcttttgactcatgacctggcaaatgctgctgagctcaagaatatggagaaagaaatcaggaaacaagtagatgacgctattgctaaagcaaaggaaagttctatgcctgatacttctgaactcttcacaaatgtttataagaagggcttcggcgtggagtcatttgggccagacaggaaggagatgagagcttctcttccgtaggttggcagcatgatgaggcagtcctcattacatggtatgatagccaggaaaaataattattgatgaaggcctcaggcattattggaatattttatcgggaaatgaacctgtatagagatgcgttgtctggaggatcagcttcgttgtttcgcccttttttcatttctacaattcagttttaactgctgctggctggcttcttattgaagctaatatcaccatccaagaaaaccgaagctagaggattataaatttgatcaaagagtgcggcaaaaagaaaagaa

SEQ ID NO: 269440 - DNA, 424 bp, Zea mays
ccatgtggattgagtgggattggatgggtttgaatcccacgcaagtcaaacttcttcataattttttccaaacccattcaatccatgtgtattgggaataagcgaacaaggccttatttgttttgcttcccttttccatttctacaattcagctttaactgctgctggttggcttcttattgaagctaatatcgtctgcaattgcttcggtccaaggaaatcgaagcaggagattataaatttgctcacgcctctcgtctatacctgccactcttagctttagttcggtaatggtacatgtaggactgcgtcgttacacttcgactggtcgattaattttatttaataaatgtggcgcatggatcggacagtgtgtaactcagaatatggtgcatgcaattgccgtgtttggtttctagaccct

SEQ ID NO: 269441 - DNA, 410 bp, Zea mays
aaattttaaaaaaagggatttaaaggtgaggtcttttgggcccaacagaaagaagttaaaactattcttcagtaggttggaaaaatgccagtcctcaatatgatatgatatccgggagaaataaccattgatgaagaaggcctcagacattgctggaattcttttgttggcaaatgaacctatgtagagatccgttgtcagaaggatctgcttagggcttgttcggtaagccttcaatccatgtggattaagtgggattggatgggtttaaatcccacgcaagtcaaacttcttcataattttttccaaacccattcaatccatgtgttttgggaatgaaaaaaaaaaaaaaaaaaaaaaaaaaaaaaaaaaaaaaaaaaaaaagggcgaaaaaaaaaaagggcggccgc

SEQ ID NO: 269442 - DNA, 917 bp, Zea mays
  unsure (1)..(917): unsure at all n locations
cgttgaagttcctacgtactctaaccctgtgaccactgctctgcaacctagagagcagacctggcaaggcatgagaacaactgctgagttgcggaaggcacacaatatccctaccccacacaacaaggattcagtttacaagcctatcgagcggaaaccacgcaagttcaatcccgtcgagatccccgcaaagctgcaacagttacttccttttaaatctaagcctaaggacacagcgaagcagaagaaaagcaccagttgaaaacagggtgcctgtaatcatgcagcctagtgagaagaagacacacgcagctatacaacagctaaggctgataaaacacgagaaggcaaagaagaagaaaattaaggaacaacagaagagaaaagcatacgaggcagagaaagccaagaccgagctactgacgaagaagcgccagagggaagagaggcgtgtgagataccgggaagaagataagcagaagaaacgtgcacgcagatgaggcgaggaacggggtatgtgcaccaggaactcagcagcacccgggcatgctctcttgtgcagaacatatgccaaaatcttagttcatagacggagagctataaaaggtgcagtcccccccatctgggcgaaaaagcatgtcaagtcataaccagggcgcggaaatgagcaagttaggttgcttgtttaagttatgtatcggttgccctaacgcggaatattgtctgagtgtttggcaaacgcatgtggtctttaacttccaagtaaatttggagtcataattttggagtgtatactacctcaggtccccaatattaggcaaacccatgtggtctttagcccccaagtaagccccgtttttatggncccaaanaaaaaaaaataattaaaaaaaaaaaaaaaaggacgcccgctctag

SEQ ID NO: 269443 - DNA, 540 bp, Zea mays
gttatttccagatagccttctaagttctaaactgggggtcctgttactttacctatggagtttcgttcctagttcattgcacattggttatcgtgacaaatgggggcgtcgctagcaggtctctcttctctggataaccacaccaccaatcatgagggaatcaccttcaacacacggggggccatctacatcttctgcggttgatgatagttactcagctgacggtgttgaagattcacaactattcctctccgtgccagctttaaaccaagctgcatcttatcttgcccagacagcttcattcctcacccaatgcctccctgtacctggttttgtgggtctatctgaggagggccaagagttattaacactgccacctgcatcggcttcaggcagactttctgttcagacttcttcagtagagccttccggtaccaattcatcccttggtcagtcagattgtggtggaaacccctctcaagaaaacgctggacagatggtgccttcgcatgtttttcagaatggagcttcactgttcca

SEQ ID NO: 269444 - DNA, 900 bp, Zea mays
tgtctatccttgcttcactgctgctctaattccagcggagaatggatcacgttcaaagccatgccctcctcaccctggggaaaagggtgaaatgcatgtggtgcctgtaccattgcctttagtatctggtctaagcagtgttagaatcaacattcctcctgatctacgaccacctgaagcaagacagaatatactttctgcagtgcaagaactaggaaagcgctacccccaaggtcttccgaaactacatccaatcaatgacatgggtattcaagaacctgaactagttgacttggtacataaacttgaagaccttgagcagaaacaatgctctcaccgacttcataagtccggtcaaagtgaacaggaactatcatggtaccaaaaaaaagcagatctgaatactgaaattcagcaactcaagtcaaagatgcgggattcacagctacaaaaatttagagatgaacttaggaaccggtcccgtgttctgaagatgctggggcatattgatgctgacggtgttctccagttgaaaggacgtgctgcctgtctaatagacacaggggatgaactgcttatcactgaacttatgttcaatggtacatttaatgatcttgaccatcatcaagttgcttcccttgctagctgctttgtaccttgtgataaatcaagtgagcagatacgcctaagaaatgaactttctaggccgatgatgcagcttcaggaggctgcaagaaaaatagctgaggtacaacgagaatgcaaactggaagtaaatgtggaggaatatgttgaatcaacctgcagaccctaccttatggatgtcatatactgttggtcaaggggagccacctttgcggaggtgatggaaatgaccgacttatttgaaggaagtgtcat

SEQ ID NO: 269445 - DNA, 1177 bp, Zea mays
agcggccgccctttttttttttttttagtaccaagttatagtcatcaactgttatttaagcaccattaaacacttgccatgtaattaggagtaaagactgagcagtgacggtcatccatatataattggccatgctgataacaggatggaccacaacatcgattaagcataggatttgacattgagtattacacaacatacccgaaaacacacggaattattcaacaacataaaacattattaagctttccaaagcatcgattgttccatctagaacgcggtcatccttgtagtagccacaaagtgctttattaatttgcactgaaatttcacttcattgtggccagacgattgatgaacacattgaaggcttggtctgtgtcaaccatactaactctgacagcccttgcatccactccaaaccttgtgccacctcgagtgataatctttttctcgagtaggaaggcctccagatcttcaatatcatccttgttgtagcgaagccatgcaaatggaggattggcggtgacagtctcattggaaaagctacaatagccagatagctcataagggagagtaaagatgtctgaggctgccacagctgcacgaagtctagcccagcgagccgccattttttccttggcgaaatggaagagttggcttgttttaccagaggatggtaccggctcatagccattacatattgccccgataatcttagcggcacgaagttgagagtccttggatacaccgattgtgttgagctctataaacttgatcatcttctgagccaccttagtatccttcaccaatgcccaccccagcctggtgccggcatggccggtgcatttggagacagtgaacagcatgatatcatgggcagctgcctcggtgatgggtgtgtactgcggccagtagtaggcgaagtcataaacaggcttgctagacttggatttgatgacaggcttccggaggccaccatcagggttgtttggggagcagacgagctcaatacatgtgtcgccatcaaatgtattggcatcaccagcccaacggtagagcgcagagtttagatagttggtcacagatggggaatgccgttgtagacggataccatgtgctcgtcgggacaggctccactcagctctttcaggccgtgctgtaccccacgcgtccg

SEQ ID NO: 269446 - DNA, 859 bp, Zea mays
gagacggtgaacagcatgatgtcatgggcagctgcctcggtgatgggtgtgtactgcggccagtagtaggcgaagtcataaacaggcttgctagacttggatttgatgacaggcttccggaggccaccatcagggttgtttggggagcagacgagctcaatacatgtgtcgccatcaaatgtattggcatcaccagcccaacggtagagcgcagagtttagatagttggtcacagatgggtaagacgagtagtacggtgccggtgagacgacgttcatgggtgtgccgtcacttgcaggtgagagcgcgtacagcacggcctgaaagagctgagtggagcctgtcccgacgagcacatggtacccgtccacaacggcattccccacgagcctgtggagacgccgcacctcgcgctcgaatccaggctccaggaaccaacagatgccgccgaggtcggagaagtagctcattgtttgccaaccagggatgaagatggaggcgctatctcctgtgccgcgccagaactcctcgtacatagtcgggtcgccatgatcgaggttgacgatggagtccgaagtgaccggcggcttccctcttgacggctccacctccccgccgccaccgttgttgtcggatcggttcccgccgccgaagtagcgccggcggatgtacgtcgcgatccacgcgaggttcactgcgacggtggccaggatcccgatccttccagcgcagcgcagcgccgccgccatcccgccgctctccctaccggccatctcctcctcctcctcctctcccagacctcaccggcctgcccctgcactgcagggacggaatgcgaggctagtgagagcgctgtgtc

SEQ ID NO: 269447 - DNA, 444 bp, Zea mays
cccgcgcgaggtcgcctgcgtggtggtcgacgggcagtggtacaagatgctgggcgcggccacgcgtgtcgctgtccccgcgctcgtgctgcgcgccgacggcgccgccacgtttctcagcatgctcgccaccccgcgcctccgcgccgacggctacctccccatcaaagaagagcggctggacgaggtggtgccgggcctggagcccctgcgcgtgcgggacctgatccgcgtggacggcagcgacgacgagacggtgctccgtttcatcacccgcaacgccgaggccgtgcaggcctcgtcgtcgggcgtggtgctgaacacgttcgagggcatcgagggcgcggcgctggccaagatccggcgcgagctgtccggccgcccggtcttcgccgtggggccgctgcacctggcgtcgccggaccccgcggcggcggcggccgc

SEQ ID NO: 269448 - DNA, 791 bp, Zea mays
cctcgcgtacgcgacaaactaggccgaccgccgccgccctacgctcagctgcccacctgccctggtcttcgactcttcgtcgtgcgctttgccggcggcgagcacccatcacaccaggtgctttattgggtccgtccatacggcaggatggcgctaaggggggtctggcagctgcagaagctcgtggtaaactactgcgactggggagggagcagcaggggcatcagggccttcatggaggcacatcttccagcctttaaggaaaagattccacacttagaggtggtgacagagcttgtccgcggtcaacatcctaacttgaagggaatttacaagaaccataacgagcgagtggtctgcgtgagaaatttaccgccagaagaaatactcctgcaagccaccaggctaaggaactctctgggcaggaaagtggtgaagctgcggaccagacacgtaacgtagcggcccagtgtccaggggacgtggacgacggagctgaagatgtgaagccaagctagcagccaaggtgtttcggtgttcttggtggtgtgatcgcagagaaatgtcagctgtgtcaataactccggtagagcgctgccgttatgccagcctatttcgatagccaaactatttacaccttttgttccgactaacaaatgtaatgacatacgtacacctggagtttctgttagtgctaggccttcaagttcgacatttcagcctcattgtcctgattttacagacagtattatgcaaaggcacattattttaaaaaaataaaaaagggcggc

SEQ ID NO: 269449 - DNA, 294 bp, Zea mays
gcgaccgccgtcgctaaacgcccagctgcccaggtcttcgtcgggcccctcgccggcgacgagcacccaacacaccaggtcaccaggatggcgctgaggggggtctggcagctccagaagctcgtggtaaactactgcgactggggagggagcagcaggggcatcagagccttcatggaggcacatcttccagcctttaaggaaaagattccacacttagaagtggtgacagagcttgtccgcggtcaacatcctaacttgaagggaatttacaagaaccataacgagcgagtg

SEQ ID NO: 269450 - DNA, 880 bp, Zea mays
  unsure (1)..(880): unsure at all n locations
aaaaaatccaaagcgaggatgccaccccacccccaatctcctcggatgtacaaaaatcactaagggaggaggctgataaggctgtgactgcataccacaacaagcgcacactacctgcccatcaagagacttgtgcacattatcgatttagctcttagtatgtttctttccttttcatcctcaggatccatttttctggtatttgtcccaaaccatttctgttaacatattttcactaactactgtattttttgtttatcttgttttcatactttgctacctgtggtggactggtggtaaagtgaaccaggaacaatttgatttcaaatatacagttttggtttgattttatggcacttctccttggtgttttgtttcgattgccattattggttgatgctttttagttttcacaattctgaatttaaattttatctttatgttatgcatgtagtaccagaagtacttcagaaaaggaacttgtaagagagcaggtctttgtccttggtcgaatgggaaatgctaaggaacctctttcgacaattataaataaactggaagacattaatacatatttagcctctattactgcatctgaggtctggtctgtttacatgaaggtctgaacaagtggaacctgacaaggatgggtgtggctggattacaacaggattgaagttgattggcaggaaatgatgctacttagcaattgttccctgactataactgcctacaaagttgtgcaattgtgatgtcgcatcgctggagaagacgggcacggcgacgagtccgacctggtcaagagctgcaactgcgaaatggacaaaaaaggtacctcgtggagttttgtgtgggggatcangtcgttgggtacatccac

SEQ ID NO: 269451 - DNA, 805 bp, Zea mays
  unsure (1)..(805): unsure at all n locations
ctccagtccntccggttttctagggtttaaagagcttgccgagcccgccgtgcgccggccggcacggctccactactttccgccatcgccggagccgaccccttcgtctccgcacgcggcaatggcattctccttcgcctcgccggctgcgtcgaaccctttccagacgccggcgacgccgaatccctttcaaacaccggctccggccacctcgcaggcgccatccctatcgccttcgccgttccagttcagcttccagcagcagccgcagccacagcagcagttggcgccggcgggcaacctccgcagccgcagccgcagccgcagccgcagccgcagaagctgatgctgtacacgacagatatgaaatctgcgggatacagcaccaagtgggaggagctgcacgccgagtcgcagaaggccttactccagatcgaggacaagatacgggacttcaaagacgagtgtgagaggttggaccagtgcagtcgcctttatgactcctcaatctcaaatgccaattttgagcttgatgcgagtcgcattgctcaggaacttggagggaccaccactgtaatggagagagagaaggcttccattcaagagttgatgaatgttgtcaatgaaatgatgtggaacacagaatttggtattaggtcatatctgatgttgaggccaagattcacccgtacaggtgctggagttgcaaatggtggttcttcaaatccttctgctggtgctccacccaatcagccagtgctagatttctacagtggagtcccaaagcgcccttccatttttatgc

SEQ ID NO: 269452 - DNA, 1446 bp, Zea mays
cggacgcgtgggcgcgtatgcttccgcactggcggcggggttatggtggagtgcgacgcgtgcctcggcggacttccacctgcgatgcgtgcgaccgccgcttcggagggtgcctgaaggtgattgggcgtgcccttactgcgaggccgagcgcgccggtaaggtggtcgagcggcccaggccgcctgaggggaagcgcgtcgtgaggaccgccaaggaaaaactcctttccagcgacctgtgggctgcacgcatcgagagtttatggagggagcctgatgggacgttctgggcaaaggtcaggtggtacattatccctgaagagactgcagcaggaaggcagctgcataacttgagaagagagctgtatcgtaccaatgatcttgcagacattgagatggaaacaatccttagacattgttctataatgtgccccaaagactttagggatgctaacaacggaggggatgatgtattttattgagaatatgagtatgatatacattggcataattttaagcgtctggcagatattgatgatgagccagagacaaaggaagatctcagtgacgagccctacaatgctggtgatgattataacagtgacactgatgaagattcagactatgacgaggaggaagaatccacatcatctttctctgtcagaaggaatcaatcacatgaatctgcggcgaattcaaggaaaggtagaatatatggcctgcaaaaaattgggatacaaaaaattcctgagcatgctcggtgccaccaaaagactgagctggagaaggctaaagcaaccctgttattggcaactcttcctaagtcattgccttgcagagataaagaaatggatgagatatcaatatttgtaaaggatgcaatctgcaacaaccaatgcctaggacgctgcctttatatacatggtgtacctggcactggcaagactatgagtgtacttgctgttatgaggaggctgagatctgaatttgattctggaactctgaggccatattgttttatcgaaattaatggtcttaaattagcatctccagagaatatctacaaggttgtatatgaacagttgagtgggcatagggttgggtggaaaaaggctcttcactatttaacagaacatttttcaggtggtactaaaattggaaagcaagcaaaccagccaattgttttgctgatcgatgaacttgatcttcttatgacaagaaaccaatcggtgttgtataacattcttgactggcctaccaaaccaaattcaaatctagttgttataggtatagcaaacacaatggatcttccagaaaagttattgcctcgtatatcaagtcggatgggtatccaacgactgtgtgttggtccatacaattatagacaactgcaggaaattataacaagccgtttagagggtattgatgcctttgaggaacaggc

SEQ ID NO: 269453 - DNA, 452 bp, Zea mays
gtgtgtatgtatttttttagtacaatagtattcaaaatgtatgaggactctttctttttgattgttttgaacaatgggcgtatgaaccggtggaagaacaattcatttgatagttgtttgtgtccaaaatggaactaaatctaaaatttgtggagcaaaccactcaatccagatctctatttaatcaaacattttttttgttatgatgcagttccacacgtgaaatagccatatggatatgtaacaacataaatttgttcagtgggaaataagtttctataatacatttatgcacccaggtgacaagaaaaaaatattttgtcatttccataaaacatgatgcattgtttctcaattcatattgtgatgttatgcctcttatgcctctagagaaggccataatacaaatggataagaagtcaccatacatttctaaatcactggtcttcatc

SEQ ID NO: 269454 - DNA, 491 bp, Zea mays
  unsure (1)..(491): unsure at all n locations
cccacgcgtccggaggcgaatctctcgctaactgtcatcaatggcggccgagcccaagatcctagagctctccaacggcaagatcaccgcgaggatctccaactggggcgccaccatcacctccctcctcgtccccgacgcccaggggagtgtcgctgatgtggtgctcggattcgatggcttggatccgtacgtgaaaggcatgtcaccttattttggctgcatagttggccgtgtcgcgaataggatcaaggatgggaagtttacactaaacggacttgagtattcattgcctgtcaacaatggacctaacagccttcatggtgggttgaagggatttgataaggtcgtgtgggatgtcgtggagcacaaagatggcgaatgcccttcaataacttttcagtatcacagcaaggacgggggngaaagctatccaggcgatgtaaccattcgagcaacatactctcttcctgaagctactactctaaagc

SEQ ID NO: 269455 - DNA, 513 bp, Zea mays
gtctctccacccgcaacaccccaaaaacctcacgggctctcgaccccgcgcgcgcgcctcgtcgccacgccggcgtgaggggcgcccacccccgtgcctatacaacgccgcccgagcggagggtataagctggtatcatggcgtccagcgcagtagcaccaagatggttaaggggtaaggtgaaggctgtgacatctggggattgtcttgtaattatggggtgctcaaaggctgagatcccacctgagaagtccatcaccctgtcctaccttatggccccaaggctggctcgccgtggtggagttgacgagccctttgcatgggaaagcagagagtttctgaggaagctctgcatagggaaggaggtcacattcaaagtggattatacagctcctaatattggacgagaatttggaactgtttttctatgtgataagaatgttgcatactcagtagtttctgctggatgggcaagggtaaaggagcaaggcccaaaggggggcgaacaaaatt

SEQ ID NO: 269456 - DNA, 508 bp, Zea mays
cgcgcgaccggccgctggcgtcgcgccctcccttataaaccaccacacttcagcacccacagctccctcttgcatcccctcgcccgtcgtctcgccagtcgctacaccccaaaaacctcacgcgcgcgctcgcgacccctcgcgctcgcctcgtcggcacgccggcgagaggggcgcccatccccgtgcctatataaggacgccggattggaggtgcccgtcccttatccgcgcggccagatctacctctgttccacgcctccgtcaccgccgcgtcggggcgatcccgccgaggtcagggtataagctggtatcatggcgtccagcgcagtagcaccaagatggttaaggggtaaggtgaaggctgtgacatctggggattgtcttctaatcatggggtgctcaaaggctgagatcccacctgagaagtccatcaccctgtcctaccttatggccccaaggctggctcgccgcggtggagttgacaagcccttcacatgggaaagca

SEQ ID NO: 269457 - DNA, 505 bp, Zea mays
tcttttaaagccacccaacccttccggaaaattggccgttgcattgaatgtgaagggaaggatttccttagtcccagctgtcatttgccttgtgtcgaaaataagtggattgcaaagctctcagggccttgtctggcacaagcatggcaggtgtacccagacttcaaaataaaggttgttggacattcactgggaggtggtacagctgctctgttgacatacgttctgagggaacagaaggagtttgcctctactacttgtctggcatttgctccagctgcatgtatgacatggaaactggcagagtcaggagtgcattttatcactccagtcatcaacggagctgatctggttccaacattttctgctgcgtcagtagatgatcttcgttcagaggttacagcgtcggcttggctaaatgatctccgtcaccaaattgaacaaaccagaatcctaagcactttttatcgttctgcatcaggcttgggatcccggctttcatcta

SEQ ID NO: 269458 - DNA, 697 bp, Zea mays
  unsure (1)..(697): unsure at all n locations
cggacggtgggaaaaaagcgagacattgaaggcgcagaacccaaagaatgggtaagtgaggaaagtggtttagcgcggtgaagaaagtcttcagctcctccgatccagatggaaagggagccaaggcccagaaggcagacaaatcgaaatccaagaggagatggccatttggaaagtccaagcactcggagccttccatatcgacggtgccaggcactgctccagcagtagctccgttgccatcaccaccagcaactcagccccactctctggagatcaaagatgtcaatccagttgaaacagacagtgagcagaacaagcatgcctactccgttgcgcttgcgtctgctgtcgctgctgaagctgcagcagttgctgcccaggctgctgcggaagttgtccgcctcacagcagttaccacggctgcaccaaagatgcctgttagttcgagggaagaacttgccgccaccaagattcagactgccttcaggggttatctggctaggagagcattgcgtgcactaagagggctagttagattgaagtcgcttgttgatggaaatgctgtcaaacgccaaaccgctcacaccttgcaatgcacacaagcaatgacaagagttcaaactcaaatctactctanaagggtgaagttggaggaggagaaacaggctcttcaaagacaactccaattgaaaca

SEQ ID NO: 269459 - DNA, 1537 bp, Zea mays
tatccctcggcgtagttggtggcggcgggatcttcgtgccgatgctgacgctcatcattgggtttgacccgaaatcatctactgcgatatcaaagtgtatgattatgggagcatctgtttcaactgtttactacaatctcaagctaaagcatccgactttggacatgccagtgatcgattatgacctggctgtgctcatgcagcctatgctaatgcttgggatcagcattggtgttatttttaatgttatattccctgactggctggtcacagttctgctgataattcttttcctaggcacatccacaaaagcctttctgaagggcattgagacatggaagaaagagacagtaatccaaagggaggctgcgaaacttttggagcaaactgcaggtgaggaagcagagtatgcagcacttcctactggaccagatgttgcaccaaacaaaaaagccctcacatcagatgaggcgccatcgcttataaagaacatacactggaagaaggttggtcttctttcatttgtatgggtggcattccttgttcttcaggtcacaaagaattacactgctacttgctccccatggtactgggtcttgaaccttctccaggttccagtgtcagtaggagtgacactgtatgaaggatttgggctgatgagtgggaagagggtgttatcatcaaagggaagtggacaaactaccatgaaatttcatcaggtagtcgtatacggtctattcggtatagccgcaggactagttggtggactccttggtcttggaggtggcttcattatggggccactgttcttggaacttggcatccctccccaagtttcaagtgctacagctacctttgcaatgatgttctcatcttccatgtcggttgtcgaatactacctcttgaaccgggttccagtgccttatgctgtttatttcatcgttgttgcatttgttgctgccatcattggccagcatgtggtgaggaagttgatcaactggctagggcgagcatcacttatcatcttcatactggctttcatgatctttgtcagcgcgatttctctcggtggggttggcgtctctaacatggttcacaagattgagcgacatgagtacatggggtttgaggacctttgcaagtacgatgcataagaagcagggaagctgaagatgtgagctatgtggtgtgcagttctccgcaagcagaagtgggataattcaaggatagaagggttccatgatgcaatttggtgcgtaggaccgaagaggttctagcagcgacagttcctcgaagggaggctagctgcatggattggcttaagatgaattttgggcactgaattttcaaaacaaatgtagagatgattttctgccacggcagaatgtcgtcagtgcatttcgttgtaggaatatgtacactgcacatcttcagataaccatcctatagtactacgcgatatgaaatatcacatgatagacatgagatgggtgcctcttatggatttaacgtctttagcctaataaaatgactgatg

SEQ ID NO: 269460 - DNA, 754 bp, Zea mays
cctggattcctttaaagccaaccaacccgtccgacccgttcctgcagctaccctataggattggggggtcttctccaccgatgagtaattttgatccagctaaaatgctcactgattctgggaagctccacaccttggatatgctactacggcgccttcgagttgaaggtcaccgtgtgcttctttttgctcagatgactaaaatgctggacattcttgaggattacatgaatttcagaaaattcaagtatttcagacttgatgggtcttctgcaatctcagaccgccgtgacatggtccgagctttccagaacaggaatgatgtatttgttttcttgttaagcacaagagctggggggcttggtattaatttgactgctgctgatactgttattttttatgaaattgactggaatccaacacaagaccagcaggcaatggatagaacgcacagacttggtcaaacaaaggaggtaactgtgtacaggcttatatgcaaagatactatcgaggagaaaatattgcaaagagcaaagcagataaatgcagtgcaagagttggttatgaaggggaaacatgtccaggacgatcatttgttgagacaagaggatgttgcttcattacttattgatgacacacagattgcacacaagctgaaagaaatatccatgcaggcgaaggatcgacaaaagaggagacgagccgagggcatcaaggttgacaaagaggagatttggcgctcgagacttggatg

SEQ ID NO: 269461 - DNA, 587 bp, Zea mays
ggcctcccggacctttctggttggtcatggcctgacaattgctgacattgcagtttggtcaaatcttgctggaattggtcagcggtgggagagtctaaggaaatcaaagaaataccaaaatcttgtccgctggttcaacagcatagattcagaatacagtgacgcactgaacgaagttgtggctgcatatgttgggaaacgaggtattggaaaatctcctgcacctagccttaaggagaaggtacatgactcaaaggacccatcagctccagaagttgatctccctggtgcaaaagttgggaaagtctgcgttcgttttgccccagagcctagtggttacctccatattgggcatgcaaaggctgcactattgaacaaatactttgctgaaagatatcaagggcgcttaatagttcgatttgatgacacaaacccttcaaaagaaagcaatgaggttgttgagaatcttttgaaagatattgaagacgttggggatcaaatatgatgctggcacatacacatttgattattttctaaagcttatggaaatggctgagagtttgataaagcatgttaaagcctatatt

SEQ ID NO: 269462 - DNA, 465 bp, Zea mays
acctggaatcctttaaagtcaaccaacccgtccggccgccgccgactccttttccggctctctcgggctataatctactccctggctccttccttctaaacccgcacccgcaacaaccgcccgttggggtttgcttcagcccccgaaacccaccccttggattgctctgattccgtggtggggcccgaagtttgcagtatggcggggtacccggaggacaaccagcacgagttgaacgggtacgacgaggaggtcgacgaagaggagggacaccccgggaggcgggtaggccgggatgggggctctgggtacgctgatgctgtcagaaaggatgggaggggggcgggtggcgactcgttgggaaagatttttgtcggaggcgttgcttgggagacaactgaagaatcattctccaagcattttgagaagtatggggcaataactgattctggaattatgaacgac

SEQ ID NO: 269463 - DNA, 536 bp, Zea mays
tgtccccggcacgtgtccggcgtcgcgtccgccacacgcaccgaccatcccctgccctcatcagcaatccccggcccgcagcgtacaaatacacgctccccgccgctccgacctcactttccccgcctccatcaccaattcacgatctcctttcccgcaccgcgccccggatcgccggctcgcaattccggagttaaattcccctccaccgcaaccgtcatgggcggctcccacagccgcgaggacgtcgatctcacctcctccgacgaagaggaggaattcgaggacgactatgacgcccgatcacccatcgcggaggccgcagcgagcgcggggcagcgcgacgacgacctcctccgcaccgccacaccttcctcgcttgaggccatcgacgccaagctcaggtcgctggatctcaagtaccagagacctaccgccgccaagctctacctccacgtcggcggggcctcgccttccgcgcgctgggtgcccgccgagcgccgcgcgacctacgcattcgtcgaccagtcgagcga

SEQ ID NO: 269464 - DNA, 787 bp, Zea mays
catatatgtcctaacgcagcttcacaaatagatttcaatggagttcgacgtccacagcgaacaacttcttctggaagttttggatcattcgatggtagctcagtttccaacaaatcaattgaatcaggttacccacctgatgcaccaacagaaaagtcagtgcattgtgctgtaaaccatcagactgtaccttctcctgaggcttgttcgacacaacaatatacctccccatccgacaatcacaacttgatacctcacaaacctgctgatttaggtagccgaggtgttgccaccaggaaaccagcgcaacatagttgcgctcagattgaaaatgtggtgccgatgcatgctccagtacaaccaacgacttccacacctcttggcctctttgatcaatcaactgtgcaacagcctgtcacatctgctgcgccgatagatctgtttgctggctttaatgaacagttaccagcttctcataatacagatggtgtatccagtcattttgttgttgctaaagaacctgcccataatgttgttcagaagggcataatgccatcagctgaagcactcgccacatctcatgctgtgcaccaagatttgttcagtctgtcaattttgcaggaaccagcaacaccctcaccctctcagccaatagatctgtttgctggctttgaccaacatttgccgcatttgtctactgttcagaaaattccatcggcagttccatttcctgctaatgatggatgggctttctttgacgtgcaacatggattgttgacatctgttt

SEQ ID NO: 269465 - DNA, 748 bp, Zea mays
gtttaccttctccaggcctctctgctgggctctcggcagattccgctccagcgcccaccgtcgcccaccgtcgcctttcaaaaagctagagggttcctcgagagggagaagcgtacccggcagctccgctccgtcagtccgtccgcccccaagaatgtcagacgaggccaggcgcgggcccgcgggcgccgcgcaggtggtgcttcgggcctcctccgaggaccgcaagccggtgggctcggggtctccgccgccggcagcgaccgcgactgcggttgcgcacaagatccagctcaagagtgccgacatgaaggaggagatgcggcaggaggccttcgaaattgctcgcatcgcattcgagaagcacagtatggagaaggacatcgcggagtacataaagaaggagttcgacaagaaccacggcccaacctggcactgcatcgtcggccgcaacttcggttcctacgtgacgcacgagacaaactactttgtatatttctacatcgactctaaagctgtcttgctattcaagtctgggtgattgtcgcagccaatagagtcaaccttgcatgcctacatcttctttctctcgtgtatgctccatccccttccctttcccctcagagtcgtctgcagccaaacctggaaaccggtaatcttatgaacctgcatgttgatgtatcaacaacggattattcttcgcatgccataatgtgagatcaagttgcatcttaattatggctgaaat

SEQ ID NO: 269466 - DNA, 360 bp, Zea mays
gaaactccagtagagcttccaaagagacttaccatcggtcccccaagtgctgatagaatccaacttcctgatggacgacatctggcttatgaagaacaaggagtctcagctaacagagcaagattttcactgattgctcctcattcttttctttcatcaaggctaacaggaattcctggaattagtgcatctcttctagaagaatttggagtacgacttgtgacctatgatcttcctggttttggtgaaagtgatccacatgtaggccggaatctcaattcttctgcactggacatgctctatctggctaatgctctcaatattccagagaagttctgggttgtgggctattctggaggt

SEQ ID NO: 269467 - DNA, 407 bp, Zea mays
cggacgcgtggctcgtcgtctccctgctgctcctggccgtcgaggtcgccgcgtacttcaacggctgggacctcgccgcctccgcgctcgccctccccgccatcggcctcgagtcgctgtacgcctcctggctgcgcttccgcgccacctacgttgcgccggggatacagttcctcaccgacgcctgcgtcgtgctcttcctcatccagagcgccgaccgactcatccagtgcctcggctgcttctacattcacatcaagcgcatcaagcccaagcccaagtcgcttgcattgcctgatgcggaggacccggatgccgggtactaccccatggtacttgtgcagataccaatgtgcaacgagaaagaggtgtatcaacaatcaattgcggccgagtgcaccttgact

SEQ ID NO: 269468 - DNA, 1586 bp, Zea mays
cccacgctctctctctcctagtccccttctatcgtggcaacgacgagcgacagtcgctgccgccctacggcaggtgcccaggtcttcttcggtcccttcgccgtcgacgagcactaccaggaacttgatcttataatacaaacttcaatatgttctctgctccaggcaacaattctatggctcttgtagccccacggccagggatggagctggctaatattcaacatcatccaaatcaggctcctgggcctggaggaaaacaacgcacatctagcctggaggcaccaataatgctacttacaggtcaccagagtgctatctactgcatgaaattcaatcctgcgggaactgtgatagcatcaggttcccatgacaaggatatcttcttatggtatgttcatggtgaatgtaagaactttatggtactgagagggcacaagaatgctattcttgaccttcagtggactactgatgggacccagatcatctctgcaagtcctgacaagactgtgagggtctgggacgttgagactggtaaacaagttaagaagatggctgagcactcatcattcgtcaactcatgctgcccagcacggaagtggccacctcttgtggttagcggttcagatgatggtacagcaaagctgtgggacttgcgtcagagaggtgcaatacaaactcttcccgacaaataccagatcacagccgttagcttctcagaggcagcagataaggtattcactggtggcctggacaacgatgtcaagtggtgggatcttcgcaagaatgaaacgacagaatatctcaaaggacatcaggacatgatcactgggatgcagcttagccctgatgggtcttacctcctgaccaatgcaatggacaatgagctcaagatctgggatctgcgcccttacgcaccagagaaccggaacatcaagactcttacaggtcaccagcataactttgagaagaacctactgaagtgtagctggtcgccagataaccgcaaggtcactgctgggagcgcagaccgcatggtctacatctgggacacaacatcaaggcgcatcctgtacaagcttcccgggcacaatggttctgtcaatgagactgctttccatcccacagagccgatcattggatcttgcggcagcgacaagcagatctatcttggggaactttaagtgactatcagttccttttcagctagatgttcttgtgacactttgatgaggagaggaggcactgacaccctgttcctttgcctgagaattggaacactcagtttggctgatctggatttgacatttgttgattgtcttgttaagcccagttggtcttgccgttcacaaactgccccatactttgcaccttgtggctttccgatattaagctagatggcatgcttgaaggtcactggttgcatgtactgtgtctagaaccttactaaaaacttgcatacggtagtactgtatgctatattgttatcttttttaatcgtatgaaactagttggagaagtgcggcaacctaattcgcatggtttgaaaaaaaaaaaaaaaaaaaagggcggccgcgcgggaatcg

SEQ ID NO: 269469 - DNA, 366 bp, Zea mays
cttccccacataactaaaccctcgcttcggaggcgcgtgaacccaagaccgacatgcgaacgaagcgagggtcctcacaaccaccatcccctgctgcaacgacgccgccggcgatggcgtccatctccggcgcggcggcgccgccatcttccgccgtgtgccggcttcggctgcgccggcaccttctgctccggccctcccacctccgcctccgcgcgccccactccatcgccgacctctcccgctcctccaattccgccccgagcccggcccgcccagcgctgggctccggcccggagaacggcagcggcggcgtccgcgcggtggagaaggacccgatcaagctgtgggagcgctacgtcgagt

SEQ ID NO: 269470 - DNA, 465 bp, Zea mays
cgggaacagtccaagcagccgcaccagctcgcagtctcccacttttcgaagtagcagcccggaactccggatccaccgctaccgccgccgcgtctaaaccctccaccgccgcggtgcgtcagaggcagaggcagagaggcagaggcagaggcagccatggggagccgcctcgggcgccgcgtgatccactttgccaacctcccgctgaaggtcatgctgccccccgcgccgctctcctccgtgcaggagttcgccgtgcggaccgtcccctccgcttccaaggtggacatccggcgctgcctcgagtccatgtacggtttttccgtcgccgaggtccgcacgcttaacatggagggcaagaagctccgccggggcccctttctctccgccaagcccgactacaagaaggcctacgtcacgctccgcgccccgctcgcggtctcgcgcgacctgtttcccatcggg

SEQ ID NO: 269471 - DNA, 418 bp, Zea mays
cccacgcgtccgctcgccgaaaacctcgacgagtccctgcctccctgggcggtgggcgcggaaacccttcgtctgttcgctagaccttggcggccggatctcccaccttcagaatccatctggtctcctctataaaagcgccgggaggatctgccgactttgccgtccataggcggcgtctctccggtgtcctgcgtctgcgccgcacacatcccccactcttcttccagtgaaacagttcaggcaaaaactctcctggaattgattgttgaggcatcacagattgcatttgccagtgcaagcaaatttcagagataaggatggcagcacaactacttttctccaatgcttccagttgccactgcccattaggcatttcaaggataaacgttgggaagacacttcttggtgaaagtgc

SEQ ID NO: 269472 - DNA, 1220 bp, Zea mays
  unsure (1)..(1220): unsure at all n locations
cacgcgaccgaaaaaaccacgctgggcaccgcgcatcgcatctccccccttcctcggttcctcccctttcgccctacttgcttcccacgccagggcccgagctccgagctagggtttcctctctcgccgccgccgccgccgccgacgtcgacggagaagaggagtaggtgaagccgagttattagcgccaggggaggaacatggggacgccggagacgtcgcgggagccatgcccggaccggatcctggacgacgtcggcggcgcgttcgggatgggcgccgtcggcggctcggccttccacttcatcaagggcatctacaactcccccaacgggatgcgcatgtccgggggcgcgcaggccgtgcgcatgaacgcgccgcgcgtggggggcagcttcgccgtatggggcggcctcttctcaaccttcgactgcgccatggtctacgcgcgccagaaggaggatccctggaactccattatcgcgggcgccgccacgggcgggttcctctctatgcgccagggcatgggggccgcgggccggtccgcgctcatgggcggtgtccttctggccctcatcgagggcgccggccttatgctcaaccgcgttctcgccaacccgccgctgcccgcggaggatcccaaccttaccgcggccatgggcgacaaccctttcccgggcctgccacaggcgccgccggtcgtggcacctccggaagtggcgagctccagcggcgcgggtgggtggttcgggggactgattggcaggaaggacgaagagaagaaatccagcgcgggcaagtcggagatcttggagagcttcgacacgcccagcagtccgataccatcgttcgagtacaagtgaggaaaaggttggctgatgccactgttgcctgcacggccttgcagatgctgtgatggggtctggaattggtgatgcatgtcagcaatacaataaccgacaggacaaaagagatggtatgcggcttaagccttttccgaaacgtggcagcttggctacttctcgagatgacgtagtatttgtagaagcaacagcagtagtatactgcccaatattatagcattcgtgttgtgcaatgtaatgcacgtgagaacgcttgtgtggttgtgcctctggctggcctctaaacggacgtcttttttgtggtcttattagtcgagtcgttctactgcgccaaaaaaaaaaaaaaaaaaaaanaaa

SEQ ID NO: 269473 - DNA, 415 bp, Zea mays
tgagaagcagacccttggctctgcggcctgttatcaaggccagggcggccattgaaccaacctcaagtgatgagctcctagggaagaagtttcgagaacccttgagtatcaatcttgcaacatttgagcatgcacttctgagggtcaccgcagatgatatccagaaagccacggagaatttcagtaaggtgcacattattggggatggtgggtttggcactgtctacagggcagcacttcctggaggtcggagagtagcgatcaaaaggcttcatggtggccatcagttccaaggtgatcgtgaattcctggccgaaatggagacaattggaaaggtgaaacatcctaaccttgttcctctacttggctactgtgtatgtggtgatgaaaggttcctgatatacgagtacatgga

SEQ ID NO: 269474 - DNA, 522 bp, Zea mays
gcttgctttttggcgtctcgcgctaccgatgcccggccggatcgccgcctgcttccgctgcgccgcggcgccgtcctcgggcgcgggcgcgggcgcggcggggcccagcctggcgacctccatctacgagacccacctcggcttggtcgcgctctcctggtcccggacctcgctcggcctctccctccgcgccgtgctccgcctgtcggccacgcccccgcccggctcctcctcctcggcgtccggagcgggctacctcgacgatgacgcggacgaagagattctcgccttccgcgtcagcccatggctattctggcgccgccgcgggtccagacggttccgcgctggcgaccgcctcgtcgacctggcgtgggatctctctcgcgcgcgcttcccggtctccgggtcccccgagccctcatcgggcttcttcgtcgccgtcgtcgtctgcggcgagatggtcctcgcggccggggacctgaccgatttggcctaccggaggacccgggcccggcgcccatc

SEQ ID NO: 269475 - DNA, 688 bp, Zea mays
ccgcgcgcttcgcctccacgcgcttcgagggcaagccgctcgttcccatcctcggcaagcccatgatccagagaacatgggaaagagttatgctagcttcttcgttggaccatgttgttgtggcaacggatgatgagagaattgcagaatgctgtcgaggatttggagctgatgttataatgacatcagcatcttgcaaaaacggatctgaacgctgctgtgaggcactaaagaagcttgataagcactatgatattgttgtcaatattcatggagatgagcctctcattgctccagagataatagatggtgtacttatgtcactgcaccgagctcctgatgcattctgcagcacagctgttacttcactgaaaccagtacatgcattcgatacacacagggtgaagtgtgttgtggataatctgggctacgctctatacttttcaagagggctgattccattcaatagatcagggaacgccaatccaaaatatccatatcttcttcatcttggaatcgctggctttgattcataatttttgaagatatatccagaacttccaccaacaccattacaaatggaagaggacctagagcaactaaaagttcttgaaaatggctataggatgaaggtgatcatagtggaccatgatgcccatggtgtggatgcacccgaggacgttgagaa

SEQ ID NO: 269476 - DNA, 375 bp, Zea mays
gccagatccagcagaattgagtgacaggctcaaacacaagctagaagataggtgcttagtgagttaaccagtgggatgtcgctggaagatagtttgaagaagagggtggccaagtgccgcagggagtatgacattatttacaagcagctaccggtgctgctagagaagatggaaattctatttcctacggggaagaagatggagagctccgagccggagaacaaatccgaagcaaagggggagccggtcgacccgctgcgagccatgacgccggcagaaataggggagcgctacaaggatctggcggacaccgtcaagggattcctcaaggatctggacgaggccgagaaggagatcgtcgcaggcacgagccag

SEQ ID NO: 269477 - DNA, 1075 bp, Zea mays
  unsure (1)..(1075): unsure at all n locations
ctgcctttcccgtcagcagcagcagcagctgctgcctgctgctgtccatcttcatcctccccatcgcccgactggatttctccctcgaattcgcacctccggcctcccccctcacttcgctgtgtctcatcaacgccggcatcaccgcgaggactgggccagcgctccctccctttctcctccctccgcctttattgctgacggcgacgactgggcgagctctgccgccgctctgcgctaggtgcccaggtcttcctcgggcacttcaccggcgacgagcacccatcaggagcgaaatggacgaggctgttcctgctttggctactggccaagcttcaaccgacggcgtgacagagcagcctgtgaatgtgtacatatgggacatggatgagacactcattttgctcaagtcacttctggatggctcatatgctggggcttttgatggcctcaaggatcatgagaaaagtactgaaataggaaagcgatgggagaacctcattcttgaactctgtgatgagcacttcttttatgaggagattgagaactacaatgaaccctatctcaatgccttgaatgaatatgacgatgggagagacttgacctcatatgattttgaggctgactgttttagttcaccatatgatgatgcgaacaaaaagaagcttgcttacaggcatcgtgctattggagagaaatatgcaaagggtttggaaaaggttctggacggacacatggtcaaagtctgcaatgatcagtacagtttgactgacaaatatactgatggctggctgtcttcagctcataagttactggaagaagcattgggcaaatcagcatcagcaccttcagccaactcttcaagcatcaactgcatagttacatcagggtcactgattccaagccttgccaaatgtttgctgtatcacctggatgatgtggtctcatctgagaacgtctacagctcatgggaagtgggtaagctgcagtgcttcaaatggatcaaggagcgcttcgacggtccaaacgtncgcttctgtgcaatcggtgatggccacgaggagtgcagtgctgc

SEQ ID NO: 269478 - DNA, 384 bp, Zea mays
gtccaatggccgcctcgccctcttcacccttgacagcgccgccagagccggtgaccccgccgtccccatggaccatcacagacggagccatctctggcacgctcccagcagccgaggccttcgcagtgcactacccgggctacccctcctctcccgcccgcgccgcccgcaccctcggcggtctccccggcctcgccaaggtccggagttccgatcccggcgcccgcctcgagctccgcttccgccccgaggacccctactgccatccagcctttggccagtcccgcgcctccactggccttctgctgcgcctctccaagcgcaaaggagctgcggcaccttgtgcccatgtggtcgctcgtgtccggactgcttactacttcg

SEQ ID NO: 269479 - DNA, 598 bp, Zea mays
cccacgcgtccgcccacgactccgctattgtctcccttccaattcgatgcctttgtagcgctgctgcctcgccgcgtcgtcgcgggtccccgatttccgcttgctgctgcgcttccaacaccatggacggcgggggatccggcaatgcctccggcggcagcggcggcgcatcgacgtgctgctactacgcgctcctcggcatccgcaagaacgcctccgccaccgacatacgcgccgcttaccggaggctcgcgatgaagtggcacccggaccggtgggccagcgaccccggcgcggccggcgaggccaatcagcggttccagcggatccaggaggcatactccgttctgtcggacaaggggaagaaggccatgtacgacgccgggctcttcgaccccctcgacgacgacgaccaggatttctccgacttcatgcaggagatgctggtgatgatggatagcgtgaaaaacgagaagccggacacgctggaggacctgcagaagatgctggaggacatcgtgaagggcgacgccgggggcgggagcggcgcatgcgggcgggcgccgacggacggtgctcgacggacgcgcgtcgcgcc

SEQ ID NO: 269480 - DNA, 863 bp, Zea mays
cggacgcgtgggcggacgcgtgggcggacgcgtgggctgctgcgcttccaacaccatggacggcgggggatccggcaatgcctccggcggcagcggcggcgcatcgacgtgctgctactacgcgctcctcggcatccgcaagaacgcctccgccaccgacatacgcgccgcttaccggaggctcgcgatgaagtggcacccggaccggtgggccagcgaccccggcgcggccggcgaggccaagcggcggttccagcggatccaggaggcctactccgttctgtcggacaaggggaagaaggccatgtacgacgccgggctcttcgaccccctcgacgacgacgaccaggatttctccgacttcatgcaggagatgctggtgatgatggatagcgtgaaaaacgagaagccggacacgctagaggacctgcagaagatgctggcggacatcgtgaacggcgacggcggggacggcgtaggcgggcgcgtgccgccggcgccgccggacgttgctcggcgaacgcgcgtcgcgccccacccgcagccgcagcaggcgcgtaggtgaccgccacgccgccgtagctgcggagtacgtacgcttttggtgaaagggactggagaaggatcagaaacgggaggctctctggaaaaaggagaataaaaatttcaggccatcctttgatcataatctacccctcctttattgtaccagtggtcgattgtgtaagctaccggccgcgcccccgcaataactgtcggtcgtggccgggtattcttactttttttttatttgtctcgccgccatttcgcccccaaaacaaaaaaaaaaaacccaagggcgccgctcgcgatctagacaagca

SEQ ID NO: 269481 - DNA, 679 bp, Zea mays
ggactcctttcccttctgtcatctgagactcggaagcctcggccgccgccgttaccacctccttgcgccatggcggagaagtcgccggcagccgacgtggaagccggtctccttgcccacctcaactcagcgggagaggtccccgactcacgctctttcgcttcctccctcggcgtctcccacctcgaacttgagggcgtcatcaagagcctctcagctttccgcatcgtcgacagcacagacatcatcaaggagacatgggtgctcaccgaggaggccaagggctacgccgccaagggctcccccgaggcacagctcgtcgccgcaatttcaccggagggtgcctctaaggacgcactcaaggcaatattgggagatgctttcgatgttggcatgaaggcagccgcgaggaacaagtggataggtttcgagaaggggaataaggacttagtccttaggaaggttgagagcgtaaaggatgagctgcaagagcagcttagaagactagagaatggggaggttgtttctgataaagtgatcgatgatttgaagagaaggaaacttattacgaaagagaaatcaatttggtactctctaaagaaggggtctgagtttgttgtaaagagaaaaacgttggctactgatgtgacaacagaacaccttaggagtggtgactgga

SEQ ID NO: 269482 - DNA, 732 bp, Zea mays
  unsure (1)..(732): unsure at all n locations
agctctctctactctctcaagatgtagctctagtagtagttagtcttggtgggagctctgctaggagtctggagtagtcttcaagagtctgaattatctacatgagcataagaaatatcaacagaaagcaggccctaaaagataccaaacctatagttgactcgaaagcaatgtctttggaaaatgaaagcgcactacagacggtgcacgtaagaagaggtggaagaaaatgtcaatcctatgggagctatcttactggaaagacttagaggtccaccacaacatcgatgtcattcacgtgaaaaaaaatgtttgtgggagtttgcttgggacactcatgagtgatagatgggaaacccacgaccatgcaaaagcacgagcttaccttgaagaattggacataaagcccgagctctattctgacaagtccagtgcccaaccacctttattcagaatatattgccagaaaaaacccgaatggcaatcatgaacctctacttatttaatgtaatctctcagaaggtccttgatgaaggatcactggatgatcatgaaatgaacatgtgtgagatgatgtgtcttcccgagcttacttctcgctgactttctttgacatatccatcctatatttggttaaggagatcaggtttcttgcaccgatgttcctccaccacatgtatctgtacgagagatttatgagtactctgaatatccanacaaaagaagactttt

SEQ ID NO: 269483 - DNA, 416 bp, Zea mays
agaaggagacacactcatcgttcagtttatccccacggctatcaatatttccccaatttatatttaatttgaggcgttctcagtttgttcaggtttttaataacagtcccgaggatactgcgtattttaggatgatgttgcacagagagaatgtaaccaatacagttgtgatgattcaaccttcacttatatcctattcatttcaatcatggccagagccagttcttttggatgcaactgcaattgcttctgacatgatccttttattgtactcttattttactgtttgttatattccatggtgttaaccattgtactatctctaaatgcttttcactattatcttgaatgtcttcgaggtctttatttctatttttatatatttttttatgttttattcttttttttattatttt

SEQ ID NO: 269484 - DNA, 457 bp, Zea mays
atacactcttctaggatcaatcgtgaggagttcattaaattgtcttgcgacatggagtacagaaagagggtggatgcgctagtgtttttctcgttacttctcctcggatactttgctgctcatgcacatgggaagggtcatgtcacagatgatgtcggtgtttctactccagctaaagaaggaattatgcaaggaaacggagcacgatgcgttgtagggtttcctccatgcaaagataacaagtgctactgctgcattggggggcgaactcatgctcgctactctacgatggctgagtgtagacatgcctgcttctaaacaaaaattaagatcgctgttattatatacattgtaatggtaggtaatgctattaataatatatgggaattttagttttggtattaaaaaaaaaaaaaaaaagaaaaaagaaaaatataaaaaaaaaaggggcggccgc

SEQ ID NO: 269485 - DNA, 774 bp, Zea mays
gcagctggccttcaccgccaccttcttcgccggcgtcttccaggcgtccctgggattgctggggctgggcttcatcgtggacttcctgtccaaggcgacgctgacgggcttcatgggcggcgccgccgtcatcgtgtcgctgcagcagctcaagggcctgctcggcatctcccacttcacctcccacatgggattcctcgacgtcatgcgctccgtcgtcaaccgccacgacgagtggaagtggcagacgatcgtcatgggctccgccttcctcgccatcctcctcctcacgcgccaaatcagcgccaggaatccaaagcttttctgggtatcagcaggtgctcccctggcgtcggtgatcatctccaccatcctctccttcatctggaaatcccccagcatcagtgttatcggcatcctccccaggggagtgaaccctccttcggcgaacatgctcagcttcagcggctcctatgtggcgctgacgatcaaaaccgggatcatgacaggcatcctgtccttaacagaagggatcgcagtgggcaggaccttcgcgtccatcaacaactaccaggtggacgggaacaaggagatgatggcgatcgggctgatgaacatggcgggctcctgcgcctcctgctacgtgacgacggggtccttctcccggtcggcggtgaactacagcgcggtctgcaggacggcgttatccaacgtcgtgatggcggctgctgtgctggtgacgctgctgttcctcatgccgctgttccacacaac

SEQ ID NO: 269486 - DNA, 732 bp, Zea mays
atcatatgcatgcaagggacgaaattagttaccagttaccaacactttcagcatatgcacgcaagggacgagattgattacccattaccaaaccaacagtttccagttcagcggtaggaacaggccgtcacggcgtcatccgccaaaggacaatccatttgctcacacaggcacaaacgctgagcgcctgagcctgctctcgcggtctaggagatggcgttgatcacgaatgtctctgactatgaggagcttgcaaagcagaagctgcctaagatggtttatgacttctatgccgggggtgcagaagaccagtggacactcaaggagaataaggaggcattctccaagattctgtttcgaccacgggtgctgattgatgtgtctcatattgacatgtctacaagtatattgggttacaaaatttccatgcctattatggtggctcccactgctttgcacaaactagcccaccaagaaggagaggttgcttctgcccaggcagcagctgctgcaggaactataatgacgttgtcttcatggtcatcttgcagcattgaggaagttagctcaattgcaccaggactccgtttcttacaactttcagtattcaaggatagggatatcgtgcaacagcttgtcagaagggctgaaaatgctggctataaggcaatcgccgtcactgtcgacgctacacgccttggtcgcagggaagccgatgtcaggaacagattc

SEQ ID NO: 269487 - DNA, 504 bp, Zea mays
ccctcctccatttggcagtggcacatctatataggcaccccgcacccggaatccccactcccccacgacgccgtccccgtccccgtcccgacgaattggaataggagaagcaaaagatgatggatctcgccgacagccagcaacagcggctcatcgccggcgcggctctgctggtcgccaccgtcgccttcctcaggctcctcctgggctcccgctccgggggcaagcgcctgccgcccaccatcccgggggcgccggtggtcggcggcctcgtcaagttcatgcgcgggcccatccccatgatccgggagcagtacgcccgcctcggcagcgtcttcaccgtccccatcatcacccgcaggatcacgttcctcgtcggccctgaggtgtccgcgcacttcttcaagggcaacgaggccgagatgagccagcaggaggtgtacaggttcaacgtgcccacgttcggccccggggtcgtcttcgacgtcgactactccgtcaggc

SEQ ID NO: 269488 - DNA, 569 bp, Zea mays
  unsure (1)..(569): unsure at all n locations
gttagtttgttgttttcttcttgtagttctttacaacaaagccttatgcctgtgatccatcaaatctacccaaatatcccccaagcaaggaatacgatgctaagcttcgagatgaagaagctaggaggcaaagagcagctgctaaaggacaggaagctgaagctggacggaggaagcaacttcctgcacccgatggtaatagtggattgcagcaccgccgagttcaggtgaattccaaaaacagcacttacaagttcactccaaaggaggatgtttctggatttccaattgatccgtcagcaagagctgcagataatggttacccacagcgtgttcctttgatgcaagctggccgttcttcatccactctgggcagatcaagtggaacggatccaaaggcccaacgatttcacacctcccaaattgttactacagaaatgtccaaccaatctactgcatctgggcagagaggcaatgctcctaagatgtctaaccttgnggaaagtgcccggggcaatatttgagagagcaccgttccagttcaagatacagtcagctcaccgctgctg

SEQ ID NO: 269489 - DNA, 733 bp, Zea mays
gaatggaagtctcgaaggttccagcgagcgactgtgtcgagcaggagagagcgcgatggggaagatgcggcagctgatctgcctcgtggccgccgtcgccgccgcggccatcctcctgacagcgtcggccaagaagtccggcgacgtcaccgagcttcagatcggcgtcaagtacaagcctgagtcatgtacgctgcaagcacacaaaggagacaaaattaaggttcactatcgtgggacactcactgatggatcagttttcgattctagctatgacagaggtgacccgtttgaattcactcttggaaatggccaagtgataaaaggttgggaccaaggattgctcggtatgtgcgtgggtgaaaagaggaagctaaagatacctgcaaagatgggttatggtgagcgaggctccccaccaaagattccaggtggagcaactctgatcttcgacacggagcttatcgccgtcaacgggaagacatccggcggtgcaaaggcagagagtgacagtgagctctgatacaatgcattggagagtttcaaagctcgggggggaatagtagcagcgtcgcatagttcattaggtgaaagggttgctgtttcctccacatagcagtttatgctatagagatgtcacagaaacaagtcaggttttgcccgatggtcgaacagtttcctttccatcttatgaaaactcgaatttgtctataaagctaccatggtcttcaac

SEQ ID NO: 269490 - DNA, 420 bp, Zea mays
cggaaagagccgaacgggaacgtggaaggaaggttccagcgaccgcggtcgtggagtaggactgtaggagaaagcgcgatggggaagaagcggcagcttatctgcctcgcagccgccgtcgccgccgcggccatcctcctgacagcgtcggccaagaagtccagcgacgtcaccgagcttcagatcggcgtcaagtacaaacctgagtcatgtatcctgcaagcacacaaaggagacaaaattaaggttcattatcgtggggcactcactgacggatcagtttttgattctagctatgacagaggtgacccgtttgaatttactcttggaaatggccaagtgataaaaggctgggaccaaggattgctaggtatgtgcgtcggtgaaaagcggaagctaaagatacctgctaagatgggc

SEQ ID NO: 269491 - DNA, 1480 bp, Zea mays
cccacgcgtccggtcgaatccgccgtgagatccgcccgactctcgctccgttccggcgctctcggtcgggcgaaggctccaccttcctccgacaagatggcggggaagggagccaaggccacggccgccaagtcggcggacaaggacaaggggaagaagaccggcggccccgtctcgcgctcctcccgcgccgcaccccaggagaagtcagctccgaagaaagatgtttatcaattgttcgctgagaaggtcagggataacaaacaactggaatcaagatgggcgatcatgcaagaaacccgcgtggagtatttccgtggaaaagatttcaataccttcgtcaagaatcatccagaagtcagggaaattttggggccagataaggatttagaggtggaagacattgttaacactttgctgaccaagaaccttgtgataaggtgtgatcgagtcatgaaaactgtgaggcctggcaagaaaaagctatcgtcatggcctgctcatttggagatacataatgaacaagtgtttactgaaaatgatgggttttttgcttggatgtttctgaaaagaaggaccttgtggcagacaattctttcatttgtttggcctctttttgcactggcagtctgcttatttccagtttacccataccagtgcaagattgttgtactgtactcatgtgctggagctctacttttcattgtctccattcttttgctaagagctgctatctttggcatcctatgggttctccttgggaaacgcgtgtggttcttccccaatataaatgcggaggagacaacatttagagaactcgttcgtttttggcctgaaaaggatgaaggagagcggccaaagtggacatcaagacttttctatgcccttgttgctctattggtgatattactgcttaggcaccatgctcctgacgaagcagctagagccaggtaccaaaagaaggtttctaacataattgatgatgttcttgaatggtccccgaagttagctatttctggaatgattgaaaaacacactggggctaacattacagaagaaagcaattacactagcagggctgcgagtagtcatgtgcctccttccaccaaagccaaagcttcagaagtcggttcagatacggatattgaggctaacttagatgaagcccaagatagtgaatatgctgatgatacaagatcaagcgaagcttaaaatcagctttatcttgtagttttttgagcaatctttgttattgttaatctgcagaatcatgtagatagcttactgctgacaacaaaaatttagggtgtcatgttttgatgttacaaccatatattgcctgcaatggttgtattctaaggttcccaaacaacattctcatagagcgcgacaaatcttcaccttttctctacacgagcatgaatctttttaatttgattttaagtgtgttgacaagttctgtacatgattgttgttaagt

SEQ ID NO: 269492 - DNA, 382 bp, Zea mays
ctcgagccgatttcccccaaacatttttttgtcgaatctgtcgtgagatcctccccgacgagatggcggggaagggagccaaggccacggccgccaagtcggcggacaaggacaaggggaagaaggccggcggccccgtctcgcgctcctcccgcgccgcacctcaggagaattcaactccgaagaaagatgtttatcaattgttcgctgagaaggttagggataacaaacagctggaatcaagatgggcaatcatgcaagaaacccgtgtggagtattttcgtggaaaagatttcaatgccttcatcaagaattatccagaagtcagggaaattttggggccagataaggatttagaagtggaagacattgttaacacttt

SEQ ID NO: 269493 - DNA, 450 bp, Zea mays
ttcgacccattctttcggtccgattcttattcttttatcggacggaatccttaacctatgggctgtcgaactaatgattctttgtacccttttttgcttttgcctttcatccatagttctgctacccagagttactaccgggtccgtatccttgcatcatgggcattaacttgtttggtatctaacgagagattgctgtacgttattagtgatatactggataattcacctcgtggaagttcacaaagcaatggctcacagtgttcagcatactgatcctgccatatcagctaatacgggaaaagcaaatgttcttttgctgcctaaagtcattcatttcaatacatggcctgttgctgcagctggctactcttgtggattacaactttagaggtttgacagacgggcgcacggaggatcagattattggcctattactggaggttcttt

SEQ ID NO: 269494 - DNA, 507 bp, Zea mays
gcagttccgttgtgtacctgccgcagggccacctcgagcacatcggcggcgacgcggcgcgaggagcagcagcttcggcggtgccgccgcacgtgctctgccgcgtcgtcgacgtcaccctccacgcggacggcgcgacagacgaggtgtacgcgcgggtgtcgctgctgcccgaggacgaggtcgcggagaagcgggcgcaggcgcgggcccgggtccgcgaggacgcggaccgccgcgacggcgaggacggcggcgccatgaggccgctcgcacggacgccgcacatgttctgcaagacgctcacggcatccgataccagcacgcacggcggtttctcagtgccgcgccgcgccgccgaggactgcttcccgccgctggactacagccagcagaggccgtctcaggagctcgtggccaaggatctacacggcacggagtggaagttccggcatatctatcgaggtcagccacgaaggcatctcttaaccactggatggagtgcat

SEQ ID NO: 269495 - DNA, 510 bp, Zea mays
agatgatggtggtgatgagggatcagatgacactgataatgaggaatatgactatcgtgatgatgatgatcctgcagccaatggcgaagggggaaccgatgacgacgaagatgatggtggagaggatgaacaggatgacgacgtcgacgtcgatgatggcgacgatggcaatgaggaagaggaggaagaatctgaagaggatgatgatgatgatgatgaagtcccccaaccacctactaaaaacaggaaatgatcaacggctgcgacgagtggttgcttatacgcaggaatgctgcctgttcgtccctgcgcagcagtttactgtttagtgggtagagttttttagcttggtcgtggacaattcatagcctagtttggaaacgaaaaagaaacatttaattgtgcatgtactattaaaccattccttcaatcatgtatctcaaatccctatcatggtttctgaattgtgtttgcctaagttttgtattgcaatttaacaatgttcttgtg

SEQ ID NO: 269496 - DNA, 516 bp, Zea mays
acaggagcagttgctgaaagagtctgctccatctgcttctgaggaacaagctatgatgaataacttttccaagaattctgagacttcacattttcttgatagcaatgctgtggaagtgagaactggaacttcagagcctactgttcaaagttccaatgacgaaggtgactcggatattagtccagaaacagacctagctgtttgcaatgttcctctagtttcatctgagggacaactgaaatctgagagtagggctgatgatcaacaggctgctgaaccaacagtttcagttcgatcagtatccagggaaaagcctagtgttgacatcgccaggtcaaagtccgcagctgggaagaggaagaagaaaaaggaaatgcttgctaaggctgatgctgctgggtcttcagatctttataatgcatacaagggaccagaagagaagtctgaaatggttggtactgcatatggtgctgatagttcttcaatagttgacacatcacatgtgctggttgatta

SEQ ID NO: 269497 - DNA, 667 bp, Zea mays
cccacgcgtccgcatctgaagcgcgcgagagacagacgcgtatacccaggcggcggttgaggaggaggagaagaagaagaagaagatggcttcctccgcatacgcctcatggtccaagcggtggatccgtcccgaggtgtacccgctgttcgtgccgatggccgtggccctgggcatctgctcgtaccagcttgtgcgcaacatcacgggcaaccccgaggtgcgggtgaccaaggagaagagggcggccggcgtcctggacaaccacgacgagggcgagaggtacgctatgcacggcctcaggaagttcgtccgcgggaagaagcccgagatcatggcttccatcaactccttcttcgccgaccctcccaaggacgattaagctagattccgtcatggatggatgaatgtatggattcccgattcccgatcgtccatagtatgttttaccattcattagctgccggcggcgcgccttgattcgtagccgtcgtcggtacatttttttttgtttctaaaattctaattctcccatataaatggaacatcatgcatttgtgcatttgtcgtgtttgcttgcatggctgcgaacgatttcagcacgcctttgggattttcatcacatatttgattgataacggatgactgtatgatattgttgcgtccc

SEQ ID NO: 269498 - DNA, 287 bp, Zea mays
ctcatctgaagcgcgcgagagaaacgcgtatacccaggcggcggttgaggaggaggtggagaagaagaagcagatggcttcctccgcgtacgcctcatggtccaagcggtggatccgtcccgaggtacgtacgccgttgctgtttcccatctgatcgttcgttcggtttctatcgatcggagatttgggtcatcggggatggatggatggatctgacgggatttgccgatcccggtgtcgcgcgcgtccatggatcaggtgtacccgctgttcgtgccgatggccgt

SEQ ID NO: 269499 - DNA, 568 bp, Zea mays
gcaggcggcaagggtcagccgcccaagaacgccgccggcaagggccagggccagggccagaagcagcagcagcccaagggtggagcgggcggcgccggcgccggcgcgaaagtggtggcgctgccgcactcgcagccgacgccgcagcagctgatgcagatgcagcagcagatgcagatgaacgggatgaagtttgctcatccggagctcatggccatgggcgcaggtcgcatgccgatgccgatgccgttcccggcggcagcgcaggcgcaggcgcaggccgccgcggccaaggaccccaagaccgtcaagttcgacctcccggggggcgaggagttcggggacgacggcagcgacctcgacgacgagttcgacgaactagacgacgtggatttcgaggacgacggcctcgacgacgacgacgacggcgacctgtacgacggccccgggatggtgatgaagcccatgggcatgcccccggccgctgctgccggtggcggcaacggaaacggcggcggcaagaagggtggcggcgggaacgaggtcccggttcagatcaatgggaacg

SEQ ID NO: 269500 - DNA, 472 bp, Zea mays
tttctttcataaaccccgcgccgcccgccggcgaccttcagtctcatgtctcgcgcgtagctcggacaggcagcttgaagctcgcgaaccagccatggcgaatggggacgcggccgtggaggtcggcgggaacggggagcaggaagccgcggcgcgccaggcgtcgacgttcgcggagctgggtatctgcgcggagctggtggaggcgtgcgacgccatggggtggaaggagcccaccaggatccaggccgaggccatcccccacgcgctccaagggaaggacctgatcgctctggcgcagacggggtccgggaagacgggcgcgttcgcgctgcccatcctgcaggagctgctcagcaaccgccaggctgaacagtcttttttcgcttgcgtgctctcgccaacgagagagctggcaattcatatcgcatagcagttagaagcgcttggatcaactatttggtttgcggtg

SEQ ID NO: 269501 - DNA, 1155 bp, Zea mays
cttgggagtgtgtactggggacaagtctgggatggttctcagattgctgtcaagaggttaagtaacgcaaagaacggcacagaagcggaatttgcttcagaagtcgagatgctgggaaggataagacacaaaaacctcctgagcttccgtggatactgtgcggacggacccgagcgcgttctggtgtacgacttcatggcaaactcaagcctgtatgcacatctccatggaccgcattccgcggagtgtctcctcgactggcggaggcgagcatctatcgccatcggcaccgctcgggctctcttgtaccttcatcgccacgcaacgcctaagataatccacggaagcgtcaaggccaccaacgtgctgctggattcagacttccgggcgcacgctggcgatttcggtctggcaaggcttattcccgacgacggaacggaccacgaaaagatagccagcagcgagagccagcgaggctaccttgctcccgagtacgccgccatgtccggcaaaccaactgcaggctgcgatgtatacagcttcgggatcatactgctggagcttgcgagcggcagaaggccagtcgagaagtcgggttctggcaaggcttgtggaatccgaagctgggtgctcccgctcgcaaggcagggcaggtacgacgagattgcggactcaaagctgggcgacaagttctctggacctgagctgagaaggatggtgttggtcggtctagcgtgcacacgttcagaacctgaaaagagacccacgatgcttcaagtcgtgccgttgctgaaaggcgagtcgaaagaaacgcttgttaagcttgaaagggaggagttgttgttcagcccagactcgacgacggtgagttcgcagggaacaccgaccccagatgggagcacggactctgcgccgccgctgaagaaagatcaagaactggttggggcgtgagttgcgatatattgctgttctaggcgattgtagagtgcgtatttgtggtattgatgattagtctgtgcggtttgacgtgaatgggaattgtataggcattgtttttttctctatgtttggtttctgtcccttttgagggagtaaggaagagccggcgggctggaggactctgttgctttgcagctttttggttcattatgcttt

SEQ ID NO: 269502 - DNA, 1583 bp, Zea mays
tgggattttcatttgaggtgaaggtagttgcagctaaccatgataacaaaagcacacagattaccaccctgcccaatgagccagaaatagattcatttaaggagattgaagtgccaggtgtaccacctgcaggaaacattctcgtcaatgatggagttatcagcacctctgcaaatgttgtttctccagttaagaatgaccctgttgttgagacatgtgtgaaagtggttaacgaggatgttgtgaagatacctgtagccgctccagcttcaactcctgttacagctgaggaagttgttaacaaggattttgtgaagattcctgagtctgctccggctctcccttcatcagttgagaaggctgctccagcacctcccgcatcagttgagaaggctgctgcagcacctcccgcatcagttgagaaaggtgctccagctcctcgcgcaccagttgagaaggctgatccagctcctagtgcaccggttgagaaaggtgctccagctcttcgcgcaccagttgagaaggctgatccagctcctcgtgcaccagttgagaaggaagtaactaggaagacttatgcatcagttgttaaaatcccgagggaggacacacagcctgccccagctgccagaccctccaagcccaacctaaatataaagatggttcaaaatacggagaaaaatgtgtcctcaccatcgaaacctgctcatgctactgttaatgccctaccgggcgataagggtgttcctaaaaacaaatcacctgatgagccagggtactcaatttttgttaagaatttaccttttgaagcaactgttgaaatggtcgaacaagagttcagcaagtttggtgctattaaatctggtggtgtacaagtcaaatgccagcctgatcagttttgctttggctttgtcgaatttgagtctcagcaatccatgctagcagcaatcgaggcttctagggtttatttcggcacaagagaatcatatgttgaggagaaaagaaccaaaacacgagttgttgatggtgttatcacccgtggggatgacaatggcaatggcggtggcggtcggttccattctggcagaggtggtggttactatggggacggctacaagcggcagtggggcggtcagaacaacggctactacaacggcggggataacatgaggaacgactactcaggtcgtgtccgtggaccgcaagggaacggccaccctcagaacggccacggctaccatcagaacggccacggctactactctgggaatggctaccaacagcgacgccccaacagcaatgggaacggactgagggtcgagcgcaacaatggcttcaggcagcaaggccctgcatctgcctagaccttgtcatttttgcagtccatccttgatacgaaagcagtggggatattttgatgtctataggtagatactttgtcatggctgaattttgttgtcgcggttgataagagcaatcgtgcgtcctttgactggaactgtaatgaggagtggagtcagtcgtgtcgcaaaggggaaaaaaacatctatcgaaatccctgctactcttttgtcgtgctgtcc

SEQ ID NO: 269503 - DNA, 1150 bp, Zea mays
cccacgcgtccgggctcctggaagtggttattgacagaatttgcattgtattatggggtttcagatgcctacacgaggttgaggtacctgtcttatatcatggatgttgcaactcctaccgctgattggctcaatctggttcacgggcttttgttacctatactgatgaaaagcgatggtactgctactttgagccaccaagagaaccgaatactgggagaagttgaagagcaaattgagcaaactctagctatggtttgtgagaattacaagtcgctagatgactctataccgttgggtttggcggaagattttaggcctccaactggattggctgctgctgctctggaaccagctattaagttgtacagtcttctacacgacgtcctatctccggaagctcagcttagattgtgtggttacttccaggcagctgccaggaagcgtacgaggcgttacatgattgaaactgatgagtatgtatcaggaaattcagaaggcttcagggtagacttggtaaccgttaccacggcttaccagaagatgaaatcattatgcaacaatctacgaagtgaaatttttactgatattgaaatccataatcagcacatacttcccagttctgttgatctgccaaatttagctgcctccatctatagtgtagagctgtcaaatcgtctacgcgcttttcttgttgcttgccctcctgctggtccagcatcacctgttgctgatttggtggttgccacagctgattttcagaaggatctggctagctggaatatctgcaatataaaagcaggtgttgatgcaaaagagctgttccatttgtacattgtattgtggattgaagacaaacgcaggatgttactggaaaactgcagactggacaaggtcaaatggtcaggagttaggacccagcatatgacaacaccttttgtggatgagatgtatgatttgctgaagaagacattgacagagtacgaagttatcatttgtcgatggccagaatacatattcgttctcgagaatgctattgcagatgttgagaaagcggttatcgagtctctggaaaaacagtatgcagatgttttggctccactgaaggattgtattgcaccaaaaaaatttggcctcaaagttgtccaga

SEQ ID NO: 269504 - DNA, 491 bp, Zea mays
  unsure (1)..(491): unsure at all n locations
gtcggccacaccgcatcgagcgccgccgccactcgccctcccctgccatctctcgccggccgccgcctcccgcccaccggccaccgcagcgtgttatatttcagcccctcttgatcggccacccgaaacccgcaggagagaggctaaggaacgatggggtggaaggcggcagagaagctcatcaggcactggaaggtcctgcgtggtgacaacgtgatgatcataagaggcaaagacaagggggagtccgggctcatcaagcgggtcattcggtcgcagaatcgcgtcatcgtcgagggcaagaacttggtcaagaaacacattaagcaaggggaagggcacacaggtggtattttctcggtcgaagccccacttcatgtctcaaatgtccaggtggttgatccagtcactgggaaaccatgtaagattggatacaagtatctggaagatgggaccanagtcaggtatgctagaggaatgtacgcatcggg

SEQ ID NO: 269505 - DNA, 1031 bp, Zea mays
cggacgcgtgggcggacagcctgcagccctccatccacgaactcccgttctccatttccagccatggcggtgtcgatcgagctcaccaaggagtacggctacgtcgtgctggtgctggtggcctatgtcttcctcaacctttggatgggcttccaggtcggcaaggcccgcagaaagtacaaggtgttctaccccaccatgtacgccatcgagtcggagaacaaggacgccaagctcttcaactgcgtgcagagggggcaccagaactctctagagtggatgcccgttttcttcgtcatactgctgctgggcggtctgcagcacccgaccatcgccgccggtctgggcggcatctacatcgtcgcgaggttcttctacttcaagggatacgccaccggcgttccggacaaccgtctcaagattggggggctcaactacttggcgttgcttgggctgatcatttgcacagcatctttcggcatcaacctgctcatcagggagatgctctaaactttgggtttatatgtgagctccaggctgggttaaccgcacaagttactcatggtctgagcatcaaaactttgtgatactagtcgtttggggttttatagtggagttatcgtttctttctttgtctgtgtgttgttagcaaaagaagtgtgcgtctgcgtcttatagctgtgatggaataaggagacagatgggttgaagcgtgaatcgtacagttcttgctgcttgtcactctctgatctggtttcgttgtagatgagatggttgttaatggtttgtgtttgaggcacgatccgccttattttctaccgatctaaagccggggtgtaacaattttgaattattctggttttgggtttatgtttatgcgatgtattggctggtagcagttctgcattgactgcatatcaaccttaatcagctggtaacaattcttggacgtttttatattattactagttgtgcgcccgtgcgttgcaacgggaacatataataccattgatggcttatgtacgttggga

SEQ ID NO: 269506 - DNA, 1225 bp, Zea mays
tcgcccacgcgttcttttgcgactgaatgtctgtcctattgctgctggtgtctctgcttattttggcttcaaaatatgttgacttaatagtcccaggttatacccatctgcaaagggcgcagcctgttctgctgccacatcttctcttatcatatgttgaacagttggagcgtgatgctggtcggctggtcaactgcagggagcgaatgaatttctgtcctcttggtgcttgtgctttggctggaactggacttcccattgataggtttcaaactgctaaagatttgaaatttacggctccaatgaagaatagcattgatgcagtatcagaccgtgactttgtacttgagtttcttgctgccaattcgattgctgctgttcatctttcgcgaattggtgaagaatgggttctttgggcatcagaggaatttgggtttctgataccaagtgacaaagtttcaactggaagcagcattatgccccagaagaaaaatccagacccaatggagcttgttcgtgggaaatctgctagggttgttggagacctcatgactgttctaaccctctgtaaaggccttccacaggcctacaaccgtgaccttcaggaagacaaggaacccttgtttgatagtgtgaaagctgtattaggaatgcttgaagtatgcacagagtttgctcaaaatatctcttttaattcaaaaagaatacaaagttcacttccagctggttatctggatgcaacgacgctggcggattatctcgtgaagaagggagtccctttcagaacttctcacgagatagttggaaggtctgttgctctatgcgtctccaagaactgtcagctagctgagcttgaattggctgacctaaaatctgtccatcctgtatttgaggatgacgtctatgaatacctgggggttgaaaacgctgtaaacaagttcatatcctatggctctactggttcagaacaagtgaaaaagcagcttgaggattggcgcatccagctcggggtgagctcataagggttggcatggttcaagaaataagctcgcaaattagtgcttgcgatttttgaaggtgtatgttgacgtcgtgaactttttctgtgtgtttgttcattcatttcgaaaactggaatgaatgatgtaaacatgttggacaccttgagcctcttttatatattattattgcactgtgttttaaaaacaaaaaaaaaacaaaaata

SEQ ID NO: 269507 - DNA, 508 bp, Zea mays
  unsure (1)..(508): unsure at all n locations
gggccgggaattctttggcggacccacgcgcgttacttganccaagaaggaaaaggagagggggtgttggattgggaggangngcctatgagggcccaaacacacctaattgaaagggttggtgagccagccaagaagttgcatactgctaggagccgcaatgaccaaattgtgacggatctaaggctatggtgccgcgatgctattgacaagattttgattcgtatcaagcagcttcaggtgtctctggctattttggcttcaaaatatgttgacttaatagtcccaggttatacccatctgcaaagggcgcagcctgttctgctgccacatcttctcttatcatatgttgaacagttggagcgtgatgctggtcggctggtcaactgcagggagcgaatgaatttctgtcctcttggggcttgtgctttggctggaactggacttcccattgataggtctcaaactgctaaagacttgaaatttacggctccaatgaagaacagca

SEQ ID NO: 269508 - DNA, 833 bp, Zea mays
cccacgcggacaatcgccaaaaccccccgagccaacacctactacgccgccgcgccgccgcgtcaaacaacggcgagaggacgcctatggcattcacttcccaatccctaatcttccgggcacccgcctcgccctcttgtgcccgcataaccccgtcatccggtcgcgtcaccctccgggaccgcagcgccgttttcccgctcgtcgcggcggcctccacctcgatggcgtcctcggagagcgaagataagagggaaaccaagctgtggggcgggcggttcgaggagggcgtcaccgacgccgtggagcgcttcacggagtccatatcctacgactggcagctctacaaatacgacataatgggcagcaaggcccacgcctccatgctcgctggccagggtttgataacagctactgatagggatatcatcttagaggggcttgatcagatagagaggctgatccaagaaggcaaatttgagtggaggaaggaccgggaggatgtgcatatgaacattgaagcggctctaattgaaagggttggtgagccagccaagaagttgcatactgctaggagccgcaatgaccaaattgtgacggatctaaggctatggtgccgtgatgctattgacaggattttgattcgtatcaagcagcttcaggtgtctctggttattttggcttcaaaatatgttgatttaatagtcccaggttatacccatctgcaaagggcgcagcctgttctgctgccacatcttctcttatcatatgttgaacagttggagcgtgatgctggtcggctggtcaactgcagggagcgaatgaatttctgt

SEQ ID NO: 269509 - DNA, 541 bp, Zea mays
tggacaagttcatgtcggaggtcaagagcatttttacatggaacctcagtgcactcttgtctggccagtggattctggaaatgaaattcatatggtttcatctactcaagctccgcagaagcatcagaagtatgttgcaagtgttcttggtcttccacaatcaaaagtcgtttgcaagactaagcgtattggtggtggatttggtggaaaagaaaccagatcagcaatatttgctgctgcagcatctgtaccctctttctgtctgagaaggccagtaaagcttgttttggacagggacgttgacatgatatcaactggacagaggcacagtttccttgggaaatataaggtgggatttaccaatgaagggaagatactggccctagacctggaaatttataacaacggtggccattcacttgatctatcccttgcagtactggaacgtgctatgtttcattcagaaaatgtctatgacatagaaaacatcataatcaatgggcacgtatgctttacaaacttcccaagttatactgctttt

SEQ ID NO: 269510 - DNA, 381 bp, Zea mays
acggcggatacccgcagctaccgttagcggaggctatggcattgggcgcaacccgccgcagcacgaggcgatgggcgccaaggagcgcggcggtggtgcggtgcgggctgctgcccgtggacccgtgggcgccgacgatggactcccagagcgtggcctcgcagctcttcgccgtctcgctcttcccctacctcggcttcctctacttcatgaccaggtccaagaccgcgcccgggctcacgctcttcggtttctacttcctcctcgtcttcgtcggcgccaccatacctgctgggatttacgcaaaagttcattatggtacctcactgtccaacgttgactggctgcacgggggcgctgaatcgctgctgactctcacca

SEQ ID NO: 269511 - DNA, 593 bp, Zea mays
ctttaatctgtatcaatttctcctccaccaagttcctcctcccttcgacttcctctcccccgtctggccgtgcagccccggaggcgtcactgggcaaggaggctggggtggggacctcaaacgccatggatgtgcagccctaggcaccagatattaggatggatggagtcacacaagctgttgaaaatcttaagaaagaatggggccaagcagtttcacagcttgacgagaacattactgcaatcaaatcatgtggaaaaacagggaaagggacagaggaagcaaattctcttccaaggttgaatggttctgcacaggatgctctgcagttgctgaagtcactgcagttccagcttgatcttctagcacagcagcttcccacttttgatgaggtgcagtctggtcaagcaaccttgaagtcatgggatgaacaatacaagaagcttcgtattagcttgaggaatgcttacttagaagcaaaagacaacattagacatgctgctgaagaggagagggcacttcttttaggcggtggtgaagagtctaccatccgtaggcgtaatctccagacaaagggctgaatgacatctgct

SEQ ID NO: 269512 - DNA, 1139 bp, Zea mays
ggcacgtaagctccgtctcgtcctccagatatcggccgccaccttcacctccaccgccccggcgcacctgtgcgtctccatcgtcgccgcctctcctccttcggacacgactgaccttccactggcgccaacgaagaaaacacataggaagaagctcaccgccaaacctcatccagatccagtcgctgccctccgaaggccgcatacggaacgtctcgtctcttcctttggatccggcggtcaactccatcacccccagcttcacctcccttagtccccctccgtccgctctcacccaccgcttctatatcgccacctctctcgttgtagaagaagacactgaggatctggctttctggaatcacatttcttgagaactatctgttggagaactaaactaggctcttgttcatattatggatcagcaagctaagattgatgctgattttcttgaaccaactgtactcttagatgagacacattaccaggaggggtacaaaaatggctataatgatggtttggcatctggaaaggaagacgggaggcaggttggtttaaagatgggtttccaggtcggtgaagaactgggtttctttcagggctgtctggatgtatggacatctgcaattctcattgatcagaatgccttcacagctcgggtcaggaagaatatcgagcaactggctgcactggtgggcagctatccgctgtccgatccggagaatgaacaaattcaagacgtgatggagaagataaggctgaaatttagggtcatcactgcaagcttaggggtgaagttagagtatgaagggcaccccaaatcatctaaacaggatgctgaggatctgtgagcggtgattgaaattacattttagtttctccgcccttgctgtttaaagctcttcaactcattggcatcatgaggaactgtcgtgagacatcaatggtcagagtccgaccataaccacatatatagttttaacaatgtctcaagttttgtgttattacctgttgtctgctgtctgccatatgtaatagtttcctttcccaaggcaaaagcacttccttcccaaaaaaaaaaaaccaaaatactcataaaaacaaaaaagaacaaaaaaaaataataaactactaccacc

SEQ ID NO: 269513 - DNA, 581 bp, Zea mays
gggcctcgacatatcggtagccaccttcacctcaaccgccccggcgcacgtgcgcgtctccatcgtcgccgcctctcctccttcggacacgactgaccttccactggcgccgacgaagaagacacataggaagaagctcaccgccaaacctcatccagatccagtcgctaccctccgaaagccgcatacggaacgtctcgtctcttcctttggatccggcagccggtgctcctcctccggatccggtggtcaactccatcacccccagctccacctcccttagtccccctccatccgccctcacccaccgcttctatatcgccacctctctcgttgtagaagacactgaggatctggccatcatcatccgtcgcccctcactcgatttcccatctgccgctccctcctggtctctgagccgctgatcgggtctccgacgcacggaagtgaagccgttccgccgtgaagcagcgccaccccttgccatccgcccgaccgctgggaagcagggcccacgtcttcaagcttcctacaggaagagcctgcgcccctcccaaaggacaaagatattatgatggatg

SEQ ID NO: 269514 - DNA, 638 bp, Zea mays
  unsure (1)..(638): unsure at all n locations
taaccggcgcaacgatggtggcgagaactatgaccggcgcaatgatggtggcaagaacttcagccgcaggaatgacagtggtaccgagaacttcaaccgcaggaatgacggtggcggcgagaacttcagccgcaggaacgatggtgttggcgagaacttcaacgtcaggaatgacggcgttggtgagaacttcaacaggaggaacaacttcagagatcagaatgacttccctggacgaggacggggttcacctacaccagggaacagttactaccagaacgggaatgggaggttcagtcgcgtgaacaatggcgccaagcaagctcctgtggccgcgtagaggcatcaaggcggtaggcttacatcaaactaggaagcataaggctacattcaagtgagctgagtgcaaggattattcttagtaggagcattgctgtcagacagcttggttatttttttttgtgccgtgttgggtcgctaagagattagtagttgcagtcgtccgtggatggtaggtgaattttgttgccgttgatgagcttgtcaactgggtgttggaccatggttcgtaactttgtgtcatctgccaatcaggattggtggcaggttagacactaatcttatcaaccggtgnctgc

SEQ ID NO: 269515 - DNA, 373 bp, Zea mays
gcctccccttgcacgacgtctccatcactacaccacaagtccacaagtccacaacaccaccaggcaccagcctcgtcacagccgcttcagcataccacaccgcacgcaaacccaccgcgcgctacgaccaccaccgtcaccatggccgccgcgcgctacgacgtggagaagggcgggaggaataacggggatgggaagccttcgccgccgccgccgccgccgggccacctgtacccgcagcgcgacggggagagggagtgggtgccgtggttggtgccgctcgtcgtggccgtcaacatcgtgctcttcgccgtggcgatgtacgtcaacaactgcccggcacacgccgcctcgtctcgccgcggcggcgcgg

SEQ ID NO: 269516 - DNA, 414 bp, Zea mays
tgcgcccgttacttggtgcagaacacctgctttggagagactaaggaactatggtgctatctttttaactccattgtcacaccgcctggcagaaaaaattgatagatccagagtcccggagattgtgatgcagggtgaattatcacgcactacgagctaagccgcagtatcatgaaagacaacgtagtgatatagcgaataacctccattcagaaggccctttcatgtcaattcatcttcggtttgagctggatatgcttgcatatgctgggtgcttcgacatattcacacctgaagaacaggaaatcctgttgaggcatcggaacaaatattttccatttctgttgaggtattggggcaaatattttccaggaaacacacctgactacagggaaagaaggctcattggaaagt

SEQ ID NO: 269517 - DNA, 757 bp, Zea mays
tacgtcgaccggagcgcgtgaaccccacggggtcggcctcattagatgacggccgccgccacctcctgagtcgtccccggagatggagcggttcctctgcgagcggctgctgaacacggagcaccccatctcggagcgcttccgggcgctcttctacctccgcaacctccgcggggatgcgccgcgccgcgccctcctccaagctgcaagggatccttctaacttgcttgcccatgaggctgcatttgcacttggacaaatgcaggatgctgaggctattcctgcactggtggcagttctcaaagatctttcgctacatccaattgtccgccatgaggcagcggaagctcttggagctattggcctggaaaagagcatccctgtgttggaggaaagtctaacaactgatcctgctgtggaggtccaagaaacttgcgagctggcactaggacgaatagaggagaataagaaagttaatggggctgagagtacaaccacttcaccctttctctcagttgatccagcgctgccttcaaagcatgggctttcagtagatcaattaaggggccttcttctcaatgagcaagagagcatgtaccaacgttatgcagctctttttgcgcttaggaatgatggtgggagatgctgctgtttctgctattggtgcagctctgagcgtcaatagtgctcttctacgtcatgagggtgcttatgtgttagggcagctgcaaaacaaaggcgctttagatgccctttc

SEQ ID NO: 269518 - DNA, 882 bp, Zea mays
ttccaaggggaagcttgtattagatccttcaccgccctaattgcctaatggatgaaaagcggaggatcaagatggcccttgatgtggccaaaggcatgaattgcctgcacactagcgtgcctacaattgttcatcgggatctgaaatcgccaaacttgctggttgacaataattggaatgttaaggtttgcgactttggactttcacggttaaagcacagtacgtttttgtcatccaaatccactgctggaacacctgagtggatggcacctgaggttctacggaatgaacaatcgaatgaaaagtgcgacgtttacagctttggtgtcatattatgggagctggcaacgcttagaatgccatggagtgggatgaatccaatgcaggttgtgggggcagttggtttccaggataggcggcttgatattcccaaggaagttgatcctctggtcgcaaggataatatttgaatgctggcagaaggatccaaatttgcgcccgtcatttgcacagttaacaagtgccctgaagactgttcaaagactagtgaccctttgtcgccaggagaaccagagcccccatgttcagcaagaaatctcagtgcatttgtctccttagtggggctttccactttgcgttgtgcatagttttttgttctgctgctgtttgtgtttgtcaaaaagtcggcaaatgcaccttgtagattgagcgtccgaggtggtagacactttgctgccgcgacaaggaccccaaaggtagggtatgtatagagtcgcccatcaaactccaatcggatcagtgtgtagcaactcattgttatgccctcgtcaatacctggccaaccgggtgcgagccctctggaaaagcagtgagagctctgtgt

SEQ ID NO: 269519 - DNA, 562 bp, Zea mays
gcaggcccagctctagcctttccaaagtgcgcgcaatctcctctgccgcatccgatattccgatctcgatcccgcgacgcggtgtctccggtcagcgccgccgccttctccctcgccggccgccactgcatcgccgcagtcgccatgaattatatcattggagcattcaagccaccttgtgacatctcgatcacattctctgatgcgaggactaggaagcaggtttcggttaagaaggacaatgggaagacaacgatggtccctgttttccagagcctcgaaactatatctggagaagtatcaatagcaccagttccaggtaaaaggattgaacacacgggtgtcaaaactgagttgctaggccaaatagagctctattttgaccgagggaacttctatgacttcacttcgttagtacgtgagttagatattcctggtgaaatctatgaaaggaagacgtttccatttgaattttcaactgttgaaatgccatatgagtcttacaatgggacgaatgtcagactcaggtacattctgaaggtgacaattggcagaaactatg

SEQ ID NO: 269520 - DNA, 1316 bp, Zea mays
tcgcgatctagaactagtttcggacctccccagtttttcccctccggccgccgccggagaagcagaagccatgcaggtcgccgccgcgcgcgcccgccgcctcctcgccttaccggcggcctcggggatccccggaatactctccggaccgatcccagggcgcgcatcatgcgccgagggcgttctcctttaccgtctcaatggcgctcccgcttcgccgtcttctccgcagcataccaggggcttctcctcctcctgcttcgcctcccgatcacactgtaacctcccatcgcctaccatagcttctcaatggttgaatgagaaatcagtacactgtcacatgacgacagcacacttctcaacggaagcaagtgacatggaccaccctacagaagctgtagaggagatgtaccagaaaatgttgaaatctgttgaagctgagaccatgcctccaaatgcctggttgtggtcaatgattgatagctgctccaataaggaggacatcaaacttctttttcaaattttgcagaaactcagagtatttagactatcaaatcttcgcatcagtgcaaacttcaatgagcatctctgcagaaaagtaactgaggcttgtgctcgtgtaggtgccgttgactatgggttgaaggctttatggaaacataatgtttatggaataacaccaacgattggttctgctcattatctactgcaacatgctaaagagcaaaatgacaacaaactaatggaaaacgtaattcatgtcctatcgagaaatttcttaccgctgcaaccaggcacagctgatatagtcttcagtatctgttataatgctgatagatgggatttactctcaaaatacgcggagagatttgttaaggcaggtgtcaaactgcatcgagctgcatttgacatttggatggactttgctgccaaagttggggattctcaatctatttggcacattaatagtctaagaggcaggtctgtcaaacattatacacttgcaacagggtttgcatgtgcaaaggggtctctgcttgatcggaagccagaaaatgccgctgacaagattaagcttctttatgagcatttgcctgatcagaagaaaccatttgtgaaagatgaactcgagaaacttattgctggatggcctacggaggtggtaaagaggcagaagaaagataagaggaaggcgttggaagaagctttgatgaaggacatcgctacgatggtggactgcctgacaaagtccggcctcgacatccctgtggaactggacaagctttccaccccacagctccaagtggcgtaacaaa

SEQ ID NO: 269521 - DNA, 1245 bp, Zea mays
  unsure (1)..(1245): unsure at all n locations
tctcttttttttttttttcaccgnctctttttttcgggggtttttttatttattgtggggcggggcaggcaacaatcactttttcagctaccattctattcaaaaccagtgtaacagggaaaacacattctccacggactacattacatatagcgctagagagctcacaacagctacacattattgatgaccataaccataagaatcggtggcggggaaaagaaaagaaaaaaggaaaacttgaaagaacaaaccgcgctagagacgatcgatgcctagagaagactcagtgccacacaagagcatctaattctgacctaagggtgggtggaccatatcatacaggtgcaggtgcaggtgcaggacaggacagtcaaactcgtgggaagcgagaaggtcctctacgtcgcaggaactctgggatctccaccgtgctgctgccctctgcgggggacgggcgtcggccattctcactttgttgcccacccttcgacacgcggccttctggttcatcctgccgtttgaagccagtagctatcaaggttatgctcacctgcccactcagtgacgggtctatgacggcaccaaatatcagattagcatttggatcgacaaggtcgtagataatttcggccgcagcattcacctcaaacaaagttaggtcagttcccccagtgatattccacacaatgcctgtggctctttcaattccaatatcaagcagcggcgactggatggcgttaagagcagcatcccttgctcttgactttcctgtagcagtccctatacccatcaaggatgaccctgcattttgcatgatagcacgtacgtcagcaaaatcaacattaaccaacccaggaaccgtaattatatcagatatgccacgaatgccttgacgaagaatatcatcagccagattaaatgcttcagttacaggtgtatttggagaaacagcagacagcaacttatcatttgggatgacgattagggtgtccacactatttctcaatgctgctattccctcctgagcttgaactgcccgtcttctcccctcgaacgagaaaggcgttgtgactatgccaacggtaagtatacccatggtcttggctattccagcaatcacaggagcacctccagttccagttcctccacccattccagccgtcacaaaaaccatgtcagaaccagaaagagcttcctgaatggactcgctgctctcctttgctgcattcatcccaaagacag

SEQ ID NO: 269522 - DNA, 437 bp, Zea mays
cccacgcgtccgcccacgcgtccggcggtccgcaactcctctaaacccttcctctccctccggcgccggcgccgacatggccgtccactacctcctccgccgcggggtctccggtggctcactgctccaccctatccgcggtctcttcctcgcctccaaggagcttgggaggcgtccgttgggctctgcggcggcgggagacgcagcggccgagctgaggggcgcgcgggaggacgtcaggcagctgctcaaggccacctcctgccatcccatcctggttcgattaggttggcatgatgctggtacatatgacaagaacattaccgagtggcccaagtgtggtggagctaatggtagcttgagatttgaagtcgagttgaagcatggggccaatgctgggcttgtgaatgctctgaagctgatccaacctatcaagg

SEQ ID NO: 269523 - DNA, 351 bp, Zea mays
tcgtgtctgcaagacgaaactagctgtggagtgcataattgcagccctaaaggctgttggatcattcatagaatatgtcaatgatggaggtgacattgtaaaaatgtttcgggattttgttcccagtatcttgaatatatcaagacagtgtcttgctaatggagaagaagatgctgcttccattgcgtttgaaatttttgacgaactaattgaatctcctgcaccacttcttggagactctgtgaggtcaattgtgcaattctcgatggaagtttctgcaaaccaggatttggaaataaatataaggcaacaggctatccagataatttcatggctggtaaaatttatagc

SEQ ID NO: 269524 - DNA, 423 bp, Zea mays
ggagaagggcaactaggtctgggctctagaatccgaactgtttcttctccccatcctgtaccgtgcattgaatcagcactatacagcaaggatcgcccatcagctatgaaaggtaacaaggctgctgaaggacatgtcagtaaagtcttgggaaattgtgtgagggccattgcttgtggaggtcgtcacagtgctgcagtaacagattcaggagctcttcttacatttgggtgggggctgtatggacagtgtggacaagggaatacagatgatgttttaagtccaacgtgtgtatcctctatcctgggatccaagatgcaagacgttgccgcgggtctgtggcacactgtatgtacatccgtagatggtgatgtttattcctttggaggaaaccaatttgggcagcttggcactggttctgat

SEQ ID NO: 269525 - DNA, 365 bp, Zea mays
tagatcgacccagcgtacgcgtacaccatatatgcctgaaagccgcttcctcacattcccgtgcgcatacatgccaccagaaacatgatctgtacattgatgcgaaaagaacacttgcttctgaattttggctccaaagatctggtggtacatgtggatgatgttcaaccgtctgaaatcaggaaaccaacaaacgcagacagactggatttctgcccttgtatatactgagatattccgttgttgctagcaggaaccgagtaaagctccttccatttcgattctttctttctttgaagtttcggttgtgcacgtttagatagtcacacgcactggggctgctatttcgctatatttttgatcga

SEQ ID NO: 269526 - DNA, 527 bp, Zea mays
tcagcagctgacctgacactgaacatgcgggtcccatcgccgctggccagcaacgcctctgccttcttccctcggcctcctccctctgctgctagtctgccagcttcgaaacctccgccccgtcgcataaacccctcctcgcctcctccgcccgagcctgcctcctcatcgacttatacgcctccttctcttaactcgacgcactagcctcagccaattgtcgcatttcgtcgctatggggtccacagcggccgtctccgtctccgcctcggcgatcgcgtcccgcggctgcgccagatccgaggctgcgcggcggccaggtggaatccgggtctgcggactccggagcgaggccctcacgtgtcactcgcttcggatctcgcaggcgcccgcgaggctgacggtggcgaggccgccgccgccggcggcggctaccaatggcgcggatgaagggacctgctggttcgactacgatctggtcatcatctgcgcgggcgtcggtggtcacggctcctcgctgcacaccg

SEQ ID NO: 269527 - DNA, 976 bp, Zea mays
cccacgcgtccgccactcccctcttccccagttccccttgtcctttgcgcaggggaaaaggagcgccgcagaccgagggacggcgacgaggtatccaatggccgaccctgacgtgatcgaagtgaccttcggcaacgacgtgattaacaccaccgtcacatcctccggccaggctgtggagcgctggatcgcggagatcctcgcgttgcaccgccccggcagcaacggctacagcatcatcgtcgggcttgacgttgagtggcgcccaagcttcggcccgcaccagaacccggtggccacactgcagctctgcgtcggacacagctgcctcatcttccagctcctctacgccgactacgtccccggcgcgctggcggagttcctcggcgaccgcgggatccgcttcgtcggcgtcggcgtggaggcggacgcggagcggctcagcgacgaccacggtctggtggtggccaacgcggaggacctgcggggccgcgccgcggagcggatgaaccgcccggacctccgccaggcggggctgcgtgcgctcgtgcaagtcgtcatgggcgtcaacctcgtgaagccgcagagggtcaccatgagccgctgggacgcgtcctgcctcagctacgagcagatcaagtacgcctgcatcgacgccttcgtctctttcgaggtcgcccgcaggctgcttggcggcgcgtactgatcgacgcggtgaggtgctgtgttgtttaatccttactctatcctgtcttagtttgttgtactttgccgtggactcccgttgcttaatccttagcctatcctatcttagttcgttgcgctttgcttccagacaatttgtgctagtgtgctcagacttcagatttggttgttgctgcatttcgggctacaaggttgtaggggtttctgtgatcgaggagaattattcagacagtcatgtactgcgttcctggtttgtcgctgcttttggcgt

SEQ ID NO: 269528 - DNA, 1477 bp, Zea mays
cggctgccgagcgcagcccttctatctctacagcaagcttcagatcctccgcaacttcgccgcttaccgcgacgctctccaggggctccgctccatcgtcgggtatgccgtgaaggccaacaacaacctccccgtgctacgcgtcctgcgtgagcttggctgcggcgccgtcctcgtcagcggcaacgagctccgactcgccctccaggcgggattcgaccccgccaggtgtatatttaacggaaatgggaagacactcgaagatcttaaattggctgctgagagtggagtatttgtaaatgtggatagcgaatttgatttagagaatattgtcagagctgcaagagctactggaaagaaagtgcctgttttacttagaataaatccagatgtggatccacaggtacatccatatgttgccacgggaaataaaacatccaaattcgggatccgcaatgagaaattgcaatggtttttgaactctatcaagtcatactcgaatgaaatcaaactcgttggtgttcattgccatctgggatctactattacaaaggttgatatattcagagatgctgcagtgcttatggtgaattatgtcgatgaaattcgagcacaaggttttaagttggagtacctgaatattggaggtggtttgggaatagattaccatcataccgatgcagtcttacctacacctatggatctcatcaacactgtacgagaattagttctctctcaagatcttactcttattattgaacctggaagatccttgattgctaatacttgctgcttcgtcaatagagtaactggtgttaaatctaatggtacaaagaatttcattgttgttgatggcagcatggcagaactcatcagacctagcctgtatggagcatatcagcatatcgaattggtctctccccccactcctggtgctgaagtagcgaccttcgatattgttgggccagtttgtgagtctgcagatttccttggaaaagatagggaacttccaacacctgatgagggagctggactggttgttcatgatgcaggtgcctactgcatgagcatggcttccacctacaacctgaagttgaggccgccagagtactgggttgaagaggatggttcgattgttaagatcaggcatgaagagaagctcgatgactacatgaagttctttgatggtcttcctgcttagatgtttatttgtgactgctaggggcgatgttttcttggagataattgaatttttctttgtcaagctcattttgctttcttgtggttgttatggaatgttactggatactggatagttagttcggcctgtaggcgtatcctcctgaacttacctctcattgctattagttttggcaccaagtttgttcccaattgccatttacggaagttattgcataaagggctgtttggttgtaatcttcccgtaagaataagatgcatgtttttgagttaaaaa

SEQ ID NO: 269529 - DNA, 564 bp, Zea mays
gggtggaaacggacggttcgatcgttaagatcaggcatggagagaagcttgatgactacatgaagttctttgatggtcttcctgcttaaatgtttattatctgcgactgctacggacgatgttttcttggggataattggattttctttgtcaagctcatttttgctttcttgtggttatgtaatgttactggatactggatagctagttggtgcatcctcctcaacttccttttcatttctgttagtttcgtcaccaagttcgtcctcaattgctatttggttgtaacccagctgtaggatgcctggcttgcctgtaaccgcctgagcgtgatttggttgggaactgacggtttcacctggtgagacatgcctgcgaaccaaatctgcccccttggctgccgtatgtgtgataccaaaatctgttgttgtcttgtaggtttaaaaaaaaaaaaaaaaaaaaaaaaaaaaaaaaaaaaaaaaataaaaaaataaaaaaaatataaaaaaaaaataaaaatataaatataaaagggcggccgttttagaggatccaagcttactt

SEQ ID NO: 269530 - DNA, 851 bp, Zea mays
tcgctctccccattctatctgattcccaattcctcatctgcttcgcttccccccaaatcgaatcctcatcgctccgtctatggcgactctaaccatgcagccgatcggtcccacccctgctccggctgcgcagcaagacccaagcaagggagagaatcctcctaccgtggatggtaccgatctgggtgacatcgactcgggctgggttatcctcaagaactcggatgtcgtttccgcggatttggcagccgccgccgtctgtggcggtcagcgtctaggctcttctacgattcctagctgggcacggtgggttctcggaggtgtggtttacacgctcgtgccgttctacaacagagttaggcatctcgaagacgagacggtgggattcgtggagaatgctgtggaggttgtggagcatttagctgaagtaacagagaagctagctgcgaatgtggctaagcaacttcctgaagatgggtctctgcagaaagcagtggaagaggttgaacacattgctgaggtagtggatgatgatgcggagaaggttgaagcagtcactgaaaagatcgacaaggtcagtgatgagattgatgctgctgtggagccggtcatcgcggagcttgaaaaggaactcgatcagagcacaacctcagacgatggagttgacacaaagaattgatcaactgcatgttaggtgtgctcttcattgtacatagcgtgtgtactgttgtttttcttctctctctcctctttggagaaactgcttgtacatatgtatgtatggaccatgaagattattggtactgtatcaagtcactatccataaataaatacacgctggcctgtgaaaa

SEQ ID NO: 269531 - DNA, 386 bp, Zea mays
tcgaccacgggtgcacgcgtaaccctcagactctacctaaacaagctcgccgcaccctcgccatggacgcccccaccggcaacggtgtcctcctctccgctgcgcatcgtgatctgcccgtggctcgcgttcggccacatgctcccgtgcctggagctcgcggagcgtctggcttcgcggggccaccgcgtgtccttcgtctccacgccgcgcaacctggcgcgcctcccgccgcggcgccacgacgtgcacctcgtgcccctgcccctcccacgcgtggagggcctccccgacggcgtcgagtccaccaacgacctgccccccgacaagagagacctccactggaaggccttccacggcctcgccgtccccttcgctgagttcct

SEQ ID NO: 269532 - DNA, 448 bp, Zea mays
gtgaggcacagggtttttttgatatgatgcctgagaaggaggtcaaaccaaacattgctagctatgagttgctattgaaggcatatattgatgctgcaaggttggatgatgcgattaaggtcgccaaatgtatcctgttagatgagagtgtcgtctttagtgatgaaacgaaagcacttctggaggaggcactagacaaagagggtagaaatgggcaaatgacaaagttatatgaagatgttgagatggagaaagcagaggcggctgcacgtgcagctgaagagaaggctagagcagaggcccttgctaaagaagaagaggagaggaagaaggccgaggcaaaggctaaagaagaagctgctgccagggctagccgagcggctattgatgcagtgctgggtcgcaagagggaagcagaaaaacatgataccagtgatggactgaacgt

SEQ ID NO: 269533 - DNA, 452 bp, Zea mays
tagtccacccacgcgtacgcaaaacaactcaaaacaatactagttttgggtcacttagttcagggatatggcacaagaggataccaactctgcggcggataagacgggaacatctcaagcaccaaggctgcacttgtcacacaatagggcctcactgaccagcaaggtgacagcaaaaattaggaagattctgttgaaagctaaggcacccaggaagaagaaaactactatgtatccggtcctagcagctgcactcaaatttcataaagatgatgacgtctatcctgcagctgctggagtgaagcagcagcagcagcacaacaaggagatgtagagatctattatgaatgcacctcatgccaacatcgatctaccttagttatgtattaatttcctagtacctagtgtcatctcaagctatctatctttacattatatcgtgtcatcatgtc

SEQ ID NO: 269534 - DNA, 443 bp, Zea mays
aaaccactcgatagaaaagcccccctcaaaacccacggcgccgcgcagccgcgttcacgaagcttggggaggcgagcaccccgatccggcgaggtgccgcgagcgaggcagcgatgagaggccgtgcgtcccatctccgcgcgctcctctcgcgagcgctctctccaagccttcctcctcctggtcgcgctctgcctcaggtcactaggcccggtgcgtctccgttcggagctggattcgtggggcgcgcgcgcttcttctccatcgacgcctcggctgcgacgcagggcgggtcgaagccccctgcgccaccgccggcgggtactgcgggccgcgagggagggggtggtggtcagtctgggaaatctgaacaagcggacgccgggaaagccgtccacggagggccagtagcttggctcacttttctactcctgcttgtgact

SEQ ID NO: 269535 - DNA, 466 bp, Zea mays
gcgagagcgcatggagagcagagaggaggagaggaagggcagcggtggcgccgccgccggcggcggctcgacccctggggcgaatctaagggacctggtgtcgagggaatactacggccacaagaagaaggtgcactctgtagcatggaactgcctaggcacaaagcttgcttcaggatcgatcgatcataccgcacgtgtctggagcattgatccacatgtccattctaaggttaaagatattgaactgaaaggccacacagatagtgtagatcagctttgctgggatccaaatcatcctgatacagttgctactgcagctgctgacaaatctattcgtctttgggatgctcgaagtggaaaatgtcaagttgttgaacttagtggagaaaacatcaacatcacatataaacatgatggcactcagatagcttgtggaaacaaggaggatgagctgacgatattg

SEQ ID NO: 269536 - DNA, 551 bp, Zea mays
caacgcttcgctttctcgttgactcgttcccactcccagacgaccggccgccagcgccgccgcgttgatggccgccgcaccggaggagcgcctcgacgtcctcaacgccgctggggacaagatcggcgtctccaagcccaggtcggaggtgcacagggacggcgactatcaccgggcggtgcacgtgtggatctacagcgagagcaccggggagctgctgctgcagcgccgcgctgactgcaaggactcgtggcctggacagtgggacatctccagcgccggtcacatctccgccggcgaatcctcgctcttctcggcacagagggagcttgaggaagaactaggcatcaaccttccagtcgatgctttcgagcttatatttgtatttcttcaggaatgcgttatcaacaatgggacatacacaaacaatgagtacaatgatgtttaccttgtgactactttaactccaattccacttgagggattcactctccaagaaagtggagtatctgcagtagggaaatgcggtggggtgagacaaaagctgcctt

SEQ ID NO: 269537 - DNA, 502 bp, Zea mays
cccacgcgtccttctcacgcgtccgcccacgcgtccgaaaaccctaaaccgtgcccctccgtcccaaccgtccgccgcctccctctccgctccgccaagaccctcctcctcacccctctcacccagctcccctcgagcccagaagcaccgcgcgcaccatgcggccaccgagagggcgcggcggcggcggccggttcggcggaggtggaggccgaggcggcggcggtggccggttcggcggcggtggccgtggtggcggcgggggcgcttcggcggcgggttccgcgacgagggcccgcccgcagaggtcgtcgaggtgtcgacgttcctgcacgcgtgcgagggggacgcggtgacgaagctcaccaacgagaaggtgccctacttcaacgcgcccatctacctgcagaacaagacccaggtcggcaaggtcgaagagatcttcgccccatcacgaatcctattctctgtgagatgatgaggggacatgcacatcgacatg

SEQ ID NO: 269538 - DNA, 362 bp, Zea mays
gctctgtggagcgccgccccttctccgacgtggcgcctcagtatttgttagggttttctccgggattgaaggcactgctgcaggctgaaacgtttctcgcttgattggcggaagaagggattccagcgatctgtttgctgctagctgcgagagttcaatatgtctcggaccttcaaatcgacgacgggtctctctcggcggtttctgaatctgatcgcggccaaccactcccctggcgtcaagtcgctgcaccgcatcggcctgggtcgcatctttaactcaacgccagggccaataccaaacggagatcgattggagttcgcagtaggtcaagaagacttcatggtgcggtcccgcgcgtt

SEQ ID NO: 269539 - DNA, 1512 bp, Zea mays
gcaggacaggagaagcttgggtctcctatcctccccacccctctctcggtctcttccccaccgcgtcttcgtcgtctcgtcttcctgcctccttcgcccgagaaaggagagaatggggagcagcgagaagaccgttaccgcttacggcgagtacacctacgctgagctggagagggagccctactggccgagtgagaagctgaggatttcgattactggggctggtggtttcattggatcccacattgctcgccgtctgaagaacgagggccattacatcattgcctctgactggaagaagaacgagcacatgaccgaggacatgttctgccatgagttccacctcgttgatctcagggtcatggacaactgtctcaaggtcacccagggtgtcgaccatgtcttcaatctcgctgctgatatgggtggcatggggttcatccagtcaaatcactctgtgatcatgtacaacaacaccatgatcagttttaacatgctggaggctgcacgtatcaatggtgtgaagaggttcttctatgcctcgagtgcatgcatttaccctgagttcaagcagcttgacacaaatgtgagcttgaaggaatctgatgcctggcctgctgagcctcaagatgcctatggcttggagaagcttgcaaccgaggagctgtgcaagcactacaccaaggactttggcatcgagtgccgcgtcggccgcttccacaacatctacggccctttcggaacatggaaaggtggccgcgagaaggcaccggctgccttctgcagaaaggctcagacatccacggagaggtttgagatgtggggcgatggtctccagaccaggtccttcaccttcatcgacgagtgcgtggagggtgttctgagattgaccaagtcagacttccgcgagccagtgaacatcggaagcgatgagatggtgagcatgaacgagatggctgagatcgtgctgggctttgaggataggaagctgcccatccaccacatccctggcccggaaggggtccgcgggcgcaactctgacaacacccttatcaaggagaagcttggctgggccccgacgacgaagctcaaggatgggctgcggttcacctacttctggatcaaagagcagatcgagaaggagaagacgcagggggtcgacatcgcggcgtacgggtcgtccaaggtggtgtccacccaggcgcccgtgcagctgggctccctccgcgccgccgacggcaaggagggcctctaagcgacgacccagggctggggctgtcttcgtccatcacagctggcgtaccatggcaggatatactgtttgcggtagaatatcacagtagcagctaaactagtccttctggaggttcaaacatgagggtcgtcttctattctattttcccattcatcgctccatttatttatgatgccatgcaactcgttgattttttgctgtactccctttatttggtcttggccggccggcaataaaattctccctgtttctactac

SEQ ID NO: 269540 - DNA, 420 bp, Zea mays
ccccgacgatgaagctcaaggatgggctgcggttcacctacttctggatcaaagagcagatcgagaaggagaagacgcagggggtcgacatcgcggcgtacgggtcgtccaaggtggtgtccacccaggcgcccgtgcagctgggctccctccgcgccgccgacggcaaggagggcctctaaagcgacgacccagggctgtctggcgtaccatggcgggatatactgtttgcggtagaatatcacagtagcagcaaaactagtacttttggaggttcagacatgacggtcgccttcttttctatttttcccattcatcgctccatttatttatgatgccatgcaactcgttgaatttttgctgtactccctttatttggtcttggccggccggaaataccattctccctgtttctactaa

SEQ ID NO: 269541 - DNA, 460 bp, Zea mays
tcgacccacgctttcgtacgactgccctgccccctcgtggcggcggcggttctgcacacgcgcacttgtccccaaacagcggcgtcggcgtcggcggcgatgagtatctcaggcgagcttcccggcgaaggatctgacggtgaggaggaggtcttcatcgacgaggaggacatcatccacgagataaccatcgacgaagaagatctccccgaccgcgacgaagaagatgacgacgtcggcgacgggattggtagggttgattcagaagacatcattgatgattctacgtactcatttcttggccacaaagatgaagtcttcactgttgcatgcagtcctacagatgcatcacttgtggcttctggaggcaaagatgataggggatttctgtggaggatcggatcagatgagggtgccttggagctgactggacacaaggatactgtcggcacagtggctt

SEQ ID NO: 269542 - DNA, 435 bp, Zea mays
caacccgtccgtcgtcatcgatctcgtttcaaatccatgcatcctcgtttcctccgtcccgcagcatctcaaccccatggccaagatcaagatcgggatcaatgggttcggcaggatcggaaggctggtggccagggtggccctgcagagtgacgatgtcgagctcgtcgccgtgaacgaccccttcatcagcaccgactacatgacctacatgttcaagtacgacactgtgcacggacagtggaagcaccatgaagtcaaggtgaaggactccaaaacccttctctttggtgagaaggaggttgctgtgtttggctgcaggaaccctgaggagatcccgtggggttcggttggtgctgaatatgttggtgagtctactggttttttcactgaccaggagaaggctgcagctcacttgaagggtggtgccaagaa

SEQ ID NO: 269543 - DNA, 1495 bp, Zea mays
gccgttaaccccatcccttcgcctgccctgcccacgtggccacgtacgagtgaccttcgattattctgttcgctctcgcccaagtcatcgtctggtcgtcgcccgcagaggcgcagacgcccaaagccggaaggggcgccatggccgcgtcggatctggagagcaaggccaaggaggccttcgtcgacgacgacttcgagctggccaccgagctctacagccaggccatcgacgccgggcccgccaccgccgacctctatgccgaccgcgcccaggcgcacatcaagctcggcaactacactgaggctgtggcggatgctaacaaagcaattgagcttgatcctatgatgcataaagcttactaccggaaaggtgctgcatgcattaagcttgaagaataccaaactgcaaaggctgctcttgagttgggttcttcttatgcatcaggcgattcaaggtttgcccgtctattgaaggaatgtgatgagcgcatcgctgaggaatctagccaggcaccagtaaagaatgtcgaggctcctgtagctgctactgttgaggacaaggaggatttcacaaatatggataatacaccaccagtgatagaacccccaagcaaaccaaaatacaggcatgactactacaacagtgccacagaagtggtactgacaatatttgctaagggtgttcctgctgatagtgtagtcattgattttggtgaacagatgttgagtgtatccattgaagttcctggtgaagaaccataccattttcagccccgtctgttttctaagattatccctgagaaatgcaaatatcaagtcttatccaccaaggtcgaaatacgccttgcaaaagctgagcaggtgacatggacaaccctggattatagtggaagaccaaagactgttccccagaagataagcacgccagctgaaacagccccaagaccttcatacccatcttcaaaggcgaaaaaagactgggataaactggaagctgaagtcaaaaaggaggagaaggaagaaaaacttgatggtgatgctgcattgaacaaattcttccgtgacatctacaaggatgctgatgaagatatgcggagggccatgatgaagtcattcgtggaatcaaatggcactgttctctcaaccaattggaaagatgttggagcaaagaaggtagaagggagcccccctgatggtatggagctcaagaagtgggaatactaaagtttggactgcccgtcttttgtaaatccaggtcttggaaactatgacctaattctgcccacccatagtgccatgagcttgcttggttaagtctctgcttttgtaagctttctgtatgacagtctagcgtgtgtctgagtgctacttgccgtagcttttgatggacataggtatgctattatgtggtatcgaccccgaaccatctgtggtatcaaagacagcaaactataatgtatggaatgcctattctttttggtcaaaaaagaaaa

SEQ ID NO: 269544 - DNA, 489 bp, Zea mays
ataaactggaagctgaagtaaaaaaggaggagaaggaagaaaaacttgaaggtgatgctgcattgaacaagttcttccgtgatatctacaaggatgctgatgaagatatgcggagggccatggacaagtcattcagggaatctaatggtaccgttctctcaaccaattggaaagatgttggatcaaagacggtggaagcgagccctcctgatggtatggagctcaagaagtgggaaatttgaagtttggactgcccctcttgtaaatccaggtcttggaagttatgacctagttctgtccacccatttggtgtcgtaagtttggttaagtgtgtgtgtgtttttggttcagctgtcgttcgaggaaaagctattgtaagttgtggactgtgtaaaagctgcaatagattgtgggttgtgaaaaaggtgtatgctgtttaatttaaacaagcataaaacttacacgtgtctctattttttcattttcttg

SEQ ID NO: 269545 - DNA, 492 bp, Zea mays
actagttctagatcgcgagctgccgccctttttttttttttttttttagtgagcatcaccacaaaggctttccgcgttgacattggtcactgaatatctcattcattcacaaggtaaaaaggaaaaagaaatgcaattatctgctgaccacctctcattctctatatgatctgatctgatcacagaagaaagaaagaaacactttgaactccctacattattatccgacacagcttggcttcagttaatccccagacctcctccccctcccttttgcaacctatgtgcttactcatttctcttttcgtgtacactacatacatgcagtcatgacttggctggccctgtcaccatggcggcgacggtctcctcgggggagctcgccttgagcagcgccgcaggagcttggatctgtgcgatctccagcaggatcttgttgagggactgcggcttcgagaagaaggggcagtggtcgccgccgttgatcttgaa

SEQ ID NO: 269546 - DNA, 520 bp, Zea mays
  unsure (1)..(520): unsure at all n locations
ctttctcgtgcgttttccggtgccggagtactggctacacctgaagcccctaccacgataagccctaatcccagcgccacctcgatggcgaccacctctttcttccatccgctcgccgccccgatggaccgcggtggcgtttgttttcgtcgctgcccgttcagcctaaccatccccgcccgtacagcgccccggcgaccggcgccgcttctcgtcgtccgcgctaagcgcgccggcagccaggcccctgctgccgccgcctcgcgtcagcccgcgaatcccagcgcggtcccgaagcgggacgtggaagaagaggaggaggaggtcgaggaggagatgccctggatccaggacaaggcgctggacctcgtggagttcactggcaccgtcacacaggccatcccagggccccgtgtcggctctagccctgttccatggcttctcgcggttcccctcgcctacgtcngggtctcctttgtgctcgcggtcgtccgcaccgtgcgcaagttcacctcgccgc

SEQ ID NO: 269547 - DNA, 425 bp, Zea mays
ttttcgcgtgggctccccgcctcactcctttgtctcctcgcctcgtgctcgctcgctcccctcgccctggcgaggagggcagcagaaaccctagcggctcaggccgggcgggggttagatgctccaaggttcgagagggaagggtaggttagtggtgcgccatcgactatgggctgcgtcttcggccgggcggctgcgtcgtcctctgcagcgccgaagaagaagtggggcaaggggaggtcgtccccgcagcccgaagcggggtcgccctccgcagtcgccgccaccgacggggacgggaggccgcggcggcggctcgggggccgcagggcgtcgggacccaggcagggttgcgtccccgcggctgctcgcggccgagcagctcgccgccggttggccaccgtggctcgttgcagtcgctgggg

SEQ ID NO: 269548 - DNA, 955 bp, Zea mays
  unsure (1)..(955): unsure at all n locations
cggtattaaccctaangaaacccaccctccctcgaggcgttctcgacccccgcgcggcggcgccgccatcacaacccagagcaccccctccccaccccaccctgtcccgatggctgcggacgccgccgctgcggcgatgtccgcgacttccctctgcgacgatctccagcccgccaccgtgcgcacccgcatccgcgatgtcctggccgcaggtgccgcgcgtgccggggaccgcgtcgtggtcggtgggtgggtccggacgggccgggagcaggggaagggctctttcgccttcctggaggctcagcgaccggtcctgcgctgccacgcttcaggccatcgttgacgccgccgtgcacccgctagcgcgcctcaccgccaccggcacctccgtcctcgtcgagggcgtgatcaaggagccgcccgaggggaccaagcagaacgtcgagctgaaggtcagccgcgtgcttgagggtcggcgaggtcgatgccgccgtctacccgctgcccaagggcaaggtcaaactcacgctcgagaagctcagggacgtcgttcatctccgttcgcgcaccaacacgattggagcggttgctaggattaggcaccagttagcctatgcatcacacaggttctttgatgagaatggatttctctatgtacatacaccaataataactacgagtgactgtgaaggtgctggtgagatgtttcaagtgacaactttatttagccaggctgagaaaactgagaaggaattgagagagaacccaaaaccttctgattctgaaattgaggcagctaaagttcttgtcaaggaaaaaggtgatgtggtcgcacagcttaaagctgcaaaagccagcaaacaagagatatcaactgctgtcgatgagcttaatagggcaaaggaaattgtttcaaaactggaggagaggttcaagttaaagcctgggattc

SEQ ID NO: 269549 - DNA, 634 bp, Zea mays
ttcgtttcgcacgtgcccgatcagccgccccaggggtcgccgtcgccctacagggtgccgtcgcagatgaccccgcctcatcaggccgccacgttgttctacaacccccagttcggccgctggtacccacctgattatccataccaacaggcattgtacaattctcaagtgctacaacattactaccctcagatgtatggtccagcctctccttcaggaccagcctaccaatacatgggctatatgcctggtggcccaagtccaaggactggattctcgccgatgcagcaaccaatgcgacaacccttctttcagcagccaacgacacagatggatggttctttcccatcagtcccttcgcttccacctaatttcagactccagctgccccctcgtgcagtctcaagggaatctgatgatgcatctggctcccagtcagcccagccaatttcttcaactcctgctacagccacaaacaacgaggaagattcgaggcctgtagtgtctgattcagatccaaacacaccaaattgacttagtgagaatcctggcaacacgatgtgacttcaatctggtgcaggctattggtagtctgtaacagagtcttcatgatactctcacatcttgactgaaa

SEQ ID NO: 269550 - DNA, 323 bp, Zea mays
cggttgccgtcgcagatgaccccgcctcaggccgccgcggtgttctacagtccccagtacggcgggtactgcgtacccacctgattattcataccaacaggtgctacaacattactaccctcagatgtatggtccagcctctcattcagtaccaccctaccaatacatggggtatatgcctagtggcccaagtccaagtgctggattctcaccgatgcagcaacccatgcgaccagcgttctttcagcagccaacggcacagatggatggttctttcccaccagggcattcgcttccgcctaatttcagactccagctgccct

SEQ ID NO: 269551 - DNA, 507 bp, Zea mays
ttgacgcgtggggtccaaatcatcgtctgtttcccctccccagtctccaccactccccctgccgccccaatcgtaaaccctagccgcgcctgagcgtgagacatccacgtcgcagccatgggcgccagccggaagctgcagggcgagatcgaccgcgtccttaagaaggtccaggagggcgtcgacgtcttcgacagcatctggaacaaggtctccgacacccagaatgccaaccagaaggggaagttcgaggcccaccctcaagaaggggatcaagaagcttccgcgcttccgggaccggatcaagacgtgggtcccgtctagcgagagcaaggacaagaaggctctgatggatgcccgaaagcagattgtacgagagatggaacgatttatagtatgtgagaaggaaacaaatactaaggccttctcaaaagaagggttaggtcagcaaccaaaaacagatcccaaagaaaggccaaagctgaaacaagagactgggctaataat

SEQ ID NO: 269552 - DNA, 713 bp, Zea mays
catcaatgttgacatgaagcacctgagcctgatcgcagactttatgaccttggatggcggataccggcctatgaacaggctggggattggccagttcaacacctcgccatttggcaagatgacgttcgagacagcaacaaagttcattgtggatgcagccacacatggggaggcagattttctggagtgcccctcagcgagtgtctgccttgggaagcccccgaaggttgggactgggatctttgggctactgcagaatcttgaattggagcagcccaagaatatctaaaatctgcatttggtgcacgtctggccaagctgccttctgaaggtttacaagttttggtcctgtcagcctttgcacggcagaatgtgctttagtttgttacggtgtggcacgctgcatctgtggtggcttagtggcagcatgccatttcatacgggcatgctgctggaaaaactagcagaacatgtcaaataccagttagtgttctggaattctggattaatttacagcatgatagctagttgtacacatgctttagaatgccgttgttgtccagtgcttgttaagaaagaactgggtcatctttgttgccagggtctcaaaaaacaaccctgcatgacgccaaggacccaggcaccagtgttcgaattatcgacgggcagacatcatatatggatgcgatattctattgacacaatctcaggtt

SEQ ID NO: 269553 - DNA, 723 bp, Zea mays
aaatccacccacgaagccattccctcttcaagaggggatcatcagattgggcttattattccttattactccaggcaaggatcggagttgctctgaattgactgaaccatggcggcgacaatggcagtgacgacgatggtgacgaggagcaaggagagctggtcgtcattgcaggtcccggcggtggcattcccttggaagccacgaggtggcaagaccggcggcctcgagttccctcgccgggcgatgttcgccagcgtcggcctcaacgtgtgcccgggcgtcccagcggggcgcgacccgcgggagcccgatcccaaggtcgtccgggcggccgacaactgcgacatcgcgcgccagcttggcgccgccgttcccgggcagcaggccgcctgggaggcggaggaagaggcagcgaagaggaggaagcagaagggcggcggcagcaagaagcagcagcagctgggcgatctgagcctgaggaaggtcagggtcaagatcgccaacccgcacctgcggcgcctggttagcggcgccatcgccggcgccgtgtccaggacgtttgtggcgccgctggagacgatccggacgcacttgatggtcggcagcatcggcgtcgactccatggccggggtgttccagtggatcaccacctgccaccgccggtccatgtgccgccgccggttcatctgccgccgccaccatgccactaccctactcaac

SEQ ID NO: 269554 - DNA, 980 bp, Zea mays
cggtcggcttccggctcgcccacgcgtccggcgcgattagttcctaacctttaggttctcgagccgcccaagatcccgatccccactccgctggttgccggagctctagccggattcgcctcaaccttgtgcacctaccccatggagctgatcaagaccagggtcaccatcgagaaggacgtatacgacaacgtcgcgcacgcgttcgtgaagatcctacgcgacgagggcccgtcggagctgtaccgtgggctgacacccagcctgatcggcgtggtgccgtacgcggcctgtaacttctacgcctacgagacgctgaagcggctctaccgtcgcgcgaccgggcggcgtcccggcgcggacgtgggccccgtggcgacgctgctcatcgggtccgcggcgggcgccatcgccagctcggccacgttcccgctagaggtggcccgcaagcagatgcaggtgggcgctgtgggcgggaggcaggtgtaccagaacgtcctccacgctatctactgcatcctcaagaaggagggcgccggcggcctgtaccgaggtctcggccctagctgcatcaagctcatgcccgccgccggcatcgccttcatgtgctacgaggcgtgcaagaagatcctcgtcgacaaggaggatgaggaggaggaggacgaagccggcggcggagaggatgacaagaaaaaggttgaatgatcaaagttcttggccaagaaggtagcaatgtcgtgaagcgtacgtgaactggaaacggatggacaagtatatttggagtttgatgtggtgtttccggatcgtgtgtttgtctcagatgaaaaaaatacaatattttgagtccaagttaatcaatgttccatttgcctatccggagctcaatttgctaggttgcatgttccatgtaattactatatttgcctatttcaattttcaaaaaataaaaaaaaaaaaaaaaaaaaaaaaagggcggccgc

SEQ ID NO: 269555 - DNA, 695 bp, Zea mays
atcgcgcgccagcttggcgccgccgttcccgggcagcaggccgcctgggaggcggaggaagaggcagcgaagaggaggaagcagaagggcggcggcagcaagaagcagcagcagctgggcgatctgagcctgaggaaggtcagggtcaagatcgccaacccgcacctgcggctgcctggttagcggcgccatcgccggcgccgtggccaggacgtgtgtggcgccgctggagacgatccggacgcacttgatggtcggcagcatcggcgtcgactccatggccggggtgttccagtggatcatgcagaacgaagggtggaccggcctgttccgcggcaacgccgtcaacgtcctgcgcgtcgctccgagcaaggctatcgagcatttcacctatgacacggccaagaagttcctaacccccaagggcgacgagccgcccaagatcccgatccccactccgctggttgccggagctctagccggattcgcctcaaccttgtgcacctaccccatggagctgatcaagaccagggtcaccatcgagaaggacgtatacgacaacgtcgcgcacgcgttcgtgaagatcctacgcgacgagggcccgtcggagctgtaccgtgggctgacacccagcctgatcggcgtggtgccgtacgcggcctggaacttctacgcctacgagacgctgaagcggc

SEQ ID NO: 269556 - DNA, 313 bp, Zea mays
cggacgcgtgggcgaagtcattccctcttcaagagggcatcatcagattgggcttattgattccggattactccaggcaaggatcggagttgctctgaattgactggaccatggccgccaccatggccgtgaccaccatggtgaccaagaaccagggagagctggccgtcattgcaggccccgcccgtggctttcccttggaagccaccaagccgtggcaagaaccgcgggcttgaatttccttggcgggccaaggtcggcaacgttcggcttaaccgggggcccggcgttcccggcgggccccaacccgcgg

SEQ ID NO: 269557 - DNA, 531 bp, Zea mays
gaaacggatggacaagtatatttggagtttgatgtggtgtttccggatcgtgtgtgggtctcagatgcaggtgggcgctgtgggcgggaggcaggtgtaccagaacgtcctccacgctatctactgcatcctcaagaaggagggcgccggcggcctgtaccgaggtctcggccctagctgcatcaagctcatgcccgccgccggcatcgccttcatgtgctacgaggcgtgcaagaagatcctcgtcgacaaggaggatgaggaggaggaggacgaagccggcggcggagaggatgacaagaaaaaggttgaatgatcaaagttcttggccaagaaggtagcaatgtcgtgaagcgtacgtgaactggaaacggatggacaagtatatttggagtttgatgtggtgtttccggatcgtgtgtttgtctcagatgaaaaaaatacaatattttgagtccaaaaaaaaaaaataattataatattaaattaataataaaaaataaataaataaataaaaaatttatttttttt

SEQ ID NO: 269558 - DNA, 1554 bp, Zea mays
ttcactacaaccataccttaatattcaggttgacagtaaatcagctgcccagttgcttgaaagtattatttttgtgattgatgctgttcttccactcataaggaagccaacacaaaatgttgttgaagaacttgggaaagatctgaatcatatgatagttcgccattcgtatctgacagttgtacatgcctgtatcaagtgcctttgtgctctgagcgagtcagcaggtagaggtccaggattagtggaaaaccttgtcaatattttctacaagcatctgtctggagctaattcagatagtcagttattgggtcgatcactgttttgtcttggactcctccttcggtatggttatcaattgatgctaacatctgaaaatcagcttgattttcccaagatcatcaacttgctccagagaaaatatcttctcaaggatgatttcagcttgaaggttcgagctttgcagactttgggatacatacttattgcgaagcctgaatttatgctacaaaaggatatgttgaatctcatagagacagcactctcttctgaggttgattatagattcaagattcaaggacttcaaaacctctacgagtatcttagagatgctgaaagccaacttactgctgagagcactgtgaaacctcctgtccggtgtgaaataaatggcagaagtaaagtgcctgttgctgctggtgctggagacaccaacatatgtggtggtattatccaattgtattggagttctattcttgaaaggtgcttggatacaaatgatcaagttcgccagagtgcacttaagattgttgaagttgtactccgccagggtttagttcaccctattacctgtgttcctcaccttatagcacttgaaatggacccactggaggggaactcaaagttggctcatcatctgctgatgaatatgaatgaaaagtaccctttattttttgaaagccgtttgggtgatggactacaaatgtcatttaaattctttgaatccatagtcaaccataagatggcagcaaacataaaatcaaatccaattgcatttgtcaaacctggcatatctagaatataccgtcttatccgttcaaatcgaaattccagaaacaaatttgtccactcgatagttcggaaattcgagtctgatagccggagtcgcagcacagttagctttcttgtatactgtgccgaagttcttgcctccctgcctttcacatgctccgatgaaccactttacttgatctatgatataaatcgaattattcaccttaaagctggaggagttgagagcaatttgaaaaggtggacttctatgtctcagtctcaagagacggcgggtatgccaaccttgccaggagagagtcatgttgtcatgcaagaagagcctggcggatattatgataacgtgggcgatgcccctgaaagggtgaatgccaatccttgcagtacttcagacgtggacatggccaaagtgcaggttgacgtggagattgccatgatgcaatagccctccagctacttctgacattgaagagacatttgaaa

SEQ ID NO: 269559 - DNA, 1797 bp, Zea mays
ttgatatcttgcatgatgagaaggttatagatctgataattggcacaggaagcaaggtggcttatgcccttgcaaagcaatggtttggaatatacacaagtgcagaggagcccaatgacgaatggctgttggatggtttggctggttttctaaccgatttatttatcaagcgttaccttgggaataatgaggcgcgttataggcgtttcaaggctaactgctcagtatgtgaatctgatgttagtggtgcactgctttgagctctactgctgcttcaagtgatttatatggaactcaagcaatcggttcatatgggaaagttcgatcgttgaaagctgtagctgttttcaaatgttggagaagcagatgggaccagactcatttcggaagattttgcaggtgatagtggctccaagccgtgcataaaatctaggcatgagcttcctaccctctcttctcaagcaaattgatcggttcttgcaatttgacaactttatgcctggttataatggggtcttgactgtcagctgcattcgtacccttgcacgaatagcaaggagggtgccatcttctgtatcccttgatcccattcgtgaattgattgcccctttccgcgacatggacaagccatggaaagttcgaattgaagctagcatggttcttattgatcttgagttacaccataaaggacttgatgctgctcttttgttgttcttgaaatatgtggatgaagaaaagtctttgcgaggagcgacaaagctggctgttcatatcttgcgtatatgtcaagcaaatattgttccttccgccaatgatcaaataaatttgacaactctaattggtcttctccatctgcttgctggcacaaaggcatacaataacgtatttcttcgtcatcatgtgttctgcatattgcaagttgctgctggaaggtccccaacattatttggtgttccaaaggtcgtcacaccccctcttgtggtcaaggacatctgtagtgatcagcacactaaagctgattcctcgattcctcaaccatcaaagcctcaggaaccttccactagcactcctagtgtccgggaggtcttacctacctctggccccactaaagatgctgataatatatctaactgcagcgaacgaaggaatgtggtcaaaattagggtgaagcttactgcgtcttccagtaaagcatctgatgctgaccacagaggccattttcatggtggaagaaatgaaaatgaaccgggtccatgtagctcaatgtcagaggatgcccctatggttgggactgcaaatgaaccatttaatgtaagcaatcataacattgaggaacagaactcatgtcatgaccgcgaatcaaggatgtcggcaagcgttagcactgttaagctattggacaggcatgatatttctagggagctacagtgtactgctgattcaaggttggatgctcttcccaagaaccagttctctcctgccattaatctgccagaagctttagacaagcctggcagtcagcttgaaggtgtctccaccagctatgaaggaaaccaagctccagaatctgtgaacggagtggaaacgaaagagagaaagaaaaaagacaagaaagataaaaagcggaaacgtgatgaaaaacgattaaagaaagatgacccacagtatctagagaaaaagcgacttaagaaggagaagataatggagaaagagttggcaagaaagcagctagaaggtgaaggaagagctacccctgagcagccgataacagtgaaccttcaggttcactggaagttt

SEQ ID NO: 269560 - DNA, 624 bp, Zea mays
cccacgcgtccggtccgccccaatacttcgggggaaaacctccgcgatttcctttcccgcccgccccacccaccgcggcagccgcctcccctcctacaaataacccccgaccctccacgaggacgggagtaccttctgcagcaagtagtgaccaggagcgagcagccaaggaaaggagtcaagcaatggagaaggccgtcgacaggcagcgggtcctgctgcggcacctcaaccccgccgcggcggggagccccgccccgcccgccatctccgcaagcgcgtgcgcggcgggggacagcgcggcgtaccaccggaggccggccttcgccgacgacgtcgtcatcgtcgctgcttacaggacggcaatttgcaaggccaagagagggggtttcaaggatacctttgctgaggacctcttggttcctgtcttcaaggctttggtagacaagacgaagctggacccaagtgaagttggcgacattgttgttggtactgtcttagctcctggttcccagagggcaatcgaatgcagaatggctgcactgtatgctgggttccctgacactgatcctcttaagactgtaaacaggcagtgctcttctggccttcaagaagttgcagatg

SEQ ID NO: 269561 - DNA, 502 bp, Zea mays
gccatcctcgccgccgccgcagcctcctgcgctccgctccactggtggtggtagggagtgcagcggatccatcccgtgtcccgatccgatcccttcgctgctagtatcgagccttgccatcgtgctcaccgaagaggacttcatcagtaaagaattgctttagcaacacttacaatataaggaaagagggttcacgttggatacaatccggtcctcccttgttgctaaatagggtaaagtttgttggcaagaggacatcctgttctgttgcaacagagccgccgcctgctgccactgaagaaccaggcatggatgtgcccaaggagatattcttgaaagattacaaggcacctgattattattttgacacggtggatttacaatttcaacttggtgaagaaaagaccatagttacatctaaaatagttgtatcttctggagttgaaggcatctcagctccactagttcttcatgggcatgacctcaagctcatatcaatcaa

SEQ ID NO: 269562 - DNA, 1026 bp, Zea mays
gaaaaatgttcgggatatttttgagaaggctaggtctgcacgcccatgtgtcattttctttgatgagcttgattccctcgctcctgcacgaggatcctcagcagattctggcggtgtcatggacagggttgtttcccagttacttgtggagatcgatgggttgagtgacaacagccaggaccttttcattattggggctaccaataggcctgaccttcttgattctgcccttcttcgccctgctcggatcgacaagcttctttatgtcggtgtaaatactgatgcatcatacacggaaaggatccttaaagcacagacacgcatgtataagctgcacatgaacgtttctctcttgtcagttgcgcagcgttgtccaccatacttcactggtgctgatatttacgcgctgtgtgcggatgcatggtttcatgcagcaaagcgatcagttgaaacattcgaaatcgatccttcaagaagtaatgaagccagtgccgaagaagtcatcgtcgagatcgacgattttatcacggtgttaggagatatcgcgccgtcgctctctctggacgagctacaaaactacgaacagttgaggcagaagatcgaaggaccttctagatgaaggtgggtttccactccctgctgacattcttaaactgctaacacaccaaaacattccctgtcttacattttcgttcgtacacaagttttcctccctgaaaacttgggcacttctatatccattcctgatttatacaatcacatacttgtagcagcatctgcattgacatcagaatgacattttctctgaagagaaacatcctgtcattctccgttagcagctctgcaactattttgaagccttttttttgcagatgatgcgaatcaactttgtatagttagtttcgttgatgtacgcctgtaccatgttgtagtaaatgataaagagaataggagtcctcggatcatctgctcgtttgaaccattcagtcatcagccatcgaaaaaagctgcctgctatattttttt

SEQ ID NO: 269563 - DNA, 1179 bp, Zea mays
  unsure (1)..(1179): unsure at all n locations
tctccactcgccggaaactgggcactcctatatccatncctgattnatacaatcacatccttgtagcagcatctgtattgacatcagaatgacattttctctgaagagaaacatcctgtcattctttgttagcagctccgcaactattctgaatgagcccgtgaagtcaagcactcaaagccttacctgggaaacaaaatgctattcctgacctgaaggaagcatccaccaatacagctagtttgggtacacacgctgaaccagctagttcgcctgggagaggcctctgtctcgtttagatgccatcgtctagaagttgtatcggaaaaattataagcgaatgttgcaatgaacagagttccttgtactgctgtgatttgtcattggtcaaagagaactaactgcagcgtttgtctacctacaatacttgtttttttgttgttgctatcttgtagtgccagcagcgatgcctccttgttggtgctcggcaagtcggctggtgtgagcaaaatccgtacgtcgtcgtctccagtggtgtcattctaaactggatctgctgctctcgagaccgaacaactgcaacaaactcaggcagggactcagcatctacacatcctggtccaacggtacgaggtccatttttattaaaccggcaggtgattgtgacacaaatcggctgcatgggaaccatactagctgccaagaaagatgaaagtgttttctccgacccaacctacaatgtgtctgttctttttgggaagagagatgagccactcctactagcttgcgcacgtcaacttattgagcacataagtggctcagcccggtcattggtgatttctctgggtctgaaagatcattctcagggaacgctgaaggatattactgtagctgtgatgattgaatagctgatgagctgggcatggggttggctcgatggttggcatattcagccccatcgataaagatactgtttagcattgcgcaagaggagccatcgtttataccatgcactaaattctggtagttttgtagttggaccttctatctacttggattaacaaaaggtggctttaagctggtgtcaaaatttgagtgtcctctttcacgctaaacaaaaggcactgtatgctggtaaaacacttctgaggtgaattatgcttttcgaggctatttgac

SEQ ID NO: 269564 - DNA, 501 bp, Zea mays
ggcttcccctcccgcatctcgccagtcgcctcgctccctcgcctccggtcctccgcacaccgtccgttgatcctgcgtgcgtgcctctctctctcctcccgcctccggtggatcgtcaatggcgctcggacggcaatgggagccagcagctggctgctccaccaaggcggtcggctgctttgggagcgcttatgcccgatatcgaagcgttacccggcctcttagcgcttcagcgcgctgaagcgtgcgcttagtgccgccatttggaaccctggttacaaccatgctcttctggttagatagatggaggtgccaatgaactccacgcaatctggtcctcacttccctgtgcagcatcggtccctctcgttagacatcaagggaaataaaacagatattgttatcagtaaatacgaagatacctttctggtgattgtggcccaaatcggctgcatgggaaccatactagctgccaagaaagacgaaagtgttttctcggac

SEQ ID NO: 269565 - DNA, 1209 bp, Zea mays
  unsure (1)..(1209): unsure at all n locations
ttgnctgtccacgcgtccgcccacgcgtccgcgccccgtctgccgctgtgccgcaccccgcacgagacccgtccttgaggggcacgtcctagatcggtggcgcctgcctctcgccgccgatacggtgcctctcgcggtctcgctccccctcgcaggtcttttggtttttttagttcctccctttgcttcttggaggtgtttgttgccgtctcacccgcagttcttgagacatgcagagccagatagtgtgccacgggtgcaggacccttctgttctacccaagaggtgctccgagcgtgtgttgtgcggtatgccatgtggtcaccaatgtgccgcctccagcaatggagatggctcgacttatatgtggtggctgccagacattattgatgtatgctcgcagtgcaacaactgtaagatgctcatgttgtgacacagtcaatcttgtcagaccagtgagtagcatagctcatgtgaactgtggccagtgccaaacagtgttgatgtatccatacggagcaccgtctgtcaaatgtgctgtttgcaacttcattacaaatgttggcggggtgactcccatgatacctttgccaccaccagcactaactgcatcaagtggaacttcatatatcatcccgtcaatttccgtgccgacgaatcaaccgcggaatgtaactgttgtcgttgaaaacccaatgacagtagatgacaagggaaaattggtgagcaatgttgtagtaggggttacgagcggcgggaaaaagtgacggcatatcacaacccgtatagctttgtccaaactatctaaaaagggtttaagaatacataccttgtatcatactgctgtttggcgatcggctgctcgacggaggaatccccctccctggagagcgtagtggcaaggcagcgctgctttcgccactgcgatcgtgctagaacgagccaaaaaaaaaaacgaagtgcgggtgtgcatactcagagtatatctgtagcttgttaccccttgattcttttgtatgtaatatgggctctgcctgactttcactgtgtgatcaaatttccaagcccgtgggcgctgttgctgcgtgccttgttattagtgaataacaaacattgcaaatggctcttgaaatgcagtgggtgtgtgtttttatcccccggcatgtatgttaatcagcaggtgccagtgtgcccccatttgctgttaac

SEQ ID NO: 269566 - DNA, 578 bp, Zea mays
aacgacccacacgcacgcacatccactatccccggaccccgggccagtctcacctccttccctcgatcgcacgccactcccgtaggaatcccgaatccccccacccaaattcccgtctagccgtctacccgatcgccgtccttctcgctgcccgtaaaccctagcccagccctctacccccgccgtcgttgcccgtgcgctgtcgtgctcgggctgcccccgcggcgccgcgagccaaaccctagccgcctcctccagatcccgattccgcagggaagccggagaggtgagggccgccccgccgcagatggagcccgcgggggcgcgcaaggagtggcgcgccgtccccgactcctcgctccgctccaatggcgccgaggatgccgcggagcatgggaagctggggcagtcggaggaacgagctatctacgaggaaggggcgggtggactgggcgacttctgtaccatcactattgatgggagcggagggctcagcgaggacatcctgcagcagcgcctgcaaagtgtcgcacggcagcgggaggagctgcagcatgtcgagatcgagttgcgtgcgc

SEQ ID NO: 269567 - DNA, 578 bp, Zea mays
aataaattggacaccaatcatcactggtgtgagcgccatcccttagtgatctgagccagggggctggctttcctggtttgacaagagcagcacttgatgggcactgagatactgggattgtgtggatttcgagcctggactattgaaatgaacagaaaaccaaacagtcctaaccaaatccagcgtctatgtgacgaggactgattaaggcaccagtgcagggcttcagcgacaatgttcagccaagacattgcaaaccaatataaagatattttccttgatgcctcctatcccccaaaatgattgctcctccttcattgacattggagaaacacataactctgttttttcctgaacgggggatttagaagcatcatgaagggtgtatgtgtagtgagaagctatagatggtgaaggagatagatataggtaatagcagtatggtgtgacaatatgggcggaacaaatgtacaatgtagctatagatatatgtggaatgaacttccgatccttttttttcagttcagctactgttaacaagtactaccaataaattataccgcaatgcatatatatgt

SEQ ID NO: 269568 - DNA, 683 bp, Zea mays
tcccgggccgacgtccgaccgaaaaaacccaaagtcacgtttcctcctcaacaaaaaccctcgcaaaaatctgggatctatctagaagcaccactcaacaaaccctaggttgcctgatcggttgatcgctccatggcgatcatctccgacttcaaggacgacgaggcaccggagcagcagctggcggccggccacggcgtcgaggtggccctcgtggcggcgttggagaggagcggcggcgcgctccccttcctacaggcggctatggatgtcgcccaccgcaggtccggcctgttccgcgacccttcggcggtgagcaaggtcaccgcgatggcggcggccgtcagggcgcagatcgaagccgaggagagggtgaccagggaggcggaggccaagaggaaggcggaggaggacgagaggaaggcggaggccgaggcgcagagggctgccaaggaggcggtaatggcgacggcagaggagaagccagagagcacggtggagaaggacagcatggaggtggataagaaggaggaagccaacgtgagacaaccaaatgctggcaatggtcttgacttggagaagtactcgtggactcaacagttgccagaggttaacatcaccattcctgttcctcaaggtacaatatcaagatttgttgtattttatttatagatgatccatct

SEQ ID NO: 269569 - DNA, 591 bp, Zea mays
cccacgcgtccgctttgtcatcacaagattggctgaagttttcatcatacaaggagcgcctacttggcctttcatttggtttgctggcaacaaggaaccatgacttgtcatacaaccttgcgtggcgtaccttaactgatccatcacgtgtctcatcaaaggccataaggaggcagttagggcataaccttctttctgcattgaagtacacatacaagattgataagagggattcacatcttaggccaacgaaaggatatgcgtttcagtcaacttctcaagttggtggtctatggaatagcaaaggattgagatatttccggcaggagttcgatgtacgtggtgctgtgcctttgggattttatagtgctgctctcaacgttggtgtaggagcgggtgtcattttaccgcttgcagggggattcatgaattcgacttcatcagtgccagagaggttttatcttggaggtaattcttctccagtgtgcagcttgggcggaccgtcatctctgctgggtttcagattaaggggagttggcccaacagaggcgcggaggcatgtccttaataactcggagagtggttcggctg

SEQ ID NO: 269570 - DNA, 419 bp, Zea mays
cggacgcgtggggtgattccaccggtcatggcggctccgatccgagcacctccggcatgggcgggcgcgggttcctccccggcggcgaggccctagcagcggcctctcctggtgggcacggcctgccccggcgacgcggtagcagccgtcccggcccgtgcgcgggtgcggcggtcaaagggcgagcaggaccgacctggctcgggcggcaccagccactgccggcgcggggcacggccttccgcttaggcccctggaggctcggcctccagcgtgggcacgaccttggcgattggagcagccctcggtgcgagtgcgcaaccccggcgcgtgctccagcgggtgcgggcagcatccggcggcgcacacggcgcggtgggcgtggcccctgcctggctccccggtgacccacggcgtgc

SEQ ID NO: 269571 - DNA, 300 bp, Zea mays
agccgctgccgcacacggcgagaggaatagggttgctccccccgttgccgactcgccgccgcatcgccgcgagcgtcatgaagaccttcccgctgtccaggggaagcaccatctccctagccctcttctccgacgtctccaacagccgggagctcctggacttgatgcagtcagggaagctggagccggcggtcgctctcctcaacgcgtcactggtgccggatgtgttccctgtcctcgcggcagcgcttaaggcgctgttgtccaagacaagggagtcactgaccacaaggactctgc

SEQ ID NO: 269572 - DNA, 710 bp, Zea mays
ccgtgtatagggtttttagcgccgtctgccacctccaggtcccgctgtcttccgcggttccgacatcgcgtcgcgaacggcggccagaaaaaagaaaaagaaaaaaaaaaacagctcgccgcaccaatctcccctaccatatcgatcgaccctgcaaggtttaatccaacagaattccaccggaaatttggtgaagtgctaatcgcttgcggcttgcctgcccggtctcgtggctttgtgctgctcccgctgtggtgaggaaccctaggatggcgggggtttcgatggcggcggcgcctgagggggtgctgcaccgccggattgagtttcatcttgcacggagaccgcatggctctgtggcggtgggcggcggcgggttccggatggagacgctgaacccggacgccgctggtaaggtggggcccggggaggcggtcgggagcagcgagggggatgcgaggaggccggagaagggagacagtggcgggatcgatccggagctcagcgtcgcaaggatctacctcgggagaattggtgctggattggaaaatcttgggaatacctgctatctcaactcagttctgcaatgcttgacgtacacggagccgttcgctgcctatttgcagagcgggaagcacacgtcctcatgtcgcacatccggattttgtgcattatgtgctcttcagatacatgtcaagactgctctagaa

SEQ ID NO: 269573 - DNA, 671 bp, Zea mays
gctgtttgctgtttttcgtttctcccgttcacctggcatccacgctcgattccgccgttttccgcatccacggtgccaggcgaccgccgccgcttccctactcacccttggccggcgacgacgagcgcccaccacggcaggatgacgacgctcaggaacctcaagatcaagacgtcgacgtgcaagaggatcgtgaaggagctgcgctcgtacgagaaggaggtggagaaggaggcggccaagaccgccgacatgaaggagaagggcgctgatccctacgacctcaaacagcaggagaatgttttggctgagtcaaggatgatggtcccagactgccacaaacgacttgaaactgcactggctgacttgaaagcaacactggctgaactgaaggagtcaaatgagcaaggtgccgagattggagaagctgagagtacaatcgcagaagttgaagcagttgtcaagccagcagaagattaaactaaaaaaactcttggtttgctgaactgttagcgcacatcctattttcgcatattgagcccttgtgagcctattacgagatgtttgaggcgtgaaatcctgtaccattatcatcacttctatcttgaaatttgagtttctgttcccaagttctaagcgttactgtttgttgtctgggagagcgcacattc

SEQ ID NO: 269574 - DNA, 440 bp, Zea mays
  unsure (1)..(440): unsure at all n locations
tcgactccacgcgtcctctcctgtacaaaaacaaaggaaggaacagaagccatgactagcaacaagaacactgccggggcgacggcgacggtggcggtgttggtactagtagcggcgacgctcctggcaacggtggtgaatgcacggccttgcttggacggcgtgctgcctccgtcgacgacgtcacatggcgtggttggggatctgctgccgcgcaagatcatcccgccctctgggcccagcgacttctggagccccgacgacgagccgtcgccgccaccgcctgcggaggcgacagtcgaccgcggtaattgagcgtgaggaggagtggtgatgaatgagaaatgctgatgtataatgccatgtgcaagaacgagcttgaataatcaacaagagggcagggtcttcttgatcaaaaataaaaaaaaagggcggccgcn

SEQ ID NO: 269575 - DNA, 560 bp, Zea mays
attgaggagagcccaggatgtgaggaaacaacttctcactatcatggacagatacaaacttgatgttgtctccgctgggaaaaacttcacaaagataaggaaagctatcactgcaggcttctttttccacgccgccaggaaggatccccaggaaggatacaggaccttggtcgaaaaccagccagtgtacatccaccctagcagcgcattgttccagcgccagccagactgggtcatctatcacgagctggtgatgacgacaaaggagtacatgagggaggtgactgtgatcgatccaaaatggcttgttgagctggcgccaaggttttactagggtgctgaccccaccaagatgagcaaaaggaaaaggcaggagaggatcgagcctctatatgatagataccacgagcccaactcttggcgtcttagcaagcgccgagcttgattgtaactcactgtaactgtgcactgcatgctcttcatggccagttgatactccataatgtaaatgtttgtgagttgtcacatgtagatgtagctgcagatagttttcccgtttc

SEQ ID NO: 269576 - DNA, 393 bp, Zea mays
  unsure (1)..(393): unsure at all n locations
cgcacgcgtccgcccgaataaatttgaagcgcggaccaagccctagatccgacacgagcgccaccctcagccatggcgccagcggcggcggaggctggtcccggcgatgacgggcttaggaagctcgaatacctttccctggtctccaaagtttgctccgagctcgagacccacatcggcgtcggcgacaaggtgctggccgagttcatcaccgagctcggccgcgactccacaaccgtccccgagttcgacgccaagctcaaggagaagggcgccgacttccccgactacttcgtccatacaaacttgatgttgtctccgctggggaaaaacttcacaaagataaggaaagctatcactgcaggcttctttttccacgccgncaggaaggat

SEQ ID NO: 269577 - DNA, 731 bp, Zea mays
cccacgcgtccgcccgaaccccaaaccctagcttcgctcgttgcggcggcgagccggcgatggcgaagtctctgcgatccaaacgcgagaagcggcttcggacgttgcgccgggagatagcggagccgttctacgacaagaaggaggccgccaagctcgccgcgcaggccgccgccctagctgctgccccgctcccggtccgcgggcccccgccgtcccaggatgccggcacctcccgcgcagctagctcggcctcggctatggatgtggagatgtctgatgcagggaacagcaggtctaagaccttcttgaggccacttggcagcattagcaagaagaaggtgcagcttcatttgaagatcaagaaagacaagagaaaagctaggaagaagggaaagttttcttttaagaagtagaggagtgtatgataaatcatgcagttttgttcccagtttgtaaaacaaacgcactgcagtcatgtcatgtggtgcacctacctaagtccattcgtgggtgacctactattaaatatgttgaaatgggtacgaaaaaaggatagtgctgacctatcagctgtttctgttctgcgggtataaatgtcaagtactcaaattgctgagatttggtttcattttcacattgtatcgtggtgaaccatgtttggacacgatggccttgtgtggctacagctgctgcttgttgaaaaactggtaataagcagcttctgtttt

SEQ ID NO: 269578 - DNA, 672 bp, Zea mays
  unsure (1)..(672): unsure at all n locations
gcgatttcccaaaccctagtcgacgctcgtagcggccacggcaggctgccagcaagggcgaagctgtctgagctgcatacgcgacgaggcgaatggagacggcgcccgtcaagatagcgcactctctctacaactagacggaggccggcaagctcgccgcgcaggccggtgccctagctgctgccccgctcccggtccgcgggcccccgacgacccaggatgccggcacctcccgcgcagctagctcggcctcggctatggatgcggagatgtctggtgcaaggaacagcaggtctaagaccttcttgaggccacttggcagcattagcaagaagaaggtgcagcttcatttgaagatcatgaaaggacagggaaaagcttggaagaagggaaagttttcttttaaaaagtaaaggagtgtatgataaatcacccagttttgttcccagtttgtaaaacaaacgccctgcagtcatgtcatgtggggcccctacctaagtccattcgtgggtgccccactattaaatatgttgaaatgggtacgaaaaaaggatagtgctgacctatcagctgtttctgttctgcgggtataaatgtcaagggctcaaattgctgagatttggtttccaaacacaaaaaaaaaaaaaaaaaaaaaaaaaaaaaaaaaanaaa

SEQ ID NO: 269579 - DNA, 1254 bp, Zea mays
gggtcactcgctcgtcgctcccaagtcccaccaagctgtcccccgaccactccgccgcccgctccaatggcggcgccggccagctcctcatgcttccacccacgcgcgaccgccagcccgccgtcttctctcagcgtcggcaccaaggtcttcgtcgggctcagggcgcagaccaagctcggttcgtcggagtcgtcatgcccgaatgtcagcgctgggttccacactgcggtcaaccggagaatctctctcaggttgtccaaaaagaaggcgaccagagcccgcatctcgatgatgcctattggtactccacgtgtgccttaccgaacacctggtgaaggaacctggcaatggcttgacatatggaacgctctgtaccgtgagcggattatcttcattggggacaatatagatgaagaattcagcaaccaagtgttggcaagcatgctctatcttgacagcattgataattccaaaaagataatgctatacattaatggaccaggaggagatcttactccgtgtatggcactatatgataccatgctaagtctaaaaagtcctattggcactcactgcttgggctttgcattcaacctggcaggattcatccttgcagccggtgaaaagggttcacgcactggtatgcctctatgccggatttcactccaatcacctgccggagcagctcgaggacaggctgacgatatagaaaacgaagcaaacgagcttatccgcatcaagaactatctctatggcaagctcgcggggcacacaggccattctgtcgagaagatccatgaggacctgtctagggtgaagcgcttcgacgccgaaggggctctcgagtacgggatcatcgaccgtattgtcaggccgtctaggatcaagaaagagggctccactgctcaaaggagggacatgcggaatctgggacttggctaataatagacgatcgaaatcctgttgtatcagaattttttgtgcaagggatgcgcttattatgggagagcgagcgatgcactgttccaagctctacgccggcgtaggtgttttgttgtgtcagctgtgcttttgctaactgtgtcagcactactattataatatatttgctgggattgttgatgagcacggcaaagaaaaagaccagagatgcgagggcactggcctctaggcctctcgtctcttggacaactcttgtaccaatcaatcaaccaggtgcccatgctctggatggggactacagttatatgc

SEQ ID NO: 269580 - DNA, 441 bp, Zea mays
caggactgtcatctctcagttgcaattgcaaaaaaaatacagagagagagagagagagagatccctaccctgcaaagagagactgacaatggacgcaaaaccggcgagtgtctgcatcttcctgctgcttcttctggcgcagaatccttcttcctcctctgcagacgaccagaagtgcttttacaccactgaccgggtggcgacctggtgcgtggactgggcgtgcaagttcggctgcctgatcgacgccaagcagtaccataccaagtacaagaacagctggtgcgaaggctccaggagaggcatctgtcactgccacttctgcgactgattctcacgaacagtcatctcgaaataaacaaatcatgtaataaaagccccgtggtcgtacgatataattttaaaaaacaccgattatagggatggagtccgatggaaaat

SEQ ID NO: 269581 - DNA, 545 bp, Zea mays
gcacctcggcccttctcatggcgacgcccgcctccgcgccggccacaccaaaccctaaccccgtctccggcgacccgccgtcgctgctgctacagcagcagcagcgaggaagaggtgccagcgccggtcccggagacggcgccgacgcccctcaccacctcgatccacccccccccctccggcggcgaggagggcgcaagcgatgactcctcgtccgtctggtcggcgccctcctccgcgcccgtccccgcccccgcccccgcccccgcggcgccctcccccgcggccaaggacatcctccacatctccttcaaccaggactacggctgcttcgcagcgggcaccaagtcgggcttccgcatctacaactgcgaccccttccgagagatcttccgccgggacctcgccgccgagggcggagtcggcgccgggggagggggtatcggcgtcgtcgagatgctgttccgctgcaacatactcgcgctcgtcggcggcggagataacccccactactcgcccaacaaggtcatgatctgggacgatca

SEQ ID NO: 269582 - DNA, 583 bp, Zea mays
tctaacattggtctgctctgctttggtctgtgctttaggattctgtttcattgggagaaacaaatgcccttgcttactttcattataactgtgctatttttttgatccaatgttgttctaagatcaagaagtggaatacttgttctaagggtcccaagttgggtggtggtggtgggacagcgttttcaggttcggtcgtgactgtggctatccactgaaaagatatgctcggtggtgctttcttgtgttgaagaacaagtatcccacggaaccacaaccgtttgtattatctggtgatttcctacattattagctggcctaacttaaccatgcgctcagaccctaaaccagctgtaagtctgtaacttaaaagcacagtgccctagcggaatggggttccttgctttttggagcgtttccccagtcagatcggcggcagggcaggtcacgtggacggggctccttgttgctggaactaaataccgtggagagtttgaagtgagactaaagaaacttatggaggaaattaagcaaaatgaagacattattctctttattgattaagtgcacacactgattggag

SEQ ID NO: 269583 - DNA, 775 bp, Zea mays
gtgcatttgtgtttttgcgtctactgtgcggctacaggcaaggaaacaggatctgtcacggaaggcgattcccatttctcagtgatgtcgatgtcctgtactcctgtatatttggattcaacaatatgccattagtgcattggtgccacaacactggatgagtataggaagcatatagagaaagatcctgccttggaaagaaggtttcaaccagttaaggttccagagcctactgtggatgaaacaatacagatcttaagaggacttcgtgagagatatgaacttcatcacaaactgcgatacacagatgatgctttaattgctgctgcacagctgtcttatcagtatatcagcgatcgttttctgcctgacaaagccattgacttgattgatgaagctggatctcgtgttaggctgaggcatgcgcagctccctgatgaagccaaagagctggacaaagagctgcggcagataagcaagcagaaaaatgaggctgtacgtggccaagattttgagaaggtatactgttgtttggcacagcggtgacaaagccgatccgctcccacctctctagcaacgtcgatctggttaataccaagcattatgttgtttccttttgagataaatattttgttactgattttaccttttgtctcctcttcttgttttttgttctagaatctgtagcaaatggctaacgatgaggatatccattactttgtttatgccaataaaactgatatgttcaagattccgtagcaacgcacgggcatct

SEQ ID NO: 269584 - DNA, 688 bp, Zea mays
cgattttaggcaggaggacaaagaacaacccctgcttaattggagagcctggtgttggaaagactgctattagtgagggagctgctcaacgtatttccaatggtgatgttcccgaaacaattgaaggaaagaaggttattactcttgtcttgggcctccttgttgctggaaccaaataccgtggagagtttgaagagagactaaagaaacttatggaggaaattaagcaaaatgaagacattattctctttattgatgaagtgcacacactgattggagcaggtgcagcagaaggtgcgattgatgctgctaatattttgaagccagctcttgcaagaggtgaactgcagtgcattggtgccacaacactggatgagtataggaagcatatagagaaagatcctgccttggaaagaaggtttcaaccagttaaggttcctgagcctactgtggatgaaacaatacagatcttaagagggctccgtgagagatatgaactccatcacaaactgcgatacacagatgatgctttaattgctgctgcacagctgtcttatcagtatatcagtgatcgtttcctgcctgacaaggccattgacttgattgatgaagctggatcccgtgttaggctgaggcatgcccagctccctgatgaagccaaagagctggacaaagagctgcgacagat

SEQ ID NO: 269585 - DNA, 434 bp, Zea mays
cgaagactgggatcacggcaacaaacagaaagtgtcagaggaggaagagctctccatcggggaagatgtgatgtttccagaggatcttgcgggaacagatggcgcaaacgcaatgccggcagataatcccgagaagcatcagaatgtggagactgacagtgacaggtcggctgcggtggttgcagatgctcctccgcagcaggaaatggtagcagcaaacggaacgggcccaccgcagctggtggtggacgggcacaagacgattcttgaagaggtccccggagaagaaaacggcaccctttctgccgccgattatgctggtaatggcagcatcgacgacgatgacgacgacgacactcccttgtatcagggaggtgatgtgctaccgaacaggccgacaagtatatttgagaacgattggcttgggccgggaa

SEQ ID NO: 269586 - DNA, 1942 bp, Zea mays
tgctcctttccctcccctcgcgtggcgtctgtggcggctatcctcgcctcgtctcccctcccccctccctagggtttatcctccaccaccacctacccaccgcctctccccaccacagataagaattatcttatcgattttttacaccggccttgaatccgatccaggagcagccgtgtggtgttggtagctgcggcagacgtctgtcctagatcgaattgactcgcgagaagaagccatgtcgacagttgctcctgcccctagcgctgctgaccagaccaccaatcttctgcagaagctgtctctggagggcaaggatggctccgacactgccaagaagccttctgggatgccatatggaggatctacccacgctggagatgcacagagcgctgcttcacaggtggacaggtcgataacacctctactacaggaggccatggatcctaatttcttctaccagcccagtgcatatgcctctccagcctattacttccctagtggttatgatggctcagccaatgaatgggactcaaggtatgctggtcatgaaggaatggagatgccccctcagaccgtgtatggagacatgtaccttggatatggctatgctccatacggcccatatccttcgggttctccagtaccaactgttgggcatgatggccagtcatatggttctcagcaatatcaatacccgtctcaatattatcagcaaccaacaccaacaaacgcaaaacatggtctaaatggtgccagttctcaacctgaaccgccctctgttgccagtcagcaggcacgagttttggtagatgcaacaaaagcaactccaaacgtgagggctaatggtatgacaattgctcacaacagttcgctgccacgtaagcaaacccacctgaatgtatcggtagcaaacagtggtttatatggaagaggacctatgcaaggcagtggaccttctgcaagcaattatggtcacaatggtgttcgttctccagctcaatggtacgatggtccagtttactcgaatgggcatcagataccaactgctagttccacatcttaccgttccaattcgtcttctatgagaagtcagagccagcatccaacaacaaacctcatgggtatacatgcacagatgccttcgtctggaatgggtctgacctcacctagatatccttctaggatgtacccagacaacagattatatgggcagtatggtcagtatgggaacacactgaagggtggccttggttttggatcaaacatgtatagctcgagaaacaatgggaggtggggagttgtggataccaaatacaagcccagagggcgtgcaccttttggttttagtggtgagaaccaagatggctttaccgagctgaacagaggaccaaggtctggtggtttcaagcaccaaaaacaattcggtcctactgtaactattgctgtgaagggccaagccctcccttcagtggggaaacagaacagtgctcttccagacaaaggccaatttaaccaggaagggtttcctttaacctacaaggatgcatagttctttgttatcaaatcatatagtgaggatgatgtgcacaagagtataaaatacaatgtgtgggctagcactcctaatggaaataagaagctggatgctgggtaccgagaggctcaggagaaatccaatgactgcccggtgttcttgtttttctctgtgaacacaagtggtcagtttgttggtgttgctgaaatggttggtcctgttgactttgataagactgtggagtattggcaacaagacaagtggaatggttgttttccactcaagtggcacatagtcaaggatgtgcccaacaacactttgaagcatattacactggataacaatgataataagcctgtgacaaacagccgtgacacacaagaggttaagctggaacaaggtctt

SEQ ID NO: 269587 - DNA, 413 bp, Zea mays
  unsure (1)..(413): unsure at all n locations
cccacgcgtncgcaacgtttgtcatgcatacctactatctctttctcacacaagtctcttctccgttttcactctcttgctagctcctctttgtccttcagttcagatctctcagaagagtagagtgcctgccagtgccatgtcgctgccagtcacacagcccattgcatgagcagaagggcaaggaagcttgggagggtgtaagctgaggatcggtgacgtgcaaatgcggccacggggaacctctctgcaacaaagctccgcatctgctctcggcgacggcgatgcggcgctaccgaagaagaagaggaaccggccaggcaatccgaaacctgatgcggaggtgatcgcgctgtcgcctcgaacgctgctggcgacgaaccggttcgtgtgcgaggtgtgcagcaagggct

SEQ ID NO: 269588 - DNA, 646 bp, Zea mays
gtctcttctccgttttcactctcttgctagctcctctttgtccttcagatcagatctctgagaagagtagagtgcctgccagtgccatgtcgctgccagtcacacagcccattgcatgagcagaagggcaaggaagcttgggagggtgtaagctgaggatcggtgacgtgcaaatgcggccacggggaacctctctgcaacaaagctccgcatctgctctcggcgacggcgatgcggcgctaccgaagaagaagaggaaccggccaggcaatccgaaggcagccagggccctctgctccatggcaaggcgcccttgcatggcgtgatgacgcatctccccgagcagcagtatcagccaaacagcggcaacgccaacgttaacctcctggacattgggttcttctctggcaacagtggtggcacgtttggcagccagggccctttggttcacggcaaggagccctttcatagccatgacctggcgcaactttccgagcaggagcaccagccaggcagcagcaacccccgcgtgaaccttcctaaccttggggtcttctctggcaacagcggtggatggcccggaagcagccatcaagacccgcgccttgtgattcaagaacaaattaaccgggggaggaggaagaac

SEQ ID NO: 269589 - DNA, 666 bp, Zea mays
tcgcattactaggtgcttaatttaactagtggccctaggcgtgaaacttcaccagctccgccactgcccatggccaacggccttccggaccctcgctgcgtcgtcctcaccgccgacgctgcccgatccctcgtcgattccgtcgacgccttcctcttcgactgcgatggggtcatttggaagggagataagctcattgaaggggtcccagagacgatggagctactgaggaaactgggaaagaaattagtttttgtaacaaataactctagaaagtcaagaaggcaatactcaaagaaattcagatcacttggacttgaagttactgaggaagagatttttacatcatcgtttgcggcagccatgttcttgaagttaaataattttcctccagaaaagaaggtttatgttggtggtgaagatggaatcttggaagagctcaagttagctggttttgaatgttttggtggtccggaggatggcaagaaaaacataaagttggaggcggatttctactttgaacatgacaaaagtgttggagctgtcattgttggacttgatcagtacttcaattattataaaatgcagtatgcaagaacatgtataagtgagaaccctgactgccttttcattgcgaccaaccgtgatccaaccgggcatatgaca

SEQ ID NO: 269590 - DNA, 429 bp, Zea mays
tcaacccacgcgtccttagtcctcggccattgcattgcctgagcggtcagcaatggaattgccaagaccaatgggcgtgcttctgctcgtgttcgtcgtcttgtgccgagtgggggacgcggcgacgttcacgttcgtgaaccggtgcacggacacggtgtggccgggcgtcctgtccaacgccggcagcccaaggctggagcccacggggttcgagctcccgccgggcgcggcgcgcgcggtgccggcgccggcgggctggtcaggccgaatgtgggcgcgcacgggctgctcccaggatggcggcacggggcggctcgtctgtgccacgggcgactgcggctccggctcatccgagtgctcgggcgcgggcgcggcgccgccggccacactggccgagttcacgctcgacggcagtggcgggctgga

SEQ ID NO: 269591 - DNA, 967 bp, Zea mays
cccacgcgtccgctcggcgatggcatcggcggcggccgtggagtgggaggcggcggcgcggaaggtgctggtggcgcgcaaccctgcttcgggctacctacggcctgcccaacctgcctccccgtgctcctctacctccgcatggcgcaggttcccttcgacatccacgtcgacacctccttccccgatgccgatcacataccatatgttgaatttggggattgcgtggctttcaacaacgagaaaggaggcgtaattgagtatctcaaggatgagaaaattgttgacttgaactcaaatcacccgaatatttcatccaccactgtgctagacaccgaaggccatggtttcgtcctggcttgctaatgctttgctgtatgaactctgggtggttagtgatggaagcattgcaaatgatatctacttctctgatctcccttggcccattggaaagatactccattggaataaaactagacatgtgaagcagctacttggtataacaaagctcaatgctgcagaaaaagaagaggagatatacctgaaggcaagtgctgcttatgactcattgtctttcagattaggggatcaagtctttctatttgataatagccctacagatgttgatgctcttttccttggacatgttctttttgttctcagtgcgttgcctgatacatctgtgctgaggggcactttgcagaagcatgacaacttggtgagctttgctgagcatcacaaggtccagttgctggaagcctcatcatcatcatcatcagggttaggatcatcacctagcccatcatcatccacccccaggagaagaccatctgctgaccacagttataagccaaaacccagagccaagaaggaacggacggaggaggaaaagaaattcaggcgaagagcaaagtatttcctggccacacaactcgttgcagttcttgtgttcctttcgctgatgggt

SEQ ID NO: 269592 - DNA, 286 bp, Zea mays
gggttaggatcatcacctagccctgatgatgatgatgctgaggcttccagcaactggaccttgtgatcatcatcatcagggttaggatcatcacctagcccatcatcatccacccccaggagaagaccatctgctgaccacagttataagccataacccagagccaagaaggaacggacggaggaggaaaagatattcaggcgaagagcaaagtatttcctggccacacaactcgttgcagttcttgtgtgcctttcgctgatcggtggggttgatagttccgagc
